United States Patent Application Publication US 2003/0099974 A1 - sequence listing, part 2

SEQ ID NO: 3411 - DNA, 954 bp, Homo sapiens
  misc_feature 1, 3, 14, 168, 257, 389, 390, 420, 436, 438, 447, 451, 462,471, 522, 527, 532, 535, 537, 542, 553, 564, 592, 594, 597,599, 615, 634, 641, 664, 680, 682, 684, 685, 691, 696, 697,700, 708, 710, 734, 736, 738, 743, 745, 752, 764, 766: n = A,T,C or G
  misc_feature 770, 778, 779, 781, 793, 794, 810, 814, 815, 817, 823, 825,832, 833, 838, 840, 841, 844, 855, 856, 858, 862, 863, 866,868, 869, 871, 873, 878, 881, 882, 885, 886, 889, 892, 894,897, 899, 901, 903, 904, 905, 914, 923, 924, 927, 932: n = A,T,C or G
  misc_feature 934, 937, 938, 943, 944, 947, 950: n = A,T,C or G
ngngcgctacttanggcgaattggagctccccgcggtggcggcccgaggtacctttagtctttaaaccctgattcttccttttttggtttagtctaatggatgaaaaactcaaactgactgatgtggctgtaatcttgggcctgtgaggtagaacagcagaaaaaaantaggaatttagaagaagaagacttggtttgaatttatctcctttaataggtgtgtggcggctgggcacggtggctcacgcctgtgatcncagcactttgagaggctgaggcgggcggatcatgaggtcaggagactgagaccatcctggctgacgcggtgaaaccccgtctccactaaaaatacaaaaaattagccaggcatggtggcatgcgcctgtagnnccaagctaatcaggaggctgaggctggganaatcgcttgaacccangnggtggaggnaatnggtgaggcccnagatcgcancactacacttcagcctggggcgacagtagggagacttcctcttcaaaaaanaaaanaaaanagnantgtgncagccaggtgntggtggctaanaccctggtaattcccaccagtttagggntnctnangtggggtggatttgcnttgagcccaattttcaagnaccagcngtggtcaaaaaatgataaaactntggcttttccctagtntntnngaagtnagttnnatntatttatntngttccttggcccgggcggccgccngngnggttntntttttcnaaccttgaagcntnttanctaatttnncnatgttccgctcnnattggttttccttatnaatnntnttttgnantcacagnnccctntnnttntaacggatggnngntagnnatntnngntnacatnggnngtnnaantangntananancnnntaccttttnattttcttnnttntaacnanctnnggtanncgngcntcct

SEQ ID NO: 3412 - DNA, 896 bp, Homo sapiens
  misc_feature 2, 3, 12, 66, 514, 653, 690, 691, 700, 714, 727, 747, 749,750, 754, 761, 762, 764, 769, 775, 779, 784, 786, 787, 794,795, 805, 808, 813, 814, 822, 829, 842, 848, 849, 851, 852,857, 862, 863, 866, 867, 868, 872, 875, 876, 879, 880: n = A,T,C or G
tnntacgcgacncgcgttatacgactcactatagggcgaattgggagctccaccgcggtggcggcncgggggccattgagactgccatggaagacttgaaaggtcacgtagctgagacttctggagagaccattcaaggcttctggctcttgacaaagatagaccactggaacaatgagaaggagagaattctactggtcacagacaagactctcttgatctgcaaatacgacttcatcacgctgagttgtgtgcagctgcagcggattcctctgagcgctgtctatcgcatctgcctgggcaagttcaccttccctgggatgtccctggacaagagacaaggagaaggccttaggatctactgggggagtccggaggagcagtctcttctgtcccgctggaacccatggtccactgaagttccttatgctactttcactgagcatcctatgaaatacaccagtgagaaattccttgaaatttgcaagttgtctgggttcatgtctaagcttgntccagctatccagaatgcccacaagaattcaactggatctggaagaggaaagaaactgatggtggtaactgaacccatttgatttgagacctaccagggctgatgtcattcattggaaaccgcacaaacttggctattncctttcccgtggggaagtattgggttttttgaaaagnnttttttggnacccttgggccggntttaaaaactaantgggattcccccgggcttgnanngaanttttttnntnaagcnttaatnaatncccgncnncctgagnnggggggcccnggnccccnncttttgtncctttantgaggggtttatngccccnngnnttaanatggnntannngttnccnnggnnaaattgttttccctct

SEQ ID NO: 3413 - DNA, 936 bp, Homo sapiens
  misc_feature 3, 391, 432, 443, 483, 584, 589, 602, 608, 635, 639, 641,666, 667, 672, 674, 680, 683, 686, 695, 700, 705, 707, 708,719, 724, 729, 737, 740, 746, 755, 757, 758, 760, 768, 777,784, 792, 799, 805, 808, 810, 815, 816, 835, 836, 837: n = A,T,C or G
  misc_feature 838, 844, 846, 851, 854, 861, 862, 870, 872, 875, 877, 880,884, 888, 891, 894, 895, 899, 902, 904, 907, 918, 922, 925,926, 928, 929, 930, 931, 933, 934, 936: n = A,T,C or G
ggnctacttagggcgaattggagctccccgcggtggcggcccgcccgggcaggtacttattgtatatttctcacattctttcagaaagttattaaaatggctttacagttgcgttgcttttttttaaagagagaagattgaaatttattttgcagctatacacttggttttggattattcatgtgtataagttatttgagctgctaccacttcctctgacctaaggctgtggctaaaatgggtttggagaagaaattcttgcctgtacctcggccgctctagaactagtggatcccccgggctgcaggaattcgatatcaagcttatcgataccgtcgacctcgagggggggcccggtacccagcttttgttccctttagtgagggttaangtgcgcgcttggccgtaatcatggtcatagagtgtttcctnggtgaaattgntatcccgctcacaattcccacagcataccgagccgggagnataaaagtgtaaaagcctgggggtgcctaatgaggtgagctaactcacattaattgcgttgccgctcactgcccgctttccaagtccgggaaacctggcgngcccngcttggattaatnaaatcnggccaacgccccggggagaaggccggntttngnattggggcgctctttccctttcctnngtcantngacttnatntgnctcggtcgnttcgnctggngnnaagcgggtttntagcntaacntaaaagcnggnaatccnggttttccncnnanttaggggnataaccccngaaaaancatgtttnccaaaanggcctncananggccnngaacccatataaggccgcnnnngatggncnttatnaanactccgnncccatgantnctntnaanaaangacnctnagnncaanggncnaanccgtatggcanctanaanncnnnntnncn

SEQ ID NO: 3414 - DNA, 865 bp, Homo sapiens
  misc_feature 257, 345, 379, 381, 389, 399, 404, 421, 429, 434, 440, 445,456, 458, 462, 498, 553, 558, 581, 595, 602, 610, 624, 625,628, 643, 648, 679, 682, 686, 691, 694, 707, 719, 720, 747,750, 755, 763, 765, 769, 771, 772, 785, 787, 794, 804: n = A,T,C or G
  misc_feature 806, 808, 810, 819, 836, 838, 840, 847, 850, 853, 854, 863: n = A,T,C or G
cgaattggagctccccgcggtggcggccgaggtacctttctttccaggcctggcaaaaaaaatccaattatgtccgtcttgagtctgtggtcttgcttcttatgtagtatttcctttgtgagctgaagattaatgcatggattcacctccttcagcacatttcatttcaattgtgaagaaaagattccaggcactgaatgtaaaattgaacatgacattttgacattccttcttctgagagctgggttggtcttaanttgctgtgaggctctagacaccgaccatacagggcgtggggctgctcctggacatgaacatcctccgaagttctccccagtccacttnacccgctctgggctcacctctgaatgtccccgcntncctgcccnggcggccgcntctanaactagtggatcccccnggctgcangaatncgaatntcaangctttatcgantnccgncgacctcgagggggggccccgggcccagcttttgtnccctttagtgagggttaattggcgcgcttggcgtaatcatggtcatagctgtttncctgngtgaaaattgttatccgcttacnaataccacacaaanatccaancccgggangcataaaagtgtannagnctggggtgcctaatnagagngctaactcacattaaattgcgttgcgcttantgncccnttttnaancggggaaaccttntccggccagctnncttaatgaattctgcaacccccggggngangcggnttcctatntnagcncnnttccgtttctggntnaatgacncatactggcntngncntttgacttncggcagcggtatcattncntnaaagggngtntannggtttcccnct

SEQ ID NO: 3415 - DNA, 861 bp, Homo sapiens
  misc_feature 44, 331, 346, 461, 470, 477, 498, 530, 568, 577, 605, 627,647, 666, 674, 694, 697, 707, 718, 749, 753, 754, 756, 758,768, 775, 786, 789, 799, 801, 802, 803, 804, 817, 818, 819,837, 841, 847, 848, 860: n = A,T,C or G
gaattggagctccccgcggtggcggccgaggtacaggtagctgntggctaaaacatattccatttacttgtcaggacttacaatttcatttcacgtgcatataaaattagtcatttttcaaattcactattaaaaatcatatccaaggcagcattttccactcaattaacccatgtattattttaaatctacaaaccaacatttcagctacagattttgaaaagccaattgttactattttgtaaaattcacatttctagccacataaattaacaacattcctgaaaaacataagaatcagatataactctgcagtaggcaatcctgggtnctgacactgactttnctacctgaggacaaccacattcaaactgcaaccatttgacaaatggggagtctcaaaaagtacagaagatagcaatccagatcacggcaaaaaacatggctttttcttgccaatnagaaaaaanaaaaaanttaaaaaaaagtacctgcccngggcggccgctctagaactagtggatcccccnggctgcaggaattcgatatcaagcttatcgataccgtngaccttcgngggggggcccggtacccagcttttgttncctttagtgaggggttaatgcncgcttggcggtaatcatggncatagctggttccctgtgntgaattgntatcccgctcacaatttcanacnaacaatacgnagccgggagcnataaaagggttaaagcctgggggcccttatngagnngncntaactctcantaattgngagtgcgctcnctngacccatttncnnnncgggaaaacctgnnnggccatttgatttaatgnaacnggtcanncgcgggggagang

SEQ ID NO: 3416 - DNA, 864 bp, Homo sapiens
  misc_feature 238, 267, 340, 357, 450, 463, 535, 564, 595, 600, 601, 602,604, 617, 620, 626, 628, 630, 635, 639, 640, 642, 650, 656,662, 665, 678, 681, 689, 690, 693, 694, 698, 702, 705, 723,724, 728, 730, 731, 732, 735, 746, 749, 753, 754, 756: n = A,T,C or G
  misc_feature 762, 763, 768, 769, 772, 774, 775, 779, 781, 782, 792, 793,797, 799, 801, 803, 807, 808, 810, 811, 812, 814, 815, 817,820, 821, 822, 823, 824, 825, 827, 828, 829, 833, 835, 838,840, 842, 843, 844, 846, 848, 853, 855, 859, 860, 861: n = A,T,C or G
  misc_feature 862, 864: n = A,T,C or G
ggggtatcgactactatagggcgaattggagctccccgcggtggcggccgaggtacgcgggggagtttctaagcccccgcctgcggtctgaggcaccggctgaaccatgtcggagatcctgtgccagtgggctcaacaaggagttgaaggtgtcccggaccgtgagtcccaagtcatttgcaaaggcattttccagtgggctatctacttggagaagttctacacaagtttgaacttnaggatgatttttcagaattttttggacancaagggtttcaagtgccaaacttaataatttttctcgcttggagccaacacttaccttctgggtggtgcaagntttgatcaaaatgtggnccatgggcatcatcacagaaaagcctggggtgggcaacaaagctgttatatcaattgtacctgccgggcggccgctcttaaaactagtggatnccccgggctgcangaattcgattcaagcttatcgataccgtcgacctcgagggggggcccggtacccactttttgttccctttantgagggttaattgcgcgcttggcgtaatnatggtcataagctgttactgtgtgaaaattngtatnnncntacaatttcacanaanaatacnancngggancatnnantgtaaaanctgggntgcctnatnagtgagctaactnacnttaatttnnttnnctanttgnccnttttaattgggaaacctnncttncnnnttntttaattaatnggncaanncncggggnnaagcnnttngnntttngnnacctttttcnntttntntntnattnntnnntnnanttnnnnnntnnntttntntancngnnntnanttttntnaaannnnan

SEQ ID NO: 3417 - DNA, 893 bp, Homo sapiens
  misc_feature 4, 5, 13, 65, 78, 172, 360, 466, 564, 595, 632, 647, 648,650, 672, 678, 716, 721, 731, 741, 748, 750, 771, 777, 794,820, 831, 835, 839, 849, 856, 865, 877, 880, 892: n = A,T,C or G
tggnnggacgccntatcgactactatagggcgaattggagctccccgcggtggcggcccgccggncaggtacttttanaagagacagggtttcaccatggtggccaggctggtctcgatgtcttgacctcgtgatctgcctgcctcggcctcccaaagtgctgggattacangtgtgagccaccacacccggcctgaattgcacttttgatggctgagccaaatgctcattctatttaatattgcacagcctggaccaaaacccgtaacattataaaggaagagatgagagccatttcaaactgtgagagaagagaagacatcaagcaaaatctgggggttttaagccaacagacttcantcctggggccttgcagcaaaaaaacaccttcagttgccccagggctttacaaggtgtggctcgcctgttctgttgctacacgctcaaacccctgaggggaggggancatgcagatggacaggtgcaggagcctaagtgggagtgtgttacaatgtgcccttttaaccctgctgtccatggatggcttgaatgttaatcaaactnaatggacactctgcttttaacaagggcaganggcccaatgtgaccactttttgtattcccaagctctntgccagcattcctgnnangaatcaggcccaccatgggccntgaaanggttgaatgcaggttttattgaatgggtggaaggtggntcttnttaaaagganttgaatccanaagcttngnaagcgggggattgcaccgggnaagganaatcttcctggttgggntgggccaaaacctatacgacccaccnttgggttaaancctnttgngggttcaaantgtcccnttttttttntttgtgccgatncgntgaacatttatnt

SEQ ID NO: 3418 - DNA, 856 bp, Homo sapiens
  misc_feature 51, 58, 535, 624, 698, 714, 718, 736, 778, 786, 792, 795,801, 819, 820, 822, 824, 829, 830, 832, 833, 841, 853: n = A,T,C or G
tgcgccctaatacactactatagggcgaattggagctccaccgcggtggcngccgccnggcaggtaccgcgggtcccacagtgccccttgattgagaaccctcttcccagccagaggcaggaagaggacgaggcacatgagcctggttggcatcatgccctaatcatgccctttgcagccttttactccttcacagcccacatgctcaaggtcgtctgtcttttctgtccctccccacctgttccagttagatttctactaaagtaatagttagcatttttgaaacagtgttggcttgtttaatcctcaccacaaacccatgaggtgggttaagagagatgaaagaacttacaaggtcacacagttttacgcaactgctgccttttcttctcttggcttcaggcttgggttccttctctttgtgtctggctgtacctcggccgctctagaactagtggatcccccgggctgcaggaattcgatatcaagcttatccgataccgtcgacctcgagggggggcccggtacccagctnttgttccctttaatgagggttaattgcgcgcttggcgtaatcatggtcataagctgtttcctgtgtgaaattgttatccgctcacaatnccacacaacatacgaccgggagcataaagtgtaaaacctgggggtgcctaatgagtgagctaactcacattaantgcgtgcgctcactgnccgntttcaggcgggaactgcntgccacttgcattaatgaatcggccacccccgggagaagcgnttgcctanttggcnctnttccgnttcttggttaattgactnntncnctcgnncnntcggttgnggcaaccgtatnact

SEQ ID NO: 3419 - DNA, 881 bp, Homo sapiens
  misc_feature 510, 530, 559, 604, 617, 628, 632, 670, 680, 685, 692, 712,735, 740, 756, 767, 786, 829, 833, 841, 852, 860, 861, 863,872, 879: n = A,T,C or G
agtgcgccgtatacgactcactatagggcgaattggagctccccgcggtggcggccgaggtacctaggaaaggggtgacaggtcggagtttgaaacccgcttgaagggaggagtcacagagcttggaaaatgctagtgctaggccagaaatgactatcactgctacgaagtcagcagttatagtgcctggtattgtcagtctagtcagacagccattaaaaataacttaggatttccaggtttccttttcaaaagctatacatttttttaaaaattaaaattattttaaaaactagaatatgtgtcagttccatttctacatctgaatttaaggtaagcctccactatcaattcagcttctaccacggtatatatttactctccctttttcactcactcaaccactctgtttacaggcaggacaaactgtgggggtagccaaagtccttctgtcctcatactgggcaccttctattctatcctccaacttgtccctgtgtctccaggcangccttgtacctgcccgggcnggccgctctagaactaagtggatcccccnggctgcaggaattcgatatcaagcttatcgataccggcgacctcnaagggggggcccngtacccagctnttgntccctttaagtgaagggttaaattgcccccttgggccnaaatcatggncatanctggttnctgggtgaaattggtatccnctcaccaatttcacacaaacatnacgancccgggaagcataaanggtaaaagccnggggtgccctaatgagggngctaactcacattaatgcgttgcctcactggcccttttccaantggnaaaacctncaggccagttncattaatnnancggccaacncccgggnga

SEQ ID NO: 3420 - DNA, 855 bp, Homo sapiens
  misc_feature 7, 21, 25, 34, 102, 103, 163, 168, 275, 342, 344, 484, 494,496, 513, 530, 538, 544, 551, 580, 585, 588, 609, 610, 616,620, 628, 644, 655, 656, 661, 662, 669, 673, 677, 682, 690,691, 701, 705, 708, 721, 726, 729, 731, 742, 744, 745: n = A,T,C or G
  misc_feature 747, 769, 771, 774, 775, 795, 797, 798, 805, 806, 813, 814,822, 823, 824, 826, 834, 841, 843, 844, 851: n = A,T,C or G
ggagctncccgcggtggcggncgangtacaatgntgtctttatgctgcgagataagtcctctcttggtttgagctcccaccttttcagtgaactcttacatnntgggggatctgctcttgtaaaggacatcctttctggtgagtattcttttggtttaatttntggtntggttatttgtgcatgaatataatctcattaggaaacaagttaagttgaatagaccaactagtgaattaatccgtcaccaaaatatatgtttttggcatttacctgnttattttgaaactctttgtaagaaatgtaaacctgtaatgataatctctgctttgtaaggatatctncntctctgacacctaaaacactagatgctttcacaaagcaaaaggaagagacctaaatctatctatctgtgtaaactcacccttgaccatttcatttttgaaggcttcctatatatgctttttttcatctcaacaaaatagnggtgttaaantntctgtacctcggcccgntcttaaactagtggatnccccgggnctgcangaaattngattttcaagcttatcgatcccgtccganccttngangggggggccccggtaccccanntttttnggtnccctttantgagggtcaaatcgcngcgcttgggcnnagaanntggccanttcngttncccgnggggaaannagatttccgnttancanttccacacaactncctanccngngagcatataantnnanaaagcctggggggcccagagtngnganncttactccacattcatttgngnntgagatnnctgccgnntttcagannngnaacctgtncgtgcantnnctattantact

SEQ ID NO: 3421 - DNA, 899 bp, Homo sapiens
  misc_feature 2, 3, 4, 9, 13, 15, 487, 549, 660, 664, 680, 696, 711, 713,730, 755, 757, 758, 765, 784, 801, 815, 831, 853, 858, 865,879, 898: n = A,T,C or G
gnnnagtgngccntntacgactactatagggcgaattggagctccaccgcggtggcggccgccgggcaggtacagtgaagctttgacctgaggagctcttctgtaggtgaagagtggttaactatggttcctgtgtgcctggggccccccactcctaggactcatccaccccctacccagaacttactagtacctcggccgctctagaactagtggatcccccgggctgcaggaattcgatatcaagcttatcgataccgtcgacctcgagggggggcccggtacccagcttttgttccctttagtgagggttaattgcgcgcttggcgtaatcatggtcatagctgtttcctgtgtgaaattgttatcccgctcacaattccacacaacatacgagccgggagcataaagtgtaaagcctggggtgcctaatgagtgagctaactcacattaattgcgttgcgctcactgcccgctttccaagtcnggaaacctgtcgtgccagctgcattaatgaatcggccaacgccccgggagaggcggtttgcntattgggccgctctttcgcttctcgctcactgactcgctgcgctcggtccgttcggctgcggcgagccgtttcaagctcactcaaaagcggtaataccgttatcccacaanaatnaaggggataaacccangaaaagaacatgtganccaaaaggcccagcnanaagggccaggaaccctnaaaaaggccccggtgcttgggcgtntnntcattangcttccgccccccttgacnaagcattacaaaaaatngaacgcttaaagtnagaaggtgggggaaancccgacagggacttttaaaganaccangcggttncccctggaaagctnccttgtgcccttttctttnt

SEQ ID NO: 3422 - DNA, 873 bp, Homo sapiens
  misc_feature 6, 145, 164, 353, 542, 553, 578, 601, 604, 608, 612, 628,664, 679, 681, 698, 702, 705, 718, 719, 722, 724, 733, 735,740, 744, 747, 757, 761, 764, 772, 786, 799, 803, 824, 832,834, 835, 837, 851, 852, 864, 866, 872, 873: n = A,T,C or G
cgaatnggagctcccccgcggtggcggccgaggtaccttagtagagcagttccaaaaaaccctgccagtcactgctgtgacctgctccacaggactcaacctgaaattggacatcgcctcccaggaaaatggtgctttaatggancagctccacatacatcttncagtcactcctacagccttccccactatgccagagctaaagcaataactggcatcccagggaaatgatgcattgactgccagagcaagttatattcccagtgcctgggctgaagcagtcccctgtctcctgggaaaatagtacctgcccgggcggccgctctagaactagtggatcccccgggctgcangaattcgatatcaagcttatcgataccgtcgacctcgagggggggcccggtacccagcttttgttccctttagtgagggttaattgcgcgcttggccgtaatcatggtcatagctgtttcctgtgtgaaattgttatcccgcttcacaattccacacaacatacgagccgggagcataaaagtgtaaangcctggggtgncctaatgagtgagctaactcacatnaattggcgttggcgctcacttgnccncttnccantcgggaaacctgtccngccagctgctttaatgaatccgccaaccccccgggnagaggcggtttgccnanttggggcgctatttcgntttnctngctaactacctcnnttncnctttgggtngntccgnttcngcnagccggtttnaacntcnactcaaanggcgggaaataccnggttttcccaganattntgggggataaccccaggaaantaacattngnntnccaaaaggccagcnnaaggccctgaancngaaaann

SEQ ID NO: 3423 - DNA, 975 bp, Homo sapiens
  misc_feature 6, 7, 9, 14, 15, 16, 19, 22, 24, 25, 27, 29, 31, 34, 35,38, 43, 46, 49, 50, 56, 57, 59, 60, 64, 65, 68, 69, 70,72, 74, 75, 76, 80, 86, 87, 94, 101, 122, 125, 138, 218,220, 249, 375, 405, 430, 433, 441, 445, 465, 470, 520, 538,567: n = A,T,C or G
  misc_feature 606, 653, 656, 673, 674, 677, 686, 687, 694, 695, 710, 712,713, 714, 716, 720, 724, 725, 729, 744, 750, 760, 765, 772,776, 777, 782, 788, 796, 798, 804, 810, 811, 814, 815, 819,824, 827, 829, 831, 832, 835, 843, 844, 848, 857, 858: n = A,T,C or G
  misc_feature 865, 870, 876, 882, 884, 886, 895, 903, 909, 912, 913, 924,926, 929, 930, 933, 937, 943, 948, 952, 962, 972, 973, 974: n = A,T,C or G
ctcgtnnantccannnaantantnnantntnaanntanactanacntcnnttttanntnnttgnncannncnannnctgnattagnnagggggnggagccnaatcgctcatatagggcgaanggnctcccttgtggcngccgagtacctttctttccagccatggcaaaaaaaatccaattatgtccgtcttgagtctgtggtcttgcttcttatgtngnatttcctttgtgagctgaagattaatgcntggattcacctccttcagcacatttcatttcaattgtgaagaaaagattccaggcactgaatgtaaaattgaacatgacattttgacattccttcttctgagagctgggttggtcttagttgctgngaggctctagacaccgaccatacagggcgnggggctgctcctggacatgaacatnctncgaagttnttcncagtccactttaccccgctntcccngcgtacctgccccgggccggccgctctaagaaactagtggatcccccagngctgcaaggaaattctanatcaagcttgatcggtaccgtctacctangagggggggcccggtacccagctttttgttcccttttantagaggggtaaaattgcgcgcttggcgtaatcatgggacatagctgnttnctgtgtgaaattggtanncgnttacaagtnncacacannataccaagcccgggngnnntnaatntgtnnaagncaggggggcctaatngagggnagctaactcnccatnaaatgcnattnngctantgaccngctttccnangcgganaccatnncgnnccanctgcnttnanannaancggccaanncccngggaagagnnggtttgntatantgggcncttttncntntacttggtnattgattngctgtnctnngtactatcggntnggnnaanacgntttacntcatnaaangcggtatatngtttttcccnnnt

SEQ ID NO: 3424 - DNA, 919 bp, Homo sapiens
  misc_feature 2, 4, 6, 11, 287, 405, 407, 420, 509, 536, 550, 597, 630,649, 651, 652, 674, 677, 718, 727, 736, 747, 748, 751, 753,757, 762, 766, 772, 776, 777, 784, 794, 802, 803, 806, 816,821, 822, 826, 839, 853, 855, 867, 877, 883, 885, 895: n = A,T,C or G
  misc_feature 896, 900, 905, 917, 919: n = A,T,C or G
tngncncgacncgcgtaatacgactcactatagggcgaattggagctccccgcggtggcggcccgcccgggcaggtactgccctccagggcttacagtctggtgaaggcacaggcaacagtaagatgatgtggtaattactgggagggggcaggaaagagagagagcaaagcagattccaggagaacaggagggaagaaggcttgcgggaatagactggcatatgcaaaggtctagaggaggaaagaaccaggtttaagtcaaagaactcaaaaatagttcaacacnggtcagacttttggagtctggtgaagggacaaggatgtacctcgcccgctctagaactagtgggatccccgggcttgcaggaattcgatatcaagcttatcgatacccgtcgacctcnangggggggcccggnacccagctttttgttcctttagtgagggttaattgcccccttggcgtaaatcatggtcatagctgtttccttgtgtgaaattggtattnccgctcaccaatttcacacaacatacnaagccgggagcatnaaagtgtaaaagcctggggtgccctaatggagtgagctaactcacanttaattgcggttgcgctcacttgcccgcttttncaatcgggaaaacctttcntnncaactttgatttaatggaattnggnccaaccccccggggaaaaggccggttttccgtatttgggcnctttttccntttctttgnttaattaattnnttngncttnggtcnttcnggtttngggnnaagcggntttaacttanttaaaggnnggnattccggttntcccnnattnaggggataacccnggaaaaaacttttnanccaaaggccccnaaaaggcccngaaccntnaaaaggcccnntttnttggnttttccataggncn

SEQ ID NO: 3425 - DNA, 889 bp, Homo sapiens
  misc_feature 3, 4, 5, 493, 508, 545, 580, 591, 599, 612, 630, 645, 651,678, 682, 686, 694, 699, 724, 732, 759, 766, 773, 781, 784,792, 838, 840, 851, 860, 863, 864, 880, 881, 886: n = A,T,C or G
ggnnngacgcgcgtaatacgactactatagggcgaattggagctccaccgcggtggcggcccgcccgggcaggtaccccaaaaccaggggctgcagctccagcaattgggaaggccaagttttcttgcacgctccccagaaaaggggccaagtccatggggctgagcagtgatagactgcagacctcaccaccactgaaccttgtaggataaggcccactagcctgggatgctagtgaggccaccctagtcctcctgagttctccagctgggagcagctctacacttctccggcatgcaagctcccaaagagagaggcaagtccacctttttgctgtctcgcaaccctcctcctgctgctctcagcttgggagggtgcacagcaattagggactatcacagaaccccagcacagtgcatctggtgaacttaaaaaaatcaacaagtgaaaaacaaacaatcccatttaaacgtacatgagataaatcatgaangccactatcatcctncttctgcttgcacaagtttcctgggctggaacgtttnaacaaaaaagcttatttgacttttatgctaaaaanatgaagctttntgggatangcccaaaaagttnctgatgacccggaatttnaacccttccttaagnccaatngggccctttccgcttgcaatggcattntttnaagngggccaanggttntgaatttgggtcttggacaaaatgnccaagggnttttccccttgaaccaattttgttaanaccttgnaaacaanaaaataanccnaatcaaanatggggactttaaaaacctgaaaaactttacccattggttttttgnanaataaaattancaaaattangcnngacatttaaccctttnngaaantgg

SEQ ID NO: 3426 - DNA, 873 bp, Homo sapiens
  misc_feature 30, 419, 506, 521, 523, 570, 605, 625, 626, 635, 648, 651,683, 688, 714, 732, 733, 738, 766, 768, 779, 820, 832, 833,859, 862, 870, 873: n = A,T,C or G
tactatagggcgaattggagctccaccgcngtggcggccgcccgggcaggtaccattatcatttttagtgcagtaataaagaaattaaaagtcttaacattgagcattggacaaaaacactctgcttggcctcccaaggtgctgggattacaggcgtgagccaccacacctggcctgggctcctgcactttaattcaagccctgtgacttgcagtgagtgtggccaggcaagcactccctgtcagaatggtatgatccctcttttctggagggccagcctgcctgcagcactgttcacaggcttgcaggtgccactgaagagaccagtgggagtttaatgtctggaatgtgttccacgtggaaatataattactctgtcatctggaacaagcgattttaattgttagagagttcctcantccactagtttgactttggccatggtcgtacctcggcccgctctagaactagtggatcccccgggctgcaggaaattcgatatcaanccttatcgatcccgncngacctctagggggggccccggtacccagcttttggttccctttaagngaagggttaattgcaccccttggcgtaatcatggncataactgttttcctgtggnnaaattgttntccgcttcaccanttncacacaacaatacgagccggggagcataaaangtgtnaaagcctgggggtgccctaatggagngagcctaactcacaattnnttgcngttgcgcctcactgccccgctttcccancngggaaaactgncgtgccagctgcattaatgaaatcgcccaaccccccggganaagccgttggcnnttgggccccttttccttccctagctnacngactcgtngcn

SEQ ID NO: 3427 - DNA, 469 bp, Homo sapiens
  misc_feature 1, 4, 6: n = A,T,C or G
ngcnancactacttagggcgaattggagctccccgcggtggcggccgaggtaccccaacgtttcgcttccttttgaccaataagataatttgcagctatgtgagacaaacacgccacctcaggccctgtgatgtgcatcagaccagaaacagccgaggcaacagcatcataaccagctcgctgagaaattggacctgtctgaccataccctgtgatggaacaatagatgatgtgaggagcaatctcgtctatatcttcatatcccaggcccattgcagacagtttgccagggacatagttttccacccccgcgtacctgcccgggcggccgctctagaactagtggatcccccgggctgcaggaattcgatatcaagcttatcgataccgtcgacctcgagggggggcccggtacccagcttttgttccctttagtgagggttaattgccgcgcttggcgtaatcatgg

SEQ ID NO: 3428 - DNA, 475 bp, Homo sapiens
  misc_feature 2, 3, 4, 5, 7, 12, 16, 19, 425, 446: n = A,T,C or G
tnnnnangcccnatcnctnctatagggcgaattggagctccccgcggtggcggccgcccgggcaggtacgtaagttgaagtccaggagggttccagacacagagcttctggtgtcttctccctgtggagtcaggactcattactctgctgtctttgatgtgtgacaacaggcaccaactatcgccaactagagaagctcaccagagctctgatgttggaagtttttattggggcctcagcatgtagacatgattgactggttggtggattaactgtctacatggttaatcttagtgtccaggtcagctgatactgcgtgaccaaaagctcctaccccgaatcccttgattagtatttctggcatagcaagcccccgtcagaaacaaagacattcctcttagaggtaatatagattacctttcaancaccaggagggcaaaggccanactacttttttaggcaagttcctcggccc

SEQ ID NO: 3429 - DNA, 508 bp, Homo sapiens
  misc_feature 2, 3, 5, 7, 10, 12, 38, 103, 234, 262, 315, 319, 345, 346,354, 360, 366, 367, 376, 390, 394, 400, 418, 423, 453, 457,463, 473, 478, 494, 503: n = A,T,C or G
gnntnangcnancactacttagggcgaattggagctcnccgcggtggcggcgcgcccgggcaggtacttgccctctctgagcccgccttgcttcctaccctgntgactgagcacattggactgggtcatagtgggtgatggcccctcccggctctgtaattccccacaacagtcctggtgcgagtgtcaggcctggtagaacagggttgtttgagagatggtatctaggcaagntatgtttcctctgctccaaccagtcctntattagtccttcagacaatgtggcacattctgttcattgtatgaagaggaggnagtncaaagtatggttgataggaaccagannaactttanaataanatccanntaaaaggtnccttcggcccgctnttanaactantggattccccccggggcntgcangggaatttcgtatttttcaaagccttattnggantacccntccaaccttnttaanggggggggcccccggntacccaagnttttt

SEQ ID NO: 3430 - DNA, 881 bp, Homo sapiens
  misc_feature 2, 5, 12, 18, 29, 73, 75, 76, 77, 79, 80, 456, 482, 485,487, 490, 537, 540, 543, 546, 547, 551, 557, 559, 585, 617,623, 627, 641, 662, 663, 667, 668, 679, 703, 726, 738, 744,761, 789, 793, 802, 810, 826, 831, 849: n = A,T,C or G
gnttnaacgctncttacncctatagggcnaataggagctccccgcggtggcggccgcccgggcaggtacttancnnnanntggagactcttttggcttgcttttccttttaattggttttatagagaaaatataactaaaagtaatgtcatatgaaataatgcattgcttattaaaaatacatactgaaaatatgcactgtcaatttcagatactcgatcatttttatattatttggcatatagcctacttaattctggaaggtggcacatgtctccatccctgatagaatatatttggctattgggggtttcattttagtttatattattaatacaatgttcaaaaatgtaacaatcttcattgattaatatggaaaaaggtaatggggggaaaacaaattttttttttaaatttcattccatcgggaaaagtggaactatctttacaccggagngtaccattcatttcaaccggttcttntgncntgnaaaccaaaaagggaatctttggattcctttggggatttaccccaaanaanaanggnntggnttaaanangaaaaaaatgcccttttctttgcttncctggaatggggaccctggaataaaatttttnaaaaanttgnaaacctgccacacntttgcaatctttttttaccanncccnnaaaataccggncttttgggaaatttggccaaaaanacccttctttaggccaaaaaatnccaaaggacatnccttgnggggtcctttttttttncctttaaaccctccaaaacttccaacanccanaaccaagtnggcctttntttcaaaccccccaanacccngggggccccccgggcccngggaaaaattcttgcaaactttacccaaccct

SEQ ID NO: 3431 - DNA, 452 bp, Homo sapiens
gaatcactactatagggcgaattggagctccaccgcggtggcggccgcccgggcaggtaccattttaggccaaagctatcccatgactattgcctagaacgggagaggtgaacagaagaggtaggggctgtgaatgctttcgcaaaactgacaagcagggcgaaagggaaactctggaatatgagcttccagactgcacttgcatcttgtttatctcacggttctcaggggccaccaccttacctggcacaccgaatgtgcctgaggaatgcttgatgcactaaaccacaaatcagtgcaatggaattgccatcccccaaaagtccttttttaagataagaacgtattttctgaagtggattctgatagctattagttttggtggtctggagtatgcttttactctttctccctgatactggcaataagaacacataggtccacaggtttgg

SEQ ID NO: 3432 - DNA, 724 bp, Homo sapiens
  misc_feature 1, 2, 4, 10, 12, 13, 15, 19, 22, 23, 24, 25, 30, 32, 33,34, 36, 39, 43, 44, 45, 47, 50, 54, 58, 59, 63, 67, 69,70, 77, 82, 84, 91, 93, 95, 102, 114, 116, 118, 119, 121,123, 124, 126, 133, 339, 341, 375, 409, 411, 414, 449, 468: n = A,T,C or G
  misc_feature 475, 507, 531, 557, 601, 608, 612, 684, 701, 717: n = A,T,C or G
nntncatctntnntnaaanttnnnnagtantnnntnatnccgnnntnaanactncatnnaatnaatntnngttagtnttttntnttctatnantngattatnagtatcaggaantnanncncnnanacgactnatatagggcgaattggagctccaccgcggtggcggccgcccgggcaggtactagctactctggaggctgaggcaggagaatggcgtgaacccgggaggcagaggttgcagtgagctgagatcacaccactgcactccagcctgggcgacagagagagactccctctcaaaaaacgaaacaatgttcttggctgggccgcagcagcntnaccacctgtaatcccagcaaggtacccttcggcncgctcttagtaactagatgggatccccccggggncntgncaaggaaattttctgattatccaaaggctttaatncgaatacccggttcgtacncttccgnaggggggggggggcccccgggttacccccagncttttttggtttcccctttttaanatggaaggggtataaaatttttggcngccggcctttgggccgttaaaaattcaatggggttcaattaagnccttggntttntccccttgggtggttggaaaaaaatttgggtataattccccggcctttccaaccaaaaatttttccccaccnacccaaaacccaattancccggaaggcccccgnggggaag

SEQ ID NO: 3433 - DNA, 452 bp, Homo sapiens
  misc_feature 2: n = A,T,C or G
gnatacgactactatagggcgaattggagctccaccgcggtggcggccgcccgggcaggtactcccaggatttatttcatctatagcaagttgaaggaatagcaaagcaccgtggcaacagccccaacttgcaattggctctttttcctgtgaggcattcccctttcaaatgagcatccgcatccaacaatagctttatttcaagcatccaagcccggagtcatgccatcgcctgtgcctaggagacctggcttttggaggtgaagccaatgcaagccagtatttctgcctgctggctcactgcaccaggcattgttctcaaagatgtccaatcatcctccttctgggtaaccctgcttgcgtatgtgtgtgtgtttcccatgatacaatatgtttgtaaccaggcatctctgaatcaatcatctcagctagcatatttttacttattgaac

SEQ ID NO: 3434 - DNA, 478 bp, Homo sapiens
  misc_feature 2, 3, 4, 5, 6, 8, 9, 12, 13, 20, 24, 34, 45, 106, 429, 447: n = A,T,C or G
gnnnnnannatnntttgaanccgntttacgactnctatagggcgnattggagctccccgcggtggcggccgaggtaccactccgatccctggtggaggtccccgcncctctctggagaccagtggtctggccccagaggtgcggccgctctagaactagtggatcccccgggctgcaggaattcgatatcaagcttatcgataccgtcgacctcgagggggggcccggtacccagcttttgttccctttagtgagggttaattgcgcgcttggcgtaatcatggtcatagctgtttcctgtgtgaaattgttatccgctcacaattccacacaacatacgagccgggagcataaagtgtaaagcctggggtgcctaatgagtgagctaactcacattaattgcgttgcgctcactgcccgctttccagntcgggaaaacctgtcgtngccagctgcatttaattgaatcggccaaccg

SEQ ID NO: 3435 - DNA, 454 bp, Homo sapiens
  misc_feature 3: n = A,T,C or G
cgnatcactactatagggcgaattggagctccccgcggtggcggccgcccgggcaggtacaaggacaatagggataccctggagctgtcccagtccagctgagaagggcattctccctacttgtgtttcatcttagggactctcactttgaccctgagtgtgataggaaccatggggaagtctcagctgaggttggacgtgaaaggtctcatgttttaacagggtcactctggccccctccactgagaacaggctgaaggtggcagggactgagtggagagacctcttgggagaccactgcagcaagtcaggtgagagctggaggtggcttggcccaatgggtagctgtgaggtcgagagcaatggctggagccaggaaacctctgagtacctcggccgctctagaactagttgggatcccccgggctgcagggaattccgatatcaagcttat

SEQ ID NO: 3436 - DNA, 437 bp, Homo sapiens
  misc_feature 420: n = A,T,C or G
ggcgaattggagctccaccgcggtggcggccgcccgggcaggtaccctgagcctcctgtgccattcttgctagctggacagaagacattgctactgagccaagaagacttgatctctcttacaccgaggaagaagggaaggtctgatgcaatgaaacagcacgtttgcttataattctagatcagaaccataatagtaatttgcctactaactatgtaacattgaacaaactactgttttgtgagcctgaaaagttggtacctcggccgctctagaactagtggatcccccgggctgcaggaattcgatatcaagcttatcgataccgtcgacctcgagggggggcccggtacccagcttttgttccctttagtgagggttaattgcgcgcttggcgtaatcattggtcatagctgtttncctgtgtgaaattgtta

SEQ ID NO: 3437 - DNA, 618 bp, Homo sapiens
  misc_feature 1, 49, 423, 461, 514, 538, 596, 598: n = A,T,C or G
ncgctatcactactatacggcgaataggagctccaccgcggtggcggcncgcccgggcaggtacgcgggggagggggtaaagtggactggggagaacttcggaggatgttcatgtccaggagcagccccacgccctgtatggtcggtgtctagagcctcacagcaactaagaccaacccagctctcagaagaaggaatgtcaaaatgtcatgttcaattttacattcaagtgcctggaatcttttcttcacaattgaaatgaaatgtgctgaaggaggtgaatccatgcattaatcttcagctcacaaaggaaatactacataagaagcaagaccacagactcaagacggacataattggatttttttgccatggcctggaaagaaaggtacctcggccgctctagaactagtggatcccccnggctgcaggaattcgatatcaacttatcgatcccgtcnaccctcgaaggggggccccgggaccccagcttttgttcctttaatgaagggtnaattgcccccttggcgtaatcatngtcatagctggtttctggtggtgaaattggtattcccttcacaattcccacacatacnancccggagcataaagtgtaaa

SEQ ID NO: 3438 - DNA, 620 bp, Homo sapiens
  misc_feature 1, 25, 31, 44, 524, 531, 590, 597, 620: n = A,T,C or G
ncgcgtatccactcactatacggcnaatagnagctccccgcggnggcggcccgaggtacgcgggggagacacattcagaggtgagcccagagcgggtaaagtggactggggagaacttcggaggatgttcatgtccaggagcagccccacgccctgtatggtcggtgtctagagcctcacagcaactaagaccaacccagctctcagaagaaggaatgtcaaaatgtcatgttcaattttacattcagtgcctggaatcttttcttcacaattgaaatgaaatgtgctgaaggaggtgaatccatgcattaatcttcagctcacaaaggaaatactacataagaagcaagaccacagactcaagacggacataattggattttttttgccatggcctggaaagaaaggtacctgcccgggcggccgctctagaactagtggatcccccgggctgcaggaattcgatatcaagcttatcgatacccgtcgacctcgagggggggccccggacccaacttttggtncctttantgaggggtaattgcccgcttggcgtaatcatgggcataagctggttcctgtgtgaaaantggtatncgcttacaatttcacacaacaan

SEQ ID NO: 3439 - DNA, 618 bp, Homo sapiens
  misc_feature 1, 3, 5, 6, 7, 389, 474, 506, 577, 588, 589, 605: n = A,T,C or G
ngncnnngacgcgcgtaatacgactcactatagggcgaattggagctccacccgcggtggcggcccgcccgggcaggtactcacagctacatcacactgaatatcatctccctgcactgccatttcatttgagcagggctttgcctgtcaagaacattcatatcttttgataaacagtgcatttttcctgatagtctgtatgggacagcctccttgtttgcatctgaaggacagggacttcaggacctcctgctgtggtcaccaaggaatcacattcaaacttctcaacaaggtgttatggtccttctcagtttgcctacgatccattgaggcaaaggtttccttctctcaatacaccctctgctttagccagggggacctcccactgncctctctatgtgttctatttgttcctgactgttagtacctcggccgctctagaactaagtggatcccccgggctgcaggaattcnatatcaagcttatcgataccgtcgaccttganggggggccccggtacccacttttgttccctttagtgagggttaaatgccccttggcgtaaacatggcatanctggttcctgnngtgaaaattggtaatnccgttacaaattt

SEQ ID NO: 3440 - DNA, 646 bp, Homo sapiens
  misc_feature 297, 299, 301, 319, 380, 384, 404, 463, 465, 472, 475, 479,497, 499, 509, 512, 515, 552, 573, 582, 599, 605, 623, 626,630: n = A,T,C or G
agccgtatacgactactatagggcgaattggagctccaccgcggtggcggccgcccgggcaggtaccaacaactgccaggctgccaagcagtttggagtattggaaaaaaacgttcgagactggcgcaaagtgaagccacagcttcaaaacgcccacgccatgcggcgggcattccgaggcccaagaatgggaggtttgctctggtggaccagcgtgtggccgaatatgtcagatacatgcaggccaaaggggaccccatcacccgggaggcgatgcagctgaaagctctcgaaatngncnaggaaatgaacattccanagaaagggttcaaggcaagcttgggttggtgtcgaagaatgatgagaaggtatgacctgtntctnaggcataaagtgcccgtgcnccagcacctgcccggaagacctgactgaagaaaactcgtcactttaccaaacgcaatgntnctggctnttnccangggcgcattgaactattnangtaacttcanatnggngaatgcaagaatgaaaacgccccatttgtttaagaangtgccattcacgggttacttnttggattanccaggggccaaaaaggnctgtcnttgggttcaagaacaccnaanccanggggaaaaaacttgaa

SEQ ID NO: 3441 - DNA, 631 bp, Homo sapiens
  misc_feature 4, 576: n = A,T,C or G
tagngcgtatacgactactatagggcgaattggagctccaccgcggtggcggccgaggtaccccaaaaccaggggctgcagctcctgcaattgggaaggccaagttttcttgcacgctccccagaaaaggggccaagtccatggggctgagcagtgatagactgcagacctcaccaccactgaaccttgtaggataaggcccactagcctgggatgctagtgaggccaccctagtcctcctgagttctccagctgggagcagctctacacttctccggcatgcagcttccaaagagagaggcagtccacctttttgctgtctcgcaaccctccctcctgctgctctcaggcttgggagggtgcacagcaattagggactatcacagaaccccagcacaagtgcatctggtgaacttaaaaaaatcaacaagtgaaaaacaaacaatcccatttaaacgtacctgcccgggcggcccgcccgggcaggtactttgcgcttactttgtagcccttcatcaagggttttgctgaaagatggcggtatattaggcttgaagcaaagaagtgggtgaaggnttgatccggggttttatcgaattacaagaaacaggcttccttttagaagggatat

SEQ ID NO: 3442 - DNA, 616 bp, Homo sapiens
  misc_feature 186, 212, 215, 243, 247, 260, 346, 354, 361, 369, 377, 380,384, 390, 392, 400, 411, 416, 425, 432, 438, 442, 452, 456,459, 462, 473, 484, 489, 490, 493, 494, 496, 501, 503, 504,513, 518, 529, 548, 549, 557, 569, 577, 580, 581, 584: n = A,T,C or G
  misc_feature 593, 599, 600, 606, 614, 615: n = A,T,C or G
agcgcgtatacgactcattatcgactactatagggcgaattggagctccccgcggtggcggcccgaggtacccaccttacaatgtgggacaagattaatttagggaaaacacgtagcacagggcttcacccatggtaagtatttcataaacggtaactatttttaacaatgacaattcacagagtnaatcctaataaaaaatgattacagangangacgcctccacccacaggaaggagccancacngtggggagctgtntaaccaggggagtgttctcacagctgacacacgtggagttgtggaggtatcaagcagagttggaggaggagggggagccctggttnctgctctntcatgancagggtgnatgcttgntcntggnactccntntcttaccngcttaactgtnctaanccgtaaaangatgggntttctnaaantcttacaagnccgntgnatnatctgtgacanctgggcattgntaagnngtnngntatgncnnattcatgtntgtangggatgacttntccctttccacaccagaannctgggcanccattcgctgtnaattcaanctnntcnaaacacgantagacnnttttcnagcctagnng

SEQ ID NO: 3443 - DNA, 603 bp, Homo sapiens
  misc_feature 563: n = A,T,C or G
agcgcgtatacgactactatagggcgaattggagctccccgcggtggcggccgaggtactgtatagtgataaaaggttaattgtatcaaggttacacaatcctgaagctttacatgccttcaaaatacataaaacaaaaattgtccttagtaaaatcagaactagacaaacccacaatcacagtgggagatttttatttttatttttatttttattttcattttgtgatggagttttgctctctcgtctaggctggggtgcagtggcataatctcagctcactgcaacctctgtctcccagacttaagtgattctcctgcctcagcctcccaggtagctgggattacaggtgtgcgccaccacgtgcagctaatttttgtatttttagtagagacagtgttttgccatgtcggccaggctggttttgaactcctgacctgaggtgatcctcttgcctcggcctcccaaagcgctgggattaacaggtgtgagccgctttgcctggccaggagattttaatatacctctaaagtaactgacaaaacaaccaccatgagtcagtnaggatattgaggatttgaacctcatcatgtacctgcccgg

SEQ ID NO: 3444 - DNA, 606 bp, Homo sapiens
  misc_feature 19, 21, 23, 35, 44: n = A,T,C or G
agcgtatacgactactatngngngaattggagctncaccgcggnggcggcgcgcccgggcaggtacttggcacatctggaaaatgacggagtctttcaaaaatactgctgggaagatgacctgttttcactctctctctaggcaggttcacatcaccagatgatgctggatatggctccactccaaggaaaacaaccttttcttggtctttcaatggctgtttatgagtatacaacaagtgctttctatatactgcaaactcgttagacagacaagtccctctgtcaatcccactctacagtgcatatgcttctgtgtggtacctcggccgctctagaactagtggatcccccgggctgcaggaattcgatatcaagcttatcgataccgtcgacctcgagggggggcccggtacccagcttttgttccctttagtgagggttaattgcgcgcttggcgtaatcatggtcataagctgtttcctgtgtgaaaattggtatcccgctcacaattccacacaacatacgaacccgggagcataaagtgtaaaacctggggtgcctaatgaagtgagctacttacattaattgcgttgcgctcactggc

SEQ ID NO: 3445 - DNA, 865 bp, Homo sapiens
  misc_feature 2, 3, 5, 7, 21, 23, 24, 25, 27, 28, 33, 35, 39, 47, 83, 367,543, 551, 564, 565, 589, 612, 632, 635, 640, 643, 679, 687,697, 712, 714, 716, 726, 764, 775, 797, 804, 812, 826, 832,833, 847, 853, 857, 865: n = A,T,C or G
gnngngntacttagggcaatngnnntnnccgcngnggcngccgaggngctgtcgcccgggcaggtacagctcagtgcattttncccaaagtgaacatagcagtgaacccagactacggaccataacattaccagaaggcacgaagtccctggagtcctcttctagtcagtagccctcacgagtaaccaggatccaacgtcatcttgttcggctttgacttttacaggaatggagtcacccagtttgtcttcttttgtgcctgcttcagcttgctgcgggtgctgtagctggcctgccctggtgtggccggggactcccttccgtgaatataccccatcgtttctcagtcccttgaactgtttccagntggggcgattgtggatagtgctgctgtgaacaggcttaagcacgtccctttttctcgaattttattgaaatacaacaaagtgcaaacattacaagtgcacaagctcgatgaagtttttaccgacgtatacacccgtgtagtcacccgcccgcaacaagcaaaagaatgttttctgnaccccaanaaaccttccttgnncctactttggcacacccccgcaanaaggcattacaatttttgacttntttttcccataaacagatgnctncgtcntgnaattaatatgaaggggatcataccaaatgggctctnttttgganaaattttaanaatcttttttaaggnantntttgggcctngggggtccatggaacttggggaaagccattttgaaaancttacaagccnccggggttaaaaaaagcgtganacaaacngcacaagngggaaaaaggaaanaaactnnaaagtcctttttcncgtgcnggcnttgagggn

SEQ ID NO: 3446 - DNA, 574 bp, Homo sapiens
  misc_feature 3, 472, 497, 541, 547, 557: n = A,T,C or G
ganattggagctccaccgcggtggcggccgcccgggcaggtcttcagctcctggactcaagtggtcctcctgcctcggcctcacaaaatgctgggattacaggcatgaaccaccacacctgatcctaagttgtattttttttctgccataatttattttatatttagattttactattttgacggaggtatttcctaaaaaccgaagtccttgtagataggggcacaattaattcattagttaattaagaccattcatggtttgatccttgccttcctctcccaccttatttctaactgtggtctccttccttctgtctctgctcctcccattacactggccttccttgggtcctttgtacctcggccgctctaagaaactagtgggatccccccggggctgcagggaaatttccgatatcaagcttatcgatacccgtcgaccctcgagggggggggcccgggaccccaancttttgttcccttttagtggagggnttaattgcgcgcttggcggtaatcatggggccatagctgttttnctgggntgaaaaatgnttattcccgctcacaat

SEQ ID NO: 3447 - DNA, 862 bp, Homo sapiens
  misc_feature 1, 611, 616, 655, 656, 657, 658, 659, 660, 663, 665, 666,667, 668, 669, 670, 671, 672, 673, 674, 675, 676, 677, 678,679, 680, 681, 682, 683, 684, 685, 686, 687, 688, 689, 690,691, 692, 693, 694, 695, 696, 697, 698, 699, 700, 701: n = A,T,C or G
  misc_feature 702, 703, 704, 705, 706, 707, 708, 709, 710, 711, 712, 713,714, 715, 716, 717, 718, 719, 720, 721, 722, 723, 724, 725,726, 727, 728, 729, 730, 731, 732, 733, 734, 735, 736, 737,738, 739, 740, 741, 742, 743, 744, 745, 746, 747, 748: n = A,T,C or G
  misc_feature 749, 750, 751, 752, 753, 754, 755, 756, 757, 758, 759, 760,761, 762, 763, 764, 765, 766, 767, 768, 769, 770, 771, 772,773, 774, 775, 776, 777, 778, 779, 780, 781, 782, 783, 784,785, 786, 787, 788, 789, 790, 791, 792, 793, 794, 795: n = A,T,C or G
  misc_feature 796, 797, 798, 799, 800, 801, 802, 803, 804, 805, 806, 807,808, 809, 810, 811, 812, 813, 814, 815, 816, 817, 818, 819,820, 821, 822, 823, 824, 825, 826, 827, 828, 829, 830, 831,832, 833, 834, 835, 836, 837, 838, 839, 840, 841, 842: n = A,T,C or G
  misc_feature 843, 844, 845, 846, 847, 848, 849, 850, 851, 852, 853, 854,855, 856, 857, 858, 859, 860, 861, 862: n = A,T,C or G
ngctactatagggcgaattggagctccccgcggtggcggccgaggtactcactcactgaatggccacctatgcccagcactcattgcactgaaattataggtagcttctgatggatttggagataagagggcctttggaattatcatctaaatgtctttcaaacttgtaatatcactactacttggcaacgcaaagggcttgtccatgtgaaagctcaccttccaatatgaactgctggagactggaaacaccgttacagagtgtctgcaagtccatgcaagaaacatacagcgcattcatattgcagcattgatttttcaggttaatttttaacctctgagttggagagaaagaaaaaaaaccaaaaggttcagtctatgaagttgttgctatctaaacactcccaaaacccattactgaaattttgcgtggcacataacccacgtggcttatttcaagtggctgaatgaacaaagtttatgagaggtacctgcccgggcggccgctctagaactagtggatcccccgggctgcaggaattcgatatcaagcttatcgatacccgtcgacctcgagggggggcccggtacccaacttttggtccctttanttganggttaattgcgcgcttggcgtaatcatgggcataactgnnnnnncgngnnnnnnnnnnnnnnnnnnnnnnnnnnnnnnnnnnnnnnnnnnnnnnnnnnnnnnnnnnnnnnnnnnnnnnnnnnnnnnnnnnnnnnnnnnnnnnnnnnnnnnnnnnnnnnnnnnnnnnnnnnnnnnnnnnnnnnnnnnnnnnnnnnnnnnnnnnnnnnnnnnnnnnnnnnnnnnnnnnnnnnnnnnnnnnnnnnnnnn

SEQ ID NO: 3448 - DNA, 863 bp, Homo sapiens
  misc_feature 494, 508, 536, 541, 545, 555, 556, 577, 594, 605, 611, 625,629, 633, 653, 658, 661, 675, 676, 705, 711, 743, 744, 747,757, 762, 768, 770, 776, 788, 808, 815, 816, 821, 828, 833,837, 842, 844, 848: n = A,T,C or G
cgcgcgcgttatcgactcactatagggcgaattggagctcccccgcggtggcggcccgaggtactttcaagctcattgctagtaaagatatcaggctaataacaactcagaaactcaagtttattttctacactatcttaaaaataaagtgaaagccaacaactattgagtagctatgtagcagacaggactttactgacactacttctaaagaaatctacaatctaggctgggcgcggtggctcatgcctgtaattccagcactttgggaggccgaggcgggtggatcacctgaggtcaggagttcgagaccagcctggccaacatgataaaaccgcgtctctactaaaaatacaaaaattagctgggcatggtggcgggtgcctgtaatcccagctactcgggaggctgaggcgggagaatcgcttgaacccgggaggcgaaagttgcagtgagcccgagatcgagccactgcactccatcctgggtgacanggcaagactccgtncccccgcaaaaaaaaaaaaaaaaaaaanccccntttnaaaccttggnnaaaagggaaaaacaaaccccnccattttttttaaaaancgggaaggggncccggntttcttttaaacangggngttnaaaacctttccaaaaaaaanggttnccngtttccccttgggnnaaaacccaaaaaaattggcgccctttccngggacnggaaaacccaaacctttttgtttttaaaaagnnccnttttggggtnaaggncccaancntttttnaaaaaatttttncccccggcaaaggggggaantttttannccccncccgggnggccntttnaaaanangganccccgggcgggggaa

SEQ ID NO: 3449 - DNA, 572 bp, Homo sapiens
  misc_feature 442, 563: n = A,T,C or G
gaattggagctcccccgcggtggcggccgaggtacagagataaaactgaggcttagagaaggtcaatacctggcccaaaccatatctgttaagtggcagagccaagatttgagctgtctgacttcagactactaaactattctacctctaatataacatatatgaaaacaactatcaaatggtaaagtcctaggcaaacatcagatctcactatcattaaaacttttctctgaatctttacttaaaaattacattatgtgaccgggcacgtaatcccagcactttgggaggccgaggtgggtggatcatgaggtcaaagaaatcgagaccatcctggccaacattgatgaaaccctgtctctactaaaaatacaaaaaattagcccgggtgtggtggtgggcacctgttagtcccagctactcgggaggctgaggcaggaanaattgcttgaacctaggaggctgagattgcagtgagccgaaatcacgccaccacactccagcctggggcaacaagagggaagactcccatctcaaaaaaaaaaaaaaaaagtccctttttnggcttaatt

SEQ ID NO: 3450 - DNA, 860 bp, Homo sapiens
  misc_feature 1, 2, 8, 18, 24, 28, 31, 33, 36, 44, 350, 434, 502, 542,550, 660, 664, 671, 717, 725, 737, 740, 743, 756, 772, 794,802, 842: n = A,T,C or G
nncgcgcnttatacgacntactanaagncgnancgnagctgcancgcgcgcggccaggtacaggcactttcttcaaagctccttcttttggtgacatctggagcttcagaggcagtgggagatggaatgggggtcagatccatggagatcattattggcagcattattggcagcaattcctgagaaactgaaacaattgagagagagatggcttacttagctcacttagcttctaagccatttttcatttcctgaaagtaatggaagccagcagcctattcttaggatttaataggagatttgagtaaaatttcattcaggaaggttctcatttttcatttttaaaagtntgaattccctgttcatatagagcagagctattcttaacaatattccatatttaaaaagaatcaagttgtatccttgagatacanatctctatcgcttggtaatcatcagctctagcatcttatttcacttaaaagcagtgctcacagaggcngttagaagatgaggataactgaaaaaacatttacgatatnaagccccnactttaagactggaaagtgatgctatcacttatgtaaaagaaatagcaaccggcttaaaaatgttcaaagtattttaaaattagcctaacagttggaatcatatgaaatntgcnacctttntacatttgccagaaatcactggttttttaaccccaatttgccattngggttccncccgggttcctnggnccnttttaaaactaanggatcccccggccgcnggaatccaaattaagctttttnatcccgtngccctcaggggggggccgggccccccttttgttccctttntgagggttaattcccccc

SEQ ID NO: 3451 - DNA, 648 bp, Homo sapiens
  misc_feature 7, 20, 37, 42, 46, 50, 58, 111, 113, 114, 470, 488, 511,536, 545, 550, 556, 573, 604, 608, 615, 616, 619, 624, 645: n = A,T,C or G
gcccctnttttccttttctnttttacggcgacccggntctcntttntggnggcggccnggggccattgagactgccatggtttacttgaaaggccacgtatttgttacttntnntagagaccattcaaggcttctggctcttgacaaagatagaccactggaacaatgagaaggagagaattctactggtcacagacaagactctcttgatctgcaaatacgacttcatcatgctgagttgtgcgcagctgcagcggattcctctgagcgctgtctatcgcatctgcctgggcaagttcaccttccctgggatgtccctggacaagagacaaaggagaaggccttaaggatctactgggggagtcccggaaggagcagttctcttctgtcccgctgggaaacccatggtccactggaagttcctttatgctactttcactggagccattcctatgaaaataccacccagntgagaaaatttcctttgnaaaattttgcaaaggttgtcctnggggttcaatgttcctaaaagcttngttccccancttantccaanaaaatgccctaccaagnaaattcaacttggaatcttgggaaagaaggnaaangaaaacnnggntgggntggttaaacctggaaaccccnatt

SEQ ID NO: 3452 - DNA, 853 bp, Homo sapiens
  misc_feature 7, 17, 23, 28, 29, 338, 506, 522, 530, 532, 554, 556, 590,622, 623, 630, 676, 686, 699, 717, 733, 735, 738, 743, 744,752, 763, 768, 773, 784, 790, 799, 809, 815, 826, 839, 842,847, 852: n = A,T,C or G
gcgcgcnttatcgactnactatngggcnnattggagctccccgcggtggcggcccgcccgggcaggtacttagggcacagagaggttagcacacaatgggtctaaatataccactgtttggggataaatagcttccagggatctggatgcagaataagctaagccagaaagattcaatgcagtcacctcagaaagtcagccacatgcatcttggagaggccttgtggtttcagggccattctaagaacgcagctatactatagtcagtccaagcggtcatcacattaaggaatctcaatttgtgaaaactagtatttcaataaaaaaggagaacactngttttgttaaaggagtgataacttcacgtggatatttgtcataggttttatttaaatgaaagctccctgactacattaaaaatatgatttatttaatttaaatgtattttgcacatatccacttttaaagaacaagttcattgcttaagccaattaaactcagattgnagaaatatttcttatntgccaagncntctggattaaaatagattcccngnccattaaagactatttatcttttctttcaaaaangaaattccacccttatattaactcattattcnnccaccanttttccatggaaggaaccagaaaattatttggaagtttttttgggnccttaaaacncaattgaatcaancctgcagaaacttttgancaaggctaaatttttntnttnggccnnaactcaanttaaaaatgtntttgnaaccntttgaattttnaaaagnggggggaanaaagccttcntttggnaaaaatgggcnggattttatttanagnaaggngtccng

SEQ ID NO: 3453 - DNA, 854 bp, Homo sapiens
  misc_feature 3, 8, 9, 11, 12, 14, 20, 21, 28, 32, 34, 47, 53, 56, 57,59, 68, 70, 73, 75, 76, 84, 85, 87, 88, 94, 99, 101, 102,103, 105, 106, 107, 117, 202, 380, 389, 393, 436, 440, 443,446, 460, 462, 480, 481, 498, 501, 507, 513, 520, 521, 534: n = A,T,C or G
  misc_feature 539, 558, 559, 602, 606, 612, 615, 654, 661, 663, 674, 679,681, 684, 688, 690, 697, 701, 707, 710, 726, 735, 737, 744,749, 756, 762, 767, 770, 778, 781, 794, 797, 801, 804, 821,828, 839, 840, 841, 843, 844, 853: n = A,T,C or G
ggntaatnntnngnaaattnnggtaatnttcngnatatagtgggaanacgggnaanngngaaaaatcngnaantnngagttttnntnnatctcntttantnnnannnattagggctntagatcatatagggcgaattggactccaccgcggtggcggccgaggtacgcgggttttgtggaacagtaagactcacttacaagnaagtaacatgctgtgtttctggatgatattcttatctgagtacaaagcacgatgagatgagcaaagttaacatggcacagacttcctggtttctcccatacctgtggctcttgttgcctgcaacctggggtctcccattcatgtatatttctctccttgaaagcctcctgacatcaantccctgttntgangcaattttcccaaatttaaagaattatgaagaaataaaaaaanggtnccntgncccctgggccgggncnggtttcttaaaaaactannttgggattccccccccnggncctggnaagggnaaatttnnaatatttcaaagnctttnttcggatttcccggtatcnnaacccttcaatagggggggggggggccccccggggttaacccncaantctttntanggttttcccctttttaagtggaagggggtttaaaatttngcccccncntttggggcggnaaaantnaangggntncattaancttngtttcnccnttgttggtggaaaaanttggtttantncccggtnttcancaaaatntcccanaaacnaanccatttcnganggccccggggagnccntttnaangtgtttataaagccctnggggggngcccttaaatnnngnngaatcctant

SEQ ID NO: 3454 - DNA, 569 bp, Homo sapiens
  misc_feature 466, 473, 483, 485, 500, 522, 540, 556, 558, 567: n = A,T,C or G
gaattggagctccaccgcggtggcggccgaggtacacacagttaacccaaaacaggcctctctgaaaaagccattgccatggactgccagacagacaatgacaagacacaaataccttctggtgtgtgagccacgggacatgtgagcttccccgctgatgctcctcttatatcaaagatcactttcacaagatgagcgactcaatatcttttatcaaaccaatgatcacctgcaagctatggtatatttttgcagctgtgtagagctatgtggcatgagaatgtgggacttataaaattgctgatccaataaataagacattatgggcaacagtgtcttatcagctagtggtgtacctgcccgggcggccgctctagaactagtggatcccccgggctgcagggaattcgatatcaagcttattcgaataccgtccgacctcgaggggggggccccggtaccccancttttgntcccctttantngagggttaattgccncgctttggcggtaatcaatggncataggctgttttcctgnggtggaaaattgtttntnccggcttcnct

SEQ ID NO: 3455 - DNA, 560 bp, Homo sapiens
  misc_feature 541: n = A,T,C or G
gggcgaattggagctccaccgcggtggcggccgaggtactcaagcccctgcctgtcatggccccccaaaatgctgggattgcaggccaccataaccggtcatcggggcaactatccttcagggcttcctccagtagggctccccaggttggccttgagggccacaataaaaaatctgacttagctatactccttccctgtccccaaccacagttattcttgtggatgaggcaaatggcagcaggacagctggagtataccagagttgactcatttattttatgcatgcttaagtgtggcatccctggggacatgaaattccagtgaaatccagtctttgtgctggagaagctcatagatctgtggaggaggcagatgcccacccacttcactgtacctgcccgggcggccgctctagaactagtggatcccccgggctgcaggaattcgatattcaagcttatcgataccgtcgacctcgaggggggggccccggtcccaaactttttgttccctttaagtgaaggggttaaattgcgcgncttggcgtaaatcattggg

SEQ ID NO: 3456 - DNA, 912 bp, Homo sapiens
  misc_feature 4, 199, 282, 352, 359, 446, 456, 462, 483, 485, 491, 502,504, 507, 508, 515, 539, 543, 546, 568, 572, 581, 584, 586,595, 597, 609, 619, 620, 626, 627, 628, 642, 649, 651, 657,659, 660, 661, 663, 669, 671, 676, 680, 684, 693, 694: n = A,T,C or G
  misc_feature 696, 700, 701, 707, 713, 714, 733, 735, 738, 748, 764, 765,767, 771, 775, 776, 779, 784, 798, 800, 801, 802, 811, 812,823, 834, 838, 843, 849, 856, 859, 862, 865, 873, 876, 883,888, 889, 891, 893, 903, 905, 907, 909: n = A,T,C or G
atgntactatggcgcgcgtatacgactactatagggcgaattggagctccccgcggtggcggcccgaggtacaagcagtaattgattcactggccttggactacttgcaggtcagcttgtctcacataacaggttggtatatgtataactatcacataattatgcattttagtaaaaataattgtttagaactggcttngggcagttgtgacctctaactgtaatttccttgcttcttctgtatgttccacctcttgtgctgtgcgcctaagccaaaatcanggtgctcttgataaaaattcttctcaatttaggcagctcatcaagattccacttctttttaacttaattntcccaanggttttcccaaacttcttttcagataagggccctgccctacttccttcaaattgagggtgcaccaaaccctctgtccccggccggtntagaactaantggatnccccggggctgcaggaattcntnttcaancttattgaatncngtnnacctctnaagggggggggcccgggcccaacntttngtncctttaatgggggggtaaaatncgcnccttgggcntananatgggaaanangatggattcctntgtgaaaatnngttatnnnttacaaattccaancacatananatcccngnnncnttaaantntaaancctngggnggcctaatnngnggtnnttactnccattnnttgggtgtggcctacatgntnccntttttaaatngggaaaacatttttgnncntttntttnnttnttatnccccacacccgtgngnnnggcgggttnngtatatgggcnttttatgcatnattntatantaaatnatatgcntcntgntangtgctgtnagncggaggngttannantnatattataangngngntat

SEQ ID NO: 3457 - DNA, 970 bp, Homo sapiens
  misc_feature 3, 6, 9, 199, 208, 210, 222, 255, 258, 261, 266, 268, 270,275, 278, 282, 285, 287, 305, 311, 314, 319, 320, 322, 323,346, 359, 368, 374, 376, 382, 383, 384, 396, 399, 408, 420,423, 429, 432, 441, 444, 448, 458, 461, 464, 465, 479: n = A,T,C or G
  misc_feature 488, 489, 508, 511, 515, 521, 527, 529, 534, 549, 550, 551,553, 557, 563, 583, 584, 585, 589, 595, 597, 600, 608, 611,613, 616, 617, 627, 628, 634, 636, 637, 638, 639, 640, 651,659, 664, 669, 672, 682, 683, 687, 697, 698, 701, 713: n = A,T,C or G
  misc_feature 719, 720, 728, 730, 736, 738, 739, 743, 745, 746, 747, 757,761, 762, 766, 770, 779, 781, 783, 784, 786, 795, 798, 800,801, 802, 812, 823, 824, 827, 833, 834, 836, 838, 850, 851,857, 860, 862, 863, 864, 865, 866, 871, 872, 874, 880: n = A,T,C or G
  misc_feature 887, 890, 897, 899, 901, 923, 926, 928, 930, 931, 938, 941,946, 954, 959, 963, 965, 966, 970: n = A,T,C or G
tanggnaanggccgcgtatacgactactatagggcgaattggagctccaccgcggtggcggcccgaggtacaagcagtaattgattcactggccttggactacttgcaggtcagcttgtctcacataacaggttggtatatgtataactatcacataattatgcattttagtaaaaataattgtttagaactggcttcngccagttgntnacctctaactgnaataccctcggcttctcctgaatgtttccaccnttnggntgggncncnaaccnaanttanggngnctttggataaaaattttnctaaanttnaggtnnannataaagaatccattttgttttancaaattttttccnaagggtttnaaaaantnttttcnnnataagggtcctnggncctaacttnctctccaaaatncgngggggnacnaaaaccttnggntccnggccggctcntanaanntaagggaaaccccncgggtttgnnggaattttatatatacaanttntatngatacntgtcanancttanaggggggggccccgnnncnaaantttttntgtcccttttaaaagggggnnnaaantggccncnctngggcaaanaantnggnnataaaaggtnngtcatntnnnnnaaaaattggtnatgtctgncaaanatttnccnaaaattttannagancggggagaannaantgtgaaaccctnggggtnncctaatgngnggcacntnncacncnnnttaattggcntatnncctnaacncccgttttntnanngngggaaaaanttntnnngcgccatgtnatattaatgannacntgccanncncncgatgagagagnngttgtntgntnnnnngggtnntntatctnatatctnttnaaaaagntnanatgatacggctttgatcatagntangntnnggggatnggntgttnatgatatnatatnaggngnnggan

SEQ ID NO: 3458 - DNA, 874 bp, Homo sapiens
  misc_feature 22, 29, 37, 43, 57, 63, 64, 74, 668, 671, 696, 717, 718,769, 773, 775, 787, 788, 812, 814, 815, 830, 850, 851, 863,867, 869, 873: n = A,T,C or G
acgcactactatagggcgaatnggagctncccgcggnggcggnccgtccgggcaggnaccttnntaagtctttnacattatgaatgaacacaggattatgaaattgtaaaggttactttctgctctctaattcctttactcgtaattttagttttcttaacggtataacttgatgcaaatatatacacagtagatactaactttcactgaagtgttttcgggagggaggggcactttacaagatgtgttgcctttagtttttccggtaaggagacaggaagacacagacagaggctcttagggcacatggaaagcgcctgcccctgtgccaagaacttaaagagagagccggggatggaccctccttgctgtggctcctgaacagtgcagcctctcttctgatgcactcaccctggcgaggagaaccgcttgtgtggcgactgcttggcccaagagcgagtaggattgttgactcaactctcttcgtgtctcctcagaggggaggaacacctggcttcacctgtttacataactcttggtgattcttgtccctaagctcttccagaatgctcttttgggcttttctcaaaaggtttttagaaagaacaagctttttggggtggcaagaaaattaagatggagaattttggttttaacctattagtcancgnggcatcagagaaccacatgtgcccnacaatcaggggcattttcagnnaatatttgttgaatattatttaaagtgaatgcttgtttgctgaaaaacaanattntntgatgacccttnnaaacctatgtttgtggataaagtnanncatagctcccattanaacttttactccttaacatnngtggaacacttnattntnattnt

SEQ ID NO: 3459 - DNA, 881 bp, Homo sapiens
  misc_feature 22, 29, 249, 254, 334, 336, 337, 407, 504, 547, 570, 586,611, 646, 660, 677, 685, 687, 697, 723, 725, 758, 763, 766,774, 777, 802, 836, 856, 862: n = A,T,C or G
acgcactactatagggcgaatnggagctncaccgcggtggcggccgaggtactagtaagttctgggtagggggtggatgagtcctatgagtggggggccccaggcacacaggaaccatagttaaccactcttcacctacagaagagctcctcaggtcaaagcttcactgtacctgcccgggcggccgctctagaactagtggatcccccgggctgcaggaattcgatatcaagcttatcgataccgtcnacctngagggggggcccggtacccagcttttgttccctttagtgagggttaattgcgcgcttggcgtaatcatggtcatagctgntnnctgtgtgaaattgttatccgtcacaattccacacaacatacgagccgggagcataaagtgtaaagcctgnggtgcctaatgagtgagctaactcacattaattgcgttgcgctcactgcccgctttccagtcgggaaacctgtcgtgccagctgcattaatgaatcngccaacgcgcggggagaggccgtttgcgtattgggcgctcttnccctttctcgctcactgactcgntgcgctcggtcgttcngatgcgcgagccgtattcagctcantcaaaggccgtaataccggtattcacaagaatcanggggataaccccangaaaagaacatgtgaancaaaaggncngccaaaaggncaagaaccgtaaaaagggccggggtngnggcgttttttcataaggcttcccccccctgganaggantanaaaaattnacncttaattaaaagtggcaaaacccanccggactattaaaaaccaggcgtttcccctggancttccttgtgcgcttttttnttccgnaccttccgtttaccgaaat

SEQ ID NO: 3460 - DNA, 876 bp, Homo sapiens
  misc_feature 494, 550, 593, 624, 627, 632, 645, 649, 694, 705, 739, 751,773, 780, 782, 793, 810, 819, 835, 860, 870: n = A,T,C or G
cgtatacgactactatagggcgaattggagctccaccgcggtggcggcccgaggtacaatcctgccctcaagaaggttaaggtccagttggaggagacttaggagttcaactgacccagttctgcaaccttaggtggctgtcctcatcctgacaggagacaggggacacacacaaaacagtgatttaggcgttaacaaagtggctttacaaaggtgtagacagaatataggaaatccaacaaggcctggtggagcaccatgaagctggtgacagcagggaacagtggcctccttagacttaaggggcaagagcaggaagaggttctgtggcccaaaaggggtgaggcacacagagagggtctggacaggagctctggtcaccagcctccaaggacaaggagggaggcccgcctggggaatatgtatcttgacctcatcttcttcctccttccagtctcctattagaatctcccaccggtcaaccccaaccaganagccagagggcagtgggggtccattaatgtgatccacattagggggcacagggcanggatggaaaatgatggagaagtggatctagaagaccccggcancctaacttgtcaccccgactcaattatctcntgntctgncatcgactgctgntttntttctgacctacctttaccttccccgtaacttggtaccttgcccngggcgggccgnttttaaaacttagtgggatcccccgggcttgcanggaattcgaatnttaaaccttatcgataccggcnaacctcnangggggggcccngtacccaacttttgttncctttaatngagggttaattgggcncttgggggtaatcatgggcatagtngttcctgggngaaaat

SEQ ID NO: 3461 - DNA, 877 bp, Homo sapiens
  misc_feature 579, 581, 588, 591, 647, 674, 681, 701, 752, 761, 788, 810,823, 839, 863, 873, 875: n = A,T,C or G
cgtatacgactcactatagggcgaattggagctccaccgcggtggcggcccgcccgggcaggtacagggtttactcagtcctgttgtgtaataggaagcaggaaagggcaagggccctgggaacaacctcagccctgccacttactggtcatgtaaccccgagcaaaatgaccacctctgagccccagtctcctcttctgtaaatgggtataccaccacctactcataggctgcgtgatgagaaatggaataatgtcagggagtgcctggcatgacgctggcaccctggaggctccccaggaacggtggctactgccttcagaaaaactgaatctacttcaacttattttacgtaggtcaaagcatccagtcagtgagtaaatcaagctgcaagattcatttctacttaacttttaggaggagtcatcccatgatacctcgaataggtctcaaagcacatgcatgatataaatgattcactgatatgactctggtcagatgtatgttcttatgaaaaacctaaagttcaaggtttacctaacatacatgggggatctcatcttcaccttccaaagcttncnaatcaanggncagaaactttccggtcattcatcactatttttggggcattatttctggctttccgngggtaactggcttccctggcttggatngggggangtgaagaatagcccattaanccctattcattggattgggcctggccaagggaccttgccaaggcttaaaanaatcccaancccttaatggggggataatggttactnaaggctaaaaacacccccccancttgcattaattncctgggccggttttanaactaatgggatccccccggcctnaaggaattcntntt

SEQ ID NO: 3462 - DNA, 877 bp, Homo sapiens
  misc_feature 9, 10, 419, 420, 421, 422, 426, 428, 430, 432, 433, 435,436, 437, 438, 441, 442, 443, 450, 453, 543, 564, 587, 596,598, 605, 607, 623, 633, 661, 689, 692, 707, 722, 734, 743,750, 751, 758, 777, 784, 797, 799, 819, 824, 840, 854: n = A,T,C or G
  misc_feature 857, 860, 870, 874, 875: n = A,T,C or G
acgtcactnntgtcgcgcgtatacgactcactatagggcgaattggagctccaccgcggtggcggcccgaggtacacctgtaatggctaccccgctggctcagagctctgcctcaccgccctgccccggcacctgcaagccagtgtgccacttttttgatgttgtatgtttttaatattccctgagacagactccagagttctgagttttcttacttggggtgtcaaattatattccaggaaccaatttgggttttcctggcttctggttaaaaagctggacagattttgagttgtttgctcttagttctctcataaactgcactatttttagggcactattttgtagaacacaagatttttcaggaagtatattgaaaggcctgtacctgcccgggcggccgcccgggcaggtacttnnnntttntntntnntnnnnttnnnaaagggnggngctggttatttttaaaatcacacattgaatacacacaacaatcagatttcttaccaaacccccaattttttaataactggctctatttancaccaaaaactccagtctggngggaagtgccagacacaaacttnacttttggntnttgggcnangcaatccatcaagggnaattggttanggtcaaggacttgccctttttttccttncctttttatgggttttccaaacccaagnttnttaaagggtttaaantttttggcccaaaanccccttttaccnccctaaatnccaccannccttttngggaaaaaattcaaaaatnttttggnaaggaattgaaangnccgggcccgttttccaaaanggggntttttccattccaagnaaaccggtttttantgngtntgaaaacccngggnntg

SEQ ID NO: 3463 - DNA, 909 bp, Homo sapiens
  misc_feature 22, 23, 24, 43, 461, 520, 521, 550, 568, 574, 585, 605, 621,628, 642, 671, 673, 688, 689, 690, 697, 708, 709, 712, 716,730, 745, 752, 759, 765, 769, 781, 782, 792, 794, 806, 812,818, 823, 824, 842, 843, 852, 860, 864, 875, 877: n = A,T,C or G
  misc_feature 881, 892: n = A,T,C or G
tacgcactactatagggcgtannnctgactataggggcgaatnggagctccaccgcggtggcggcccgcccgggcaggtacatgcggtttctttgggcaggaacaccctcccttctaccatggtctgtaggaattgaaccttccgtgccgttttcaaatgctgtctgtgctcggaaaatacataatatcaagtcccttactgaaccccctacagattgtgttcataaggtgcttcactgctgttggtctacctggcctactgtttgtacctcggccgctctagaactagtggatcccccgggctgcaggaattcgatatcaagcttatcgataccggtcgacctcgagggggggccccggtacccactttttgttccctttaagtgaggggtaattgcgcgcttggcgtaatcatggtcatagctgttcctgtgtgaaattgttaatccgctcaacaattncacacaacataccagccgggagcattaaagtgtaaaagctggggtgcctaaatgaggtnngctaaacttaacattaattgcgttgcgcncactggccccttttcaantcgggnaaacctgtccntgcccagcttgcattaattnaattcggccaaacccnccggggngaaggcgggtttgncgtatttgggcgctttttccggtttcctngntaaatgaattggttnnncctcggncctttggtttnnggnaagngggtattaatcttnaattaaaaggggggnaaaacgnttttccnaaaaantaanggggataacccnngggaaaaaanantttatgcaaaanggccancaaaanggccnngaaccttaaaaaaggccnntttttggcntttttcanaagntcccccccctncngggnttaaaaaattnccctcaataaaaggggg

SEQ ID NO: 3464 - DNA, 867 bp, Homo sapiens
  misc_feature 5, 7, 9, 11, 13, 14, 15, 18, 549, 640, 687, 692, 730, 750,756, 761, 774, 776, 779, 823, 825, 827, 830, 839, 851, 852: n = A,T,C or G
acgtnantnantnnngcncgtatacgactactatagggcgaattggagctcccccgcggtggcggcccgcccgggcaggtactgtggcatgtcacactacaaggagcagaaagaacagctcctctaatatagaattgccagggtacactggcaggtcatcataagctgccctggctctatagagctccagcattcagactaggaaccaatgcacgcgtgcagccatgcttgtcagtaataaacttccctggacttatactaaaaccgtattttattgatatgtccagtatgttttaagaaaacagtctcaaactcgggtctatctaatattaccagccacttaacactatgtgataactttttatgctttcagccctggatattctttgaagaatattttctataaggagttctaaaatccttcgatcctcatattgatacaaaaaaattaaacacatgaacaaaatctctgtgcttcacacaaaggtgagatccaacctgtggccccatacagtcaccagtgtcatcaaataggccactacagtgtanggggatgcaggggcagcttcaagccatgaatgagacagcattacactctgtatacacagtgccctagaatatctgtgtgaaacaggtggangaaaaaaagatgactaatttgtgtgtgtgtgtgtgtgtgtgtgtganaaaanagagagagagagaaagaccgagaggaggtgaaaggttncatttggtggtgggcattgncttttnacttntttttcataggcntnaanaaaattccacccctaaagcccaattaaatggcttataacccaanananttntaagtggtntgcaaaaacccnntttccttggccgttt

SEQ ID NO: 3465 - DNA, 848 bp, Homo sapiens
  misc_feature 572, 591, 594, 628, 651, 662, 666, 669, 672, 684, 696, 707,715, 717, 721, 724, 726, 746, 747, 755, 757, 760, 761, 762,767, 771, 772, 774, 775, 777, 778, 782, 787, 794, 799, 804,814, 816, 817, 819, 823, 824, 825, 827, 828, 834, 838: n = A,T,C or G
  misc_feature 839, 840, 842, 846: n = A,T,C or G
acgtcactcactatagggcgaattggagctccccgcggtggcggcccgcccgggcaggtacatgagtcccttcaggaagtcatcagctttgttcagtttcctcagattagatagtaaaactgagattatgaactataaagatgtgtgtaatttatctgtcagtgaacttgactttaataaaagctttttgaaaaagaactctgggtggggtgcattggctcacacacatagtcccaactactgtggaggtcagggcaggaggatcactggagcccaagagtccaagatcagcctgggcaggatagcgagaccctgtctatagaaaatattaaaaatcagctaggcatggtggcttgcccttgcattccctgccacttgggaggctgaggtgggaggttcgcttgagcccaggagctcaaggctgcaatgggctgtgatcgaaccactgaattccaacctgggtgacagagtgaggccctgtctcaaaaagagaactctcgatgtcactggctttccatgtaagcagagcacatcatgtgagccccattcgtggatgtcagtcagcagaacanaatctttggacctggagcntgnttgtcctgtgctagaggttggaggggggctctgnctttctggtgggttcctgcagtncaggtccttanaagnttntgntccatccaccanctcttgcaggtnggggagatgancaaccttncnctgnccngntccttcctgactacgccaannatcctggnanctnnnagggncccnngnngnncctnggccngttttanaactnttggntccccgggcngnngnattnnntnncaagcntttnnntnccgncc

SEQ ID NO: 3466 - DNA, 881 bp, Homo sapiens
  misc_feature 445, 584, 593, 594, 618, 622, 647, 691, 738, 740, 758, 765,772, 776, 781, 783, 797, 841, 856, 860, 876, 880: n = A,T,C or G
acgcgatcgactcctatcgtgatacgactcctatagggcgaattggagctccaccgcggtggcggcccgaggtacagaacttaaacaccactatttgttgagatgaaaaaaagcatatataggaagccttcaaaatgaaatggtcaagggtgagtttacacagatagatagatttaggtctcttccttttgctttgtgaaagcatctagtgtttaggtgtcagagagggagatatccttacaaagcagagattatcattacaggtttacatttcttacaaagagtttcaaaataaacaggtaaatgccaaaaacatatattttggagacggattaattcactagttggtctattcaacttaacttgtttcctaatgagattaaattcatgcacaaataaccaaaccaaaaattaaaccaaaagaatactcaccagaaaggatgtnctttacaaagagcagatcccccaaaaatgtaagagttcactgaaaaggtgggagctcaaaccaagagaggacttatctcgcaagcataaaagcaacttgtcctcggcccgctctagaactagtggatcccccgggctgnaggaatttnnatatcaagcttatccgatacccgncganctcgagggggggccccgggacccanctttgttccctttagtgagggttaattgcgccgccttggccgtnaatcatggtccatagctggttccctgtgtgaaaattggttattccgntnacaatttccacacaacantaacgancccgggnagcnttaangngtaaaaccctgggntgcttaatgagtgagctaacctcacattaattggcgtttgcgcntcatggcccttttcnaatntgggaaaacctttttngccnt

SEQ ID NO: 3467 - DNA, 850 bp, Homo sapiens
  misc_feature 25, 30, 514, 516, 517, 518, 519, 520, 521, 523, 524, 525,526, 527, 528, 529, 530, 531, 532, 533, 660, 681, 729, 755,781, 806, 834, 840, 842: n = A,T,C or G
tacgtcgctcctatagggcgaatangactnactatagggcgaattggagctccaccgcggtggcggcccgaggtacgcgggatggcccaatattaaattgggccaatgaatgtcttctttttcagtgctaagggaaaaataattttgggaggaagaggtaaatacttaaatacttaaaacatttttcattaaaatgaacttttattgcatttttttctttttttagattcttataattatttttagagacaagctctcaccatgttgcccaggctggtctcgaactcctaagttcaagtgatccacccaccttggcctcccaaagtgctgggattacagtcctaagctactgctcctggccgagacatacatttttataatgttaagagttatttaaaaaaaaaatttaaggcacgtaatgaagggtggttggtattcattacataagtgtttattctctacaagcgtagagaaatgaacaccatcatgaaatgaaataaaagtaaaagtttgnannnnnnannnnnnnnnnnaagtcccggggaaagcgcttctgcgcagcgcctagcgacctggagtttggtgaccctgtgatggtctaaaggctggagattcaagatctgggtgccatcattttctgggtctggtgatgaccctttncaggttcatacagcttacatnttgcatcctaagccgttttttttttaaggctaaaattcacaaagcctnttttaatgaatcaggaggtctagatnccggatagtcctgcccggcggccgtnttaaactagggggtcccccggctgnaggaatcgattcaagccttttgttccgngccctngnggggggct

SEQ ID NO: 3468 - DNA, 838 bp, Homo sapiens
  misc_feature 557, 616, 641, 691, 749, 765, 796, 798, 815, 821: n = A,T,C or G
acggtatacgactcctatagggcgaattggagctccccgcggtggcggcccgcccgggcaggtacaacttttgatacagtcaatgtttctctccagtttccgcaaattgttaacttttatcatgaaacatgagatttgagggtgtttatcctttcttgcatagagcacatgaacaggtgtcaatgctgatcatagctagaagtagagtgggtcccatgtgtaactccggatggctaaagaaagtgttctacttacaagaggatgcttcatttgactaggattggctctcaacaaggcccgtgcaccttagaagaaaaaagtcacttctgtcacataagagctcaactgattcactcaacttcaaaagggcactgagaatgccatgctttgaaaaacatacaaaacagtaagaggagcagagaaaagcttgatgtgtttttctcaaatgacacaaaacaatttgtctctacaggtttaaggaaaatcaattaaaacataatctgtagatcaggagtggtagctacttaaataccaaaaaaggaaaataaccccaaatngaaaagacaaaaaaagacatatcaagggatgagaagagtagacctattcaaacctattncaacacagtctgcttaaaccagatnctcagcactgccatttgctggcagatctgagcaatgaccatggcaggtcnagtggaaagctattctggactttaacactggaaaatcagggtgtcctcggccgtctanactagtggatcccccnggctgcaggaatcatttcaagcttttcgatncngccacctcgaggggggnccgggnccactttggtccttaat

SEQ ID NO: 3469 - DNA, 839 bp, Homo sapiens
  misc_feature 134, 240, 356, 469, 473, 540, 551, 594, 602, 609, 632, 653,661, 666, 694, 703, 706, 712, 733, 735, 752, 759, 779, 785,786, 815, 819, 837, 839: n = A,T,C or G
tacggtatcgactactatagggcgaattggagctccccgcggtggcggcccgaggtacgtgtttcaagtcactgggctgacctgtaacacagcacaaccttcatagccactgtatgaagaagtagaagacccanactcttgctttatgttggtatcaaaagtcatttcagagtcaggctgatcactcccaagtaacccactgacttctttactccagctctctgtctgctgttgactcanaatgttacacttcattttctccattgctgatataatcatatctgcaacataaaagtgggcattttccttttctacatcaacaggcagcacaaatacctctggtgagaaggaattcnaagaaatggttcttctactgacttgaacagcaccttcatcagcagcagatgtcagatgggaaggctcaaaaaaagcactgtcagtctcaggatatggggaggtggccaaaatnccanggcttgtgggcagagacacccgatgggagtattctgggcggaccatgtgtcctgcccgggcggccgntctagaactantggaacccccgggctgcaggaattccatttcaagcttatcganacccgtcngacctcnagggggggccccggtacccaacntttggtccctttaatgagggntaaatgcnccctngcgtaatcatgggcatactggttcctgngtgaaaatngtnatccgntacaattccccacaacatacnanccgggaaccttaaatgnaaaagcntggggtgcctaatgaatganctactnnattaaatgcggtggctaatggccggtttnaacnggaaactggttgccactnan

SEQ ID NO: 3470 - DNA, 855 bp, Homo sapiens
  misc_feature 626, 635, 694, 776, 789, 797, 802, 807, 813, 821, 825, 844,854: n = A,T,C or G
tagctatcgactactatagggcgaattggagctccccgcggtggcggcccgcccgggcaggtactgcctgaaagggctgtagggacttacctgtgtcacccagtgtcagcacataggggctgagtgatgctggaaacatagaatagagagcttcctctggactgctctctggctgcctgggacccaggcagacctcctgtttgatctctgctggggttgctgggagcaggaaacacctacctcgggggctttctcttgctaaggggaaggaagtagaggttctgaaacctacgaaagtctcctgcccctgggtagaggattacaagacaccagggctatagaagccactggtgctgttacctggtaggggacaggcctccctgcagttgctggtgatgtgggcggaccaggcctatagcttctgctgagtatggagtggacaacaggaaggcccttatgggctgcattgacactgtacctcggccgctctagaactagtggatcccccgggctgcaggaattcgatatcaagcttatcgataccgtccgacctcgagggggggcccggtacccagctttttgttccctttagtgagggttaattgcgcccttggcgtaatcatggncatagctgnttcctgggtgaaattggtattccctcacaaattccacacacatacgagccgggaccatnaaagtgtaaagcctgggggtgcctaatgaagtgagctaacctacatttaatttgcgttgcgcttacttgcccgcttttccantcgggaaaccttncctgccancttcnttaantgaatncgccaacncccngggagaggcggtttgcttnttgggccctnt

SEQ ID NO: 3471 - DNA, 864 bp, Homo sapiens
  misc_feature 653, 658, 678, 693, 703, 714, 722, 728, 732, 734, 746, 747,749, 756, 763, 771, 782, 786, 789, 823, 825, 836, 837, 844,856, 857, 863: n = A,T,C or G
agctatcgactactatagggcgaattggagctccaccgcggtggcggccgaggtacttttttttttttttttttgatacagcgaatcacttgaacccaggaggtggaggttgcagtgagccaagatcgcaccattgcactccagcctggaccacagagcaagactccatttcaaaaaaaaaaaaaataggaaattagatcatggccttctagaaataggcaatatgccatttcctctgtttatagctctctactggcttcttccttacacttagaacaaaatcatatttatgaccacaaggccatacaggatctgtctcagtggttctcagtgggatgtacctgcccgggcggccgctctagaactagtggatcccccgggctgcaggaattcgatatcaagcttatcgataccgtcgacctcgagggggggcccggtacccagcttttgttccctttagtgagggttaattgcgcgcttggcgtaatcatggtcatagctgtttcctgtgtgaaattgttatccgctcacaattccacacaacatacgagccgggagcataaagtgtaaagcctggggtgcctaatgagtgagctaactcacattaattgcgttgcgctcactggccgctttccagtcgggaaacctgtcgngccancctgcatttaatgaatcggncaacgcccggggganaggcgggttngcgtattgggngctttttncgcttncctngnttacttgacttnntngcgcttngggcggntccggctnggggcgagcgntttnaanttacctcaaaggccgggaaataccggttattcananaattaaggggnntaccccnggaaagaacatnntgaccnt

SEQ ID NO: 3472 - DNA, 850 bp, Homo sapiens
  misc_feature 160, 628, 677, 687, 694, 707, 714, 737, 751, 758, 763, 764,765, 771, 773, 774, 775, 776, 777, 778, 779, 781, 782, 784,788, 810, 813, 821, 843: n = A,T,C or G
tatacgactcactatagggcgaattggagctccccgcggtggcggcccgaggtacgcggggatgggtgtgagtgtgctctgccatgagagattgtcctgttcagggctggttcccacctcactccgtgagctgctgggatgggctctggccacccatggncatgaactggaaataagcaggtatggacaaggttctgacccttattattggaactcaaatccagatggagtttgttgggacttcacatcattggaaggtgaatagaaaagtatgtcttaagaatttcaccatgttttggaagaattgcagcaagaaaaaaagaactcctttgtttccaccccatttcttttaaggaaaacctggaatatctgagggtgcaagctgagaaaagtctgcttatctgttccctactctggcaatcaaaaaggatccaagtctactgttctcttctcctggcactcttaacttgccacattgcaaaccttttatggcaaaagtaatggtcaagctatcctaacaaggaccagcccttattaaataattcactgtggttgggaaatggtgaggaagccatcttctttttggcttcttttctctgaaaaataaaaattttggcctaaattttgnattaaaggccattttgggctttacttttatttacattcctctacttttntttaaatagnctcgaancctaatgacagtnccttgtnttggtcttgcaaaacaaagaatnaatttgttaaattnaaccttntaaannnaaaaantnnnnnnnannanggtncttgccccgggcggccgtttanacnagtggaanccccggcctggaggaatttaanttaacct

SEQ ID NO: 3473 - DNA, 842 bp, Homo sapiens
  misc_feature 3, 568, 616, 646, 650, 674, 689, 697, 707, 727, 731, 742,746, 750, 751, 757, 759, 778, 785, 793, 796, 809, 817, 828,836: n = A,T,C or G
agntatcgactactatagggcgaattggagctccccgcggtggcggccgggggccattgagactgccatggaagacttgaaaggtcacgtagctgagacttctggagagaccattcaaggcttctggctcttgacaaagatagaccactggaacaatgagaaggagagaatgctactggtcacagacaagactctcttgatctgcaaatacgacttcatcatgctgagttgtgtgcagctgcagcggattcctctgagcgctgtctatcgcatctgcctgggcaagttcaccttccctgggatgtccctggacaagagacaaggagaaggccttaggatctactgggggagtccggaggagcagtctcttctgtcccgctggaacccatggtccactgaagttccttatgctactttcactgagcatcctatgaaatacaccagtgagaaattccttgaaatttgcaagttggctgggttcatgtctaaacttgttccagctatccagaatgcccacaagaattcaactggatctggaagaggaaagaaactgatgggtgttaactgnacccatttttgattgagacctacacagggcttgatgtcatttattggnaacccgcaaccaacttggctttttccttgnccgngggagtattgggttttggagagtnttttggtcccttggncgtcttanaactagtggntcccccggctggaggaattngatntcaaccttttngatnccgnnacctcnanggggggggcccggtccccnctttgtnccctttangangggtaaatggccncttggcgnaaacatggcanacctgttnctgggg

SEQ ID NO: 3474 - DNA, 862 bp, Homo sapiens
  misc_feature 23, 45, 625, 629, 651, 678, 723, 730, 732, 755, 770, 771,782, 784, 806, 837, 839, 854, 860: n = A,T,C or G
acgtcactactatagggcgaatnggagctccccgcggtggcggcncgcccgggcaggtacgcggggggataggcaattaatttcatggagagtaggaggtgtgggttcagctgctgcttttttttttttcagtgaggcattatctgaatgatgctcattctctcttgagtctggacttcgtgcaacaagcagcaactggatattattttaaaataagcataagccacccaaagatactgatctgggtccttcttttggaagaagagttgattgagaagtgcctcttggttaaggattaaccacagggaaaaatccagcagaaacagaagaactgtgggtttcttaccccagccctcaaggaagctatgccgtgaaaggggtacctcggccgctctagaactaagtggatcccccgggctgcaggaattcgatatcaagcttatcgataccgtcgacctcgagggggggcccggtacccagcttttgttccctttagtgagggttaattgcgcgcttggcgtaatcatggtcatagctgtttcctgtgtgaaattgttatccgctcacaattccacacaacatacgagccgggagcataaaagtgtaaagcctggggtgcctaatnagtnagctaactcacattaattgcgntgcgctcactgccccgctttccagtcnggaaaccctgtcgggccagctgcattaatgaatcggcccaccgcnccggganangcggtttgcgtattggggcgctnttccctttcttgctnntggactcgctncnctcggcctttcggcttgcggcnaccggtttaacttcactcaaaggcggttatncngtttttcccaaaatnaagggnat

SEQ ID NO: 3475 - DNA, 868 bp, Homo sapiens
  misc_feature 3, 5, 6, 7, 8, 9, 10, 11, 13, 634, 638, 645, 672, 703, 720,721, 730, 732, 761, 774, 816, 820, 827, 829, 837, 838, 841,842, 849, 854, 855, 859, 861: n = A,T,C or G
agngnnnnnnngncgcgcgtatacgactactatagggcgaattggagctccccgcggtggcggccgcccgggcaggtacctggcctattcctggctttgaaaaaatggttttcggacactaaatcttttattataattcaaacacattatagttgcttctgggagacttttgccttttgccctgcttacaaactagcatcatattctaaaatctcaggaactaaaattactcattgtaatttctctaaaattcaaagcctattggaatccctgctcttgttatgtaaaatataaatattcgagacatttcacaccacattttcattattcagcattcccatcaagtgctggaaggccagttcgctattttataatgaacgtcctgggtttgttctgaaagggcagccttgtacctcggccgctctagaactagtggatcccccgggctgcaggaattcgatatcaagcttatcgataccgtcgacctcgagggggggcccggtacccagcttttgttccctttagtgagggttaattgcgcgcttggcgtaatcatggtcatagctggttcctgtgtgaaaatggtatcccctcacaatttcccacaacataccaacccggagcataaaatgtnaagnctggggngcctaatgagggggctaactcacattnattggcgttgggctcactggccgcttttcantcggggaaacctggtcnngccaactgnanttaatggaatcggccaacccccggggaanaggcggttttgcntattggggcgctttttccgctttcttggttaaattaaatcgntggncttcggncnttcggttnnggnnaaccggnttaanntacntnaaagggg

SEQ ID NO: 3476 - DNA, 484 bp, Homo sapiens
  misc_feature 5, 10, 108, 111: n = A,T,C or G
ctatngggcngattggagctccccgcggtggcggccgcccgggcaggtacgcggggaatgcaagaatcaagtgtgtaatctctgtggatttaaccctacaccacattngantgagattcaagaatggctttgtttaaattgccaaacccagagagcaatatcaggacagcttggagacatacgcaaaatgccacctgcaccatcaggacccaaagcatctcctatgcctgttcctacagaatcatcatctcagaaaacagcagtgcctccccaagtaaaattagtgaaaaagcaagaacaagaagtaaaaacggaagctgaaaaagtcattctggaaaaagtaaaggaaacactatcaatggaaaaaattcctcctatggtaaccacagatcaaaaacaagaagagagtaaactagagaaagacaaagcttcagctcttcaagaaaaaaagccactccctgaagaaaaaaaactaatccctgaa

SEQ ID NO: 3477 - DNA, 483 bp, Homo sapiens
atacgactactatagggcgaattggagctccccgcggtggcggccgaggtaccagagtccatgttcttaaaccattaatctacgatgcctctcaagtaaatagtcaataagtggtaggtgtgaggctgtaggaaaaagaggagacgaagggacaggaaagcagtcctcattggaaaactaggtttcgactggcactgttggactgggctgcagtttaggtcctcccactgctgagttccctcacttcatctcctggtgcttctggtttcccatttataaaatgcaagggaaggattctatttatgtcacaaggtgcatctaaggagtaaaaagtcacgtcatgtttgaccaatgttagtcagatcaagatttattttagataaattatctgttaagttttaattaccatgactcagattttatgttcactttttgggcaaagctaaataaaatatataaatatataaaatctgggctccaacc

SEQ ID NO: 3478 - DNA, 485 bp, Homo sapiens
  misc_feature 292, 401, 481, 485: n = A,T,C or G
taatacactactatagggcgaattggagctccccgcggtggcggccgaggtacctttctttccaggccatggcaaaaaaaatccaattatgtccgtcttgagtctgtggtcttgcttcttatgtagtatttcctttgtgagctgaagattaatgcatggattcacctccttcagcacatttcatttcaattgtgaagaaaagattccaggcactgaatgtaaaattgaacatgacattttgacattccttcttctgagagctgggttggtcttaattgctgtgaggctctanacaccgaccatacagggcgtggggctgctcctggacatgaacatcctccgaagttctccccagtccactttacccgctctgggctcacctctgaatgtgtctccccccncgtacctgcccgggcggccgctctaaaactagtggatcccccgggctgcaggaattcgatatcaagcttatcgataccgncgan

SEQ ID NO: 3479 - DNA, 467 bp, Homo sapiens
  misc_feature 452: n = A,T,C or G
tactatagggcgaattggagctccccgcggtggcggccgaggtactcagaggtttcctggctccagccattgctctcgacctcacagctacccattgggccaagccacctccagctctcacctgacttgctgcagtggtctcccaagaggtctctccactcagtccctgccaccttcagcctgttctcagtggagggggccagagtgaccctgttaaaacatgagacctttcacgtccaacctcagctgagacttccccatggttcctatcacactcagggtcaaagtgagagtccctaagatgaaacacaagtagggagaatgcccttctcagctggactgggacagctccagggtatccctattgtccttgtacctgcccgggcggccgctctagaactagtggatcccccgggctgcaaggaattcgatatcaagcttatcgataccgncgacctcgagggggg

SEQ ID NO: 3480 - DNA, 461 bp, Homo sapiens
  misc_feature 177, 178, 188, 206, 326, 374, 398, 408, 416, 440, 442, 446,448, 449, 450, 459: n = A,T,C or G
ggcgaattggagctccaccgcggtggcggccgcccgggcaggtactgttctagctagggctttcaggtacgataagttccattggaaggataattagagggaaaaaatggttagaatttatagaaaagtctttatttgaacagctgtcatagaaacaaggagtagacagtcaagttnntactaaaggnagaacttaaatcaataangaaattataagaaggaagattttacctaaatttttaaacaattttttccttttggccaggcaccatggctcatgcctataatcccagcaatttagggggctgaaacaggtggattacttnagtccaggagtttgagaccagcctgggcaacatggtgaaaccctgtgnctactaaaaccacaaaaattaagncaggcatggnggcatgtncctgcatttccagcctctttccgnancctnannnctgaaagangg

SEQ ID NO: 3481 - DNA, 460 bp, Homo sapiens
  misc_feature 198, 302, 328: n = A,T,C or G
ggctaattggagctccaccgcggtggcggccgaggtactgtgtcatgctttttacattgagctatgtgccattgggggtggggggtaaaagctattcttatttttaaactcttcaacattttttaaagtcttcaacatgatctttatcatgttgtgatgtgaccgcctagatttccattttgaggctctcatataatntacttgaccatgtccctactggttgacaggagaccatcatggttcctatgatttctcaaagtgtgacccccaacaaacacctgtcctagaaacacctgtcccanaaacacccagtacctgcccgggcggncgctctagaactagtggatcccccgggctgcaggaattcgatatcaagcttatcgataccgtcgacctcgagggggggcccggtacccagcttttgttcccttttagtgagggttaattgcgcgcttggcgt

SEQ ID NO: 3482 - DNA, 487 bp, Homo sapiens
  misc_feature 19, 20, 354: n = A,T,C or G
taatcactactatagggcnnattggagctccccgcggtggcggccgcccgggcaggtacgcggggagatgtagtgaatctctgcctgtgtggacaaagagacacattcagaggtgagcccagagcgggtaaagtggactggggagaacttcggaggatgttcatgtccaggagcagccccacgccctgtatggtcggtgtctagagcctcacagcaactaagaccaacccagctctcagaagaaggaatgtcaaaatgtcatgttcaattttacattcagtgcctggaatcttttcttcacaattgaaatgaaatgtgctgaaggaggtgaatccatgcattaatcttcagctnacaaaggaaatactacataagaagcaagaccacagactcaagacggacataattggattttttttgccatggcctggaaagaaaggtacctcggccgctctagaactagtggatcccccgggctgcaggaatt

SEQ ID NO: 3483 - DNA, 832 bp, Homo sapiens
  misc_feature 2, 8, 17, 18, 19, 20, 21, 25, 28, 35, 38, 39, 41, 49, 51,53, 55, 57, 58, 60, 63, 64, 71, 72, 82, 85, 89, 90, 92,94, 97, 98, 105, 109, 112, 113, 115, 118, 122, 123, 124,131, 155, 162, 308, 310, 353, 367, 381, 390, 396, 420, 443: n = A,T,C or G
  misc_feature 450, 453, 460, 463, 468, 469, 472, 474, 476, 479, 493, 501,505, 506, 531, 543, 552, 563, 564, 565, 567, 569, 579, 583,585, 586, 587, 589, 592, 594, 597, 599, 608, 610, 611, 646,649, 666, 670, 672, 675, 703, 707, 710, 713, 723, 731: n = A,T,C or G
  misc_feature 736, 737, 739, 747, 758, 772, 794, 803, 806, 819, 820, 832: n = A,T,C or G
antctccncacacattnnnnnattnctnttatttngtnntnattccctncncncncnncncanntccctcnngtatccccancanattnnancnatnnctctctnctantanncnttngtannnccgtatncgatcactatagggcgaattgganctccacncgcggtggcggccgaggtactgctgagagcacaaaatcatcaatcaaaccgcggagaatgcagcaggctgctcctacagatcctgacttaccaccaggttatgtgcagagtctgattagacgagttgtaaataatgtaaacacttngnggatgaaaataatgctcatacctataaaatactgttggaaagnatggatactcagtnccttttccggtcanataattcanctttcntgccaggaatggttactaccacgntaaggttggaaatttaatggggnattccgnggncattgtncantgggnnttntntntcntggccaaaacctgnaattattngggnntggccttggaggaaaaaaggggttnattccaaaattntttgtttcnttggaacttgnnnancncttgggcccnccgngnnngnggncnccngntccccgggngnnccaaggggttaacccaccaaccttaaggcctttgnaantaaaaaggaaacaaccntggntnttnggcgcccaattaaaatgggttgcttaantttntanttntgggggaatnccaaggcncaaanntntttaattnaaaaggtgctncccaaccaattgtngttcaattggcccaaccaattnaagtctttnttnaccaaccaaaggnntttgggcgaaan

SEQ ID NO: 3484 - DNA, 489 bp, Homo sapiens
  misc_feature 21, 25, 32, 106, 107, 112, 186, 391, 435, 477, 489: n = A,T,C or G
gggggggtggtttggttgcantttngtttatncggcgaattggttctctccgcggtggcggccgcccgggcaggtaccgagcttcagtagcagtctaacaggttcnngctgnctcttccaaaaagcggggacttatcctcatggcttcaaggtcacctgcagtccttagctgtcccgatagacttntctctccaaaagtccctatttttagctgttttcacaggggcacccagaggcaaatattatacagaaactgccacatgtagactgtgataacccacacctgctggacgggaagttaacctttgtataaagaagagggttggctgagtcaatttatgacaagaacaatttggaaaaggtaatgctggaactactcaagtcctttctnaagcatcctccagcatttcagaagcacctaccaattaatatgtnaattacaaaccattctcacctgttcaggaaagggcccctgangtcttcttccan

SEQ ID NO: 3485 - DNA, 498 bp, Homo sapiens
  misc_feature 3, 20, 21, 142, 301, 455, 464, 484: n = A,T,C or G
cgnaacactactatagggcnnattggagctccccgcggtggcggccgaggtacagtgtggcctaaaacagaagaatgtttaactgcatgaaggcagggtgctttgtattgctgggcttggtgtatatttctttgctatctantttaatatattgagctttacatctgtgccagccttgcatgtccatatacctttggcaggcatttctagtcaggtggcatggggcaaggggtgtgctacgttttaagtccctcatttctccagcctgtccaggtagtgtctacgtctccaactcactcangaaggcaggagacttccagattcactccactggtatcaagagttaggttctggtgagagagctggcagaagcttcaaaggaccttgcgtcttagcccctctttttttcctgtccttaacagcaagttgttgcctctaattttcagaaaatcgcngcacatttncaggaagacctgaaatgccngtgggactgcttca

SEQ ID NO: 3486 - DNA, 461 bp, Homo sapiens
  misc_feature 157, 211, 412, 439: n = A,T,C or G
attggagctccccgcggtggcggccgaggtgggagaatcacctgagcttgggaacgttgaggtgcagtgagctgagatcgcactgctgcattccagccagggtgatgggagtgagaccgtgtcttaaacaaataataataatttgggggtgatgtanacagaaataaggacagaggtatgaaaagggaataattatttagcattttactangccagagatttgggcagtcccaaaaagcagcttttctaatctccctctcctttcccaaaaaactttaatcaagatcctttagtatcctatcatctttgggttatttacatactactttttggaggggggattgtggaaagctatccgagatctttgaaagcattgatgattagcaagatgattattcctgtaagaagcccntaagaggagaaatgcaagtggtaagtnaacactggcttcttaaatttgg

SEQ ID NO: 3487 - DNA, 913 bp, Homo sapiens
  misc_feature 384, 391, 424, 433, 443, 470, 500, 541, 571, 596, 604, 613,616, 621, 625, 626, 630, 639, 654, 656, 659, 661, 669, 673,681, 683, 685, 687, 689, 691, 696, 698, 700, 702, 703, 707,709, 710, 715, 722, 725, 730, 737, 748, 754, 767, 773: n = A,T,C or G
  misc_feature 774, 779, 793, 798, 799, 826, 847, 851, 857, 860, 865, 868,870, 875, 880, 882, 889, 891, 906: n = A,T,C or G
cgaattggagctccaccgcggtggcggccgaggtactgacttgcccagagcctcaggtccagatgaaggggaagtgtatttgtcctgttcattgcatctctgagacctaatgctacagtcctgccttgacctgtgaagaggaagtcaaaggtgtaaacagtctcccactggttcccttgccatcccatcccttgttggccagccctgactgtggccagttctgcatccctacccgcgtacctgcccgggcggccgctctagaactagtggatcccccgggctgcaggaattcgatatcaagcttatcgataccgtcgacctcgagggggggcccggtacccagcttttgttccctttagtgagggttaattgcgccgcttgggngtaaatnatggtcatagcttgtttcctgtgtgaaaattgntattcccgntcaacaattnccacacaaacatacgagcccgggagcnataaagtgtaaaagcctggggtgccttaangagtgaagctaacttcacattaaattcagttgcgctcactngccgcttttccagtcggggaaacctgtctngcccagctgcaattaaatgaaatcngtcaaacncccggggangangctgntatnntatntggggcgcnttttacgctttcttngnttncntgactttntgtnctcgggangntncngntnctganancngnnatanannttacntaaaagnggnttatncgggtanttccacataantcaggngataaacccaganaagacnntgttnatacaaagggccanaaaanngcctgaaaccgaaaaagggcccggttntagggcattttcattagggcntcgngccccnggncagcnttnanaaaanttacntnttaagtnanaggtggcgaaatccncatggct

SEQ ID NO: 3488 - DNA, 921 bp, Homo sapiens
  misc_feature 170, 258, 310, 396, 398, 402, 410, 422, 425, 427, 432, 442,447, 465, 472, 486, 492, 503, 511, 529, 542, 543, 548, 554,555, 562, 566, 570, 577, 587, 588, 595, 602, 607, 608, 637,639, 642, 650, 658, 661, 665, 671, 681, 685, 694, 695: n = A,T,C or G
  misc_feature 711, 716, 717, 723, 730, 731, 732, 735, 743, 744, 763, 765,771, 774, 776, 779, 781, 784, 785, 789, 800, 801, 806, 814,815, 816, 819, 822, 826, 827, 828, 835, 836, 850, 851, 852,853, 856, 861, 862, 864, 867, 868, 873, 877, 879, 880: n = A,T,C or G
  misc_feature 884, 888, 900, 905, 906, 913, 915, 916, 920: n = A,T,C or G
ggagctccacccgcggtggcggccgcccgggcaggtacgcggggctctcttctactgtcccagctgtctctgttttttaggcaactttctgtggctttttcaagagtggagatttggctggagcaggattaggaagcctcctgctacacgctttccctgagaaaaacctnctctctggaaggggcctgaggtgaaaatgattcagaaggcagctgaggagttctggaaagagccccaaagaccaggctctgaggcctncctgggccacttactaactaaatgggagaagattacttgagaaaaagccttnacagtgcccaccattgataccccattgtgaaattaccatttaggaggtaagccgtcccccctggagtgggatcaaaagacaaccanangccnaacggggnaaaaatgtttgngcntntgccncggcttgatnattgngcttgctgaataaagggntgattcntttattgtaaaaanggcttngaaccccaaangcctattncaccaagcaagccaaggncatttagaagccnnctccnttcttnnttggaangctngacnggaaaangggaaccccnnaaaccanagttatnctccnngattccctccttccccaaaataaatttgntnccntgacatgntgtaaccnaancacntatggnctcccggcangtgncacttattnnataaatattttttcangtatnnaacatntgatatnnnatncccggtcnngggtattggttataattantncgcgtnatngntcnanatnnaccntcctttgtggnntacgngtgagatnnntcntcncgtnnnatgaaannggcatgggactttnnnnatnattanncntanntcgtnaatnanntggntgcnacatatggggangtgannttgctanannatcnt

SEQ ID NO: 3489 - DNA, 921 bp, Homo sapiens
  misc_feature 386, 395, 401, 406, 408, 411, 422, 437, 480, 518, 523, 524,533, 540, 546, 550, 558, 565, 571, 591, 595, 599, 623, 628,630, 631, 641, 682, 688, 690, 697, 703, 708, 710, 714, 723,728, 729, 732, 734, 735, 739, 740, 741, 746, 747, 749: n = A,T,C or G
  misc_feature 755, 756, 757, 767, 774, 786, 787, 795, 798, 800, 803, 808,817, 829, 837, 842, 849, 862, 869, 875, 876, 883, 895, 896,899, 900, 903, 904, 905, 906, 907, 909, 914: n = A,T,C or G
tactatagggcgaattggagctccccgcggtggcggcccgaggtactgtttcactttcatcaccagtaggtaattattactattatataagtttctaaaaggtttgtttttgcatattcaaataaatatgaatttccatcttcttttactcaaatggtggcatattatacacacagttttttttgagacagagttttgttcttgttgcccaggctggagtgcagtggcgcaatctcggctcaccacaacctccatctcccgagttcaagcgattctcctgcctcagcctcccgagtagctgggattacaggcatggtgccaccacgcctggctaattttgtatttttagtagggaccaagtttccctatgttggtcaaggctgggncttgaactncccggnctcangngancaggccacctnggcctaccaaagtgntaagattacaggcgtgagccacccgtgcctgggccacactgtntaatactttggcttttttgtggcagcaagtgtaccctngggannattctcttntaatatntaaggngggnttgtggtnttttttnaaaaanatatgggataaattgtaatntgtnatangggaaagttgacatttatacccanccccntnncaggagaaanatttggggggcgatttccatgattccgggaccgagggggancatgcncnggcgggncggtcnaaaantntgangggttcccnggggnncgngnnattnnngattnngngttatnnntgcccgccgncctttgnggggggggcccnngacccatnttntngtntcctntataggtgnggggttatttgncacccttngccgngataacngggcaaatgatgnatccggngggganngatgtanttccgttgccanngtnnccnnnnntntgagngccgggg

SEQ ID NO: 3490 - DNA, 948 bp, Homo sapiens
  misc_feature 384, 423, 429, 441, 458, 465, 468, 469, 499, 502, 505, 507,517, 531, 543, 568, 577, 578, 579, 596, 600, 611, 617, 618,622, 634, 643, 648, 663, 665, 670, 671, 672, 674, 675, 676,678, 704, 705, 706, 711, 712, 721, 722, 726, 731, 738: n = A,T,C or G
  misc_feature 740, 743, 747, 754, 758, 768, 778, 780, 781, 790, 792, 793,800, 811, 812, 822, 824, 825, 827, 830, 841, 846, 854, 866,873, 878, 885, 888, 890, 895, 899, 900, 901, 902, 909, 911,914, 915, 918, 919, 920, 927, 937, 939, 944, 948: n = A,T,C or G
cgatcgactcactatagggcgaattggagctccccgcggtggcggccgccgggcaggtactttgaatgcttcctcctggaagtgagctactcacattttatgagtcaaagcaagtctcttagccccacttcactttaatagggcaggtatcactagccctaatgaccacttcaaggggtagaatatgaggctgttaatattaaggaaacaactctgaagtctaacattattgaaaccagcattctggtaaacacagacaaactatcaaagacaataataataggatcataaaagtttcagaaagcacagacacggctgaaacactaacacccaactggcaatggaatcattccttgccctgccttcctgaagaagccctttctnattatgtaagggcataccactggcttactcccaaacacnttatanagtgctggctgntctcatgaccctggctncctttgnganngatgtcccttttatactaattctttaactnccntcntngggaatgggntttcttcatcaaantgggctttaaangttttttaaggccaaaactgtgganaatccctcnnnatggtaccctcgggccngttntagaaactaantggganncccncggggcttgcanggaatttcnatatncaaagctttatttcntnccccnnngnnncnccaagggggggggcccggggcccccnnnttttnnttccctttnntggnggggnttaaatncnccncctntggcggnaatnaagggaaatnacaggttccntnngggaaaaangnnatccccntttcaaatttnncccacattcnanncnggnggctaataagntaaanccttgggngcctataatatnagctaanctacntttaatnggntnggtgntacnnnnccccttntnaanntgnnnaaacccngggcccctananttttnattn

SEQ ID NO: 3491 - DNA, 900 bp, Homo sapiens
  misc_feature 3, 4, 5, 6, 7, 9, 10, 11, 13, 54, 336, 425, 486, 520, 580,633, 668, 674, 681, 695, 701, 705, 713, 726, 729, 739, 746,762, 771, 782, 784, 801, 802, 825, 841, 849, 866, 880, 895: n = A,T,C or G
cgnnnnntnnncnactactatagggcgaattggagctccaccgcggtggcggcncgaggtacatcaggcagtcactgctcccgtcataccgggcacatttcacccacaggcctgtgtaaacagtcaggttcttctcgtttctgttgaatgtgatcaatcgtaattttctccagttgggaagcagagtccctgcaaagaggcctgctactgaggcgattccacacaggaaggaaaggactgtggctgcgtggacatcccgacagcccatggcaggcaagcttgtggagtacctgcccgggcggccgctctagaactagtggatcccccgggctgcangaattcgatatcaagcttatcgataccgtcgacctcgagggggggcccggtacccagcttttgtttcctttagtgaggggtaattgccncgcttggcgtaatcatggtcatagctgtttcctgtgtgaaaatgttatccgctcacaattncacacaacatacgagcccggagcattaaagtgtnaaacctggggtgcctaatgaagtgagcctacctcacattaaattgcgttgcgctcactgnccgcttttcaatcgggaaacctgtctgccagctgcattaatgaatcggccacnccccggggagaggcgggtttgcgtattgggcgctntttccntttcttngttaattaacttgnttgctncggncattcggntggggcagccggnttnaacttaactnaaagggnggtaataccggttttncaaaaaatnaggggataacncnggaaaaaaacatttgtnncaaaaaggccatccaaaaggccngaaccctaaaaagggncccgttgnttgcgtttttcaaaagncttcccccccctgncgaggcttaaaaaantgcct

SEQ ID NO: 3492 - DNA, 873 bp, Homo sapiens
  misc_feature 3, 9, 63, 66, 70, 73, 75, 487, 581, 601, 639, 642, 664, 701,703, 705, 717, 739, 743, 751, 756, 808, 809, 827, 828, 845,849, 856, 857, 858, 873: n = A,T,C or G
ggnccgacnccgtaatacgactactatagggcgaattggagctccaccgcggtggcggccgangtnccangtncnagcctgggccttaagaggtcttgcttgcttctgttccctttggaactctgttactgctgtgagcacgtgaacaggctcacttggtggaaggggagcagctaaatggagcagagccaagtcattttacttgagtctggccctctcagaccagccgtcagccagctgaccaaaaatgtgttaagacagaacagccaacatcagcagagccacctacctaacttgtacctgcccgggcggccgctctagaactagtggatcccccgggctgcaggaattcgatatcaagcttatcgataccgtcgacctcgagggggggcccggtacccagcttttgttccctttagtgagggttaattgcgcgcttggcgtaatcatggtcatagctgtttcctgtgtgaaattgttatcccgnttacaattccacacaacataccaacccgggagcataaagtgtaaagcctggggtgcctaatgaagtgaactaacctcacattaatttgcgttgngctcactgcccgttttcaantcggggaaacctgtcgtgccagctgcattaatgaaatnggnccaaccccccggggaagaagcngtttgcgtaattgggcgctttttccgctttccttggntnantgaattccttgngcctcgggccgttccggcttgngggnaagcggtnttaanttcacttaaaaggcgggaaataccggttattcaaaagaaataaggggatacnnaagaaaaaaaaattttanncaaaaggccagcaaaanggcnagaaccnnnaaaagggcgggtttn

SEQ ID NO: 3493 - DNA, 636 bp, Homo sapiens
  misc_feature 3, 4, 5, 7, 10, 14, 461, 481, 486, 615, 620: n = A,T,C or G
agnnngncgncgtnatcgactcctatagggcgaattggagctccaccgcggtggcggccgaggtactagagaagacaccaggatggccaggagacaatggcagcattagaaggccctagttgaacagaatatataatttcatttaacagctgccgaagctcattacgctggcatgaatgattctttacaaccacaaaaagaaagaaaaacagacagcagcctatttacagatgcagtgagagctgtcccttgctttccagctttcaagggaagcaaaacatgtctgcataataactttaacctataattcaacgctatttaaaagtgtagcttgccataagcttacagggatatttttatactacattttcaaaacctccacaatctctcagcagtttctgactggattgcttccaggcttgctgctacctgctgcggggccaatcaaggcagcaatctanccagcacaggcattcttttntggcncccacccttcttggcactcaaacattttctatccaaacatactttgcatatcttcatgttttcaacctgaggaaagtatagctcaaatgcctttcacaacttttttagcttaaatggtctttcttttgngaacntcaacaaccttatttt

SEQ ID NO: 3494 - DNA, 628 bp, Homo sapiens
  misc_feature 2, 105, 106, 107, 108, 177, 180, 256, 278, 289, 326, 388,391, 458, 469, 479, 497, 501, 517, 538, 541, 552, 560, 564,579, 582, 587, 593, 599, 609, 610, 614, 615: n = A,T,C or G
gnctactatagggcgaattggagctccaccgcggtggcggccgcccgggcaggtaccagccagttttgagatatacctggtttgctttaatgttattaaattgtnnnnggtgagttttgcaaatggacaattgaactttgttctgccaaattcttttttattgcatttaaacttcanggntttttatttccggcttattatgaatggattagtcattttgtgaatataactcttcattgagtttagggagaaatangacgttagatccgaagatgctntttgtttaatnaccagaatggacaaaattatacttcatttactatcanggaggcatggggagaatagaggcctaggggtagccgtcttgtggctcttactggttttgtgnatntggtttttttttttttttgagagggcttcccattatgttgcccgtgctggaccccaactgctgaatnactggctctanagatcttctngcctcagtctcccaaggnaccnggggactatagacgcnaggagacccattttggcattnaanctgtgaacgtngctaaaanaaanatgcatgttccaacnatnccccntgtaanaccccngaacaaaccnntttnnccgccccccccct

SEQ ID NO: 3495 - DNA, 653 bp, Homo sapiens
  misc_feature 5, 6, 8, 13, 14, 37, 39, 418, 431, 432, 436, 440, 444, 450,456, 457, 459, 462, 463, 468, 472, 474, 479, 480, 484, 485,488, 490, 496, 499, 503, 507, 509, 510, 511, 512, 520, 521,529, 531, 532, 546, 548, 558, 575, 577, 579, 581, 594: n = A,T,C or G
  misc_feature 598, 599, 603, 604, 605, 612, 617, 618, 619, 623, 624, 625,626, 629, 633, 634, 642, 645, 646, 652: n = A,T,C or G
aatgnntnacgcnntacgactcactatagggcgaatngnagctccaccgcggtggcggccgcccgggcaggtacactcagtgccttacacgtgttgtttcatttcatcttcacaatagccttaggagataggtgccatcatttctactttatatatgaggaaactgatgtgaggggacaatgtgtgcccaggccacccgatcagtgattggtagggctagaactaaacccaaggcctgtgactccaaatcccaccttttcacaaaccagagtgcctcgacagccaagtcttcaatactaatttactcagggtgtttgtaataaaatatgagggtaagagaggtcaatgttttttttttgaacattgagattcttcagaaccacacaactgtctagagctatgctgtttgatgtggtanccattagccaccnntggntacnttcntttaangttcanngnatnncctgngatncnaactnntgtnnccntnttggcnagnaccnatanannnnatgggccnnaaaacacnannttaggctttttgcntntcttccattngttctttgcatttcctngngncnttgtttttttttnaccnnttgnnntttcaanttgannngtgnnnnaantttnncttttttnganntggggna

SEQ ID NO: 3496 - DNA, 633 bp, Homo sapiens
  misc_feature 1, 4, 5, 6, 7, 8, 9, 13, 600: n = A,T,C or G
nagnnnnnnggcncgcgtaatacgactcactatagggcgaattggagctccaccgcggtggcggccgcccgggcaggtaccattctccaggcacatacaacatgaaatatcatacagctgtgaaagatctggtggaaagctggaatattgaggaagaaacattttttgaaaattatttctctctctaagtcagtaaatgtttgatataattctgagtgcatggctgtagtctgaaagtttatgtgcccctaaaattaatatgtcaaaatcctaacacccatggtgatgatatcaggaggtagggcctttgggaaagtaattaggtcattaaattaataaggaaatcgtatccttttttttttttgagacgtagtctcgctctgttgtccaggctggagtgcagtggcacaatcttggctcactgcaacctccgcctcctaggttcaagcgattctgctgtctcaggctcctgagtagttgggattacaggagcctgccaccacgcccagctaagttttgtatttttagtagagactgggtttcaccatgttggccagcctggtcttgaactccagacttcaagtgatccacccgcctcangcttccaaagtgctggcattacaggcgtgagcc

SEQ ID NO: 3497 - DNA, 636 bp, Homo sapiens
  misc_feature 6, 633: n = A,T,C or G
aggggnggcggcgtaatacgactcactatagggcgaattggagctccaccgcggtggcggccgcccgggcaggtacagctggatgttgacatagtcaggtctgttctcttgccaaaacttgttatgcaacatacagagtaaatctgcaaaccaacggaaggactggatatctctgcatacccaaataaagtatagtcttctaagcttgtatggtttccagtcatccaacagggtgttgagtattgatgcaaatggagttactccaatgcctccagccacgcagaggctgacctcatagttcagtgattcctcaaatggacttccaaaaggaccatcaatatacagcttgggataatttctagattgaatgaagggcagaatttcggagtcttgactagatgaaggcagtagtaaatctcgaaatcgttctgtccagtctcctactattttaagatgaaccccaaatgttgctttggtttcagttggacacattgtgagggtaaatggatgattttctaatgcagatacactgggacaatgtagagtaatatactgaccaggtcttgctttaaaaattttcttttgaccattcggatttccatgacatctgagggatgacttatgaccgaaatnatg

SEQ ID NO: 3498 - DNA, 654 bp, Homo sapiens
  misc_feature 15, 411, 412, 413, 418, 426, 429, 439, 450, 506, 529, 540,553, 561, 565, 570, 592, 597, 599, 600, 605, 610, 619, 621,623, 626, 629, 631, 632, 637, 645, 647, 653, 654: n = A,T,C or G
aagttaggccgcgtnatacgactactatagggcgaattggagctccaccgcggtggcggccgcccgggcaggtacgcgggtatgacgagcctgtggctttcaagctgtggacatctggcctagctagatttctacttttgtttgtttgtttgggttgtgttttccccccatttctcagaaagtgaaagagaaataagaattggcagaatgttgcgaaagcacggcacatctttggccaagtgaggggtgagaaggccctgatgtgtcttcaagattcatctggggaaccccctaatgctacttcttagaaatgcttctgcatttagagcagccagatgaggttgtgttaacttttggggtttctgaaggcctttggcttcttcctcttggtctaaacagaagttcaaaatnnnacatnaaaaaaanatntaagtacctnggccgctctanaactagtggattcccccgggctgcaaggaattcgatatcaagcttatcgataccgncgacctcaagggggggcccggtncccaagctttngttcccttttagngagggttnattngcccncttggcggtaatcattgggcantaagntnnttttnctggngtggaaaantngnttnttncnnctcanaattttcncnaccaann

SEQ ID NO: 3499 - DNA, 621 bp, Homo sapiens
  misc_feature 1, 7, 621: n = A,T,C or G
ncgcgtnatacgactcactatagggcgaattggagctccaccgcggtggcggccgaggtacgcggggtgtttttgaaagggtctgataggaattgcaatggtataggttaagtaagataaagtcacatttactgagtgggctctttggggacagcatacatcagagcatatagtcttcttggtctagcaaagaataatggttatgaaaattaaccatttagggctagagaaggtcttggaaattgtatagccaagcctcttcattttgtcagtgaggggattgattctccagctgatttaggtctaaatctgtgacaatgatttatatacctattcatgatcacttaactggtattattaatggcaattaatatgagtcaagcagtggtttaaatgctttgcatatattaacccattactccacaacagctccataggtaggtgtattattatcccgcttgtaaagatgaagaaactaaggtaagagagtgtagttcactcagctaagatcacatatttcagcctatttgtcaaatctgttcaattttctctatcaccacaatccctactctgagccaagctccaatcacctcaatctggacttcttgcaaaaggcctccn

SEQ ID NO: 3500 - DNA, 643 bp, Homo sapiens
  misc_feature 1, 13, 17, 21, 22, 27, 540, 555, 566, 584, 590, 595, 597,601, 605, 609, 616, 620, 632, 637: n = A,T,C or G
natgctatgctcnaccnctgnntatanggcgaattggagctccccgcggtggcggccgaggtacacacagttaaccacaaaacaggcctctctgaaaaagccattgccatggactgccagacagacaatgacaagacacaaataccttctggtgtgtgagccacgggacatgtgagcttccccgctgatgctcctcttatatcaaagatcactttcacaagatgagcgactcaatatcttttatcaaaccaatgatcacctgcaagctatggtatatttttgcagctgtgtagagctatgtggcatgagaatgtgggacttataaattgctgatccaataaatagacattatgggcaacagtgtcttatcaagctagtgtgtacctgcccgggcggccgctctagaactagtggatcccccgggctgcaggaattcgatatcaagcttatcgataccgtcgacctcgagggggggcccggtacccagcttttgtttccctttagtgagggttaattggcgcgcttggcgtaatcatgggnatagctggttcctgngtgaaaaatgntattccggttacaattcncccccncacantnccancccncgangcccccnaagngtaaaaagcctnggggnggccct

SEQ ID NO: 3501 - DNA, 975 bp, Homo sapiens
  misc_feature 2, 3, 4, 7, 9, 19, 48, 53, 56, 57, 63, 77, 84, 86, 135, 144,199, 209, 217, 221, 260, 294, 312, 325, 338, 357, 358, 399,404, 453, 464, 474, 477, 495, 497, 534, 538, 541, 551, 555,557, 559, 572, 587, 593, 611, 628, 634, 635, 640: n = A,T,C or G
  misc_feature 645, 660, 670, 673, 674, 678, 682, 687, 694, 695, 698, 702,721, 727, 730, 732, 736, 742, 745, 748, 758, 763, 764, 768,780, 782, 787, 811, 873, 874, 882, 890, 895, 907, 908, 910,913, 920, 925, 942, 948, 962, 970: n = A,T,C or G
gnnnaangnttaattctangagtagaccgctcgatagagcgcctgcgngcgcncannacctgncgcacgaacgccanaacaccntngatcaactgtgggagagcttgtctcagataaggtcacatctgagatacngggggtcangattctacatgtgagtctgggaagacactgttcaccccttaacatctctgttctncagggtcttnaaatatantttngggtgcaaggaaaggcagctaagtaccaagttaattatnagaaggaccagttttgaggatttcaggaaaaaanaaaaaaaaaaaaaaaaangtgcggccgctanactagttctaganaaaaaaccttccacacctnnccctgaacctgaaacataaaaatgaatgcaattgttgttgntaacnttgtttattgcagctttataatggtttacaaataaagccaatagcattnacaaaattttnacaaattaangcnatttttttttcaactggnantttttaaattggggggtttggtcccaaaactccatcnaaangtnatctttaatncatngntnttgggaatccccncgggggtaccccgangcctcngaaatttaatttcccttntttcccggtttcccttngcttannttgantttgncttggcgcctcgggntccgttttcnggnnttgngggncgaangccggtnnttnagcntcacttcaaaagggcgggntaattnccngntttnttccancanganttaggggggntaacnnccanggaaaagaaacntntttanaccaaaaaagggccagccaaaaanggccaaggaaacccttaaaaaagggccccggtttgttggccgttttttccataaggctttcnncccccctngacgagcntttancaaaaaaattgnncnctncaagttnaaaanggggggggaaaaccgcncagggntttttaaaagaatnccaggggntttct

SEQ ID NO: 3502 - DNA, 967 bp, Homo sapiens
  misc_feature 377, 379, 382, 445, 464, 471, 480, 524, 559, 570, 571, 586,593, 627, 685, 703, 712, 730, 734, 736, 747, 751, 754, 760,767, 818, 826, 830, 831, 832, 833, 834, 836, 840, 841, 846,853, 869, 871, 880, 882, 887, 895, 898, 902, 917, 927: n = A,T,C or G
  misc_feature 929, 934, 937, 956, 960, 966: n = A,T,C or G
ggcgaattggagctccaccgcggtggcggccgaggtaccatttccccttaagcaagcaggattgcaggtgggctactgcgctaagtttttagcaaaagaaaagtaatctgatttgaatcaggactcatggcaactctaaatcacgtatagtttttctcatcagttaaataataaaatgacaaaactgtttcggtaaaattctgattttaaagataaaatattattataattgatattgaagaaagcaaacaacgttcattgcaggactcctagttgcatattttcttgtagaagatattttcttgaaccgtcttcaattattgggaaaaaatccatgtttcaagagttccacaggctgtacctgcccgggcggccgntntanaactagtggatcccccgggctgcaggaattcgatattcaaagcttatcgataccgtcgacctnggagggggggggccccggnaccccancttttttgntttccctttaagatggaggggttaaattgccgccgccttgggcnaaaatcattgggtcataggctgtttccctggtggngaaatttgttnntcccgcttcacaaanttccacnaccaaccatacaaagcccgggagccataaaagtntaaaagccctgggggtgcctaatggagtggagcctaacttcacaattaattgcgtttncgctcacttgccccgctnttccaagtncggggaaaacctgtcgtngccnancttcattaatnaaantcnggccanccccccnggggaagagggccggtttggcgtatttgggccgcctctttcccgtttcctnggctcaanttgnnnnncnctgnngcttngggcctnttcggtttgcgggggngncgggttttnantttcncttaaaanggngggnaataaccggtttttncccagaaatnangggantangccgggaaaaaaccttttnagcnaaaggnc

SEQ ID NO: 3503 - DNA, 875 bp, Homo sapiens
  misc_feature 507, 509, 546, 563, 691, 697, 698, 724, 734, 735, 760, 769,771, 772, 781, 791, 798, 800, 812, 814, 821, 827, 835, 839,850, 861, 869: n = A,T,C or G
gtaatacgactcactatagggcgaattggagctccaccgcggtggcggccgaggtactggggagaactcagagaagaaaggggatgcactgctgggcctcatgagttggcttatacttcaccttgagctaagcatactaatacccagtccaggcagcattgaacagctccgcgcagatctcaccctccaaaaaacaggaagaaaaagccctctcactgcaagcaagatccaaagagagaagagcaagggaggggctgatgtgagcatgcccagatccatcccccacccatattcgccaccaagggcggagacaggcaaagagggcccctgtcctggaaatccctccatgaggaagcagtgaaggatgcagggcccactctgtcagtgtctagtgttccaccgatcctacatagtaattttgaaagacgatagcatgatgttcctgaaaggaaaaaaaaagtttcctctatgaggtcattaacatatatcttgagtgactttattggncntctgggtcattttgacatttttgtaaattctatagancttttatttactcctgngatatattttaaagatcaacaaatgtccccaccaaaagaaaaaaatcaccaggtaagttccgtaacttttatatttctatactttttaactggttcatttaaattcctggtcttatttcaaaaagggnttcccnncaaaaatactttacctaatctttggntttcctgggnnttgaactcctttggcctttcttganaattaaaanannttgcttttnttttccgggnggggccncnaattcaaaaaanantaagaanaatggnccctgggngggnatccactttgngaagggttaanaagtgaanccccct

SEQ ID NO: 3504 - DNA, 1002 bp, Homo sapiens
  misc_feature 332, 390, 433, 441, 471, 482, 486, 537, 549, 558, 560, 585,591, 616, 619, 620, 625, 630, 632, 639, 651, 655, 662, 670,676, 679, 689, 699, 705, 706, 713, 718, 743, 748, 768, 772,808, 810, 824, 828, 848, 854, 858, 859, 862, 865, 874: n = A,T,C or G
  misc_feature 881, 885, 886, 893, 900, 907, 915, 917, 922, 924, 927, 928,933, 946, 960, 963, 964, 965, 968, 969, 976, 977, 979, 987,991, 994, 996, 1000, 1001, 1002: n = A,T,C or G
ggcgaattggagctccaccgcggtggcggccgaggtaccattctccttcaggctggctctatgttcttcatgggcagcgtctccacggtcatgcaccatgccgctggcttctggaccccgaaggtgctatggagcccagctccattccactgagtccaaaactcacgaatacagaggccaccagcactactgaaatgccagcagggtgtgtcggcatttggagggccttccagcaaagctttgaacatgctataattgctccaatataacaagtgatgttccaattaataagataatttacagcaatccacagtctctgccacaggtggttntttcttcaagagggctgtcccgggacagaactgggacaatgcttgaagcttctcatcntgtcccctctgcccataaattaactcctgtcttcataaggganaataaatnttaaggaaaataaaccaatttgtgctcttnaggggggaaangganggggaaacaaaacactttggggaggttcaagaaaaagaccctttccgcttnaaaaatagaacncaaatttgntncctggatttttactcctacatttgntttttnttccccccaaaaggacccatccacnttnngaatngcgcnanccaccantttttaaaaaanaccntcctttntctaccancacttnaangccctttttnttttaaaccnaatcannttttagnggganggggggaaccccactggcttgaaanctttnccttccttggcccaattcantccnccaaaggttttttccttgatggaaagaaacaattananttgaaggaactttncctnaccctttccaagttgttccntggaangggnngangtntttaatttnggctttntaannaaaaatnattaaangggttanaaaaactntnataancnatnnaagcntccccttaaaaancgggttccctaatnccnnnganncaagggnntntgtggttnaccntgncnacannn

SEQ ID NO: 3505 - DNA, 836 bp, Homo sapiens
  misc_feature 2, 3, 4, 7, 8, 9, 10, 11, 12, 645, 715, 731, 737, 755, 802,819, 823, 835: n = A,T,C or G
gnnnagnnnnnnattgtaatacgactcactatagggcgaattgggccctctagatgcatgctcgagcggccgccagtgtgatggatatctgcagaattcggcttcgagcggccgcccgggcaggtactcacagaggagatgggcacgagctcaaagcctagcatctttgatcttactgttcacctggtaatgttaagaaattgcccctttgtgctaatcctcagcagcagagagagctatgcaggttcaattactaaaaaattctcccaattaattttttgggcattagtctcaaaactggttactccgtgtgttgttctaatggtgtttcttctttttccacaaggatttcctgagattggcatagtcccctaattaattgaaaaggacctaaaagaataattggaaatatgcttttgatggttgttgtatacaaatgttctcagaagcttagggaaatgggtgtgatttcagattttcacatacataaaaggtgcaaggtcttctgagggaatggtttgcatgagctttaatgtatatagttcaaaggacttacagatgaatgaatttggttagtcaagtaacccatactaattggacagatggagcaagacatggatgaagaacaccatcctgccaatcaangtcatttataattttattaccttctttcaactctctgcataaactttaagtggcattgcaaggtaccttnggccgcgaccacgctnagcccnatttcacacactggcggncgtactagtgggatccgacctcggacccaactttggcgtatcatggncatagctggtttcctgngtgnaaatggtatccnt

SEQ ID NO: 3506 - DNA, 842 bp, Homo sapiens
  misc_feature 2, 3, 4, 7, 10, 12, 13, 15, 657, 663, 699, 739, 755, 765,779, 788, 793, 800, 809, 813, 832, 837, 840: n = A,T,C or G
gnnnagnttnanngnatcgactcactatagggcgaattgggccctctagatgcatgctcgagcggccgccagtgtgatggatatctgcagaattcggcttcgagcggccgcccgggcaggtaccatatcctgggctggttaaaaacataccatccctgtgatggtgatgaccattgacttcactcttcacaagaatttatgtcaacgtgtcctagacatttggtagtagaggtatagctgtagtccaaacctctaccaagctatggtttctgagagccctgtatgttaagtgcctacggaatgctcagcatagtcaaagacaccttagattcacattatacgaggagccacactgcagttattcaagattaagcactggctggagaaactggctgtatgaactccagccttgggtgcgctgtacctcggccgcgaccacgctaagccgaattccagcacactggcggccgttactagtggatccgagctcggtaccaagcttggcgtaatcatgggcatagctgtttcctgtgtgaaattgttatccgctcacaattccacacaacatacgaaccggaagcataaagtgtaaaagcctggggtgcctaatgagtgagctaactcacattaattgcgttgcgctcactggccgctttncagtcnggaaacctgtcgtgccagctgcattaatgaatcggncaacccccggggagaggccggtttgcgtatttgggcgctntttcgcttcttggttnattgaattcnttgggcttcggccnttcgggtgnggggnagcggtnttagccccnctcncaccgggggaataccggtnttccnaanaa

SEQ ID NO: 3507 - DNA, 896 bp, Homo sapiens
  misc_feature 515, 577, 582, 592, 604, 631, 643, 659, 697, 736, 740, 756,772, 795, 804, 805, 838, 841, 845, 846, 864, 866, 872, 882,891, 894, 895: n = A,T,C or G
gtaatacgactcactatagggcgaattggagctccaccgcggtggcggcccgcccgggcaggtacgtcaagacacttttaaactatacatgacagttccttggggatctttctccaactccctaaccttaattatgtcactcccagatatgctctcaaagtatcctgtacttttttttttgagatatggggagatggcaaggaacaaaaagagaggaaaatggacagaaatgaaaaggtgaggtcacccaaggcgaacttagtcagcttgccaattttacctggggttcagacctcactcgattctttccatttccatgtcgtggatggggggaggtgcaggaaaggggacactcatctgggactgggtaactgtcaagcccaatctaatcaaaaccaccctaaagcacacaagggactggagaagaacactaaaaatttagaacaagatatttagacaagatgcttcctaaattctgtgaaattttcatgaagtaagaatttccaaacccaagntcattatcttctctctttccttaaataagactattaaaaatatggggggccttgagaagccncaganaaagaactgntggagccaaganaaaggggccacaaccaaacttggaganaaaatctctttntgtcatttcccccaanaaccttggtttctaacagggtggcctttgggcattttntaaccggggtgttcccttgggcacctttttacagtgggnccgntacccttcgggccggnttttaaaaaccttagngggattccccccggggctggcanggaaatttnnaattttcaaagcctttattcgaatacccggtcnaancctnnaaggggggggccccgggntncccaanccttttgttnccctttaanggnng

SEQ ID NO: 3508 - DNA, 1020 bp, Homo sapiens
  misc_feature 4, 8, 269, 363, 380, 484, 495, 496, 499, 507, 549, 559, 567,608, 609, 629, 640, 641, 644, 658, 661, 675, 676, 677, 699,705, 709, 716, 735, 741, 744, 767, 783, 790, 793, 795, 798,807, 813, 829, 837, 842, 845, 850, 865, 879, 889: n = A,T,C or G
  misc_feature 891, 894, 902, 911, 920, 921, 925, 926, 933, 935, 936, 941,946, 952, 974, 976, 979, 987, 999, 1006, 1010, 1012, 1016: n = A,T,C or G
gttnaccncgtaatacgactcactatagggcgaattggagctccaccgcggtggcggccgaggtactagtaagttctgggtagggggtggatgagtcctaggagtggggggccccaggcacacaggaaccatagttaaccactcttcacctacagaagagctcctcaggtcaaagcttcactgtacctgcccgggcggccgctctagaactagtggatcccccgggctgcaggaattcgatatcaagcttatcgataccgtcgacctcnagggggggcccggtacccagcttttgttccctttagtgagggttaattgcgcgcttggcgtaatcatggtcatagctgtttcctgtgtgaaatngttatccgcttcacaanttccacacaacataccgaacccgggaagccataaaagtgtaaagccttggggtgcctaatgagtgagctaactcacaattaattgcgtttgcgctcaactgccncgctttccaanncgnggaaaacnctgtcgttgccagcttgcattaaatgaaatccggcccaaacnccgcgggggnagaaggcngggttttgccgtatttggggcgctttttcccgcttccctannattcaacttgactctcttgngctttggtccnntcngggtttgccgggcnganccggttattcaaannnttaacttcaaaagggccggtanaatacngggnttaattncaccaagaaatcaaggggnataaangcnaaggaaaaaaaacattgtttgangccaaaaagggccatncaaaaanggncnagnaaacccgtnaaaaanggcccgaggttgcttngggcgttnttttncanaagcnttccgcccccccttnacgaagccattaanaaaaaattcnangcnttaaattnaaaaagggngggcgaaanncccnnacaggantnntaaanaatanccaggncgtttacccccttgaaaacttncnttntggcgctnttcttttttacngaacccngccncnttanccgg

SEQ ID NO: 3509 - DNA, 854 bp, Homo sapiens
  misc_feature 2, 3, 4, 5, 6, 7, 479, 569, 570, 606, 652, 704, 718, 742,756, 761, 787, 794, 799, 803, 818, 824: n = A,T,C or G
gnnnnnnccgcgtaatacgactcactatagggcgaattggagctccccgcggtggcggccgaggtacctttctttccaggccatggcaaaaaaatccaattatgtccgtcttgagtctgtggtcttgcttcttatgtagtatttcctttgtgagctgaagattaatgcatggattcacctccttcagcacatttcatttcaattgtgaagaaaagattccaggcactgaatgtaaaattgaacatgacattttgacattccttcttctgagagctgggttggtcttagttgctgtgaggctctagacaccgaccatacagggcgtggggctgctcctggacatgaacatcctccgaagttctccccagtccactttacccgctctgccccgcgtacctgcccgggcggccgctctagaactaagtggatcccccgggctgcaggaattcgatatcaagcttatcgataccgcgacctcnagggggggcccgggacccagcttttgttccctttaatgagggttaattgcgcccttggcgtaatcatgggcataagctgtttcctgtgtnnaaatgttattccctcacaattccacacaaacatacnaaccggggagcctaaagtgtaaaagcctggggggcctaaatgaggngagctaacctcacatttaattggcgttgcgctcactggccgcttttcagtcngggaaaactttcgngccaactgcatttaatgaatcggnccaccccccggganaagcnggttgcgtattggggcgccctttccntttcctngctantganctccttgggctcggncgttcnggttgggggagcgggtttcacttactcaaa

SEQ ID NO: 3510 - DNA, 942 bp, Homo sapiens
  misc_feature 353, 487, 525, 657, 676, 683, 692, 693, 724, 731, 732, 739,763, 764, 766, 767, 770, 791, 793, 804, 820, 827, 844, 845,848, 852, 856, 860, 861, 870, 872, 881, 887, 904, 912, 914,925, 927, 933, 942: n = A,T,C or G
gcgtaatacgactcactatagggcgaattggagctccaccgcggtggcggccgaggtactttctgtgcccctctcctcacttccatccctgtcactcctaaaggatctccctctcctgctaggattcttcagaccatgatctgaaaacaactgatttagagtaagtaatgctttgggtgctcttccaagaattctatcccaccttttacttttgtgatacccagttaatcctttatgacctaactttccattacatcaaaggagcatagggtccagaatcttacaggagtgcatgacttttccacaggcacttctggcttgcttgtcaggccacctgaattaggtattgcttntttctctcataatcagccatatgctaatccctcccgttctctattggacagaccagaacctctaaggaggggctgagctgcttgcttgacgagacacaaaagcactgctacacagcaagaaggttgaactgttnggacacaggcactgcgggggggcagcgctgccctcccntcaaggcaggctaagtgggccctgaggacatacctttggcgaattgtcatggcccttgatcttctctatgtcaatcatgccagtagtgccaggacaccaaggcttcttcatggttgattgtaagaagcttgntttcaacaagaagccaaanaatggcntttcgtaannaaccttgccccggggcggggccggttcttanaaaactnngtgggantccccccgggctgcagggaaattnnannttnaaagctttattcgatacccgntncgaccttcganggggggggccccgggncccaacnttttggttacccttttnntgngggntaanttgnnccccttggncntaaatcatnggtganttagattgttatcctgngtggaaantngtattccgctnanaaattncccacaaan

SEQ ID NO: 3511 - DNA, 890 bp, Homo sapiens
  misc_feature 456, 555, 641, 673, 692, 696, 710, 713, 717, 735, 740, 769,773, 780, 833, 836, 839, 852, 874: n = A,T,C or G
gtcgaccccgcgtccgattccagaaacacatcgctttcttcctctgtactggagtgtagcaacacaaagacacagccaacaatttcacttggtggtctgatgaactctcataaatgccttgtttacagcataagaatgtaagtacatatttatatatctctctctgacaaaatatcctttccatatatctgatggccattaatttggacttaactagttttgtccaaaaatgaaattccaagggccagggaagaataaaatgtacttgaaaaatttcttctaactggtataaatattaaattaaacttatatgctaattggaacaataatggccctttggatgattctacattacaagcgtcaactgaaataaggtccccaattgtcactgagaacatcaaagggatcttactttgaggaataaatatgtgattatagtgattatgtgtgaattgnggttatattcttcaataaaagaaacattgctgggatttacaactctcctctggagacttaagtcaaataaaattaacacattatttgaaacacccacanggattcctggcagccagaaataaaccaaattatttttacccaaacctgcaaaaacatcagcctagtgggactaaagctgcccaatngaactccagcctgaagccgtgggcccccaaancagaaacaatttaagccanggcnagaattttattttncanttgngggggttaccgtccttcntttgngcaaatcttaaaaatgggctttggaactnggancgtccanaaacttggattcctggtttcccagctcttgggcatcctgaaaagttgccattnaanggnattggggttttcnaatttccctaaattttggaaangggggaaaatcatttg

SEQ ID NO: 3512 - DNA, 857 bp, Homo sapiens
  misc_feature 2, 3, 4, 7, 8, 9, 10, 11, 527, 578, 601, 671, 673, 690, 781,807, 843, 857: n = A,T,C or G
gnnnagnnnnnactcctatagggagtcgaccccgcgtccgttctaagcctgcccgcctggggctctgtaactatggctcctaacgtggggagcccacaatctagctatatcatgttagcgagagctctttgtatactgaaacaataaacttaccatcttgatgagttttacatgtagaatggcttaggttataaggtactgccacctcattccactgttgagaattgtctaatgcaaagctcactttttaaacatggataattggacagtcatgagtggatcatcgaagggataagcaaaatatatgtcaaactgagaattaatatctatcaaaacacttgctattatttggtagatgggaggttattttatttttaagaagtagattggctgaatggaaaagcaaaatgtggcataaaataaaatgggatattgttcagcagtgaaaggaataaagtactgatatggactacaacatggatgaaccttgaaaacattatggcaaagtgaaagaagccagttacaangccgggcaccatggctcatgcttgtaatctcagcacttttgggagaccgangtgggtgaatcacttgaggtcangagttcgagaccagtctggacaaccatggggaaaccccccgtctctactaaaaaaaaaaaaaaaagtgcngncgctagactagtctaanaaaaaaaaccttccaccccttcccctggaacctgaaacattaaaaatgaatgccattgggtggtggtaacctgggttattgcaaccttatnaagggttaccaaattaaagcaattancatcacaaattttaccaaataaagccttttttttcnctgcattcttagtn

SEQ ID NO: 3513 - DNA, 884 bp, Homo sapiens
  misc_feature 604, 606, 682, 705, 713, 717, 735, 737, 745, 752, 753, 778,790, 793, 795, 815, 816, 831, 838, 849, 850, 861: n = A,T,C or G
agtcgacccacgcgtccgcagtcaccagggaaacaagcaacatcatcatggcacaggtgagcagggacctagagggtaaaccaaagcccaacatgcagagccatcataaagatcttcacccagagggaaagactctgaaatctgaacatctatctataagcaaccgccttttcagtcctttaaagaaaggaattaataacaaatgttttcaagacatccacaattaaaaccactcatgcaccacacacacagcaaccaccctgcacacactgtctcattaaacccagacactgagaaatcactcaaggccttctctgcagttcagtaaggctcatgatgatgatgagatctgttttagaaagtaaactcttcaggagccaaactatattttctttgcacacttcagttgtgtgagtaaatgtgcagcccaactacagtatgattacaaaggacaaccaatgaaacacaaagtctgtaaagcggaagaagaccacctggagatttttcttttcaatcagcagagattaattagcctacatttcttagaaatgtggactttaccatagacaatatttttcttcccaaggatgaccattcttagacngnccaatgctttccaatggtgtggcccccaaaatttttggacccacttgtgtaaaaccttttttttttcttaatcaangttttggcttttatattaaaaantaaaaatnggtngaggttaaaatggtttangngaatacancttaganngggacttcaaaaaaccctttggctngggaataaaggnggntnaaaggtattcttcccaattnncaactggaagggaanaattggnttttttccaannaaaaggggaanaattttacttgggggggccttgg

SEQ ID NO: 3514 - DNA, 859 bp, Homo sapiens
  misc_feature 494, 609, 710, 716, 738, 740, 774, 779, 793, 818, 819, 820,848: n = A,T,C or G
gggagtcgaccccgcgtccgtgcatttccaactgaggtaccctgttcatttcactgggactggttaggcagtgggtgcagcacacggagggcaagcagaagaagggtggggcatctcctcacccaagaagtccaaggcacgggcaagggagtctccctttccaagccaagagaagctgtaatctacaaggaacttaaacaaattttcaagaaaaaaacaaacaaccccatcaaaaagtgggtgaaggatatgaacagaatttctcaaaagaagacatttatgcagccaacagacatatgaaaaaaagctcatcatcactggtcattagagacatgcaaatcaaaaccacaatgagataccacctcatgccagttagaatggcaatcattaaaaagtctggaaacaacagatgctggagaggatgcagagaaatcggaatgcttttacactgttggtgggagtgtaaattagttcaaccattatggaagacagtntggcgattcctcaagaattatagaaccagaaatccatttgatcccacaatcccattacttggtatatatcccaaaggattattaaattcattccactattaaagacccatgcccnccttatgtttatttgcagcactttttaccaatagccaaagactttgggaacccaccccaatgccccatcaatgattagactggattaaagaaaaaattccncatacnccatgggggatactaccgcagncnttaaaaaaagaaccgagttctttttcctttgccnggggncattgggatgaaanctgggaaaaccctttattctttagnnnggcccccccccccccccccccccccccnccccttttttt

SEQ ID NO: 3515 - DNA, 925 bp, Homo sapiens
  misc_feature 2, 3, 13, 31, 468, 482, 523, 548, 569, 580, 595, 600, 613,618, 620, 630, 631, 642, 652, 665, 673, 683, 689, 691, 694,700, 714, 720, 723, 727, 732, 743, 752, 764, 770, 774, 776,789, 791, 796, 802, 803, 808, 818, 825, 834, 853, 856: n = A,T,C or G
  misc_feature 863, 864, 865, 880, 883, 884, 889, 902, 903, 906, 909, 914,915, 919, 921, 924: n = A,T,C or G
gnnaagttaaacntttatagggagtcgaccnacgcgtccgcggacgcgtgggtaaagaatgggcagccaagccaggcgtggtggcacacacttttaatcccagcacttgggaggcagaggcagacggatttctgagttcgaggccagcctggtctacagtgagttccaggacagccaaggctacacagagaaaccctgtctcggaaaaaaaaaaaaaaagaatgggctgccaatccacagccaccctgacaacggggggtgggggtggggtagctaaagccaatttgaagaaagcccctatgaaagggcgctttttccttcaaggtacagaccagtccaaaatgtacagacacccctcactatgaacacaaacaatcctggtgtaaattacctaactacagttgggaaatctaactggctttaaaaggaaaagagagcctgccgtctttttgtgggtgccattttatntagatggatatatntttgagcttttgggtctgttatgcttttggaaatgcttaanttgcaagccctggtttgcccccaanagacccaaagtggatgttatngtgacccttgnacccctaaagttacnttctnggtttggtgaaanaaaanantccctgccanntcgataagctngggcaggganaaaaaccaagggntggggggnttttaggggntttccntngangccttngggggtttgtaaanaaaaanccncccnacggnaggggccgaanaaaaggtgnaagggagggaanggaaancggncntggatttgggtgnantttgnggaaannatggntattttgggnttggctnaatttgganttaaaaaccagcccaatanggnaaacttnnnggaattagattgaanggnnttaantgggcttggggannaanggncaaanntatngnaang

SEQ ID NO: 3516 - DNA, 875 bp, Homo sapiens
  misc_feature 2, 7, 535, 609, 642, 680, 684, 699, 706, 736, 742, 754, 783,790, 792, 804, 805, 845, 850, 858, 862, 874, 875: n = A,T,C or G
gnaagtnaccttaaggagtcgacccctcgtccgcgcccccgcccggctaattttttgtatttttagtagagacggggtttcaccgtgttaaccgggatggtctcgatctcctgacctcgtgatccgcccgcctcggcctcccaaagtgctgggattacaggcgtgagccaccacgcccggctgatttcattgttttttatgtctgtgtagtattccatggtgtgtatgtgctacattttctttatccaattcaccattgatgggtacttaggttgataccatgtttttgctgttgtgaatagcactgcaatgaatgtatgagtgcctgtgtctttttggtagaatgatttgttttcctttgtgtatatacccagtaatgggattgctgggtcagttggtagctctgttttaagttctccgagaaatctccaaacacggtggaatgttggcctgtagttttctttttttggtgtgcctctgccagattttggtatcaaggatgatgctggcttcatagaatgagctaaaggaggangccccttctccatttttggtataagttttcagtaggaattggtaatgaagttcttctttgtaacatctgggaanaattttggctgtgaaactcaatctgggccaggngctttttttttgggttggtaaggtttttttttaaaatnactngattcaagtttttgnaaatttnggtaattgctctggttcaagggtttttcanctttcnttcctgggttcnaatctttggaagggttggggggtttccangaaaccntntccattttcccnntaacattttccttttcctttttttttttttttttggaaancggantttttggnctgntccccccaggcnn

SEQ ID NO: 3517 - DNA, 907 bp, Homo sapiens
  misc_feature 2, 3, 4, 5, 7, 10, 521, 542, 555, 564, 566, 575, 594, 681,682, 723, 731, 739, 748, 753, 758, 761, 777, 794, 807, 811,817, 823, 826, 827, 832, 834, 842, 843, 846, 850, 854, 861,869, 881, 890, 896, 906, 907: n = A,T,C or G
gnnnngnccncgtaatacgactcactatagggcgaattggagctccccgcggtggcggccgcccgggcaggtactacagacccatttaaaaggtgaagaaactaatggacataagtttcacagactcaaagtcttacggagagtttggtaaacccagatctcaactcagattttccagttctgctaattttccccattcccctctggtgctgccttttcaacttgggttgtcaacaggcaaatgggaccagtggaagcattcagagagaagattgatggttttcagatgtttctttctctccctgacatgatgtcttaggcacaaccacagtatttcaagtggttgaaaatcaagctgagctaatgggggctggagtgagggtggaagggcagacccagagactcaatctaccagatgctcattctcttccagcacccaccctaccccatcaattgttctggcacccaccacaaagccctaagagccttggtggaaaaagtctgggaaaatactgtggtangggccaatcaaagtgacgatnggccaccacttantaagttctncnataaaccangggcttccaaagcattttngaaacctaagaagggtaaatcattccatgcaaccggacataccaaacagatgctcagaagcaattaagtaccttgggccgctcttannaacttagtgggatccccccggggcctggcagggaattcgantattcaangctttatngatacccgntcgancctcnaangggggggggccccggntacccaaccttttttgnttccccttttaanggangggttnaattgngcnnccttngnggtaaatnnatngggncatnagctggntttcctgnggggaaaattgnttattcccnttcaanaaatcccccnn

SEQ ID NO: 3518 - DNA, 866 bp, Homo sapiens
  misc_feature 2, 3, 4, 7, 8, 9, 10, 11, 519, 520, 521, 529, 530, 531, 533,534, 535, 536, 542, 547, 548, 549, 550, 551, 552, 553, 554,556, 557, 558, 559, 560, 562, 563, 564, 584, 591, 647, 648,651, 654, 671, 718, 720, 729, 740, 749, 756, 764: n = A,T,C or G
  misc_feature 776, 798, 803, 812, 813, 814: n = A,T,C or G
gnnnagnnnnnccttagggagtcgaccccgcgtccggccaccacatatgtggtaatgtgttataagcagcaataggaaattaaaacaattaggaaactgtgatagggacaacccatgtgagaagtgacagtggataaagagaaattgttgaactgcagaagtttcaagaagatagaattgctgggcacatcagggtacgcttaagtaaataaaaaaataaaataaaaagaattgttgagtgtgctggctcacatctgtaatcccaacactttgggaggctgaggtgggcggatcgcttgaggccaggagttcaagaccagcctgggcaacacggcgaaatcccatctctacaaaaaattcaaaaattagccaggcatggtggtgcacgcttgtagtcccagctactcaggagctgaggtgggaagatcgcttgagcctggaggtcaaggctgcagtgagctgtgattgtgccactgcactccagccttttttttgacacagagtgagactccatctcannnaaaaaaannnannnngggaanggaannnnnnnnannnnnannngtgccggccgcttagactantctaaanaaaaaaacctccacaccttcccctgaaccttgaaacataaaatgaatgccattggnnggngtnaacttgggttatttgcngcttaataatgggtaccaataaaagccattgccttcccaaattttcncnaaataaagnattttttttcnctggcattncaattgngggtttgncccaacctcatnaatggttttttataatctcctncgctnccgggttannngaggttggattaaaccccccccccccccccccctccccttccccccccccct

SEQ ID NO: 3519 - DNA, 849 bp, Homo sapiens
  misc_feature 2, 3, 7, 8, 9, 13, 699, 744, 789, 806, 820, 822, 829, 833,848: n = A,T,C or G
gnntagnnnactncttagggagtcgaccccgcgtccgctcaattccatgtcctaaaagggaggtcagagagttttctgacaagtcttataggttgtcagcacaattgtgtcaaggtactcaacagttcttgagcatttacttaaacgaacttatgaaagactgacccataagataaatgggttatatccacttacaatgagagatacctttccagtgacctgaagaagtgtctagagtaccaagtgtccattaggaatgatgagaggcaatactgagattagtctgtgaaaaaattaagtaactaaaatactaggaatatatgatatgtacatacatcttcatatatgtttaagtttacaaatatatgtggtatataacaggggactgatttaagttagatttcaagtttgaaggaaacctaaaggataagctgaagggaaagatagagaaaatagaggcctaaactaagcccggtagtgggagttaaaaagaaaggatgaatacaaaatttctgcattaaaatgagtggtaccgtttgtccctcagtatctgcagagaattagttccaggacccccatttaccaaaacctggggatgctcaaagtcccttatagttgagccctctgtacctgcaaatccctgcagggacagaggaccaacagtatttggacagcagtgaaataaagaatctgggcaanggctgggcatggtggctcaacctgtaattccagcacttttgggangcttgaagcagcagatcaccctgagggtaaggagtttgaccccgnccttggccaacattggngaaaccccagtctntncttaaangtcnccaaaattacttggng

SEQ ID NO: 3520 - DNA, 863 bp, Homo sapiens
  misc_feature 2, 3, 4, 7, 8, 9, 10, 11, 12, 512, 523, 622, 640, 707, 709,711, 719, 738, 758, 765, 780, 781, 783, 784, 789, 829, 843,859, 863: n = A,T,C or G
gnnnagnnnnnnttgtaatacgactcactatagggcgaattgggccctctagatgcatgctcgagcggccgccagtgtgatggatatctgcagaattcggcttagcgtggtcgcggccgaggtactatggcctgactgagaaggcctagatccttgagaaatcgccccaaggtttcataaagatcagctaagcaactcatgttgtcctcgccttcgcagtttttctcatactgcttcaatgaatcgaagtattctgttgccattgcacttttgtctttgccaacaaactgccaataactcagcaactcagcaaagtatccccttttataaaggttttgagacacaaagagattaagaaggcaaccatgcagcttctgtttacttccctgctgctgaaaaagccacgggagttcatctgcgcttctccaagtcactctgtcctgacttagctgcaaggtgaaatagttgattagcttttgcctgtatgaagaagtaacagtggggccttccangtacctgcccnggcggccgctcgaaagccgaattccagcacactggcggccggtactagtggatccgagctcggtaccaagcttggcgtaatcatgggcatagctggttnctgtgtgaaattggtatncgctcacaatttcacacaacatacgaacccggaagcataaaagtggaaaagcctgggggggcccccncncngcgccccncctcccccctccctctccncctccccccctcccccctcnctccccncccccggaaaactgnngnngcaanttgcatttaatgaaattgggccaccccccggcggaaaggngggttgcggtattngggccccctttttcgnttcn

SEQ ID NO: 3521 - DNA, 1004 bp, Homo sapiens
  misc_feature 126, 133, 185, 198, 243, 248, 252, 262, 286, 294, 305, 307,308, 309, 322, 329, 330, 342, 357, 359, 362, 385, 415, 419,424, 428, 434, 467, 473, 480, 507, 513, 518, 522, 529, 531,563, 573, 578, 579, 602, 611, 613, 628, 635, 637, 642: n = A,T,C or G
  misc_feature 654, 655, 657, 660, 666, 669, 687, 689, 712, 713, 717, 723,738, 745, 754, 756, 768, 777, 782, 787, 789, 790, 795, 806,810, 812, 823, 827, 854, 857, 859, 863, 865, 867, 868, 869,870, 873, 875, 879, 880, 882, 885, 887, 899, 900, 904: n = A,T,C or G
  misc_feature 905, 912, 915, 922, 924, 925, 932, 935, 944, 949, 951, 952,953, 958, 964, 972, 973, 974, 984, 985, 989, 990, 991, 994,995, 998, 1000, 1003: n = A,T,C or G
gaattggagctccccgcggtggcggccgaggtaccatgctgacattctgcaaagtctgcattcgcaaagcctgaaatgattccaactgctgctgaaggactttcaatgctgattgtggttggattngattttntgattctgctatgcagccatattttagcattcagagaagcaacggagcatancgtggtggtgaanacaggcagtccggagccgccctgctgaatgcccgctccattcctngctgnctgngtgaccttanggagttaacctctctgtgcccgtntactcatntgttttactgnannncactttgctttancccctcnntaagaatttaangatcttggaacgccngnaanggagaaccgggagtcaaactttnatccttcttacccggttgccgctttttatngtanccacngggnttaccntgcccaggccgggagaaactgtgctaacataantggganccccccngggggtgcaggggaaatttctgatatncaaagntttantcgnataccgntncgaaccctctgaagggggggggggccccgggnaccccaaganttttnngtttccccttttatttgaggggntttaaattngntgccgcttttgggcntaaattnantgggntcaataagcttnntnttncctggngtngaaaaattggttttttcngngttacaaattttccccaccaaannatanccgaancccgggtgagccttnaaggtgnaaaaaaccntnggggggtggccnttaatttcntgggngcctnanntccanatttaaatttncggntnggggcctcaantggnccacgttttccagatgggggaaaaacntgntnattncnannnnggntnttanntnaantngccaaccccccnngggnnaaagggnggntttgcgntnnttggggnccntttttccgncttcntnnnaattnaattancattcgtnnngcctgggtcnncttnnnttnnggngnagng

SEQ ID NO: 3522 - DNA, 1152 bp, Homo sapiens
  misc_feature 2, 8, 10, 11, 16, 17, 20, 21, 22, 23, 27, 28, 29, 34, 40,43, 44, 45, 46, 48, 50, 54, 55, 56, 61, 66, 67, 69, 70,72, 74, 76, 77, 79, 80, 83, 85, 89, 90, 92, 96, 98, 99,100, 104, 105, 302, 372, 385, 437, 487, 520, 565, 566, 569,575: n = A,T,C or G
  misc_feature 582, 596, 601, 626, 631, 638, 653, 660, 663, 695, 708, 715,736, 759, 770, 825, 839, 852, 864, 866, 870, 878, 879, 880,895, 897, 920, 931, 932, 954, 956, 958, 976, 992, 995, 999,1011, 1013, 1016, 1055, 1058, 1060, 1064, 1066, 1067: n = A,T,C or G
  misc_feature 1071, 1075, 1078, 1108, 1109, 1110, 1119, 1128, 1136, 1138,1141, 1145: n = A,T,C or G
cncatgantnnttttnnttnnnnattnnntgatntttctnttnnnntntnttannntgtcnttatnntnntntntnntnnttntntttnngnaggngnnnatgnngttccgctaatacgactcactatagggcgaattggagctccaccgcggtggcggccgcccgggcaggtacaagttacctaccctttccttgcctcagtttcctcctttgtgacaatggggacaataacagaaactgccacacaagagggatgttagagaactgaccaagcgaatgtaagtaatgacttggagcaacntatggctaagagtaagttaggggttgttacgatgactttcctgagataaacagggagatcttttagctgngggtcaagtgcangagggacagtgggagctcaaggcctaatggaaactaacactaattgtacctngggccgctctagaaactaggtggatccccccggggcctgcagggaatttngatatcaagcttatccgataccggtcgacctcnagggggggggccccggggaccccaagcttgttgtttcccttttanntgnaggggntttaatntgcggccgccttgnccgtnaaatcattgggtcattaagcctggnttttncttgttntggaaaaaatttgtntattctngcntccaacaaatttcccacaaccaaaacaatacngaagcccgggggnagccaantaaaaagtggttaaaaggccnttggggggttggccccttaaatnggaggttggangccttaaaactttcaacaattttaaatttggcgggttggccgccttcaacctggncccggctttttccncaaggtctggggnaaaaaaccatgntncggnggccccannntttgccattttaaantnggaatttcgggcccaaacccccnccggggggaannagggccgggttttggccggtantntnggggccggcctctttttnccgccttttcctctgnctncaantggaacttcgcntnggngccttcgggactgtttctcggcttggcgtggccgaagcnggntntttnanncttnaacntcnaaagggccggggaatttacggggttattcnnnaaagaattncagggggtntaaccccnanggnaaanaaacatt

SEQ ID NO: 3523 - DNA, 822 bp, Homo sapiens
  misc_feature 586, 687, 690, 692, 713, 718, 752, 762, 769, 793, 805, 812: n = A,T,C or G
ctcactatagggcgaattggagctccccgcggtggcggccgaggtacaagttgtctttatgctgcgagataagtcctctcttggtttgagctcccaccttttcagtgaactcttacattttgggggatctgctcttgtaaaggacatcctttctggtgagtattcttttggtttaatttttggtttggttatttgtgcatgaatttaatctcattaggaaacaagttaagttgaatagaccaactagtgaattaatccgtcaccaaaatatatgtttttggcatttacctgtttattttgaaactctttgtaagaaatgtaaacctgtaatgataatctctgctttgtaaggatatctccctctctgacacctaaaacactagatgctttcacaaagcaaaaggaagagacctaaatctatctatctgtgtaaactcacccttgaccatttcattttgaaggcttcctatatatgctttttttcatctcaacaaatagtggtgtttaagttctgtacctcggccgctctagaactagtggatcccccgggctgcaggaattccgatatcaagcttatcgataccgncgacctcgagggggggcccggtacccagcttttggttccctttagtggagggttaattgcgcgccttgggcggtaaatcatggtcataagctgtttcctgnggngnaaattgttatcccgctcacanttccnccacaaccatacgagcccggggagcataaaaggngtaaaagccntgggggnggccttaatgaggtgagctaactnacatttaaattngcgtttncgctcacctg

SEQ ID NO: 3524 - DNA, 840 bp, Homo sapiens
  misc_feature 681, 743, 791, 801: n = A,T,C or G
tagggcgaattggagctccccgcggtggcggccgcccgggcaggtactaaaaatatagcaatgtgggtgggctccaaggactgttccttcagacctcaaatccacatgcttatagaagaccacataggtcagagcaaactctctacacctgtctttgtcaactgtcacccagttgaagatctctgaagctgcatgccgatttaggccaacaatcagactatgtagcatttacatttacatttgtctgtgtgtgataacatgaagccagaaggaaggaaaatttgtggctgctggtttccctgacaagcagtttgaaggtcaaaagaaaccaaccctggaggaactcgagttatgacagagcaatgttaagtgtagacctaggagggaagcctatagggctaggataggggtgctaacagataaagtggcaaagcaagagaagaagggaaagacggcagatgaggaaaggtgccctatccatagcagggatgcaatgcaaagacaaatctaaggtttctgtttcttcaccactcctggcctaggtctggctttgctatttcctagcagtgtgacttgtcctcggcccgctctagaactagtggatcccccggctgcaggaattcgatatcaagcttatcgataccgtccgacctcgagggggggcccggtacccaactttgntcccttttagtgaggggttaaatttgcgcgccttggcgtaatcatgggtcatagctggtttnctgtgtgaaaattgttattccgttcacaattttcacaccaacataccnagccgggganccataaagtgtaaagccctgggggtgcctaatggagtga

SEQ ID NO: 3525 - DNA, 802 bp, Homo sapiens
  misc_feature 99, 105, 544, 704, 730, 742, 756, 773, 791, 802: n = A,T,C or G
tggcggccgaggtggaaggattgctcggagccaggtgttcgaaaccagcctggtcaaccaagcgagaccctgtctctaaaaaaaattttttttaatganctgggnacgggggtgtgtgcctgtagtctcagttactcaggaggctgaggtgggggaatctcttgaacctaggagttcaaggctgcagtgagctataatcacaccactgccctgcagtctgggcttcagagttagatttcatctcatgaatgagggaataaaggattaatagaagtaggcaagcaaaagggggaatgaagggtattctaggcagagggaacagtaaagtctgagacaagacggagtggtatgttagagatactacaagactttaagtacctgcccgggcggccgctctagaactagtggatcccccgggctgcaggaattcgatatcaaagcttatcgataccgtcgacctcgagggggggcccggtacccagcttttgttccctttagtgagggttaattgcgccgcttggcgtaattcatggtcatagctggnttcctgtgtgaaattgttatccgctcacaattccacacaacatacgaaccggggagccataaagtgtaaagccctgggggtgcctaatgagtgagcctaactcacattaaattgcgtttgcgctcactgcccgctttttcagttcggggaaaacctgtcngtggcccagcttgcattaattggaantcgggcccaacngccccgggggaagnaggccggttttgcgtanttggggcgcctttttccncttccttcgcn

SEQ ID NO: 3526 - DNA, 830 bp, Homo sapiens
  misc_feature 29, 711, 759, 806, 820: n = A,T,C or G
ttagagcccttttaatacgactcactatngggcgaattggagctccaccgcggtggcggccgaggtacgcggggacattcagaggtgagcccagagcgggtaaagtggactggggagaacttcggaggatgttcatgtccaggagcagccccacgccctgtatggtcggtgtctagagcctcacagcaactaagaccaacccagctctcagaagaaggaatgtcaaaatgtcatgttcaattttacattcagtgcctagaatcttttcttcacaattgaaatgaaatgtgctgaagaaggtgaatccatgcattaatcttcagctcacaaaggaaatactacataagaagcaagaccacagactcaagacggacataattggattttttttgccatggcctggaaagaaaggtacctgcccgggcggccgctctagaactagtggatcccccgggctgcaggaattcgatatcaagcttatcgataccgtcgacctcgagggggggcccggtacccagcttttgttccctttagtgagggttaattgcgcgcttggcgtaatcatggtcatagctgtttcctgtgtgaaattgttatccgctcacaattccacacaacatacgagccgggagcataaagtgtaaagcctggggtgcctaatgagtggagctaactcacattaattgcgtttgcgctcctgccccgcttttncagtcgggaaacctgtcggccaactggcattaatgaatcggccacgcncggggagaggcggttttgcgtattgggcgcttctttccgctttcctngctcacttgactcncttgcgctcg

SEQ ID NO: 3527 - DNA, 858 bp, Homo sapiens
  misc_feature 342, 508, 525, 616, 617, 648, 651, 681, 722, 724, 731, 746,809, 815, 829, 846: n = A,T,C or G
gtaatacgactcactatagggcgaattggagctccaccgcggtggcggccgaggtacttggtgaagtgagattcagactgagtggggtcacagcacagggcactgtcttgcctggctttatctgagccagtcacacctctcctggccactatctgtggtctagccccctttgtgcagaaagagaaagaagagccttgaggaccagcctagtcagccgggggccattgagactgccatggaagacttgaaaggtcacgtagctgtacacttctggagagaccattcaaggcttctggctcttgacaaagatagaccactggaacaatgagaaggagagaattntactggtcacagacaagactctcttgatctgcaaatacgacttcatcatgctagggttgagttgcagcgcgcagcggattcctctgagcgctgtctatcgcatctgcctgggcaagttcgccttccctgggatgtccctggacaagagacaaggagaaggccttangatctactgggggagtncggaggagcaatctttttgtcccgctggaacccatggtcactgaaagttccttatgctactttcactgagcattctatggaaatacaccanngaggaaaattccttgaaatttgcaaagggtnggnctgggtttcatgtcttaagcttggttccancttatcccagaaatgccccacaaagaatttcaaactgggantnttggaangaggaaaagaaactngatggtggtttaacttgaacccaatttttggatttgaggacctacaccaggggcctgattgtncatttntttgggaaacccgncaacaaaacttggcctntttccctttgct

SEQ ID NO: 3528 - DNA, 832 bp, Homo sapiens
  misc_feature 649, 727, 730, 739, 740, 741, 767, 787, 799, 827, 828: n = A,T,C or G
attggagctccaccgcggtggcggccgaggtactcagaggtttcctggctccagccattgctctcgacctcacagctacccattgggccaagccacctccagctctcacctgacttgctgcagtggtctcccaagaggtctctccactcagtccctgccaccttcagcctgttctcagtggagggggccagagtgaccctgttaaaacatgagacctttcacgtccaacctcagctcagacttccccatggttcctatcacactcagggtcaaagtgagagtccctaagatgacacacaagtagggagaatgcccttctcggctggactgggacagctccagggtatccctattgtccttgtacctgcccgggcggccgctctagaactagtggatcccccgggcttgcaggaattcgatatcaagcttatcgataccgtcgacctcgagggggggcccggtacccagcttttgttccctttagtgagggttaattgcggcgcttggcgtaatcatggtcatagctgtttcctgtgtgaaattgttatcccgtcacaattccaacaacatacgagccgggagcataaagtgtaaaagcctggggtgcctaaatgagtgagctaaccttacaattaaatttgcgttgcgnttcacctgccccgctttttcagtccgggaaaaccctggtcgtggccaacctggcatttaaatggaaatcggcccaacnccnccgggggannnggcggggtttggcgtatttgggcggntctttccgcttttccttggntcacttgactcncttgggcctcgggtcgtttccggggtgnngggg

SEQ ID NO: 3529 - DNA, 848 bp, Homo sapiens
  misc_feature 69, 104, 508, 546, 623, 624, 663, 687, 693, 707, 714, 723,725, 744, 754, 761, 764, 779, 797, 803, 806, 807, 808, 820,821, 828, 836: n = A,T,C or G
gggcgaattggagctccaccgcggtggcggccgcccgggcaggtacccaagcttcacatgccctgtctntgccatggagagcaggcccacgcactgctgtctgntggagcaaccgtgctggtcacagggccagaggcagagagccctaacaagcagtcagggcgctaatgaggaagggggggacaacctgtcctctacagaaaataatgagattaatatgttcaacaactcccatccagaatccagcaggaagttaaaccaaacgacacatgattctctgacgaagaaataagaatacggttgactggttttttatatttatttacctgaaagcttctaatgtttctaactagtgacatatttcaggccaggaattctgtttgcctagatcatgatgtctaaacactgcacacttgaccaactttgggatccaaataactagctttgtatgctcttgggccctgcagtacctcgccgctctagaactagtggatcccccgggctgcangaattcgatatcaagcttatcgataccggcgacctcgngggggggccccggtacccagctttttggttccctttagtgagggttaaattgcgcgcttgggccgtaattcattggnnataagctggttttccttgtgtgaaaatttgttattccgntcacaaatttcccacaaccaacanttccgnagcccggggagccntaaaagnggaaaaggncntggggggtgcccttaatgnaggggaagcntaacttnacntttaatttggggttnggggcctcacttgccccntttttncannncggggaaaaccnnggtcggnggcccaanttgcaattaaag

SEQ ID NO: 3530 - DNA, 882 bp, Homo sapiens
  misc_feature 467, 478, 481, 488, 490, 491, 496, 497, 498, 522, 537, 539,543, 545, 546, 558, 559, 570, 576, 580, 584, 585, 586, 587,592, 604, 610, 613, 615, 632, 634, 636, 638, 639, 642, 651,652, 655, 656, 663, 665, 666, 667, 672, 681, 685, 694: n = A,T,C or G
  misc_feature 696, 701, 702, 706, 710, 723, 727, 729, 736, 739, 742, 751,763, 764, 766, 767, 771, 772, 780, 788, 789, 791, 802, 807,809, 819, 822, 825, 833, 837, 841, 842, 848, 849, 856, 864,868, 869, 870, 873, 874, 877: n = A,T,C or G
gtaatacgactcactatagggcgaattggagctccaccgcggtggcggccgaggtacaaacgaactctgaagagtcggccaagcagatcacatgactcattgagctttaatgcctgcactggagcataagcaggcctatttcctaaatgtggaagcatccagtatcgctgaaaccctcagagccgagacagtcactctgtggagagagaacagagggctgggaacccagccacggccagggaactggactctaaggacagcagcagagtctgcctttgcagcacgttatacagtttgcacgtattaccttatttgatttgatctcatgaaaaccagaaagacgacagtgactaagttcctaaaccatgagcacaagactttctggaggaaaaaggaaagccccaggaagaagcggaatttgtcacccaggtcaagcgagcttgccctgagcaaaaacttaaccaggntcccgggaatnaanagggcanannccccnnnttaccttggcccgggggggggccngtttttaaaaaactnangggnannccccccgggccnnggggggagaantttcantttntaannnnttttntttatacccccncccccnctntnggggggggggggccccncncncnnccnatttttttnntcnnttttttngnnnggggnggaaatatnttcnccccccccngnggggnntatnaaangggggggaacaanttgncnttcttgnggnggnaaaaaaaantttttttttttnntnnaaanncccccccnaaataaannangcggggggggntaaananataaaaaaanaanagnggggggcncccnttanngggggnnccccccncaactttnattnnnggnnggnccccc

SEQ ID NO: 3531 - DNA, 791 bp, Homo sapiens
  misc_feature 733, 753, 776: n = A,T,C or G
gtaatacgactcactatagggcgaattggagctccccgcggtggcggccgcccgggcaggtattcagtcagctgctggtgagcaacgtggctcctgtccctatgaagcttaaagtctagggtaaggcagaccctaggaattcggcgcacagaagcctctctgctgtgatggagaagtaacagggacgatgaggacatagagcagggaagggggcctaggaagctattctggaagaagtgagttggttcctgaagttgaagcacctgcagaggtgaggaggtggggagcagaagtgcaggatccatctgtgcaaagagcctggggcctcaacaacatgaactgttttaatcagatttgcattttagaaatgataaccctaggcctggagcggtggctcatgcctgtaattccaacactacgggaggcagaggctctactaacaaatctctactaaaaatacaaaaattagctgggtgtggtggtgcatgcctgtaattccagctactcaggaggctgaagcaggaaaatctcttaacacaggaggcagaggacgcagtgagccaagatcacaccattgcactccagcctggggtgacagagcgagactctgtctaaaaaaaaaaaaaaaaagggaaaagaaagtaccttggcccgcttctagaactagtggatcccccgggcttgcaggaatttcgattatcaagctttattcgatacccgtccgaccctcgangggggggcccggtaccccanctttttgttcccctttaatgganggggttaattgcgcc

SEQ ID NO: 3532 - DNA, 825 bp, Homo sapiens
  misc_feature 6, 7, 726, 756, 758, 768, 776, 816, 825: n = A,T,C or G
ggggtnngacgcgcgtaatacgactcactatagggcgaattggagctccaccgcggtggcggccgaggtacgcgggggggatgggtgtggaggccgcggaacttctggcgggcgcaagctatatgccttgttgatcttgccgcatcttttttactagatgtcggctgagtgagtagctacagtttttaacatgtttaacttgcggccttcaaaaattgttagcggactttctctgttgcctcctcagtgagctctgccctttctcgcaactccttgtcgtcccaccgcgcctctgcacctcagaggaaggagaagagtagcgaggccgagcgggtttttagatttctctgtgattacccccagccttgtcttttctgactttaccgtccccgcttggggtacctgcccgggcggccgctctagaactagtggatcccccgggctgcagggaattcgatatcaagcttatcgataccgtcgacctcgagggggggcccggtacccaacttttgttccctttagtgaggggttaattgcgcgcttggcgtaatcatggtcatagctgtttcctgtgtgaaattgttattccgctcacaatttcacacaacatacgagccgggagcataaagtgttaaagccctgggggtgcctaatgagtgagctaacctcacattaatttgccgtttgcgcttcacttggcccgcttttccaattcggggaaaaccntgttcgtgccaagcttgcatttaattgaantnggcccaaccnccccgggnggagaaggccgggtttggggttatttgggccgctcttttncgcttttcn

SEQ ID NO: 3533 - DNA, 790 bp, Homo sapiens
  misc_feature 745, 764, 785, 790: n = A,T,C or G
gtaatacgactcactatagggcgaattggagctccaccgcggtggcggccgcccgggcaggtacgtaagttgaagtccaggagggttccagacacagagcttctggtgtcttctccctgtggagtcaggactcattactctgctgtctttgatgtgtgacaacaggcaccaactatcgccaactagagaagctcaccagagctctgatgttggaagtttttattggggcctcagcatgtagacatgattgactggttggtggattaactgtctacatggttaatcttagtgtccaggtcagctgatactgcgtgaccaaaagctcctaccccgaatcccttgattagtatttctggcatagcaagcccccatcagaaacaaagacattcctcttagaggtaatatagattacctttcagcaccagagggcaaaggccagactactttttaggcaagtacctcggccgctctagaactagtggatcccccgggctgcaggaattcgatatcaagcttatcgataccgtcgacctcgagggggggcccggtacccagcttttgttccctttagtgagggttaattgcgcgcttggcgtaatcatggtcatagcttgtttcctgtgtgaaattgttatccgctcacaattccccacaacatacgaagccggggacataaagtgtaaaaggccctggggggtgccctaaatggagtgagctaaactcacattaaatttgcgttgcgctnaactggcccgctttttcangtccgggaaaacctgttcatncccan

SEQ ID NO: 3534 - DNA, 871 bp, Homo sapiens
  misc_feature 451, 510, 524, 542, 545, 550, 583, 585, 589, 590, 605, 608,612, 621, 623, 650, 667, 672, 679, 680, 693, 700, 710, 730,731, 732, 733, 742, 745, 748, 749, 750, 751, 761, 770, 773,779, 780, 785, 793, 802, 805, 813, 841, 842, 844, 849: n = A,T,C or G
  misc_feature 857, 860, 861: n = A,T,C or G
gtaatacgactcactatagggcgaattggagctccaccgcggtggcggccgaggtacacgtgcagcagaaggctggtaggatagtttcttccacatccatgtgaacctcagagtcatctgaccattggccttgttctcttccaggttctagctggccagagacttttttggcctcatactaactgcaaaattgcacacagttggcgaatacaccactggaagccactgtggctgcattgtcacagttcaccaattgtgcatgttatttcctgcagtgggcccaagatcactgacaggatgccgtcggggttgggctgaaggtggaaacagcacactagcttgctgtttgtggcctctttacaactgccggccccatctgagatccggaaccaacacgttgctaacctcagcccattggggccagtggggcagcccggcagtggaaccatancttttccacacctatgtctattggcaccggtagctgcccggcccccaagtttcaactgncattccccctttgncattgtggcccccccaanaanaaaanttagggcccaaaaaaaaaaaagcctggcctttnangggnngccccaaaaggggtnatntttnggggggggntnaaacttttttgcccaaaaagggggggnaaaaaaaaaattttttnccttnaaaaggnnctttttttttttnaaacccngggggggcanaaaagggggccccgggagannnnttttttttnttntgnnnncccccctttntttaataanaanaaaatnngtttntttttttncaaaaaacncgngggaaaanttttttttccccccccccctttttgggnntnccccnaaaaaagngcnncctttttttt

SEQ ID NO: 3535 - DNA, 895 bp, Homo sapiens
  misc_feature 56, 376, 394, 407, 412, 417, 418, 421, 424, 425, 434, 443,444, 447, 460, 464, 465, 466, 494, 496, 508, 514, 518, 525,530, 531, 536, 548, 562, 566, 568, 596, 597, 609, 624, 628,633, 639, 640, 641, 659, 660, 661, 662, 664, 667, 672: n = A,T,C or G
  misc_feature 673, 674, 686, 687, 688, 690, 695, 702, 704, 709, 711, 717,726, 729, 731, 732, 741, 745, 747, 755, 768, 775, 776, 778,783, 789, 790, 793, 795, 805, 809, 811, 813, 814, 819, 821,826, 832, 843, 856, 857, 858, 859, 883, 885: n = A,T,C or G
gactactatagggcgaattggagctccaccgcggtggcggccgaggtacccagcanaattctcacatgtgcttattttgaaattaaaccaatgcaaaagtttttaccctgaggtgttgctaattcatgaacctattctcttgacagtttttccctccaatataacctatatcttattaaatgtcttttcttcttctagattgtttccaatagtagctcaattttagctttgttcaggctccaaattagaaaaacgctgagattagccaaatatttgaacactgtaaggtattaatcagtttaatctgaaaaaaaaggtataagaacacttcctacagttccagaaagagtgagctgtcctggctgagggttatttnattaagcacctacatgtntggaccactaatnggggngggcnntcnccnnagggaaagntgaaaaaannccngggacccgggggntttnnnggtgggatcccccccctttttcaggggnanaaaagtttttgngttttncaanacccatngcccnnttttnaggcttttcttnaaaatcccatgggntttncnttggggccaagggggctttttttttttnnccccaaaaaatntgggggggggggaanaaanccccnttaaannncgggggggcctttttttnnnntnganattannnggcccaaaggannnanggganaacccgntnttctntnttcccnatggggggnggngnnttaaaaacncctntnttgggggngtttttaaaaaanccccccnnanaaaantttttnnaangngaaaaccttngtgntntnnttgananccccncccccnctttttttttnaagaggggggggnnnncaaaaaaaaaaaaaaaaatttttngntttttttgcg

SEQ ID NO: 3536 - DNA, 897 bp, Homo sapiens
  misc_feature 448, 467, 481, 500, 513, 524, 571, 580, 587, 596, 624, 638,640, 646, 647, 649, 658, 685, 695, 712, 713, 723, 730, 734,739, 747, 760, 780, 787, 788, 794, 798, 814, 815, 822, 829,830, 838, 842, 848, 855, 861, 868, 870, 873, 877, 882: n = A,T,C or G
  misc_feature 886, 892, 893, 894, 897: n = A,T,C or G
ggcgaattggagctccaccgcggtggcggccgcccgggcaggtactgcctttttggagctcctcacgcatcaccatttctctctacctatgattccttcagcttttgttaatgcaattggctcgctttttgttttgttgagtcttgatttaatttccaggctttgctcttccagctttgtccagagacacatcctgtcctgtccttaaggacttctgcaaatcagtaatcacagatgttgcgtgcagttcactgatatctactctcctcgtattttggggtggcttactgcatacccacgagtaagaacttctttgcaatcaacaggcaatttgctggggtgctggggtttgttccattatcaaacaaactgggattcctaccccagttccatcacttacaggttgtgtgtgacctcgggatgagttgcttaacctcctgagcctagntttctctgctgaaatatanaaatcggcagcatnacaaattttttaaaactcnttactacctgttnattcacttcangtttatgaactgggggccctggggggtacccttcggcccgcctctanaaacctaangtggganttccccccngggcctgcaggggaaatttcgaatatcnaaagctttattcgnanacccgnncnaaacctccnagggggggggggccccgggtacccccnaccttttttngtttccccttttaatgnnagggttaaantttgccncccnttggnggtaaaancaatggggtcaanaagctggtttccctgggggngaaaaannggtaantccntttacaaaattccccnncaaacanaacccanncccggggngccnaaaaangggttanaagccnggggggngnccnaatnggggngggncttacnnnccn

SEQ ID NO: 3537 - DNA, 913 bp, Homo sapiens
  misc_feature 453, 464, 476, 496, 498, 533, 543, 565, 576, 604, 618, 624,632, 637, 660, 667, 674, 678, 685, 686, 691, 692, 696, 697,707, 708, 710, 712, 717, 721, 722, 727, 728, 730, 733, 734,736, 740, 743, 753, 758, 759, 762, 765, 769, 772, 774: n = A,T,C or G
  misc_feature 780, 781, 782, 797, 804, 805, 812, 813, 826, 837, 841, 845,849, 853, 855, 857, 859, 866, 867, 869, 870, 880, 885, 886,892, 897, 900, 903, 906, 909, 911: n = A,T,C or G
gtaatacgactcactatagggcgaattggagctccaccgcggtggcggccgcccgggcaggtacactccagcaatccattctttaggtcctgcttcctcaggagctttatatgagatcttctctttgagaagtgtgtcttaattacaaagtctccttattctttatgccttgagtcttggtgctggttttgatttttcctctgcctattctcctcttctcctgactgttggcctgctctaggccttgaggtctagctgtgccatgattgatagcttcactctgagccctgacacttcacatggttgctgggatccaccaactctcccaggcactaaggactagcactttctggaaaaacaacagcatgcaagactttttaaaccatgggctttatctagaccttatatacaggtgtgaggcctgacttctgactattttgactgtcttttcangtgttcctctncagcaaaggctnggagacctcaatttcccagntnttggatttccatttctaaacccttggccctggctnaaaatgcccnaaaattttcaacctatttgccnagaggcttcantttgcttggcccaattgggaatttttancttttgggagttantaattnactttaanaaagntggttggcttgcccagaaaaacntattgtntttcccntaanggtaacnngaatnngaannaattcttatnnantnttggnatannaaaanntnggnntntacnccnaggttttttnttttnnagnaantttnatncntgggannnaaatttatttttatnagaaaannaaaaaannttgcctttttccntcttatttttnatcnaaanaatntttncnangntttctannannaaaaattggnctttnnaaatgnttccnggnttngtngananat

SEQ ID NO: 3538 - DNA, 1167 bp, Homo sapiens
  misc_feature 2, 3, 9, 12, 13, 14, 16, 17, 18, 20, 21, 22, 23, 25, 26,27, 32, 34, 37, 39, 40, 47, 52, 58, 60, 63, 65, 68, 73,74, 75, 76, 77, 78, 79, 82, 83, 86, 88, 90, 99, 150, 221,244, 331, 355, 410, 414, 418, 426, 444, 465, 467, 468, 506: n = A,T,C or G
  misc_feature 507, 518, 522, 532, 536, 541, 596, 602, 606, 609, 612, 625,626, 632, 633, 643, 670, 715, 716, 720, 724, 727, 731, 750,751, 756, 773, 778, 785, 802, 838, 840, 850, 854, 865, 867,868, 873, 878, 883, 897, 899, 912, 913, 919, 925, 936: n = A,T,C or G
  misc_feature 938, 940, 950, 951, 952, 955, 956, 962, 965, 972, 977, 987,990, 992, 996, 1001, 1003, 1013, 1017, 1018, 1032, 1046,1049, 1052, 1054, 1066, 1073, 1075, 1076, 1088, 1091, 1096,1102, 1104, 1105, 1107, 1109, 1110, 1111, 1113, 1115: n = A,T,C or G
  misc_feature 1116, 1122, 1125, 1128, 1131, 1142, 1150, 1154, 1156, 1166: n = A,T,C or G
anntttacnaannntnnntnnnntnnnttaantntgntnngttattnttttnaatatnanttnanttnttttnnnnnnnagnnggntnancgcgcgtanacgactcactatagggcgaattggagctccaccgcggtggcggcccgaggnactttttttttttttttttttttttttgggacggagtctcgctctgtcgtccaggctggagtgcagtggcncgatcttggctcactgcaagctntgcctcccgggttcacgccattctcctacctcagcctcctgagtagctgggaccacaggcgcccgccaccatgccttttaaaaaatnagccaaggcacagtggcatgtgtntgcagtcccagccactcaggaggctgaggcaggaaaggacctgctttgagcccangaanaagngggggctncaatgtcatccaactgcnactctggcctggggtgacaananntgagacccaagaaaaaggaaaaggaaaatggttaatgnnggttataatanttangatttaccancccnccccnttatttagttttaaattaaatttaaattacctaaaatttaaaataaaatttaaantaattntaanaanggnagggaacaagggnnaaaaannaatggggaanggggggaagggggggaagaacttatgnaattttaaaaaaaaaaaaaaattccccaaaaaaaacctttaaaanntttntaanaancaanacccataaaaattcccaanntaatntttttaaaaaaaccccncgggnaagttanaaaattttaggggaaanaaaaaaggggccccaattttttttttttaaaggggnanggttcccccnatantatttaatggnannctttnccccnggggncgggggcccgcttntnttaaaaaataaanntgggantccccnccgggggcttntnangggaaaattnnngannatattnaanacctttnatttnaataaccccntcnanaccntttanangggggggggncccnnggggaccccaaacnttttttgtttcccnttnttnantgggggggggtnaaattangnnccccctttgggntanatacnaagggnannanannntngnnttaccntgnggnggnaaaaatttttnaatttccntttnanaaatatcccnt

SEQ ID NO: 3539 - DNA, 865 bp, Homo sapiens
  misc_feature 458, 487, 496, 549, 558, 660, 665, 666, 668, 669, 677, 678,685, 702, 712, 713, 721, 723, 732, 747, 753, 755, 766, 778,780, 781, 787, 795, 805, 806, 809, 813, 815, 820, 825, 838,840, 842, 846, 847, 854: n = A,T,C or G
tagggcgaattggagctccccgcggtggcggccgggggccattgagactgccatggaagacttgaaaggtcacgtagctgagacttctggagagaccattcaaggcttctggctcttgacaaggatagaccactggaacaatgagaaggagagaattctactggtcacagacaagactctcttgatctgcaaatacgacttcatcatgctgagttgtgtgcagctgcagcggattcctctgagcgctgtctatcgcatctgcctgggcaagttcaccttccctgggatgtccctggacaagagacaaggagaaggcctcaggatctactgggggagtccggaggagcagtctcttctgtcccgctggaacccatggtccactgaagttccttatgctactttcactgagcatcctatgaaatacaccagtgagaaattccttgaaatttgcaagttgncttgggttcatgtctaaagcttgttccanctatccagnaatgcccacaagaatttcaactggatctggaagaggaaaagaaactgattggngttaactgnacccattttggattgaagaacctacacaggggctggatggttattttcaattggaaaaccgcaaacaaaaccttgggctatttcccttgccccccggggagntattnngnnttttttgnnagagtcntttttttgggacccttngggcccggtnntaaaaaantnggtggaatnccccccgggccttgnatgggnanattctatattnaaactttttttnannccggcngaaccttnaggggggggnnccngggncnccaanttttngtaccctttttgngngngggnnaaattgnccccctctgcc

SEQ ID NO: 3540 - DNA, 876 bp, Homo sapiens
  misc_feature 372, 433, 437, 469, 482, 489, 512, 515, 527, 537, 538, 559,572, 581, 592, 593, 614, 617, 619, 621, 622, 623, 629, 630,642, 656, 670, 683, 684, 696, 702, 716, 739, 751, 754, 760,764, 770, 783, 797, 813, 816, 818, 823, 825, 827, 829: n = A,T,C or G
  misc_feature 833, 837, 855, 857, 859, 870: n = A,T,C or G
ggcgaattggagctccaccgcggtggcggccgaggtacattattattactcacatgctgtcatggaaacagaagccacagtggttgggtcctgtccaaggttaatggaggaagaagtagggaagctaggattcagattcagatttcactatgtaaagacctgtttccattatgccacattacccctcaggttttctgaggtctaggttgcttcctatcttttcctgtgtgttctatcttccttccatcctcatgggcactcatgggatacccccctctctgtataggcatcagagtccattcaagtttccaatggtcctgtggtctccacaacctggaggtgcagatccattagagaaaggagtgcaggttnttgattggacataagtaacaggcccagaatcacatccccaaatgttcagatcagccccagnatcnccagggctttccagccttgaaccaatgggtanggaactctctganatgctanaaacttaagccagcaacctgttnttntttaaacttttnccaagtcttnntttaatcaaaagcttttgggnttgggttttgggntttttgggntttaaactggnnacccaggaaccttgcccgggncgngncnnnttttannaactaagtgggntccccccgggggcnttgcatgggaattnctgatattcaaannctttattcgatnccccgnccgaaccttttgangggggggggccccggtaccccancctttttggttnccnttttantggngggggntaaattggcgccncctttggccggtanattaatgggcataacntgntntcctngngngnaaantgtnaatccctttcacaatttncncnaaacaatccgnaccggg

SEQ ID NO: 3541 - DNA, 1208 bp, Homo sapiens
  misc_feature 3, 5, 7, 10, 15, 16, 21, 26, 27, 28, 31, 35, 42, 43, 45,47, 53, 56, 58, 59, 66, 68, 72, 75, 77, 82, 84, 85, 89,92, 101, 107, 246, 282, 311, 363, 399, 423, 456, 477, 492,493, 507, 520, 521, 523, 524, 531, 540, 544, 545, 555, 558: n = A,T,C or G
  misc_feature 560, 563, 575, 581, 582, 586, 597, 598, 599, 603, 614, 624,630, 632, 643, 683, 684, 685, 695, 713, 732, 735, 757, 763,764, 769, 777, 780, 794, 795, 796, 798, 802, 840, 842, 852,860, 861, 874, 877, 881, 888, 890, 893, 898, 903, 910: n = A,T,C or G
  misc_feature 915, 918, 925, 926, 944, 945, 948, 949, 965, 969, 973, 976,979, 986, 987, 996, 1002, 1003, 1005, 1013, 1016, 1023,1024, 1033, 1040, 1042, 1048, 1049, 1057, 1058, 1060, 1075,1076, 1086, 1090, 1091, 1094, 1102, 1125, 1130, 1136, 1137: n = A,T,C or G
  misc_feature 1143, 1144, 1147, 1148, 1154, 1155, 1162, 1163, 1164, 1167,1179, 1181, 1184, 1185, 1187, 1189, 1190, 1191, 1192, 1193,1194, 1195, 1198, 1202, 1208: n = A,T,C or G
aancntntanattcnncgtanaattnnnaantaanattattnntntnagatcnatntnnttataantntaanaanantttanannattntanaggattagncccgtnatacgactcactatagggcgaattggagctccaccgcggtggcggccgaggtacctttctttccaggccatggcaaaaaaaatccaattatgtccgtcttgagtctgaggtcttgcttcttatgtagtatttcctttgngagctgaagattaatgcatggattcacctccttcancacatttcatttcaattgtgaagaaaagnattccaggctctgaatgtaaaattgaacatgacattttgacattccttcttntgagagctgggttggtcttagttgctggtgaggctnttagtacaccggaccatacagggncgtggggctgctccctgggacatggaaccattnctcccgaagtttctcccccantccactttttaaccnngctccccccggcgntacccttgccccnngnnccgggcnccggctttnctannaaacttaagntgngnatncccccccggggncctggnnaagnggaatttcccnnnttanttcaaaggccntttaattccnaaatancncgggtcgaacncatctggaggggggggggggggcccccgggttaccccaannnttttttggtnttccccctttttaaggtngaagggggtttaaaaattngcngccgcctatgggccggttaaantccatnnggggnccaattangcnttggtattcccttnnngnttgnaaaatttgtttaatccccggcctctatcaaaatttccnancaacaataanaattaacnnaagccccggggangcnaatnaaaattngnttnaaagnccatnggggggntgccnttnaattganngtggaggcctaaacttcnncanntttatattggcatttngcgncttnaanttnggccccnncttttttcnaagatnngnggaaaaanccnctggttnngtggcccanacttggnanttaatnngaaaattnngncccaacccgcccccnnggggaaaaangccnngtnttgcgttnttaggaggccgccttatttcccnctttnctattnnttatanntannacattnnattgtgnnnatngggtaccgtttncnggnntngnnnnnnnaancggntatatn

SEQ ID NO: 3542 - DNA, 891 bp, Homo sapiens
  misc_feature 552, 556, 568, 634, 641, 697, 721, 723, 728, 730, 742, 761,783, 787, 797, 803, 818, 819, 820, 822, 823, 825, 829, 836,838, 857, 858, 870, 883, 890: n = A,T,C or G
gtaatacgactcactatagggcgaattggagctccaccgcggtggcggccgaggtacatcttcctccatgagtggatcaagaaatattgagatggctaagctggaaattacaaaaatgttggcatactattatagcatatggttatgaaaatcaatgaatatttatatttagtattatgctttaagtatatatccaagctgatcaattaattacactttcactgatgagatgtcaattctacatttagctgaactctcatctgaactgtgtggcttctcaatgacagggcatattaaagaacatgatgaatgtttgtaatgtaatgatataaattattataatgtgttgcattaaagacatatggtgtagcattctacgttcagcttttgcatttattttctcagtgtcatgatttgctcctgtgattcccagatcagttttctccttatcagtcagcatatacatattggtattaacactttttgcaaaaatcatatataaatggttgtagaatgttgttgtcattctaccagcaactggttagtttttgntcancgattagcttgnttttcatttattttaaagaatttcagggcccagtccgtgggtgggctcaccgccttgttaaatttnccagccncctttggggaagggccgacccccgggcccggatccaccaagggtttagggaggatnccaagacccatttcttgggccaantnccggngnaaaaccccaatnttttactttaaaaattacnaaaaaaaattatcccccggccntggntggggtgggntgcccntgtagtcccccagcnnntnntngganggcttgnanggcaagggaaaattggcgnnaaaccttggganggccgggtccttngaccgang

SEQ ID NO: 3543 - DNA, 872 bp, Homo sapiens
  misc_feature 63, 64, 93, 122, 126, 138, 192, 503, 512, 523, 542, 590,591, 598, 603, 607, 615, 636, 645, 655, 673, 679, 683, 685,697, 698, 703, 723, 724, 734, 751, 783, 784, 785, 791, 797,798, 809, 812, 813, 818, 823, 824, 826, 832, 838, 849: n = A,T,C or G
  misc_feature 850, 856, 857, 861, 865, 871: n = A,T,C or G
gaattggagctccaccgcggtggcggccgcccgggcaggtacagtgaggcactggggtccggnnccatagtgggagttggggttgtttacccnacacttctaaggggattttcacaatcggntaancccccgttaatnctcacatggttattgcggcgacccccatagcccacggtcccaaacgtgtgcatntgaatcatccgaagctctttctaaaggcaggctcccctggccgcctctcctaatccgactcggtacctcggccgctctagaactagtggatcccccgggctgcaggaattcgatatcaagcttatcgatacccgtcgacctcgagggggggcccggtacccagcttttgttccctttagtgagggttaattgcgcgcttggcgtaatcatggtcataagctgttttcctgtgtgaaaatttgttattcgcttcaccaattccacacaaacataccgagcccgggagccataaaagtgtaaaagcctggggntgcctaatnaagtggagctnactcacaatttaatttgcngtttggcgctcactggccccgctttttcaattccgggaaaacctgtcnntgcccancttgnattnaatgaatncggccaaacgccccggggggngaggcgggntttggcgtanttgggcgcctttttccgnttttcnttgntnaacttgaacttnncttgngctttcggttcggtttctgnnttgcgggcgnagcgggttttcaacttnacttcaaaaggcgggtaattcgggttattcannnaaatcnaggggnntaaccccaggnaannaacantgttnngncaaaanggcccncaaaaaagccnnggaacnngtanaaanggcccng

SEQ ID NO: 3544 - DNA, 880 bp, Homo sapiens
  misc_feature 249, 258, 278, 362, 383, 397, 446, 483, 492, 517, 523, 525,555, 558, 600, 602, 610, 629, 635, 659, 660, 675, 690, 692,693, 719, 720, 727, 730, 733, 738, 739, 743, 746, 748, 760,776, 778, 782, 786, 794, 797, 805, 808, 811, 818, 822: n = A,T,C or G
  misc_feature 825, 830, 832, 842, 848, 869, 874: n = A,T,C or G
ctatagggcgaattggagctccccgcggtggcggccgaggtaccctcttttcctcctttcatgcccgacatatgccttttttcctacttattgtgtaaagttcttcatttgtcatggccatcgtgagaaaaatctggggcttccctttcatcataaatgacaggttttttttctgcttccaaaatctagaattttcatatttgtaacacctggaggtaagggtcatggtgttaattataaagagagcanagagagtangcatctgtaggaaacatctngggtttttttaattatttgctggattcatttattcaacagttgtatatgaaatggtttttacacatgaggtcctgctaagggtngtgcttgccaccttcgtggancttacatttggcangaagctgtattacactagatgaatcctatgtggatgtgcaactcaaaanaaagggttgtggactgagaatcataagtttgggggtnatcgcgacncaaatagaatgttaacaaaccgtgnggatcnangtagacctgtacctgccccgggccgggccnctnttgaactagtgggatccccccgggcctggcaagaaattcccntnttcaaagncttttttcaattaccccgnttaaanccttggaagggggggggcccccgnnccccaaccttttttntttcccctttttatngnnggggtttaaatttggcccccttgggnncgtaaanaanatngggcnnaaanggntntttacccctggnggggaaaaatgggtanancccnggtncaaaattnccncaaaaaanatncgnagccggngaancantaaantntaaaaccccngggggngccctaaaagagggggccccnccccncttttt

SEQ ID NO: 3545 - DNA, 860 bp, Homo sapiens
  misc_feature 561, 600, 652, 665, 673, 688, 689, 723, 771, 805, 812, 813,846: n = A,T,C or G
cgtatcgactcactatagggcgaattggagctccaccgcggtggcggccgaggtactgcaaccgtaagtggggtatatggtttcaccgagaatgtgacatcagagcaaacactaacatcagcaaaggagtatctcagaaaagagcattttaggcacaggaaggaagaaatacaaagggctatgggcctgtagctggcgttttcaagggaccacagagtgaggggagaaggagggaccaggtggtggtgagagaactggtatcagaggaagtaggaatctgtgggttactcaaaggacctcggcctttacaatgagtaacatggcaaagtttttttaatattgtttaagcccaagaaagatactaatttacacagtaagatttatactaaaaaaaaacaaactatgacagttactataaaagagtagctcaccagttcaagttgaaatgaattaaaaggggctgggcacagtggtagaaaataattaaacaaaacataaaaattcctgccaaaaagaagtttatgttatagtgggaagacagcaaatcctatcccacaaacncccaatttttttttttaatggagtctttgttctgtcttnccaagcttagaagggccagtggcgtgatctcgactcactggaaagcttctgnctcctggggtttnaagcccanttctcctgcctttannccttcccaagtaaactggggatttacagggcacncaaccaccacacctaggggtaattttttctattttttttagtaaaaanaccgggggttttcacccatatttggcaaggggcnagttttnnaactttcttgacctcaaagcgatcttgccttgntttaagccttccct

SEQ ID NO: 3546 - DNA, 923 bp, Homo sapiens
  misc_feature 5, 6, 8, 12, 27, 33, 51, 549, 550, 577, 618, 636, 655, 660,673, 689, 693, 695, 696, 700, 703, 704, 710, 711, 716, 721,726, 729, 745, 751, 754, 756, 770, 778, 783, 795, 797, 798,801, 824, 839, 846, 854, 857, 859, 872, 874, 890, 895: n = A,T,C or G
  misc_feature 897, 899, 905, 918, 920, 921: n = A,T,C or G
ggggnncncgtnaccgactcactatanggcganttggagctccaccgcggnggcggccgcccgggcaggtactatggcctccacactcacagggtctcaagttgctatgactggaaaacaaacactatcaacaaaagaaattatgggaaagaaatagacttcaaaatcatcatttttctgtcaatagaatactatgacaatcttgtcaggcatgaatataggaagaagatcgaccgaaaattacgcacatacattttgttcaggaagttgaagtcctttgtaggccattctttgattttcccagaaagatcagttctcttttggggtttatagtggacggcttattaaaagctacttgctctaacatgatttctaagatgtgtattctttgcagtatctttcaactcaccttcagctgaagtaaaaacatcccaaataaggtcaattttcatgtttttattaataaccctgagatgaaggtgactctctctctcagcttattcctgttatttgcctgcaaatactgacctgaaagtaatgtaccaaacnncaccccctggaaacttctttaaagggnagggagacacttactttagcaatcatggggaaaaaccctgnttcccaaatttccgaatntttcccctaaaaaacacanttccnttttttaaggttngttccaaaaaaattangccncnncccnacnntggggnncaatngtttnccatnttngtaaaccaaacccctnccaccnttngngggcaaaattttanccttcggncccgntttttaaaaaantnnggnggaaccccccccgggcctggggnggaaaatttttattnttcaagnctttattnttntncccccccaacccncnagggggggggcccggnacccnananttttgntgcccttttaatngnngg

SEQ ID NO: 3547 - DNA, 877 bp, Homo sapiens
  misc_feature 3, 4, 5, 10, 474, 628, 637, 673, 674, 692, 706, 737, 741,755, 789, 791, 793, 794, 811, 812, 813, 821, 822, 829, 840,843, 844, 846, 848, 853, 855, 863, 869: n = A,T,C or G
ggnnngacgncgtaatacgactcactatagggcgaattggagctccaccgcggtggcggccgaggtgggaggatcacctgaacccaagaggttgaggctgcagtgagctgtgtctgtgccactgaactccagcctaggtgacagagtgagaccccatctcaaaaaaataatactaatagtaataaccacagcacttaataaaaataatagcagctagtatatatctagccacatactctacactacacactgttctaaacacgtctcaaatatcaacttactgaatcctcaaagcaaccctccggttctcattcccatcttatagccgacaaactgatgcacagaaagcttgagatgcttatgaataaggagtgaggttgggattctcacccaggaggcgggctgcagtgtctaagctcttcaatgcagggccctaaaaaagtgcccaagaatatccactgagagacaccccanagctgctcgacccttttagggcctcaagggtgcctgagttgatttctgttgcttgcaacccaagaacctggattggtaaaacagatcactttactgggttttacacttttttgccaaactgggccgggacttgctttccagtgcttgcaatgcngggggcatnttaccaaatttttacaagtttgggagtcagtggatnnggggcattcaagggcaancttcattttccaanaacaagccattttttcccccccagggggagnaaancccattaagaaaanttcccttggcccgggcggccggttttttaaaacnangnnggttccccccgggtttnnnggaattcnnttttaancttttccaatnccnncnanccttnangggggggnccggtncccaactt

SEQ ID NO: 3548 - DNA, 922 bp, Homo sapiens
  misc_feature 5, 13, 14, 17, 23, 24, 25, 30, 32, 122, 124, 161, 199, 258,300, 306, 313, 338, 434, 445, 486, 495, 503, 516, 591, 601,617, 624, 634, 673, 684, 700, 712, 716, 718, 729, 730, 736,740, 741, 745, 760, 768, 770, 773, 774, 795, 797, 820: n = A,T,C or G
  misc_feature 821, 824, 831, 837, 865, 866, 881, 893, 896, 906, 909, 919,920: n = A,T,C or G
ggttngagtccgnnatncgactnnnctaantntagggcgaattggagctccaccgcggtggcggccgcccgggcaggtactcaatctgtgaagtgtgttctcacagtgtcccacacctcccngnggggctcacctgcccacagcagtgctctctgctcttnagtccacctagatactctcttctctttgatcttgaagnctccttatcctgacccatcattcttggaaccactaacctataaagtaattgcaaatcanactcctgtttcagggtctgtttctgaggatcctcaacttcanacactntaaattnttttcatggtaatggtaaggaaaangcattattttatctgaaatattcatttttgcaatcttttcattaattatccaattgttgaacagaaaaaaaattgcttattactttaaaaaatgcncacacatattnaatatctgtttagaatcatagatttctggcaagtcagcgtntccataatngtaaacanatttttctaacanaaaaaaatagctttagagtttccctcaccctattcatcccttaatatttcatacattttaatacaactttttttngtatcccggntcccaagcccaactgnaacctanggaggctttnaaaattaggaaattggaaaaaaaaaagtggggcctaaangcttaaaaaangaccaaaaaaaaaaanccaaattgcctnaganantccaaaaggcnntaaatngtgnngttnccctcgggcccgtcnttaaaaancnagnngggatccccccccggcttggnanggaaatttcaattttaaaaagcnntanttttttncccggngggaaccccaagggggggggcccccggnnccccaaccttttttnttccctttaaanggnggggtaaaantgnccccccttgnnct

SEQ ID NO: 3549 - DNA, 857 bp, Homo sapiens
  misc_feature 3, 4, 5, 6, 13, 14, 15, 18, 20, 23, 214, 294, 488, 531, 538,562, 574, 580, 588, 622, 636, 638, 665, 687, 692, 700, 711,725, 730, 768, 772, 777, 781, 784, 791, 818, 829, 830, 833,857: n = A,T,C or G
ggnnnnccgcgcnnnccnantangactcactatagggcgaattggagctccaccgcggtggcggccgaggtaccttccagctcagtggatcaatatgactttatgaagcaaagtaagggaaagaggtcactaaaaacaacgattttatacatgagaaggtgaaaattcaaaaactcccattttttcaacataaatggctcatgtcatgtgctangaaacataaaaccctagactatcttccataaatgaaaagactaaggcacaattctgtcgtcatgtaattcagtctactanaagagacagacccaaaaaacaaagagcaatgctactgagtgataagagcagtaaggaaatgtgctctcacggttgcagctgctatgggaacataggagaggaaggcatttttctcaagaacagtgggtaggataatcataggaaaattacagagaaagtgacatttgaaattctcctagaatacagcgcttganatggagcagggaatcacaggaaaagcaagttacaagagcacancacttcntgaacaaggaaggcaagggcccangaatggctgaanggtaanctctcggnagcctgaagcaggagaatagcttgaaccccggangcggaagttgccantnagctgaaatccgagcaaaactttcatntcttacccacctttttaaaaanaatanaaaaggtncttccccggcnggcggttttaaaanatagnggattcccccggcttgtaaggaaatttcgttttcaaancttntcgantccngcnaccctcnaagggggggccccgtccccaacttttnttccctttaanngangggtaaaatgcccccccttggccn

SEQ ID NO: 3550 - DNA, 909 bp, Homo sapiens
  misc_feature 2, 7, 9, 15, 17, 18, 421, 425, 435, 457, 467, 474, 497, 550,581, 611, 653, 658, 669, 686, 708, 729, 736, 738, 740, 750,753, 760, 762, 769, 780, 797, 800, 801, 807, 808, 810, 812,819, 820, 823, 824, 829, 831, 839, 858, 866, 869: n = A,T,C or G
  misc_feature 888, 890, 903, 906, 907: n = A,T,C or G
gnccttnantcctantnnactcactatagggcgaattggagctccaccgcggtggcggccgcccgggcaggtacttttagaagagacagggtttcaccatggtggccaggctggtctcgatgtcttgacctcgtgatctgcctgcctcggcctcccaaagtgctgggattacaggtgtgagccaccacacccggcctgaattgcacttttgatggctgagccaaatgctcattctatttaatattgcacagcctgaaccaaaacccgtaacattataaaggaagagatgagagccatttcaaactgtgagagaagagaagacatcaagcaaaatctgggggttttagccaacagacttcagtcctggggccttgcagcaaaaaaacgcctccagttgccccagggctttacagggtgtggntcgnctgttctatngctacacgctcaaacccctgangggaggggancatgcanatggacaggtgcaggaacctaantgggggtgtgttacaaagtgcccttttaaccctgctgtccattggatggcttnaatgttaaatcaacttaattgacactttttncttttttcacaaaggccagaaagggcccanttgttgacccacctttttttgtattccaaagcctctttggtnccaancctttcttggnaaaaaattcaaggcccncaccattggggctttgaaaggnttgaaatgcaaggggtttttntttgaantngntgggaagggnggnttccttncnaaaggantggaatgccanaaacttgggaaaacggnggnnttggtnncngnaaaagannaannctttncnccttgggnggggcaaaaccttttccgnaacaaccnttngggttgaacttcttttttngngttaaaaaatttnccnntt

SEQ ID NO: 3551 - DNA, 950 bp, Homo sapiens
  misc_feature 1, 9, 12, 18, 23, 162, 235, 287, 298, 419, 423, 427, 431,447, 459, 499, 509, 513, 527, 537, 544, 555, 558, 561, 602,605, 610, 625, 631, 634, 638, 652, 692, 695, 698, 702, 726,730, 739, 740, 744, 752, 777, 779, 781, 791, 800, 816: n = A,T,C or G
  misc_feature 817, 823, 826, 828, 838, 849, 860, 862, 865, 874, 877, 879,884, 885, 901, 912, 921, 935, 938, 941, 948: n = A,T,C or G
naatcctantcnactcantatanggcgaattggagctccaccgcggtggcggccgcccgggcaggtcggaggaggggaaccaaggatgctcatggagtcagccctggagattgtcagcagacattgtttctttggggtaaacaggaaaaggagagcagtggntggcactatggagagatggggtagaatggaggacagaaaaaggtgttcacatggaaggcaaagactatctaanaagctaagaggaacagaagtggggaagacagaaaaatttgccgtgtaccttnggccgctctanaactagtggatcccccgggctgcaggaattcgatatcaaagcttatcgataccgtcgacctcgagggggggcccggtacccaagcttttgttccctttagtgagggttaattgcgcgcttngctnatcntgtnatagctggttcctgtngtgaaattggtntcccgctcacaattccacacaacattaccgagcccggganccataaaaantgtnaaagcctgggggtngccctaattnaagtgancttaacctcancanttnaatttggcgtttgcgcttcacttggcccccctttttccaanttnggggnaaaaccttgttcctngcccanctncgantttaaatgaaattncggcccaaccccccccggggggaagaaaggccggtttttnccnttntttngggccgccttcttttccctttttncttnggctttaannttantttgcttnggcccccggttccattcccggcttncngncgaagccggnttttcaacnttcacttcaaaagggnnggtaanatncnggtttttccncaaaaaattangggggattaancnccngggaaaaanaancntgttnnacccaaaaaggcccancaaaaaggccntgaaaaccnttaaaaaagggccnttnttnctttgtntt

SEQ ID NO: 3552 - DNA, 900 bp, Homo sapiens
  misc_feature 4, 5, 7, 9, 364, 440, 572, 576, 581, 630, 671, 738, 739,740, 757, 774, 791, 808, 815, 819, 820, 839, 840, 871, 885,886, 896, 897: n = A,T,C or G
agtnngncnccgtaatacgactcactatagggcgaattggagctccaccgcggtggcggccgcccgggcaggtacctgctcaagatgcctggctgagagtgtgtgggagtctggttggagcccagattttatatatttatatattttatttagctttgaccaaaaagtgaacataaaaactgagtcatggtaattaaaactaacagataatttatctaaaataaatcttgatctgactaacattggtcaaacatgacgtgactttttactccttagatgcaccttgtgacataaatagaatccttcccttgcattttataaatgggaaaccagaagcaccaggagatgaagtgagggaactcancagtgggaggacctaaactgcagcccagtccaacagtgccagtcgaaacctagttttccaatgaaggactgctttnctgtcccttcgtctcctctttttcctacagcctcacacctaccactaattgactatttacttgagaggcatcgtagattaatggtttaaagaacatggacttctggtaccttcggccggtctagaactagtngatnccccnggctgcaaggaattcgattttcaagcttattcgattcccggtcgacctncgaagggggggccccggtacccaactttttggtcccctttnattggagggttaaattggcccgccttgggcggtaaattcattgggggcataagccttgttttcctgnnntggaaaattggttattncgcttcacaaatttccnccacaacaataccgaanccgggggccttaaaagnggtaaangccnngggggggccttaatgaagnngagcctacctcacattttatttggcgtttgngccttacttggccnncttttcaaannggg

SEQ ID NO: 3553 - DNA, 847 bp, Homo sapiens
  misc_feature 493, 510, 605, 652, 682, 711, 796, 812, 816, 833, 838, 841,843, 844: n = A,T,C or G
atacgactactatagggcgaattggagctccaccgcggtggcggcccgaggtacctgagaaaggaaaacaaggtgagtcctattaatgcttcccagactggccagattttctcactgcagccagccctatctcacatgtattaatgttataatttcacatactgtatgatgctatcctttgattagcgtttagtttgatgggaactccaaaccattaaagaaaattcaggccagccgtggtggcgccgtgcctgtggacccagctactcaggaggctgaaatgggaggatggctcaaactcgagcagtcaagtgagccgttattgtgccactgcactccagcctgggctgtaacagagcaagacccccatctctaaagcaggaaaaaaaaaaaaaaaaaaaaaagtacctgcccgggcggccgctctagaactagtggatcccccgggctgcaggaattcgatatcaagcttatcgataccgtcgacctcganggggggcccggtcccancttttgttccctttagtgagggttaattgcgcccttggcgtaatcatgggcattagctgtttcctgtgtgaaaattgttattccgctcacaattncacacaacatacgagcccggggagcataaagtgtaaagcctgggggngcctaatgagtgagctaactcacatttaanttgcgttgggctcactggccgcttttcanttcgggaaaacctgtcgtgcccccttgcatttaatgaattcggccacccccccgggggaaaaggccggtttgcgtttttgggggnctttttcggtttcttngttnattgaattcctttggcntcggncgntnnggt

SEQ ID NO: 3554 - DNA, 975 bp, Homo sapiens
  misc_feature 4, 7, 12, 72, 94, 178, 334, 369, 438, 445, 448, 449, 450,466, 470, 471, 483, 489, 500, 501, 506, 508, 531, 538, 548,549, 550, 572, 573, 591, 597, 602, 603, 609, 613, 616, 624,625, 633, 649, 652, 654, 660, 665, 668, 671, 674, 693: n = A,T,C or G
  misc_feature 713, 717, 722, 730, 746, 747, 753, 754, 755, 757, 758, 763,774, 776, 780, 782, 788, 796, 801, 813, 824, 827, 831, 841,842, 843, 844, 860, 862, 864, 874, 879, 881, 892, 901, 905,907, 914, 927, 928, 935, 943, 945, 946, 948, 955, 965: n = A,T,C or G
  misc_feature 974, 975: n = A,T,C or G
ggtntangctcncgtaatacgactactatagggcgaattggagctccaccgcggtggcggccgggggccatngagactgccatggaagacttgnaaggtcacgtatgctgagacttctggagagaccattcaaggcttctggctcttgacaaagatagaccactggaacaatgagaangagagaattctactggtcacagacaagactctcttgatctgcaaatacgacttcatcatgctgagttgtgtgcagctgcagcggattcctctgagcgctgtctatcgcatctgcctgggcaagtttcaccttccctgggatgtccctggacaaganacaaggagaaggccttaggatctactgggggagtncggaggagcagtctcttctgtcccgctggaaccccatgggtccactgaagttccttatgctactttcantggaacnttnnnatgaaaatacacccantgannaattttttttgnaaattnccaaagttggnntggcntnattgtcttaaactttttttcaancttttcnaaaattgccnnnaagaattttcaaacctgggatnntgggaaaaaaggaaaaanaaaacnttggnngggggnttanctnggaacccnnttttttanattggggaaaccttcnccncngggggntgggnggnccnttnaaattgggaaaaacccccnaacaaaaaattttgggtttntttnccctntgcccccntggggaagttttttgnntttttnnngnnagttntttttttgggntncccntnggcccntctttttnaaaantaagggggattnccccccggggnttngggnggaatttttnnnntttaaagcttttttantntncccgtaaaancctcnanggggggggggncccgggttncccnanttttttngtccccttttaanngaggggnttaatttngnncnccttggngttaattatnggggaaaann

SEQ ID NO: 3555 - DNA, 640 bp, Homo sapiens
  misc_feature 394, 468, 483, 484, 504, 506, 516, 517, 518, 520, 525, 532,535, 536, 548, 552, 558, 575, 582, 588, 590, 603, 606, 611,617, 620, 623, 626, 636, 639: n = A,T,C or G
aatacgactcactatagggcgaattggagctccaccgcggtggcggccgaggtaccccaaaaccaggggctgcagctccagcaattgggaaggccaagttttcttgcacgctccccagaaaaggggccaagtccatggggctgagcagtgatagactgcagacctcaccaccactgaaccttgtaggataaggcccactagcctgggatgctagtgaggccaccctagtcctcctgagttctccagctgggagcagccctacacttctccggcatgcagctcccaaagagagaggcagtccacctttttgctgtctcgcaaccctgcctcctgctgctctcaggcttgggagggtgcacagcaattagggactatcacagaaccccagcacagngcatctggtgaacttaaaaaaatcaacaagttgaaaaacaaacaatcccatttaaacgtacctgcccgggcggncggctctaaaactanngggatccccccgggcctggnangaaattttcnnnantcaangcctttnatnntttacccggccnaacntttganggggggggccccgggtnaccccancttttngntccccttttaaanganggggnttaaanttngcnccnctttggcctnaant

SEQ ID NO: 3556 - DNA, 615 bp, Homo sapiens
  misc_feature 311, 378, 393, 408, 419, 431, 445, 485, 492, 494, 506, 538,551, 553, 578, 582, 585, 592, 605, 607: n = A,T,C or G
gaattggagctccaccgcggtggcggccgcccgggcaggtacgcgggtgacatacttttgggccacattcttacaataattaactggaaggaatttaaagaattcatagtattctattccattttaaaaaataatctaaacagacaaacatattcagttaaaaggtgacactgagttaaaaggctacctaataatttaggaattatttatccttctcttctttggcctacttttgacatatctctaagaatcatgagttagaattttgaaattacatacaagtaaatgtgtattgattaaaggtgaacaangtgatttatcttatgactattgaattaagtattagaaacttcatgctacaaatgccaaaaaactaanatactggccaagaantttggaaatacaggngggccctgggnacagcatgtgtntgaactgtgctggnctgcttattcatgggaataaacatgaattggaaaataccngaattcngngggtcccacatntaccgggtagccaaacttttttcattttacantgggatttctggnanagcccaactgtggggaccttggagntatngtngaaagantttttggttttancnaagggggg

SEQ ID NO: 3557 - DNA, 617 bp, Homo sapiens
  misc_feature 494, 529, 553, 609, 614, 616: n = A,T,C or G
tcgtaatacgactcctatagggccgaattggagctccaccgcggtggcggccgaggtactttcaaagactttagaaccaaatgtcattcagctgaaaccataatgtattataaactacgtcttctagagctttgttgtcatagagtcaaatgagatgccaaatgctagcaatcctatttaggaggcctactattaggatttaaaagaagtggactgccagagatgaattatgtgacacagatgctaacatctagttattatgagtgatccattctgtcatgaggtagcacttgaaaaacaacctgggacaaaagaacaggcctctggcactactgaatttttggagagagaaacctttagaagttagcatgtggttctttctggacatgttcattgccttagttctccttttgcaaatattttgtaaatattcatgaagtgaaatgtagatgtttgaagaaggcagatctgcagatcccctaaagagcattgtnagttatgctgggctgttcctaccctatccctctgnttacctgcggcggcctctcaaaancgtgatccgtggtggcttttgtggggggttttaaatgtaatccgggagaagctagnctganana

SEQ ID NO: 3558 - DNA, 623 bp, Homo sapiens
  misc_feature 303, 304, 372, 378, 398, 437, 438, 471, 474, 509, 511, 513,524, 528, 533, 539, 540, 542, 551, 554, 556, 560, 565, 567,579, 585, 590, 593, 594, 595, 597, 602, 605, 609, 610, 611: n = A,T,C or G
cgaattggagctccaccgcggtggcggccgaggtacaaggagaccctgggcaagcagctagcagccccctttcacaaccctgcagagcgtcctggaggtcccagcagccactgttcttcctcctaagcttgcctgccatggcagcatccactccacccttcagtgcttgaagccaagtggttgtcgccccggaaggctctgcccttctggttttagactgctgtggaggagggagccacttggagatacaaagcccacctctctagaatcttccagggtccccacaaattataaaactatggnnacaccaggaaaccaaggcattttcaataacaacctttcctactgatttccagcttcatcttccagaantccagngcactgccattcataccatncattaactgtttctcctttcactagaccacgagcagggnntacagccacacccgaggaaacccatctcatgangtntaactactggacccccccccccccccccccctggnantncttcttggggnaggnccccncccccnngngggcccccnccnanggancctgntnggcccccccccnggcctnggttnggnnncnccccnctnttgnnncgccccccccct

SEQ ID NO: 3559 - DNA, 671 bp, Homo sapiens
  misc_feature 11, 207, 233, 283, 296, 317, 334, 352, 353, 362, 363, 364,367, 370, 379, 388, 389, 390, 394, 398, 399, 403, 406, 409,421, 433, 438, 445, 456, 462, 465, 467, 470, 482, 483, 500,511, 513, 523, 528, 535, 546, 553, 554, 557, 560, 564: n = A,T,C or G
  misc_feature 566, 567, 570, 575, 576, 578, 581, 583, 587, 590, 597, 598,600, 601, 614, 618, 619, 624, 630, 640, 652, 657, 658, 659,663, 664, 666, 669, 670: n = A,T,C or G
aattggagctncccgcggtggcggccgcccgggcaggtactgagtagaataggacgtgagacaagtgctctacttgaaataagcacagacgtggaagaagggatgtgtagttttgtctggggattcggcacagtttttatggaggatgtggtctgtgaaatggctgatttgaaacatgaaggaggctgcttatgggatgggttattntgggaagcaagcaagtgctgagggcnccatgaaggtatgaagggccttggagatacctcggccgctctagaactangttggatcccccnggcttgcaaggaaattcgatnatcaaagcttatcgatncccgtcggacctcgaggnngggggcccnnnacncancatttttgnttccctttnnntgangggnntaanttnccncgctttggccgnaattcattgggngcatnagctggnttccttgtggnggaaantgntnatntcgcttcaccannttcgcacacaaaccatncggaggccccngnagccattaanggtgncaaaagnccttggggggnggccctnnatngangtgnannctnaactnnancantntaanttnggcggtnngnngcctcaccctgcncccnnttttnccatantcgggggaanaaccttggctgngcccnnnttgnnanttnnt

SEQ ID NO: 3560 - DNA, 642 bp, Homo sapiens
  misc_feature 279, 383, 421, 436, 512, 518, 556, 559, 560, 576, 590, 618,634, 639, 642: n = A,T,C or G
ctatagggcgaattggagctccccgcggtggcggccgaggtaccctagggccttggcctgagcagatgtgtggccctcttggaatgaactgctacatgacatgctggtggtgtatttggtcataccttttaccatgttcaggctgtttgtttatttgagaatatttttctttaagttaatatgagacttttaatttcataatatgctatgtttcatagactgactgatgataaacatagactgataatcattttgcagataaacgcagtcaacaattgnaatttagttttttataaaagttattatttagtcagtaaattcaaggcttggacaaaaatagttctcactatgtgtgtgtgcccctcagggtgtaacatactttnggactcagtctttttattggtttgtttttgttaagtangatgaaaagctcaantagagcaggcccctcagcaaaaagttgtggatgtaaaagaaaattcttgggcccgggccttcgtttgactcattgnctggtnaatccccaggcccttttggggaggccccgaggcctagncannatcaccaaagggtcanggaagttttcgaanaaccagcccctgggcccaaatattgggnggaaaaacccccctcnttttnccn

SEQ ID NO: 3561 - DNA, 608 bp, Homo sapiens
  misc_feature 3, 87, 141, 144, 331, 356, 383, 412, 418, 462, 488, 549,563, 605, 608: n = A,T,C or G
tantaccactcactatagggcgaattggagctccaccgcggtggcggccgacgtaccatagtgggaactgctgggcccctaatgacnagagagatggatgaatggaccccactcccatttctcttcttctctccccttctnttntctctccttcctcccttcccccaatggccaaggacaacactaaaatcagtatcacaagtctgctgtggcacatggccatggaatgtgaccgtcagaggcagctcagagaggacacaactggaagaacaggtggtgtggaattttagaaccactgccttaagcattctgctcaaagtcccagaatggntgctctgatgggagctttttgaganatgatctctccctgcaaagagaataanaaatgggtgaggatgatagtatcctgganaagctntaactttgacaagctttaaggggtcttaaagcaaccaagtcctnctttgacagagaggtcaagctatttnacatctggtttgcccaaaaaactgtgcctgtgttttgctttaagacacaagggaacccgcncgctctagactagngggatcccccggcctgcagggaattcgattcaaacttatccnatn

SEQ ID NO: 3562 - DNA, 878 bp, Homo sapiens
  misc_feature 2, 3, 4, 5, 6, 36, 122, 280, 283, 284, 285, 291, 292, 294,305, 306, 307, 312, 313, 326, 333, 342, 344, 347, 349, 351,356, 358, 359, 361, 363, 366, 390, 391, 403, 404, 419, 425,426, 428, 432, 438, 453, 463, 471, 481, 500, 504, 508: n = A,T,C or G
  misc_feature 511, 513, 518, 520, 522, 527, 536, 540, 543, 546, 565, 574,583, 593, 608, 612, 630, 647, 654, 662, 663, 664, 665, 667,674, 682, 690, 692, 704, 714, 715, 716, 719, 720, 723, 736,741, 743, 744, 746, 759, 761, 764, 768, 794, 795, 806: n = A,T,C or G
  misc_feature 810, 816, 827, 839, 841, 854, 858, 862, 868, 870: n = A,T,C or G
tnnnnncgccctaatacgactactatagggcgaatnggagctccaccgcggtggcggccgaggtaccaggaagcccagctgtgctgtagttcctgctcttagatttctgtgggattcctcanagtatttttacaacatcgcctcatcttgggtttgcctgatctgggctgtgtcccctctaccatataagctgtaacgaacatactacagtaggcagatctctctgctgcttaaaataataaaacaatggaggcgacaaaaaaaaaaaaaaaaaaaaagnccnnnccgggnngnccgttttaaannnagggnnccccccggccggnagaattncaatttaancnttntnantcccngnnancntgngggggggccccgtcccaacttttnnttccttttaggnngggtaaatggccccntggggnnantatnggccanagttgttcctggggnaaaaatgttntccgttanaaattccacnaaaaatacaaacccggggnccanaaanggntnaaaancntnggggngcctaaatnaggnganctnacctcccattaatttgggnttgggcttncttgccccncttttcaaantggggaaaccctgtngggnccacttgttttaataaantctgccccccccccggngaaaagncggttttnnnntnttggggnctttttcnctttcctngntaaataaattcnttgccttggnnnttnnggnttggggaagcggnttttntnntntttaaaagggggnanttngggntttcccaaaaattagggggtaccccnnaaaaaaacctngggncaaaangcccccaaaanggcccggacccntnaaaagggccgggntggngggntttttnanagccccct

SEQ ID NO: 3563 - DNA, 877 bp, Homo sapiens
  misc_feature 2, 35, 518, 535, 536, 590, 598, 605, 672, 701, 739, 752,780, 782, 783, 796, 801, 803, 810, 817, 835, 859, 875: n = A,T,C or G
gnggcgcgcgtaatacgactactatagggcgaatnggagctccccgcggtggcggccgggggccattgagactgccatggaagacttgaaaggtcacgtagctgagacttctggagagaccattcaaggcttctggctcttgacaaagatagaccactggaacaatgagaaggagagaattctactggtcacagacaagactctcttgatctgcaaatacgacttcatcatgctgagttgtgtgcagctgcagcggattcctctgagcgctgtctatcgcatctgcctgggcaagttcaccttccctgggatgtccctggacaagagacaaggagaaggccttaggatctactgggggagtccggaggagcagtctcttctgtcccgctggaacccatggtccactgaaagttccttatgctactttcactgagcatcctatgaaaatacaccagtgagaaattcccttgaaatttgcaaagttgtctgggttcatgtctaaacttggtcccagcttntccagaatgcccacaannaatttcaaactggatcctgggaagaaggaaaagaaactggatggtggttaactnaaccccanttttganttgagaccctacccaggggctggattgttcattcatttggaaaaccccaaccaaaaccttgggcttnttccctttgccccgtgggaggtatttggnttttttgagaagtctttttgggaacctcgggcccgttntaaaaacttaatnggattccccccgggctgcaagggaattncnntttcaaggcttantcgantncccgtcnacccttnaagggggggccccggtancccaacttttggttcccttttagngaggggttaattggcncc

SEQ ID NO: 3564 - DNA, 824 bp, Homo sapiens
  misc_feature 3, 62, 93, 269, 335, 380, 474, 486, 527, 622, 673, 675, 706,710, 734, 778, 784, 796, 800, 805: n = A,T,C or G
ggngcgatcactactatagggcgaatgggagctccccgcggtggcggccgcccgggcaggtncaggagacaggtcagcagctgcggtcagcanaggcacacacgccagcccctggagatgggtggcttgtcctgagccaaagctgggctggtttataaacagcacctatgccttttccatttgaatttttacagctaccacttcctccacgagatgacttgctctctggattggaggtgtgtctgcatttcaggaacaagcaacttttntctgtggctacaggctgtacctcggccgctctagaactagtggatcccccgggctgcaggaattcnatatcaagcttatcgataccgtcgacctcgagggggggcccggtncccagcttttgttccctttagtgagggttaattgcgcgcttggcgtaatcatggtcatagctgtttcctgtgtgaaattgttatccgctcacanttccacacaacntacgagccgggagcataaagtgtaaagcctggggtgcctantgagtgagctaactcacattaattgcgttgcgctcactgcccgctttcaagtcgggaaacctgtcgtgccagctgcattaatgaatcggccaacncccggggagaggcggtttgcgtattgggcgctttttccgcttccttggttnantgactcgcttgggctcggtccgttcggttgngggngagcggtttcagcttacttcaaangcggtaataccggtttttccacaaaatcagggggataaccgcanggaaanaacatgtgagcnaaanggccnacaaaaggcccgggaccct

SEQ ID NO: 3565 - DNA, 817 bp, Homo sapiens
  misc_feature 3, 4, 7, 8, 16, 23, 33, 551, 552, 553, 554, 555, 556, 558,559, 560, 561, 562, 563, 564, 565, 566, 567, 568, 569, 570,571, 572, 573, 574, 575, 576, 577, 578, 579, 580, 581, 582,583, 584, 585, 586, 587, 588, 589, 590, 591, 592, 593: n = A,T,C or G
  misc_feature 594, 595, 596, 597, 598, 599, 600, 601, 602, 603, 604, 605,606, 607, 608, 609, 610, 611, 612, 613, 614, 615, 616, 617,618, 619, 620, 621, 622, 623, 624, 625, 626, 627, 628, 629,630, 631, 632, 633, 634, 635, 636, 637, 638, 639, 640: n = A,T,C or G
  misc_feature 641, 642, 643, 644, 645, 646, 647, 648, 649, 650, 651, 652,653, 654, 655, 656, 657, 658, 659, 660, 661, 662, 663, 664,665, 666, 667, 668, 669, 670, 671, 672, 673, 674, 675, 676,677, 678, 679, 680, 681, 682, 683, 684, 685, 686, 687: n = A,T,C or G
  misc_feature 688, 689, 690, 691, 692, 693, 694, 695, 696, 697, 698, 699,700, 701, 702, 703, 704, 705, 706, 707, 708, 709, 710, 711,712, 713, 714, 715, 716, 717, 718, 719, 720, 721, 722, 723,724, 725, 726, 727, 728, 729, 730, 731, 732, 733, 734: n = A,T,C or G
  misc_feature 735, 736, 737, 738, 739, 740, 741, 742, 743, 744, 745, 746,747, 748, 749, 750, 751, 752, 753, 754, 755, 756, 757, 758,759, 760, 761, 762, 763, 764, 765, 766, 767, 768, 769, 770,771, 772, 773, 774, 775, 776, 777, 778, 779, 780, 781: n = A,T,C or G
  misc_feature 782, 783, 784, 785, 786, 787, 788, 789, 790, 791, 792, 793,794, 795, 796, 797, 798, 799, 800, 801, 802, 803, 804, 805,806, 807, 808, 809, 810, 811, 812, 813, 814, 815, 816: n = A,T,C or G
agnnganncgcatatngacatantagagggctnattggagctccccgcggtggcggccgaggtacacacagttaaccacaaaacaggcctctctgaaaaagccattgccatggactgccagacagacaatgacaagacacaaataccttctggtgtgtgagccacgggacatgtgagcttcccgctgatgctcctcttatattaaagatcactttcacaagatgagcgactcaatatcttttatcaaaccaatgatcacctgcaagctatggtatatttttgcagctgtgtagagctatgtggcatgagaatgtgggacttataaattgctgatccaataaatagacattatgggcaacagtgtcttatcagctagtgtgtacctgcccgggcggccgctctagaactagtggatcccccgggctgcaggaattcgatatcaagcttatcgataccgtcgacctcgagggggggcccggtcccagcttttgttccctttaatgaggggttaattgcgcgcttggcgtaatcatggtcatagctgttcctgnnnnnnannnnnnnnnnnnnnnnnnnnnnnnnnnnnnnnnnnnnnnnnnnnnnnnnnnnnnnnnnnnnnnnnnnnnnnnnnnnnnnnnnnnnnnnnnnnnnnnnnnnnnnnnnnnnnnnnnnnnnnnnnnnnnnnnnnnnnnnnnnnnnnnnnnnnnnnnnnnnnnnnnnnnnnnnnnnnnnnnnnnnnnnnnnnnnnnnnnnnnnnnnnnnnnnnnnnnnnnnnnnnnnnnnnnnnnnnnnnnnnnnnnnnnnnnnnnnnnnnnng

SEQ ID NO: 3566 - DNA, 799 bp, Homo sapiens
  misc_feature 3, 16, 20, 21, 590, 617, 626, 628, 630, 632, 635, 636, 637,638, 639, 640, 641, 642, 643, 644, 645, 646, 647, 648, 649,650, 651, 652, 653, 654, 655, 656, 657, 658, 659, 660, 661,662, 663, 664, 665, 666, 667, 668, 669, 670, 671, 672: n = A,T,C or G
  misc_feature 673, 674, 675, 676, 677, 678, 679, 680, 681, 682, 683, 684,685, 686, 687, 688, 689, 690, 691, 692, 693, 694, 695, 696,697, 698, 699, 700, 701, 702, 703, 704, 705, 706, 707, 708,709, 710, 711, 712, 713, 714, 715, 716, 717, 718, 719: n = A,T,C or G
  misc_feature 720, 721, 722, 723, 724, 725, 726, 727, 728, 729, 730, 731,732, 733, 734, 735, 736, 737, 738, 739, 740, 741, 742, 743,744, 745, 746, 747, 748, 749, 750, 751, 752, 753, 754, 755,756, 757, 758, 759, 760, 761, 762, 763, 764, 765, 766: n = A,T,C or G
  misc_feature 767, 768, 769, 770, 771, 772, 773, 774, 775, 776, 777, 778,779, 780, 781, 782, 783, 784, 785, 786, 787, 788, 789, 790,791, 792, 793, 794, 795, 796, 797, 798: n = A,T,C or G
gcntatatggacatanttgnnggctgattggagctccaccgcggtggcggccgaggtacaattgatataacagctttgttgccaccccaggcttttctgtgatgatgccatgggccacattctgatcaaactgcacacccagaaggttaagtgttggctccaagcgagaaaaattattaagtttggcacttgaaaccctgctgtccaaaaattctgaaaaatcatcctgaagttcaaacttgtgtagaacttctccaagtagatagccactggaaaatgcctttgcaaatgacttgggactcacggtccgggacaccttcaactccttgttgagccactggcacaggatctccgacatggttcagccggtgcctcagaccgcaggcgggggcttagaaactcgccaggaaccaagcctgccagcccgcgtcctcctgtagccaagggcaaccctttgctcccgcgtacctgcccggcggccggttctagaactagtggatcccccgggctgcaggaattcgatatcaagcttatcgataccgtcgacctcgagggggggcccggtacccagcttttggtccttttatgangggttaattgcccttggcgtaatcatnggcaaaaantntntncgnnnnnnnnnnnnnnnnnnnnnnnnnnnnnnnnnnnnnnnnnnnnnnnnnnnnnnnnnnnnnnnnnnnnnnnnnnnnnnnnnnnnnnnnnnnnnnnnnnnnnnnnnnnnnnnnnnnnnnnnnnnnnnnnnnnnnnnnnnnnnnnnnnnnnnnnnnnnnnnnnnnng

SEQ ID NO: 3567 - DNA, 817 bp, Homo sapiens
  misc_feature 2, 3, 4, 5, 7, 9, 18, 29, 35, 61, 519, 526, 527, 528, 529,530, 531, 532, 533, 534, 535, 536, 537, 538, 539, 540, 541,542, 543, 544, 545, 546, 547, 548, 549, 550, 551, 552, 553,554, 555, 556, 557, 558, 559, 560, 561, 562, 563, 564: n = A,T,C or G
  misc_feature 565, 566, 567, 568, 569, 570, 571, 572, 573, 574, 575, 576,577, 578, 579, 580, 581, 582, 583, 584, 585, 586, 587, 588,589, 590, 591, 592, 593, 594, 595, 596, 597, 598, 599, 600,601, 602, 603, 604, 605, 606, 607, 608, 609, 610, 611: n = A,T,C or G
  misc_feature 612, 613, 614, 615, 616, 617, 618, 619, 620, 621, 622, 623,624, 625, 626, 627, 628, 629, 630, 631, 632, 633, 634, 635,636, 637, 638, 639, 640, 641, 642, 643, 644, 645, 646, 647,648, 649, 650, 651, 652, 653, 654, 655, 656, 657, 658: n = A,T,C or G
  misc_feature 659, 660, 661, 662, 663, 664, 665, 666, 667, 668, 669, 670,671, 672, 673, 674, 675, 676, 677, 678, 679, 680, 681, 682,683, 684, 685, 686, 687, 688, 689, 690, 691, 692, 693, 694,695, 696, 697, 698, 699, 700, 701, 702, 703, 704, 705: n = A,T,C or G
  misc_feature 706, 707, 708, 709, 710, 711, 712, 713, 714, 715, 716, 717,718, 719, 720, 721, 722, 723, 724, 725, 726, 727, 728, 729,730, 731, 732, 733, 734, 735, 736, 737, 738, 739, 740, 741,742, 743, 744, 745, 746, 747, 748, 749, 750, 751, 752: n = A,T,C or G
  misc_feature 753, 754, 755, 756, 757, 758, 759, 760, 761, 762, 763, 764,765, 766, 767, 768, 769, 770, 771, 772, 773, 774, 775, 776,777, 778, 779, 780, 781, 782, 783, 784, 785, 786, 787, 788,789, 790, 791, 792, 793, 794, 795, 796, 797, 798, 799-817: n = A,T,C or G
gnnnnanancgcataatngacatactatngggctnattggagctccaccgcggtggcggcncgaggtacaaggggttttcctctctgtctcttccatcacgggatggtgtctaggcacatggtaagggccatcttgttcttgcagttgtcactggttggttgagggctcttatattgtttaatgtcaagccaggtcttctgtggttattgaaaattaagtgtcttttgcaggtcattctcacacccctgttgatgatcttcactgttgcttcgagccataagcttacctttcactgtgaactctggccccaaccccagacctacttctgtccactaatcctacagcttcccttggtacctgcccgggcggccgctctagaactagtggatcccccgggctgcaggaattcgatatcaagcttatcgataccgtcgacctcgagggggggcccggtacccagcttttgttccctttagtgagggttaattgcgcgcttggcgtaatcatggtcatacttnttccggnnnnnnnnnnnnnnnnnnnnnnnnnnnnnnnnnnnnnnnnnnnnnnnnnnnnnnnnnnnnnnnnnnnnnnnnnnnnnnnnnnnnnnnnnnnnnnnnnnnnnnnnnnnnnnnnnnnnnnnnnnnnnnnnnnnnnnnnnnnnnnnnnnnnnnnnnnnnnnnnnnnnnnnnnnnnnnnnnnnnnnnnnnnnnnnnnnnnnnnnnnnnnnnnnnnnnnnnnnnnnnnnnnnnnnnnnnnnnnnnnnnnnnnnnnnnnnnnnnnnnnnnnnnnnnnnnnnnnnnnnnnnnnnnnnnn

SEQ ID NO: 3568 - DNA, 843 bp, Homo sapiens
  misc_feature 3, 4, 7, 12, 17, 24, 28, 331, 333, 334, 335, 336, 337, 338,339, 340, 341, 342, 343, 344, 345, 346, 347, 348, 349, 350,351, 352, 353, 354, 355, 356, 357, 358, 359, 360, 361, 362,363, 364, 365, 366, 367, 368, 369, 370, 371, 372, 373: n = A,T,C or G
  misc_feature 374, 375, 376, 377, 378, 379, 380, 381, 382, 383, 384, 385,386, 387, 388, 389, 390, 391, 392, 393, 394, 395, 396, 397,398, 399, 400, 401, 402, 403, 404, 405, 406, 407, 408, 409,410, 411, 412, 413, 414, 415, 416, 417, 418, 419, 420: n = A,T,C or G
  misc_feature 421, 422, 423, 424, 425, 426, 427, 428, 429, 430, 431, 432,433, 434, 435, 436, 437, 438, 439, 440, 441, 442, 443, 444,445, 446, 447, 448, 449, 450, 451, 452, 453, 454, 455, 456,457, 458, 459, 460, 461, 462, 463, 464, 465, 466, 467: n = A,T,C or G
  misc_feature 468, 469, 470, 471, 472, 473, 474, 475, 476, 477, 478, 479,480, 481, 482, 483, 484, 485, 486, 487, 488, 489, 490, 491,492, 493, 494, 495, 496, 497, 498, 499, 500, 501, 502, 503,504, 505, 506, 507, 508, 509, 510, 511, 512, 513, 514: n = A,T,C or G
  misc_feature 515, 516, 517, 518, 519, 520, 521, 522, 523, 524, 525, 526,527, 528, 529, 530, 531, 532, 533, 534, 535, 536, 537, 538,539, 540, 541, 542, 543, 544, 545, 546, 547, 548, 549, 550,551, 552, 553, 554, 555, 556, 557, 558, 559, 560, 561: n = A,T,C or G
  misc_feature 562, 563, 564, 565, 566, 567, 568, 569, 570, 571, 572, 573,574, 575, 576, 577, 578, 579, 580, 581, 582, 583, 584, 585,586, 587, 588, 589, 590, 591, 592, 593, 594, 595, 596, 597,598, 600, 601, 602, 603, 604, 605, 606, 607, 608, 609-843: n = A,T,C or G
tgnngangcgcntattngacatantatntggctgattggagctccaccgcggtggcggccgaggtactctgctataacatgagatctgtctctccaggctctggcttcctcaaggacagctgccaccaggtcctatccatcttgtaagtccccccgcgtacctgcccgggcggccgctctagaactagtggatcccccgggctgcaggaattcgatatcaagcttatcgataccgtcgacctcgagggggggcccggtacccagcttttgttccctttagtgagggttaattgcgcgcttggcgtaatcatggtcatagctgttcctgganannnnnnnnnnnnnnnnnnnnnnnnnnnnnnnnnnnnnnnnnnnnnnnnnnnnnnnnnnnnnnnnnnnnnnnnnnnnnnnnnnnnnnnnnnnnnnnnnnnnnnnnnnnnnnnnnnnnnnnnnnnnnnnnnnnnnnnnnnnnnnnnnnnnnnnnnnnnnnnnnnnnnnnnnnnnnnnnnnnnnnnnnnnnnnnnnnnnnnnnnnnnnnnnnnnnnnnnnnnnnnnnnnnnnnnnnnnnnnnnnnnnnnnnnnnnnnnnnnnnnnnnnnannnnnnnnnnnnnnnnnnnnnnnnnnnnnnnnnnnnnnnnnnnnnnnnnnnnnnnnnnnnnnnnnnnnnnnnnnnnnnnnnnnnnnnnnnnnnnnnnnnnnnnnnnnnnnnnnnnnnnnnnnnnnnnnnnnnnnnnnnnnnnnnnnnnnnnnnnnnnnnnnnnnnnnnnnnnnnnnnnnnnnnnnnnnnnnnnnnnnnnnnnnnnnnnnnnnnnnnnnnnnnnnnnnnnnnnnnnnnnnnnnnn

SEQ ID NO: 3569 - DNA, 813 bp, Homo sapiens
  misc_feature 9, 15, 21, 465, 476, 494, 515, 538, 541, 552, 577, 583, 623,649, 672, 675, 680, 697, 705, 708, 726, 735, 738, 747, 749,750, 756, 757, 775, 782, 797, 809: n = A,T,C or G
agccgtatngactanttgtgnctgattggagctccccgcggtggccgagcggccgcccgggcaggtacctacgatcctctgatttggggatggggttggcgcagcgttggctgttatacttggccacatattcacattgcttgaagggggcagtcttgtcctccagaacgtgtctgatcagaaggcgtagcccgttgagtcgcctctgcttgcacagtttggggctatatgagcacaagggcttattgtcaacctcagagaagtgtatatgtttcccttcatacatcacgtgactctattccttgtgaacatcagctgattttaaatcttctgcaccatagcaatgttaagagaacccccaaggataccgcaatttggaatgccgcaaaatcaggatgaagcagattgtctttcagctgcttttttttttctccttcccccctgttccctcggctgggctgacanataaaagtganaggccctggcaatggacnaggaagcttggttgccgttgntactgtcccccctgggctccggnganacctttccctntaaagcaaaaggggtgaggatcatntttttnttttggaaactaaaaagtgctcccaggggtcgggtgattnttaaggggaaatccctgaaaatactntccaaccaaaaaaggcagggctnccngggcnttacccttggcccgctntaaaaacnaanggaatcccccggcctgcnggaatttcnaanttaagcttntnnaatccnnccaccctgaggggggggncccggtnccccacttttttttnccctttagggangggg

SEQ ID NO: 3570 - DNA, 828 bp, Homo sapiens
  misc_feature 1, 6, 16, 23, 306, 311, 412, 496, 511, 519, 524, 542, 550,557, 570, 580, 582, 584, 605, 613, 622, 643, 652, 675, 680,693, 695, 710, 714, 745, 752, 757, 758, 765, 767, 777, 779,804, 814, 817, 827: n = A,T,C or G
ncgcgnatcgacatanttgtttnctgattggagctccaccgcggtggcggcccgaggtaccagaggggatgtagcctgatgcccttatcaacaaagtcagggatggtggcacacaaggtttgactactgcatacacggtcacagtgctacttccagatggcctgaattcccctgctctctctggtggggagaagggctggcagagccattagcatgagcttcagccaatcctggccactttgatgctcctggtgctgacccagggtcctggaggatgggctgaggtgggggggtagagatgttcanggcancagcagctcctttccatccacactggaactatttcagtatttcaccccaattcatctattcccttgtgcgctgactgaacatcagccctgctccaggtctnagtttcccctttgtaaagggaaagctctggattcaggggtggtgagaggtcatcatggtcttgagatttcaggcctgtaggcangggggtgagaggttnactatgantgcanaataccaatgctgggtanaagcaaangaaaaantggcctccctttngacccaagtngnangttcacaagaaacaccgtttncttctttnttcaaggcnagactttgttaacaagtgagnttaaagcantatggcactttgggactaactangaatntaaccctccctgnanccttccacttcattngacnacatgaaaaggaatgttttaagttttaactnggaacangcttnntggcccngnatttactttntnaatggaagggacagcccctcttcanaaaccccggnggngcccaaaacnt

SEQ ID NO: 3571 - DNA, 817 bp, Homo sapiens
  misc_feature 4, 5, 9, 10, 19, 399, 584, 586, 587, 588, 589, 590, 591,592, 593, 594, 595, 596, 597, 598, 599, 600, 601, 602, 603,604, 605, 606, 607, 608, 609, 610, 611, 612, 613, 614, 615,616, 617, 618, 619, 620, 621, 622, 623, 624, 625, 626: n = A,T,C or G
  misc_feature 627, 628, 629, 630, 631, 632, 633, 634, 635, 636, 637, 638,639, 640, 641, 642, 643, 644, 645, 646, 647, 648, 649, 650,651, 652, 653, 654, 655, 656, 657, 658, 659, 660, 661, 662,663, 664, 665, 666, 667, 668, 669, 670, 671, 672, 673: n = A,T,C or G
  misc_feature 674, 675, 676, 677, 678, 679, 680, 681, 682, 683, 684, 685,686, 687, 688, 689, 690, 691, 692, 693, 694, 695, 696, 697,698, 699, 700, 701, 702, 703, 704, 705, 706, 707, 708, 709,710, 711, 712, 713, 714, 715, 716, 717, 718, 719, 720: n = A,T,C or G
  misc_feature 721, 722, 723, 724, 725, 726, 727, 728, 729, 730, 731, 732,733, 734, 735, 736, 737, 738, 739, 740, 741, 742, 743, 744,745, 746, 747, 748, 749, 750, 751, 752, 753, 754, 755, 756,757, 758, 759, 760, 761, 762, 763, 764, 765, 766, 767: n = A,T,C or G
  misc_feature 768, 769, 770, 771, 772, 773, 774, 775, 776, 777, 778, 779,780, 781, 782, 783, 784, 785, 786, 787, 788, 789, 790, 791,792, 793, 794, 795, 796, 797, 798, 799, 800, 801, 802, 803,804, 805, 806, 807, 808, 809, 810, 811, 812, 813, 814: n = A,T,C or G
  misc_feature 815, 816: n = A,T,C or G
agcnngaanncgcataatngacatactatgttggctgattggagctccccgcggtggcggcccgaggtacctttctttccaggccatggcaaaaaaatccaattatgtccgtcttgagtctgtggtcttgcttcttatgtagtatttcctttgtgagctgaagattaatgcatggattcacctccttcagcacatttcatttcaattgtgaagaaaagattccaggcactgaatgtaaaattgaacatgacattttgacattccttcttctgagagctgggttggtcttagttgctgtgaggctctagacaccgaccatacagggcgtggggctgctcctggacatgaacatcctccgaagttctccccatccactttaccccctcttgggctcacctntgaatgtccccgcgtacctgcccgggcggccgctctagaactagtggatcccccgggctgcaggaattcgatatcaagcttatcgataccgtcgacctcgagggggggcccggtacccagcttttgttccctttagtgagggttaattgcgcgcttggcgtaatcatggtcataactttttcctngnnnnnnnnnnnnnnnnnnnnnnnnnnnnnnnnnnnnnnnnnnnnnnnnnnnnnnnnnnnnnnnnnnnnnnnnnnnnnnnnnnnnnnnnnnnnnnnnnnnnnnnnnnnnnnnnnnnnnnnnnnnnnnnnnnnnnnnnnnnnnnnnnnnnnnnnnnnnnnnnnnnnnnnnnnnnnnnnnnnnnnnnnnnnnnnnnnnnnnnnnnnnnnnnnnnnnnnnnnnnnnnnnnnnnnng

SEQ ID NO: 3572 - DNA, 716 bp, Homo sapiens
  misc_feature 6, 21, 544, 545, 546, 547, 548, 549, 550, 551, 552, 553,554, 555, 556, 557, 558, 559, 560, 561, 562, 563, 564, 565,566, 567, 568, 569, 570, 571, 572, 573, 574, 575, 576, 577,578, 579, 580, 581, 582, 583, 584, 585, 586, 587, 588: n = A,T,C or G
  misc_feature 589, 590, 591, 592, 593, 594, 595, 596, 597, 598, 599, 600,601, 602, 603, 604, 605, 606, 607, 608, 609, 610, 611, 612,613, 614, 615, 616, 617, 618, 619, 620, 621, 622, 623, 624,625, 626, 627, 628, 629, 630, 631, 632, 633, 634, 635: n = A,T,C or G
  misc_feature 636, 637, 638, 639, 640, 641, 642, 643, 644, 645, 646, 647,648, 649, 650, 651, 652, 653, 654, 655, 656, 657, 658, 659,660, 661, 662, 663, 664, 665, 666, 667, 668, 669, 670, 671,672, 673, 674, 675, 676, 677, 678, 679, 680, 681, 682: n = A,T,C or G
  misc_feature 683, 684, 685, 686, 687, 688, 689, 690, 691, 692, 693, 694,695, 696, 697, 698, 699, 700, 701, 702, 703, 704, 705, 706,707, 708, 709, 710, 711, 712, 713, 714, 715, 716: n = A,T,C or G
cgatangcatactatgaggcngattggagctccaccgcggtggcggccgaggtacacactagctgataagacactgttgcccataatgtctatttattggatcagcaatttataagtcccacattctcatgccacatagctctacacagctgcaaaaatataccatagcttgcaggtgatcattggtttgataaaagatattgagtcgctcatcttgtgaaagtgatctttgatataagaggagcatcagcggggaagctcacatgtcccgtggctcacacaccagaaggtatttgtgtcttgtcattgtctgtctggcagtccatggcaatggctttttcagagaggcctgttttgtggttaactgtgtgtacctgcccgggcggccgctctagaactagtggatcccccgggctgcaggaattcgatatcaagcttatcgataccgtcgacctcgagggggggcccggtacccagcttttgttccctttagtgagggttaattgcgcgcttggcgtaatcatggtcatagctgtttcctggnnnnnnnnnnnnnnnnnnnnnnnnnnnnnnnnnnnnnnnnnnnnnnnnnnnnnnnnnnnnnnnnnnnnnnnnnnnnnnnnnnnnnnnnnnnnnnnnnnnnnnnnnnnnnnnnnnnnnnnnnnnnnnnnnnnnnnnnnnnnnnnnnnnnnnnnnnnnnnnnnnnnnnnnnnnnn

SEQ ID NO: 3573 - DNA, 710 bp, Homo sapiens
  misc_feature 2, 3, 7, 531, 591, 592, 593, 594, 595, 596, 597, 598, 599,600, 601, 602, 603, 604, 605, 606, 607, 608, 609, 610, 611,612, 613, 614, 615, 616, 617, 618, 619, 620, 621, 622, 623,624, 625, 626, 627, 628, 629, 630, 631, 632, 633, 634: n = A,T,C or G
  misc_feature 635, 636, 637, 638, 639, 640, 641, 642, 643, 644, 645, 646,647, 648, 649, 650, 651, 652, 653, 654, 655, 656, 657, 658,659, 660, 661, 662, 663, 664, 665, 666, 667, 668, 669, 670,671, 672, 673, 674, 675, 676, 677, 678, 679, 680, 681: n = A,T,C or G
  misc_feature 682, 683, 684, 685, 686, 687, 688, 689, 690, 691, 692, 693,694, 695, 696, 697, 698, 699, 700, 701, 702, 703, 704, 705,706, 707, 708, 709, 710: n = A,T,C or G
gnnaagnatcgactcactatagggcgaattggagctccccgcggtggcggccgaggtacttccgtgagatataaggctgatgataaggattggggtaaagagttgattcggtcacacttgactgccttgaaatctgtcttggcatcgggtcctcttcctccatcgataggtggtcagtctcagagggttggtcatctccctcttgcttcagagacacagcctggaatccttcaaaactcccaattgttgacatttcttcagcctgactaggctggtcctcaaggctcttctttctctttctgcacaaagggggctagaccacagatagtggccaggagaggtgtgactggctcatataaagccaggcaagacagtgccctgtgctgtgaccccactcagtctgaatctcacttcaccaagtacctgcccgggcggccgctctagaactagtggatcccccgggctgcaggaattcgatatcaagcttatcgataccgtcgacctcgagggggggcccggtacccagctttngttccctttagtgagggttaattgcgcgcttggcgtaatcatggtcatagctgttcctgnnnnnnnnnnnnnnnnnnnnnnnnnnnnnnnnnnnnnnnnnnnnnnnnnnnnnnnnnnnnnnnnnnnnnnnnnnnnnnnnnnnnnnnnnnnnnnnnnnnnnnnnnnnnnnnnnnnnnnnn

SEQ ID NO: 3574 - DNA, 704 bp, Homo sapiens
  misc_feature 5, 6, 12, 14, 31, 174, 213, 259, 286, 301, 341, 365, 375,380, 381, 443, 475, 489, 511, 515, 542, 568, 575, 576, 577,582, 584, 594, 596, 611, 615, 618, 628, 630, 653, 654, 659,662, 665, 666, 667, 668, 669, 670, 671, 672, 673, 674: n = A,T,C or G
  misc_feature 675, 676, 677, 678, 679, 680, 681, 682, 683, 684, 685, 686,687, 688, 689, 690, 691, 692, 693, 694, 695, 696, 697, 698,699, 700, 701, 702, 703, 704: n = A,T,C or G
aaganngcatantngacttagtatggggctnattggagctccccgcggtggcggccgaggtacctctcataaactttgttcattcagccacttgaaataagccacgtgggttatgtgccacgcaaaatttcagtaatgggttttgggagtgtttagatagcaacaacttcatanactgaaccttttggttgtttttctttctctccaactcanaggttaaaaattaacctgaaaaatcaatgctgcaatatgaaatgcnctgtatgtttcttgcatggacttgcanacactctgtaacggngtttccagtctccacagttcatattggaaggtgagctttnacatggaccaaccctttgcgttgncaaggagtanggatnntacaagtttgaaagacatttacaagataattccaaagggcctcttattttcaaattcatcanaagctcctataatttcaatgccatgagtgctnggcataagggggcnttcagtgagtgaagacctgccnggcnggccctttaaaaatagtggatcccccngctgcggaatttgatttaagcttatnaaaccgnnnacctnangggggggccngncccacttttggtccnttangangggtaaatgncncttggggtaaacatggggataanntgttnccnggnnnnnnnnnnnnnnnnnnnnnnnnnnnnnnnnnnnnnnnn

SEQ ID NO: 3575 - DNA, 948 bp, Homo sapiens
  misc_feature 5, 12, 17, 34, 44, 55, 391, 475, 476, 477, 478, 479, 480,481, 482, 483, 484, 485, 486, 487, 488, 489, 490, 491, 492,493, 494, 495, 496, 497, 498, 499, 500, 501, 502, 503, 504,505, 506, 507, 508, 509, 510, 511, 512, 513, 514, 515: n = A,T,C or G
  misc_feature 516, 517, 518, 519, 520, 521, 522, 523, 524, 525, 526, 527,528, 529, 530, 531, 532, 533, 534, 535, 536, 537, 538, 539,540, 541, 542, 543, 544, 545, 546, 547, 548, 549, 550, 551,552, 553, 554, 555, 556, 557, 558, 559, 560, 561, 562: n = A,T,C or G
  misc_feature 563, 564, 565, 566, 567, 568, 569, 570, 571, 572, 573, 574,575, 576, 577, 578, 579, 580, 581, 582, 583, 584, 585, 586,587, 588, 589, 590, 591, 592, 593, 594, 595, 596, 597, 598,599, 600, 601, 602, 603, 604, 605, 606, 607, 608, 609: n = A,T,C or G
  misc_feature 610, 611, 612, 613, 614, 615, 616, 617, 618, 619, 620, 621,622, 623, 624, 625, 626, 627, 628, 629, 630, 631, 632, 633,634, 635, 636, 637, 638, 639, 640, 641, 642, 643, 644, 645,646, 647, 648, 649, 650, 651, 652, 653, 654, 655, 656: n = A,T,C or G
  misc_feature 657, 658, 659, 660, 661, 662, 663, 664, 665, 666, 667, 668,669, 670, 671, 672, 673, 674, 675, 676, 677, 678, 679, 680,681, 682, 683, 684, 685, 686, 687, 688, 689, 690, 691, 692,693, 694, 695, 696, 697, 698, 699, 700, 701, 702, 703: n = A,T,C or G
  misc_feature 704, 705, 706, 707, 708, 709, 710, 711, 712, 713, 714, 715,716, 717, 718, 719, 720, 721, 722, 723, 724, 725, 726, 727,728, 729, 730, 731, 732, 733, 734, 735, 736, 737, 738, 739,740, 741, 742, 743, 744, 745, 746, 747, 748, 749, 750-947: n = A,T,C or G
tagtngacatanttgtngctgattggagctccancgcgcttatngacatagtatntggctgattggagctccacccgcggtggcggccgcccgggcaggtacttattgtatatttctcacattctttcagaaagttattaaaatgggctttacagttgcgttgcttttttttaaagagagaagattgaaatttattttgcagctatacacttggttttggattattcatgtgtataaagttatttgagctgctccacttctctgacctaaggctgtggctaaaatgggtttggagaaaaaattcttgcctgtcctcggccgctctaaaactagtggatcccccgggctgcaggaattcgatatcaagcttatcgataccgtcgacctcganggggggcccggacccagcttttgttccctttagtgagggttaattgcgcgcttggcgtaatcatggtcatagctgtttcctggnnnnnnnnnnnnnnnnnnnnnnnnnnnnnnnnnnnnnnnnnnnnnnnnnnnnnnnnnnnnnnnnnnnnnnnnnnnnnnnnnnnnnnnnnnnnnnnnnnnnnnnnnnnnnnnnnnnnnnnnnnnnnnnnnnnnnnnnnnnnnnnnnnnnnnnnnnnnnnnnnnnnnnnnnnnnnnnnnnnnnnnnnnnnnnnnnnnnnnnnnnnnnnnnnnnnnnnnnnnnnnnnnnnnnnnnnnnnnnnnnnnnnnnnnnnnnnnnnnnnnnnnnnnnnnnnnnnnnnnnnnnnnnnnnnnnnnnnnnnnnnnnnnnnnnnnnnnnnnnnnnnnnnnnnnnnnnnnnnnnnnnnnnnnnnnnnnnnnnnnnnnnnnnnnnnnnnnnnnnnnnnnnnnnnnnnnnnnnnnnnnnnnnnnnnnnnnnnnnnnnnnnnnnnnnnnnnnnnnnnnnnnnnnnnnnnnnnnnnnnnnnnnnnnnnnnng

SEQ ID NO: 3576 - DNA, 976 bp, Homo sapiens
  misc_feature 2, 9, 12, 18, 340, 341, 342, 343, 344, 345, 346, 351, 352,353, 357, 358, 359, 360, 364, 366, 367, 368, 369, 370, 373,374, 375, 376, 377, 381, 382, 383, 384, 395, 397, 398, 403,404, 405, 411, 413, 419, 420, 421, 422, 424, 425, 426: n = A,T,C or G
  misc_feature 427, 428, 429, 430, 431, 432, 433, 434, 435, 436, 437, 438,439, 440, 441, 442, 443, 444, 445, 446, 447, 448, 449, 450,451, 452, 453, 454, 455, 456, 457, 458, 459, 460, 461, 462,463, 464, 465, 466, 467, 468, 472, 473, 474, 475, 476: n = A,T,C or G
  misc_feature 477, 478, 479, 480, 481, 482, 483, 484, 485, 486, 487, 488,489, 490, 491, 492, 493, 494, 495, 496, 497, 498, 499, 500,501, 502, 503, 504, 505, 506, 507, 508, 509, 510, 511, 512,513, 514, 515, 516, 517, 518, 519, 520, 521, 522, 523: n = A,T,C or G
  misc_feature 524, 525, 526, 527, 528, 529, 530, 531, 532, 533, 534, 535,536, 537, 538, 539, 540, 541, 542, 543, 544, 545, 546, 547,548, 549, 550, 551, 552, 553, 554, 555, 556, 557, 558, 559,560, 561, 562, 563, 564, 565, 566, 567, 568, 569, 570: n = A,T,C or G
  misc_feature 571, 572, 573, 574, 575, 576, 577, 578, 579, 580, 581, 582,583, 584, 585, 586, 587, 588, 589, 590, 591, 592, 593, 594,595, 596, 597, 598, 599, 600, 601, 602, 603, 604, 605, 606,607, 608, 609, 610, 611, 612, 613, 614, 615, 616, 617: n = A,T,C or G
  misc_feature 618, 619, 620, 621, 622, 623, 624, 625, 626, 627, 628, 629,630, 631, 632, 633, 634, 635, 636, 637, 638, 639, 640, 641,642, 643, 644, 645, 646, 647, 648, 649, 650, 651, 652, 653,654, 655, 656, 657, 658, 659, 660, 661, 662, 663, 664-976: n = A,T,C or G
antgactanttntggctnattggagctccaccgcggtggcggccgaggtactagtaagttctgggtagggggtggatgagtcctaggggtggggggccccaggcacacaggaaccatagttaaccactcttcacctacagaagactcctcaggtcaaagcttcactgtacctgcccgggcggccgctctagaactagtggatcccccgggctgcaggaattcgatatcaagcttatcgataccgtcgacctcgagggggggcccggtacccagcttttgttccctttagtgagggttaattgcgcgcttggcgtaatcatggtcatagctgtttccctgnnnnnnnaaatnnntttnnnncttntnnnnnccnnnnncctnnnngggggggcccngnnccccnnntttttntncctttnnnnannnnnnnnnnnnnnnnnnnnnnnnnnnnnnnnnnnnnnnnnnnnntttnnnnnnnnnnnnnnnnnnnnnnnnnnnnnnnnnnnnnnnnnnnnnnnnnnnnnnnnnnnnnnnnnnnnnnnnnnnnnnnnnnnnnnnnnnnnnnnnnnnnnnnnnnnnnnnnnnnnnnnnnnnnnnnnnnnnnnnnnnnnnnnnnnnnnnnnnnnnnnnnnnnnnnnnnnnnnnnnnnnnnnnnnnnnnnnnnnnnnnnnnnnnnnnnnnnnnnnnnnnnnnnnnnnnnnnnnnnnnnnnnnnnnnnnnnnnnnnnnnnnnnnnnnnnnnnnnnnnnnnnnnnnnnnnnnnnnnnnnnnnnnnnnnnnnnnnnnnnnnnnnnnnnnnnnnnnnnnnnnnnnnnnnnnnnnnnnnnnnnnnnnnnnnnnnnnnnnnnnnnnnnnnnnnnnnnnnnnnnnnnnnnnnnnnnnnnnnnnnnnnnnnnnnnnnnnnnnnnnnnnnnnnnnnnnnnnnnnnnnnnnnnnnnnnnnnnnnnnnnnnnnnnnnnnnnnnnnnnnnnnnnnnn

SEQ ID NO: 3577 - DNA, 982 bp, Homo sapiens
  misc_feature 6, 9, 13, 18, 42, 327, 328, 329, 330, 331, 332, 333, 334,335, 336, 337, 338, 339, 340, 341, 342, 343, 344, 345, 346,347, 348, 349, 350, 351, 352, 353, 355, 356, 357, 358, 359,360, 361, 362, 363, 364, 365, 366, 367, 368, 369, 370: n = A,T,C or G
  misc_feature 371, 372, 373, 374, 375, 376, 377, 378, 379, 380, 381, 382,383, 384, 385, 386, 387, 388, 389, 390, 391, 392, 393, 394,395, 396, 397, 398, 399, 400, 401, 402, 403, 404, 405, 406,407, 408, 409, 410, 411, 412, 413, 414, 415, 416, 417: n = A,T,C or G
  misc_feature 418, 419, 420, 421, 422, 423, 424, 425, 426, 427, 428, 429,430, 431, 432, 433, 434, 435, 436, 437, 438, 439, 440, 441,442, 443, 444, 445, 446, 447, 448, 449, 450, 451, 452, 453,454, 455, 456, 457, 458, 459, 460, 461, 462, 463, 464: n = A,T,C or G
  misc_feature 465, 466, 467, 468, 469, 470, 471, 472, 473, 474, 475, 476,477, 478, 479, 480, 481, 482, 483, 484, 485, 486, 487, 488,489, 490, 491, 492, 493, 494, 495, 496, 497, 498, 499, 500,501, 502, 503, 504, 505, 506, 507, 508, 509, 510, 511: n = A,T,C or G
  misc_feature 512, 513, 514, 515, 516, 517, 518, 519, 520, 521, 522, 523,524, 525, 526, 527, 528, 529, 530, 531, 532, 533, 534, 535,536, 537, 538, 539, 540, 541, 542, 543, 544, 545, 546, 547,548, 549, 550, 551, 552, 553, 554, 555, 556, 557, 558: n = A,T,C or G
  misc_feature 559, 560, 561, 562, 563, 564, 565, 566, 567, 568, 569, 570,571, 572, 573, 574, 575, 576, 577, 578, 579, 580, 581, 582,583, 584, 585, 586, 587, 588, 589, 590, 591, 592, 593, 594,595, 596, 597, 598, 599, 600-764, 766-982: n = A,T,C or G
tcgacntanttgnggctnattggagctccccgcggtggcggncgcccgggcaggtacgcggggacgttaagaactggacttacaagatggataggacctggtggcagctgtccttgaggaagccagagcctggagagacagatctcatgttatagcagagtacctcggccgctctagactagtggatcccccggcctgcaggaattcgatatcaagcttatcgataccgtcgacctcgagggggggcccggtacccagcttttgttccctttagtgaggggttaattgcgcgcttggcgtaatcatggtcatagctgtttcctggannnnnnnnnnnnnnnnnnnnnnnnnnntnnnnnnnnnnnnnnnnnnnnnnnnnnnnnnnnnnnnnnnnnnnnnnnnnnnnnnnnnnnnnnnnnnnnnnnnnnnnnnnnnnnnnnnnnnnnnnnnnnnnnnnnnnnnnnnnnnnnnnnnnnnnnnnnnnnnnnnnnnnnnnnnnnnnnnnnnnnnnnnnnnnnnnnnnnnnnnnnnnnnnnnnnnnnnnnnnnnnnnnnnnnnnnnnnnnnnnnnnnnnnnnnnnnnnnnnnnnnnnnnnnnnnnnnnnnnnnnnnnnnnnnnnnnnnnnnnnnnnnnnnnnnnnnnnnnnnnnnnnnnnnnnnnnnnnnnnnnnnnnnnnnnnnnnnnnnnnnnnnnnnnnnnnnnnnnnnnnnnnnnnnnnnnnnnnnnnnnnnnnnnnnnnnnnnnnnnnnnnnnnnnnnnnnnnngnnnnnnnnnnnnnnnnnnnnnnnnnnnnnnnnnnnnnnnnnnnnnnnnnnnnnnnnnnnnnnnnnnnnnnnnnnnnnnnnnnnnnnnnnnnnnnnnnnnnnnnnnnnnnnnnnnnnnnnnnnnnnnnnnnnnnnnnnnnnnnnnnnnnnnnnnnnnnnnnnnnnnnnnnnnnnnnnnnnnnnnnnnnnnnnnnnnnnnnnnnnnnnnnnnnnnnnnn

SEQ ID NO: 3578 - DNA, 900 bp, Homo sapiens
  misc_feature 2, 9, 17, 124, 522, 529, 579, 587, 633, 659, 660, 661, 662,664, 668, 669, 670, 671, 672, 673, 674, 675, 676, 677, 678,679, 680, 681, 682, 683, 684, 685, 686, 687, 688, 689, 690,691, 692, 693, 694, 695, 696, 697, 698, 699, 700, 701: n = A,T,C or G
  misc_feature 702, 703, 704, 705, 706, 707, 708, 709, 710, 711, 712, 713,714, 715, 716, 717, 718, 719, 720, 721, 722, 723, 724, 725,726, 727, 728, 729, 730, 731, 732, 733, 734, 735, 736, 737,738, 739, 740, 741, 742, 743, 744, 745, 746, 747, 748: n = A,T,C or G
  misc_feature 749, 750, 751, 752, 753, 754, 755, 756, 757, 758, 759, 760,761, 762, 763, 764, 765, 766, 767, 768, 769, 770, 771, 772,773, 774, 775, 776, 777, 778, 779, 780, 781, 782, 783, 784,785, 786, 787, 788, 789, 790, 791, 792, 793, 794, 795: n = A,T,C or G
  misc_feature 796, 797, 798, 799, 800, 801, 802, 803, 804, 805, 806, 807,808, 809, 810, 811, 812, 813, 814, 815, 816, 817, 818, 819,820, 821, 822, 823, 824, 825, 826, 827, 828, 829, 830, 831,832, 833, 834, 835, 836, 837, 838, 839, 840, 841, 842: n = A,T,C or G
  misc_feature 843, 844, 845, 846, 847, 848, 849, 850, 851, 852, 853, 854,855, 856, 857, 858, 859, 860, 861, 862, 863, 864, 865, 866,867, 868, 869, 870, 871, 872, 873, 874, 875, 876, 877, 878,879, 880, 881, 882, 883, 884, 885, 886, 887, 888, 889: n = A,T,C or G
  misc_feature 890, 891, 892, 893, 894, 895, 896, 897, 898, 899, 900: n = A,T,C or G
ancgactanttgtggcngattggagctccccgcggtggcggccgaggtactgcaatgaagaagaggagaaaggttacttcaaatcttgagaagatccatctaggctatcataaagattcttcanaaggaaatgttgcagtggagtgtgaccaagtgacctatactcattctgcaggaagaccaactcctgaagctcttcactgttaccaggaacttcctccctctccagatcagagaaagcttttaagttctttgcagtataataagaatttgctaaaatatttaaatgatgataggcagaagcaaccatctttttgtgatttacttatcatagtggaaggaaaagaatttagtgcacataaagtagtcgttgctgtcggcagtaagttattttcatgcgtgtttgagcaaaaatccaagcactgatgttgtcaccctggatcacgtaacacattcagtttttcagcatttgcttgaatttctttacacatcagaattttttgtgtacctcggccgctctanaactagnggatcccccgggctgcaggaattcgatatcaagcttatcgataccgtccnacctcganggggggcccggacccacttttgtccctttagtgagggttaattgcnccctggcgtaatcatggcatagctgnnnntngcgnnnnnnnnnnnnnnnnnnnnnnnnnnnnnnnnnnnnnnnnnnnnnnnnnnnnnnnnnnnnnnnnnnnnnnnnnnnnnnnnnnnnnnnnnnnnnnnnnnnnnnnnnnnnnnnnnnnnnnnnnnnnnnnnnnnnnnnnnnnnnnnnnnnnnnnnnnnnnnnnnnnnnnnnnnnnnnnnnnnnnnnnnnnnnnnnnnnnnnnnnnnnnnnnnnnnnnnnnnnnnnnnnnnnnnnnn

SEQ ID NO: 3579 - DNA, 719 bp, Homo sapiens
  misc_feature 3, 13, 20, 30, 134, 186, 221, 248, 257, 290, 296, 483, 567,570, 571, 572, 573, 574, 575, 576, 577, 578, 579, 580, 581,582, 583, 584, 585, 586, 587, 588, 589, 590, 591, 592, 593,594, 595, 596, 597, 598, 599, 600, 601, 602, 603, 604: n = A,T,C or G
  misc_feature 605, 606, 607, 608, 609, 610, 611, 612, 613, 614, 615, 616,617, 618, 619, 620, 621, 622, 623, 624, 625, 626, 627, 628,629, 630, 631, 632, 633, 634, 635, 636, 637, 638, 639, 640,641, 642, 643, 644, 645, 646, 647, 648, 649, 650, 651: n = A,T,C or G
  misc_feature 652, 653, 654, 655, 656, 657, 658, 659, 660, 661, 662, 663,664, 665, 666, 667, 668, 669, 670, 671, 672, 673, 674, 675,676, 677, 678, 679, 680, 681, 682, 683, 684, 685, 686, 687,688, 689, 690, 691, 692, 693, 694, 695, 696, 697, 698: n = A,T,C or G
  misc_feature 699, 700, 701, 702, 703, 704, 705, 706, 707, 708, 709, 710,711, 712, 713, 714, 715, 716, 717, 718, 719: n = A,T,C or G
gantcgcataatngacttantatagggctnattggagctccccgcggtggcggccgaggtactacgccagatgctgtttacacatagagttttgagctgtttctcaaggaggggcattggtggcatttgggcanaatgattctttgatgggcagaaaggtcccacccttcgcagaatgtctatcantaaactgcaatcattctcgccaatctttagggtgnatgggaagagtaatgcccaaatgaganccctcccanatgttcatagcaacggatatgaagtcatacagngcgggngtggtttttattccatccattcctctcctggggaccttagacaagtgataatgctctatgcttcagtttccccccttgtaaaatggtggtaattcccgcgtacctgcccgggcggccgctctaaaactagtggatcccccgggctgcaggaattccatatcaagcttatcgatacccgtccacctcnagggggggccccgtacccaacttttgttccctttaatgagggttaattgcccccttggcgtaatcatgggcatagctgtttccnggnnnnnnnnnnnnnnnnnnnnnnnnnnnnnnnnnnnnnnnnnnnnnnnnnnnnnnnnnnnnnnnnnnnnnnnnnnnnnnnnnnnnnnnnnnnnnnnnnnnnnnnnnnnnnnnnnnnnnnnnnnnnnnnnnnnnnnnnnnnnnnnnnnnnnn

SEQ ID NO: 3580 - DNA, 733 bp, Homo sapiens
  misc_feature 6, 7, 14, 17, 22, 465, 466, 467, 468, 469, 470, 471, 472,473, 474, 475, 476, 477, 478, 479, 480, 481, 482, 483, 484,485, 486, 487, 488, 489, 490, 491, 492, 493, 494, 495, 496,497, 498, 499, 500, 501, 502, 503, 504, 505, 506, 507: n = A,T,C or G
  misc_feature 508, 509, 510, 511, 512, 513, 514, 515, 516, 517, 518, 519,520, 521, 522, 523, 524, 525, 526, 527, 528, 529, 530, 531,532, 533, 534, 535, 536, 537, 538, 539, 540, 541, 542, 543,544, 545, 546, 547, 548, 549, 550, 551, 552, 553, 554: n = A,T,C or G
  misc_feature 555, 556, 557, 558, 559, 560, 561, 562, 563, 564, 565, 566,567, 568, 569, 570, 571, 572, 573, 574, 575, 576, 577, 578,579, 580, 581, 582, 583, 584, 585, 586, 587, 588, 589, 590,591, 592, 593, 594, 595, 596, 597, 598, 599, 600, 601: n = A,T,C or G
  misc_feature 602, 603, 604, 605, 606, 607, 608, 609, 610, 611, 612, 613,614, 615, 616, 617, 618, 619, 620, 621, 622, 623, 624, 625,626, 627, 628, 629, 630, 631, 632, 633, 634, 635, 636, 637,638, 639, 640, 641, 642, 643, 644, 645, 646, 647, 648: n = A,T,C or G
  misc_feature 649, 650, 651, 652, 653, 654, 655, 656, 657, 658, 659, 660,661, 662, 663, 664, 665, 666, 667, 668, 669, 670, 671, 672,673, 674, 675, 676, 677, 678, 679, 680, 681, 682, 683, 684,685, 686, 687, 688, 689, 690, 691, 692, 693, 694, 695: n = A,T,C or G
  misc_feature 696, 697, 698, 699, 700, 701, 702, 703, 704, 705, 706, 707,708, 709, 710, 711, 712, 713, 714, 715, 716, 717, 718, 719,720, 721, 722, 723, 724, 725, 726, 727, 728, 729, 730, 731,732, 733: n = A,T,C or G
ccgtanngacttanttngggcngattggagctccaccgcggtggcggccgcccgggcaggtacccagcataaagccctgctctcagcagacactgatatatgtttattgaatgtgtgaatgaatctagcttcatcacattcgatgccatatgagaaaatcattttagggcaatacagagtttataaatgaattaaaatttgaaatcaaatttccaaagattttattttttaaaaaatgtcaaattcctgtaaaatcttacccttgaaagtgcccttgaaatgcactttcccccaggtgtacctcggccgctctagaactagtggatcccccgggctgcaggaattcgatatcaagcttatcgataccgtcgacctcgagggggggcccggtacccagcttttgttccctttagtgagggttaattgcgcgcttggcgtaatcatggtcatagctgtttcctggannnnnnnnnnnnnnnnnnnnnnnnnnnnnnnnnnnnnnnnnnnnnnnnnnnnnnnnnnnnnnnnnnnnnnnnnnnnnnnnnnnnnnnnnnnnnnnnnnnnnnnnnnnnnnnnnnnnnnnnnnnnnnnnnnnnnnnnnnnnnnnnnnnnnnnnnnnnnnnnnnnnnnnnnnnnnnnnnnnnnnnnnnnnnnnnnnnnnnnnnnnnnnnnnnnnnnnnnnnnnnnnnnnnnnnnnnnnnnnnnnnnnnnnnnnnnnnnnnnnnnnnnnnnn

SEQ ID NO: 3581 - DNA, 731 bp, Homo sapiens
  misc_feature 7, 14, 16, 20, 23, 200, 348, 372, 382, 403, 485, 573, 679,702, 704, 714, 720: n = A,T,C or G
atgaatnccattantngacntantatagggctgattggagctccaccgcggtggcggcccgcccgggcaggtacgcggggatggtagggactcggttgccgcttctctcttctactgtcccagctgtctctgttttttaggcaactttctgtggctttttcaagagtggagatttggctggagcaggattaggaagcctnctgctacacgctttccctgagaaaaacctcctctctggaaggggcctgaggtgaaaatgattcaaaaggcagctgaggagttctggaaagagccccaaagaccaggctctgaggcctccctgggccacttactaactaaatgggagangattacttgagaaaaagcctacancagtgcccancatgataccccgttgtgaatnaccatttggaggtagtccgtccccacctggagtggatcaaagacaacagaggccaacggggaaaaagtttgagctttgccangctgatattggctgctgaataagggtgattttctcttgtaaaatggcttgaaccccaaagctatagcacaagcaagcagggtcatcanaagccactccttcttcttggaaacctgcaggggaaagggaaccccaaaaaccagattaatctcctgaatccccacatgcccaaatcaaatttgttaccaggcttgntgtaacgaaatacctcgggccgntnttaaaactantggatncccccggctga

SEQ ID NO: 3582 - DNA, 861 bp, Homo sapiens
  misc_feature 11, 17, 21, 23, 541, 549, 550, 552, 553, 554, 555, 556, 557,558, 559, 560, 561, 562, 563, 564, 565, 566, 567, 568, 569,570, 571, 572, 573, 574, 575, 576, 577, 578, 579, 580, 581,582, 583, 584, 585, 586, 587, 588, 589, 590, 591: n = A,T,C or G
  misc_feature 592, 593, 594, 595, 596, 597, 598, 599, 600, 601, 602, 603,604, 605, 606, 607, 608, 609, 610, 611, 612, 613, 614, 615,616, 617, 618, 619, 620, 621, 622, 623, 624, 625, 626, 627,628, 629, 630, 631, 632, 633, 634, 635, 636, 637, 638: n = A,T,C or G
  misc_feature 639, 640, 641, 642, 643, 644, 645, 646, 647, 648, 649, 650,651, 652, 653, 654, 655, 656, 657, 658, 659, 660, 661, 662,663, 664, 665, 666, 667, 668, 669, 670, 671, 672, 673, 674,675, 676, 677, 678, 679, 680, 681, 682, 683, 684, 685: n = A,T,C or G
  misc_feature 686, 687, 688, 689, 690, 691, 692, 693, 694, 695, 696, 697,698, 699, 700, 701, 702, 703, 704, 705, 706, 707, 708, 709,710, 711, 712, 713, 714, 715, 716, 717, 718, 719, 720, 721,722, 723, 724, 725, 726, 727, 728, 729, 730, 731, 732: n = A,T,C or G
  misc_feature 733, 734, 735, 736, 737, 738, 739, 740, 741, 742, 743, 744,745, 746, 747, 748, 749, 750, 751, 752, 753, 754, 755, 756,757, 758, 759, 760, 761, 762, 763, 764, 765, 766, 767, 768,769, 770, 771, 772, 773, 774, 775, 776, 777, 778, 779: n = A,T,C or G
  misc_feature 780, 781, 782, 783, 784, 785, 786, 787, 788, 789, 790, 791,792, 793, 794, 795, 796, 797, 798, 799, 800, 801, 802, 803,804, 805, 806, 807, 808, 809, 810, 811, 812, 813, 814, 815,816, 817, 818, 819, 820, 821, 822, 823, 824, 825, 826-860: n = A,T,C or G
agtcgcgtatngactanttgntngctgattggagctccccgcggtggcggccgaggtacacactagctgataagacactgttgcccataatgtctatttattggatcagcaatttataagtcccacattctcatgccacatagctctacacagctgcaaaaatataccatagcttgcaggtgatcattggtttgataaaagatattgagtcgctcatcttgtgaaagtgatctttgatataagaggagcatcagcggggaagctcacatgtcccgtggctcacacaccagaaggtatttgtgtcttgtcattgtctgtctggcagtccatggcaatggctttttcagagaggcctgttttgtggttaactgtgtgtacctgcccgggcggccgctctagaactagtggatcccccgggctgcaggaattcgatatcaagcttatcgataccgtcgacctcgagggggggcccggtacccagcttttgttccctttagtgagggttaattgcgcgcttggcgtaatcatggtcatagctgtnttcctggnnannnnnnnnnnnnnnnnnnnnnnnnnnnnnnnnnnnnnnnnnnnnnnnnnnnnnnnnnnnnnnnnnnnnnnnnnnnnnnnnnnnnnnnnnnnnnnnnnnnnnnnnnnnnnnnnnnnnnnnnnnnnnnnnnnnnnnnnnnnnnnnnnnnnnnnnnnnnnnnnnnnnnnnnnnnnnnnnnnnnnnnnnnnnnnnnnnnnnnnnnnnnnnnnnnnnnnnnnnnnnnnnnnnnnnnnnnnnnnnnnnnnnnnnnnnnnnnnnnnnnnnnnnnnnnnnnnnnnnnnnnnnnnnnnnnnnnnnnnnnnnnnnnnnnc

SEQ ID NO: 3583 - DNA, 949 bp, Homo sapiens
  misc_feature 8, 251, 258, 259, 260, 264, 266, 272, 273, 285, 288, 289,290, 294, 295, 297, 301, 302, 305, 308, 309, 316, 317, 329,339, 343, 351, 358, 361, 365, 366, 367, 373, 374, 375, 377,378, 379, 380, 385, 386, 397, 405, 406, 407, 411, 414: n = A,T,C or G
  misc_feature 418, 419, 420, 421, 422, 423, 424, 425, 426, 427, 428, 429,430, 431, 432, 433, 434, 435, 436, 437, 438, 439, 440, 441,442, 443, 444, 445, 446, 447, 448, 449, 450, 451, 452, 453,454, 455, 456, 457, 458, 459, 460, 461, 462, 463, 464: n = A,T,C or G
  misc_feature 465, 466, 467, 468, 469, 470, 471, 472, 473, 474, 475, 476,477, 478, 479, 480, 481, 482, 483, 484, 485, 486, 487, 488,489, 490, 491, 492, 493, 494, 495, 496, 497, 498, 499, 500,501, 502, 503, 504, 505, 506, 507, 508, 509, 510, 511: n = A,T,C or G
  misc_feature 512, 513, 514, 515, 516, 517, 518, 519, 520, 521, 522, 523,524, 525, 526, 527, 528, 529, 530, 531, 532, 533, 534, 535,536, 537, 538, 539, 540, 541, 542, 543, 544, 545, 546, 547,548, 549, 550, 551, 552, 553, 554, 555, 556, 557, 558: n = A,T,C or G
  misc_feature 559, 560, 561, 562, 563, 564, 565, 566, 567, 568, 569, 570,571, 572, 573, 574, 575, 576, 577, 578, 579, 580, 581, 582,583, 584, 585, 586, 587, 588, 589, 590, 591, 592, 593, 594,595, 596, 597, 598, 599, 600, 601, 602, 603, 604, 605: n = A,T,C or G
  misc_feature 606, 607, 608, 609, 610, 611, 612, 613, 614, 615, 616, 617,618, 619, 620, 621, 622, 623, 624, 625, 626, 627, 628, 629,630, 631, 632, 633, 634, 635, 636, 637, 638, 639, 640, 641,642, 643, 644, 645, 646, 647, 648, 649, 650, 651, 652-949: n = A,T,C or G
agcactanttgtggctgattggagctccccgcggtggcggccgggggccattgagactgccatggaagacttgaagggtcacgtagctgagacttctggagagaccattcaaggcttctggctcttgacaaaaacggatccattaagccagcaccaaggagaacatcttgacactttatggaatttcaaaaagtatgatatgatggcaataaagtggctcttcagccaaaaaaaaaaaaaaaaaaaaaaanccccccnnncccntnaaaaanngggggccccccnggnnngggnnantttnnttnaannttttttnncccccccccccngggggggggncccncccccccnttttttnccntttnnngggggnnnannnnccccnnggggaaaaaangggaaaannntttnccnttgnnnnnnnnnnnnnnnnnnnnnnnnnnnnnnnnnnnnnnnnnnnnnnnnnnnnnnnnnnnnnnnnnnnnnnnnnnnnnnnnnnnnnnnnnnnnnnnnnnnnnnnnnnnnnnnnnnnnnnnnnnnnnnnnnnnnnnnnnnnnnnnnnnnnnnnnnnnnnnnnnnnnnnnnnnnnnnnnnnnnnnnnnnnnnnnnnnnnnnnnnnnnnnnnnnnnnnnnnnnnnnnnnnnnnnnnnnnnnnnnnnnnnnnnnnnnnnnnnnnnnnnnnnnnnnnnnnnnnnnnnnnnnnnnnnnnnnnnnnnnnnnnnnnnnnnnnnnnnnnnnnnnnnnnnnnnnnnnnnnnnnnnnnnnnnnnnnnnnnnnnnnnnnnnnnnnnnnnnnnnnnnnnnnnnnnnnnnnnnnnnnnnnnnnnnnnnnnnnnnnnnnnnnnnnnnnnnnnnnnnnnnnnnnnnnnnnnnnnnnnnnnnnnnnnnnnnnnnnnnnnnnnnnnnnnnnnnnnnnnnnnnnnnnnnnnnnnnnnnnnnnnnnnnnnnnn

SEQ ID NO: 3584 - DNA, 946 bp, Homo sapiens
  misc_feature 5, 9, 13, 15, 16, 17, 18, 19, 20, 21, 22, 23, 24, 25, 26,27, 28, 29, 30, 31, 32, 33, 34, 37, 47, 54, 58, 64, 191,199, 245, 257, 278, 316, 417, 423, 427, 497, 502, 529, 560,568, 578, 618, 620, 646, 655, 656, 657, 658, 659, 660, 661: n = A,T,C or G
  misc_feature 662, 663, 664, 665, 666, 667, 668, 669, 670, 671, 672, 673,674, 675, 676, 677, 678, 679, 680, 681, 682, 683, 684, 685,686, 687, 688, 689, 690, 691, 692, 693, 694, 695, 696, 697,698, 699, 700, 701, 702, 703, 704, 705, 706, 707, 708: n = A,T,C or G
  misc_feature 709, 710, 711, 712, 713, 714, 715, 716, 717, 718, 719, 720,721, 722, 723, 724, 725, 726, 727, 728, 729, 730, 731, 732,733, 734, 735, 736, 737, 738, 739, 740, 741, 742, 743, 744,745, 746, 747, 748, 749, 750, 751, 752, 753, 754, 755: n = A,T,C or G
  misc_feature 756, 757, 758, 759, 760, 761, 762, 763, 764, 765, 766, 767,768, 769, 770, 771, 772, 773, 774, 775, 776, 777, 778, 779,780, 781, 782, 783, 784, 785, 786, 787, 788, 789, 790, 791,792, 793, 794, 795, 796, 797, 798, 799, 800, 801, 802: n = A,T,C or G
  misc_feature 803, 804, 805, 806, 807, 808, 809, 810, 811, 812, 813, 814,815, 816, 817, 818, 819, 820, 821, 822, 823, 824, 825, 826,827, 828, 829, 830, 831, 832, 833, 834, 835, 836, 837, 838,839, 840, 841, 842, 843, 844, 845, 846, 847, 848, 849: n = A,T,C or G
  misc_feature 850, 851, 852, 853, 854, 855, 856, 857, 858, 859, 860, 861,862, 863, 864, 865, 866, 867, 868, 869, 870, 871, 872, 873,874, 875, 876, 877, 878, 879, 880, 881, 882, 883, 884, 885,886, 887, 888, 889, 890, 891, 892, 893, 894, 895, 896-946: n = A,T,C or G
cgtgngacntaantnnnnnnnnnnnnnnnnnnnngangcgcataatngacatantatntggctnattggagctccccgcggtggcggcccgaggtactttctctttgtctctgccttccaggcaacaagggattttggggtagtagtaagctctacaaatatctttgaccagtaaaaacctttgcaacctnaaaattantggttttggcttcctttgggaaaaaccagtggaaacctgccaaatnctgaacttaacnagtaaagggtttgtctttttnaaaatggtgggcctgaagttaagggttcaatttttaancctaaaaaaatgaaccactttcttggttggcattttggggtgaacctgtgcccatttggttgaatcttcctccttttaataaacttgtcttaaaattttcntttctntgancacctgggaaggttacatttgggaaaagttaaaaagccaggaacccgcgtaccttgccccggccggccgntctanaactaagtggatccccccgggctgcangaatttcaatatcaagcttatcgatcccgcnacctcganggggggcccngtaccccagcttttgttccctttatgaagggttaattgcncncttggcgtaatcatggtcatagcttntttcctggnnnnnnnnnnnnnnnnnnnnnnnnnnnnnnnnnnnnnnnnnnnnnnnnnnnnnnnnnnnnnnnnnnnnnnnnnnnnnnnnnnnnnnnnnnnnnnnnnnnnnnnnnnnnnnnnnnnnnnnnnnnnnnnnnnnnnnnnnnnnnnnnnnnnnnnnnnnnnnnnnnnnnnnnnnnnnnnnnnnnnnnnnnnnnnnnnnnnnnnnnnnnnnnnnnnnnnnnnnnnnnnnnnnnnnnnnnnnnnnnnnnnnnnnnnnnnnnnnnnnnnnnnnnnnnnnnnnnnnnnnnnnnnnnnnnn

SEQ ID NO: 3585 - DNA, 902 bp, Homo sapiens
  misc_feature 2, 7, 10, 14, 15, 21, 173, 395, 465, 576, 580, 591, 649,652, 657, 685, 703, 716, 730, 735, 741, 744, 750, 765, 768,794, 796, 809, 815, 827, 857, 881, 894: n = A,T,C or G
anatggncantagnntgtttnctgattggagctcctccgcggtggcggccgccgggcaggtgtggctaaagactggactgtagaacagggagagtatctggggttgtccagtgggctcaatatagtcacagtcagggaatgttctctggccggaggcaggagagacatggcanaagactagaggctgagactgcccaacccaccattgctggagggggccacttggaaagcatgagaaggaagggggacccagtcctacagctgcaaggaataattgagccaactgtgcataagcttgaaggcctccagggtgaacccagcacctcagacactggccccatgagactgagcagaggacccagctgggcctggctgaactcaggcatctgacttanagaattgtgagataatcagtggtatttaaactgccaagcctgtggtgatttgttgtcatggaagcaatanaaaactaatcaacagggctggacgcgcctgtaatcctagcactttgggaggtgggcggatcaccttatgtcaggagttcaagatcagcctggccaacatggtgaaacctantctntactaaaaatncaaaatttcaaaatcaaaaatcacccggcgtggtggcaggtgcctacccgcgtacctnggncgccnggcaggtcttgggccccaaacccccatntccggcggagaaaccgtncgaggtaattgtntgccacaatgcccnttttnaaacanganatttanttctaaaatgggaanaanctactttttaaaaaactgttgccatntntttaaacataatnttccangaaaggctttgnctctggcctttaataggacatgttcgcacnaaaggatttgggattttgcccttnaaccccccccaanagggacaa

SEQ ID NO: 3586 - DNA, 904 bp, Homo sapiens
  misc_feature 2, 8, 12, 33, 454, 670, 671, 672, 673, 677, 678, 682, 683,684, 685, 686, 687, 688, 689, 690, 691, 692, 693, 694, 695,696, 697, 698, 699, 700, 701, 702, 703, 704, 705, 706, 707,708, 709, 710, 711, 712, 713, 714, 715, 716, 717, 718: n = A,T,C or G
  misc_feature 719, 720, 721, 722, 723, 724, 725, 726, 727, 728, 729, 730,731, 732, 733, 734, 735, 736, 737, 738, 739, 740, 741, 742,743, 744, 745, 746, 747, 748, 749, 750, 751, 752, 753, 754,755, 756, 757, 758, 759, 760, 761, 762, 763, 764, 765: n = A,T,C or G
  misc_feature 766, 767, 768, 769, 770, 771, 772, 773, 774, 775, 776, 777,778, 779, 780, 781, 782, 783, 784, 785, 786, 787, 788, 789,790, 791, 792, 793, 794, 795, 796, 797, 798, 799, 800, 801,802, 803, 804, 805, 806, 807, 808, 809, 810, 811, 812: n = A,T,C or G
  misc_feature 813, 814, 815, 816, 817, 818, 819, 820, 821, 822, 823, 824,825, 826, 827, 828, 829, 830, 831, 832, 833, 834, 835, 836,837, 838, 839, 840, 841, 842, 843, 844, 845, 846, 847, 848,849, 850, 851, 852, 853, 854, 855, 856, 857, 858, 859: n = A,T,C or G
  misc_feature 860, 861, 862, 863, 864, 865, 866, 867, 868, 869, 870, 871,872, 873, 874, 875, 876, 877, 878, 879, 880, 881, 882, 883,884, 885, 886, 887, 888, 889, 890, 891, 892, 893, 894, 895,896, 897, 898, 899, 900, 901, 902, 903, 904: n = A,T,C or G
anggctanttgnggctgattggagctccaccgnggtggcggccgcccgggcaggtacagggtttgtgaggcagtgtgtgggggacccggctggatttgtataaagtcccaagaagtgctccttttccagaagggctgctacaatccaatctcaggaacgtggactgttatctgagttctgcagtttcactttgttcccagggccacccccagtcgcctccaaattctttgtataattccagaggccattcctctgggcttatcctgcttcctccacgctggtgaataactcccacctcctgccctttgtctctctatttatggcccttctgagttctggagaagacttcactgggacttacgtcagtgagcttaacatctttctcattaatgaggaatgagagagaaggcaacaggacaatgcccccatggcttccactgtaagaaagttgaanactgtgaatcttaaagttattagagcagttggaagccacacggttttaacagttctacttgtgtacctcggccgctctagaactagtggatcccccgggctgcaggaattcgatatcaagcttatcgataccgtcgacctcgagggggggcccggtacccagcttttgttccctttagtgagggttaattgccgcttggcgtaatcatggcatagnnnntttnngggnnnnnnnnnnnnnnnnnnnnnnnnnnnnnnnnnnnnnnnnnnnnnnnnnnnnnnnnnnnnnnnnnnnnnnnnnnnnnnnnnnnnnnnnnnnnnnnnnnnnnnnnnnnnnnnnnnnnnnnnnnnnnnnnnnnnnnnnnnnnnnnnnnnnnnnnnnnnnnnnnnnnnnnnnnnnnnnnnnnnnnnnnnnnnnnnnnnnnnnnnnnnnnnnnnnnnnnnnnnnnnn

SEQ ID NO: 3587 - DNA, 716 bp, Homo sapiens
  misc_feature 3, 8, 15, 434, 566, 603, 642, 650, 651, 652, 653, 654, 655,656, 657, 658, 659, 660, 661, 662, 663, 664, 665, 666, 667,668, 669, 670, 671, 672, 673, 674, 675, 676, 677, 678, 679,680, 681, 682, 683, 684, 685, 686, 687, 688, 689, 690: n = A,T,C or G
  misc_feature 691, 692, 693, 694, 695, 696, 697, 698, 699, 700, 701, 702,703, 704, 705, 706, 707, 708, 709, 710, 711, 712, 713, 714,715: n = A,T,C or G
aangtatngacttanttggggctgattggagctccccgcggtggcggccgaggtgggagaatcacctgagcttgggaagttgaggtgcagtgagctgagatcgcactgctgcattccagccagggtgatgggagtgagaccgtgtcttaaacaaataataataatttgggggtgatgtagacagaaataaggacagaggtatgaaaaggaataattatttagcattttactagccagagatttgggcagtcccaaaaagcagcttttctaatctccctctcctttcccaaaaaactttaatcagatcctttagtatcctatcatctttgggttatttacatactactttttggaggggggattgtggaaagctatcgagatctttgaaagcattgatgattagcaagatgattattcctgtaagaagccttaanaggagaaatgcaagtgtaagttaacactggcttcttaaattggtcagtgaaagttggatgccgctctagaactagtggatcccccgggctgcaggaattcgatatcaagcttatcgatccgtcgacctcganggggggcccggtcccagcttttgttccctttaatganggttaattgcgcgcttggcgtaatcatggtcatagctgnttccgggnnnnnnnnnnnnnnnnnnnnnnnnnnnnnnnnnnnnnnnnnnnnnnnnnnnnnnnnnnnnnnnnnnc

SEQ ID NO: 3588 - DNA, 913 bp, Homo sapiens
  misc_feature 1, 2, 7, 11, 14, 16, 45, 53, 69, 70, 72, 84, 89, 91, 114,129, 131, 163, 171, 174, 192, 211, 294, 300, 324, 325, 342,346, 392, 417, 540, 541, 542, 543, 544, 545, 546, 547, 548,549, 550, 551, 552, 553, 554, 555, 556, 557, 558, 559: n = A,T,C or G
  misc_feature 560, 561, 562, 564, 566, 567, 568, 569, 570, 571, 572, 573,574, 575, 576, 577, 578, 579, 580, 581, 582, 583, 584, 585,586, 587, 588, 589, 590, 591, 592, 593, 594, 595, 596, 597,598, 599, 600, 601, 602, 603, 604, 605, 606, 607, 608: n = A,T,C or G
  misc_feature 609, 610, 611, 612, 613, 614, 615, 616, 617, 618, 619, 620,621, 622, 623, 624, 625, 626, 627, 628, 629, 630, 631, 632,633, 634, 635, 636, 637, 638, 639, 640, 641, 642, 643, 644,645, 646, 647, 648, 649, 650, 651, 652, 653, 654, 655: n = A,T,C or G
  misc_feature 656, 657, 658, 659, 660, 661, 662, 663, 664, 665, 666, 667,668, 669, 670, 671, 672, 673, 674, 675, 676, 677, 678, 679,680, 681, 682, 683, 684, 685, 686, 687, 688, 689, 690, 691,692, 693, 694, 695, 696, 697, 698, 699, 700, 701, 702: n = A,T,C or G
  misc_feature 703, 704, 705, 706, 707, 708, 709, 710, 711, 712, 713, 714,715, 716, 717, 718, 719, 720, 721, 722, 723, 724, 725, 726,727, 728, 729, 730, 731, 732, 733, 734, 735, 736, 737, 738,739, 740, 741, 742, 743, 744, 745, 746, 747, 748, 749: n = A,T,C or G
  misc_feature 750, 751, 752, 753, 754, 755, 756, 757, 758, 759, 760, 761,762, 763, 764, 765, 766, 767, 768, 769, 770, 771, 772, 773,774, 775, 776, 777, 778, 779, 780, 781, 782, 783, 784, 785,786, 787, 788, 789, 790, 791, 792, 793, 794, 795, 796-913: n = A,T,C or G
nngctanttgngtncngattgtagctccaccgcggtggcggccgnccggccangtacacactaactganncnacactgtggccnataangnctatttattggatcagcaattanataagtcccacattntnatgccgtatagctctacacagctgcaaaaatntaccatanctngcaggtgatcattggttngataaaagatattgagtcnctcatcttgtgaaagtgatctttgatataagaggagcatcaccggggaagctcacatgtcccgtggctcacacaccaaaaggnatttgngtcttgtcattgtctgtctggcannccatggcaatggctttntcanagaggcctgttttgtggttaactgtgtgtacctcggcccgctctanaactagtggatcccccgggctgcangaattcgatatcaagcttatcgataccgtcgacctcgagggggggcccggtacccagcttttgttccctttagtgagggttaattgcgcgcttggcgtaatcatggtcatagctgtttcttgnnnnnnnnnnnnnnnnnnnnnnncncnnnnnnnnnnnnnnnnnnnnnnnnnnnnnnnnnnnnnnnnnnnnnnnnnnnnnnnnnnnnnnnnnnnnnnnnnnnnnnnnnnnnnnnnnnnnnnnnnnnnnnnnnnnnnnnnnnnnnnnnnnnnnnnnnnnnnnnnnnnnnnnnnnnnnnnnnnnnnnnnnnnnnnnnnnnnnnnnnnnnnnnnnnnnnnnnnnnnnnnnnnnnnnnnnnnnnnnnnnnnnnnnnnnnnnnnnnnnnnnnnnnnnnnnnnnnnnnnnnnnnnnnnnnnnnnnnnnnnnnnnnnnnnnnnnnnnnnnnnnnnnnnnnnnnnnnnnnnnnnnnnnnnnnnnnnnnnnnnnnnnnnnnnnn

SEQ ID NO: 3589 - DNA, 904 bp, Homo sapiens
  misc_feature 8, 11, 12, 16, 32, 39, 48, 51, 54, 56, 58, 67, 74, 76, 79,104, 107, 113, 193, 207, 223, 414, 416, 420, 429, 430, 445,446, 450, 453, 457, 460, 464, 472, 484, 485, 486, 505, 526,527, 537, 549, 553, 558, 559, 560, 561, 562, 563, 564: n = A,T,C or G
  misc_feature 566, 569, 570, 571, 572, 573, 574, 575, 576, 577, 578, 579,580, 581, 582, 583, 584, 585, 586, 587, 588, 589, 590, 591,592, 593, 594, 595, 596, 597, 598, 599, 600, 601, 602, 603,604, 605, 606, 607, 608, 609, 610, 611, 612, 613, 614: n = A,T,C or G
  misc_feature 615, 616, 617, 618, 619, 620, 621, 622, 623, 624, 625, 626,627, 628, 629, 630, 631, 632, 633, 634, 635, 636, 637, 638,639, 640, 641, 642, 643, 644, 645, 646, 647, 648, 649, 650,651, 652, 653, 654, 655, 656, 657, 658, 659, 660, 661: n = A,T,C or G
  misc_feature 662, 663, 664, 665, 666, 667, 668, 669, 670, 671, 672, 673,674, 675, 676, 677, 678, 679, 680, 681, 682, 683, 684, 685,686, 687, 688, 689, 690, 691, 692, 693, 694, 695, 696, 697,698, 699, 700, 701, 702, 703, 704, 705, 706, 707, 708: n = A,T,C or G
  misc_feature 709, 710, 711, 712, 713, 714, 715, 716, 717, 718, 719, 720,721, 722, 723, 724, 725, 726, 727, 728, 729, 730, 731, 732,733, 734, 735, 736, 737, 738, 739, 740, 741, 742, 743, 744,745, 746, 747, 748, 749, 750, 751, 752, 753, 754, 755: n = A,T,C or G
  misc_feature 756, 757, 758, 759, 760, 761, 762, 763, 764, 765, 766, 767,768, 769, 770, 771, 772, 773, 774, 775, 776, 777, 778, 779,780, 781, 782, 783, 784, 785, 786, 787, 788, 789, 790, 791,792, 793, 794, 795, 796, 797, 798, 799, 800, 801, 802-904: n = A,T,C or G
agtggacntanntgtngctgattggagctccncgcggtngcggacgtnctngcngntnctcggaggnacggcangntangactggaaccatggagctcagcgtnctnctcttncttgcactcctcacaggcctattgctactcctggttcagcgtgaccctaactcccatggcaccctccaccagggccccgncctctgcccctttnggggaaccttctgcanatggacagaaaaggcctactcaaatcctttctgagggaagtggatctgattgccgtcgatcaataatacctttgaccaagggactccaatcaattcagcatgttttgcctaatgccttttgtttgtaatactgttgcgggacaatcaaagactggagagatcaaaaaaaaaaaaaaaaaaaaaaaaccccngngccntttaaaaannagggacccccggggnngggnaantttnttnaaantttttttncccccccccccnnnggggggggccggccccccnttttttccctttaaagggggnnaaaagccccntggggaaaaaangggnaaaannnnnnncnggnnnnnnnnnnnnnnnnnnnnnnnnnnnnnnnnnnnnnnnnnnnnnnnnnnnnnnnnnnnnnnnnnnnnnnnnnnnnnnnnnnnnnnnnnnnnnnnnnnnnnnnnnnnnnnnnnnnnnnnnnnnnnnnnnnnnnnnnnnnnnnnnnnnnnnnnnnnnnnnnnnnnnnnnnnnnnnnnnnnnnnnnnnnnnnnnnnnnnnnnnnnnnnnnnnnnnnnnnnnnnnnnnnnnnnnnnnnnnnnnnnnnnnnnnnnnnnnnnnnnnnnnnnnnnnnnnnnnnnnnnnnnnnnnnnnnnnnnnnnnnnnnnnnnnnnnnnnnnnnnnnnnnnnnnnnnnnnn

SEQ ID NO: 3590 - DNA, 726 bp, Homo sapiens
  misc_feature 2, 3, 4, 9, 14, 15, 20, 24, 27, 180, 371, 451, 481, 504,568, 576, 577, 578, 579, 580, 581, 582, 586, 587, 588, 589,590, 591, 592, 596, 597, 601, 607, 613, 618, 621, 622, 623,624, 631, 633, 641, 642, 643, 646, 649, 650, 655, 656: n = A,T,C or G
  misc_feature 665, 671, 674, 676, 677, 678, 679, 683, 696, 700, 701, 702,703, 704, 710, 711, 715, 717, 718, 719: n = A,T,C or G
gnnnaatantcgcnntattngacntantatagggctgattggagctccaccgcggtggcggccgaggtaccccctgacttggtgttatctgacattggctaatctccaacttatactgaatacccgagcatttctaagtgccctggccttagctggggcaggcttagcaacaagggtaanacaagagaagacgaataggctggatgcagtggctcatgcctgtaattccaccactttgagaggccgaggctatcagattacttgagtccaggaatcaaagaccagcctggggcagggcatggtggtgtgtgcctataatcctagtgctttgggtggctgaggcagctggatcacctgaggtcaggagttcnagaccagcctggacaacatggcaaaaccctatatctactaaatatacaaaattagccgggtgtggtggtgcagcctgtantcccagctacttgggaggctgagacagganaattgcttgaacctgggaggcanacactatagtaaagccgagatcgcaccacttgcactccaacctgggtgaatcaatgcgaaactnttgtctcnnnnnnnaaannnnnnnaaanntttntttccngggggnccccnggnnnnttttttncnggggaccnnnggnaannggggnncccctttanaaaaanggntnnnngggncaaaaaaaaaaantttnnnnncccttnncccntnnnccggggg

SEQ ID NO: 3591 - DNA, 720 bp, Homo sapiens
  misc_feature 3, 6, 8, 11, 14, 18, 23, 29, 32, 34, 205, 434, 494, 504,512, 603, 637, 666, 668, 675, 686, 702, 705, 709: n = A,T,C or G
gtncgncntantcnactnctatngggctnatngnagctccaccgcggtggcggcacgaggtacttggccctaccctttggcctctttcacccctgatgtggaatcttcctttctcatatgcgtgactttttcatatcatctgctcatcttggcgtctccttcatcagaattccacggttatttgggaggtctgctcaagactaanttcagtgacattccccattgccccctccagccctttcacacacacacagacatacacacattccctctgtctctttagggtttcaggtaatcaaataactcactgtctatggtgttctgctctttccaccgagtcctttggctgctgaatgtgtctctctcctcttacgctgttcctactttggctggcgaataagatgaacagagccactccctggaaaggacttcanatttggcctccgctgaaacaatgaagatgagggagagcaggaaagccaggctgggcgtanaatgtgtgtnacaatgangctggaatgaaaagggagatgggaatttgcagtttgctcacaccctcattccaaatgttatccccgcgtaccttgcccgggcgggccgttntagactagtggatcccccggctgcaggaattcgntttcaaacttatcgataccgtcgacctcnanggggggncccggaccccnctttggttccctttanganggtnaattgcccccc

SEQ ID NO: 3592 - DNA, 730 bp, Homo sapiens
  misc_feature 2, 3, 4, 8, 9, 13, 17, 19, 119, 393, 632, 647, 653, 661,700, 726: n = A,T,C or G
gnnncagnncgtnttantngactcctgattgggcctccccgcggtggcggccgaggtactttttattattttctttagtttcaccagtcctatatctggaagtctcttctaagcatcangatagaggtcatctagttcaagatgcttaaattctctcttcagtatatcttttcaagaacaagaggtgtgaccaatacacaataggcaatcaatattcaatgaaaatgtttgctcagaatgagtaaagacctccagtgataaggaatgcattcctttccaagggaacccattctattttttgaagagttcacaacatcaaaaaaaagttcttatgctgagcatgaatctatctccttttgacttgcccattgaactcaattctgtgcttccaanggagatacaattaaagctcaatactttcaccaaacgacagcaactcacaaacctgaggggcgggttgagactactcttcctcacagtccaatcttcagccctctccattcctcagtgacaagggtttcctttctcctccctatgctactcattccctctagaaataaattggtttgccagactttatttactccagttcttctaatctaaatagttggcctaaataaaggggagaagtntaagaaaaaatgccntcagangccaggcnggtctgggtaaagcatttttaggtaaggccccaaaaagnggggacaactggtttaaccttggganaata

SEQ ID NO: 3593 - DNA, 720 bp, Homo sapiens
  misc_feature 3, 7, 9, 28, 30, 31, 34, 38, 48, 50, 66, 69, 71, 72, 74,443, 510, 511, 512, 513, 514, 515, 516, 517, 518, 519, 520,521, 522, 523, 524, 525, 526, 527, 528, 529, 530, 531, 532,533, 534, 535, 536, 537, 538, 539, 540, 541, 542, 543: n = A,T,C or G
  misc_feature 544, 545, 546, 547, 548, 549, 550, 551, 552, 553, 554, 555,556, 557, 558, 559, 560, 561, 562, 563, 564, 565, 566, 567,568, 569, 570, 571, 572, 573, 574, 575, 576, 577, 578, 579,580, 581, 582, 583, 584, 585, 586, 587, 588, 589, 590: n = A,T,C or G
  misc_feature 591, 592, 593, 594, 595, 596, 597, 598, 599, 600, 601, 602,603, 604, 605, 606, 607, 608, 609, 610, 611, 612, 613, 614,615, 616, 617, 618, 619, 620, 621, 622, 623, 624, 625, 626,627, 628, 629, 630, 631, 632, 633, 634, 635, 636, 637: n = A,T,C or G
  misc_feature 638, 639, 640, 641, 642, 643, 644, 645, 646, 647, 648, 649,650, 651, 652, 653, 654, 655, 656, 657, 658, 659, 660, 661,662, 663, 664, 665, 666, 667, 668, 669, 670, 671, 672, 673,674, 675, 676, 677, 678, 679, 680, 681, 682, 683, 684: n = A,T,C or G
  misc_feature 685, 686, 687, 688, 689, 690, 691, 692, 693, 694, 695, 696,697, 698, 699, 700, 701, 702, 703, 704, 705, 706, 707, 708,709, 710, 711, 712, 713, 714, 715, 716, 717, 718, 719, 720: n = A,T,C or G
gtntcgncntactcgactcctgattggncnnatngcanctccaccgcngnggcggttcgaggtacncgnannanaatgcaaaaatcgtgtgaaaatcaacgtggaacaggaaatgaggtgcgggtgtcaactggttacaaagggtcagaagttgtctggtgcctgacaaggacacacatctcattcataacatatggtggtaatttaaaaatgaaatgatgttattttttccttcgaattcatatgtattttttttcaggtggccacttagttgtaaggacataaatactcattaagttgtttggacctatttaataaatggacatgttaggtatttcacctgcccgggcggccgctctagaactagtggatcccccgggctgcaggaattcgatatcaagcttatcgataccgtcgacctcgagggggggcccggtacccancttttgttccctttagtgagggttaattgcccccttggcgtaatcatgggcatagctgtttcctggnnnnnnnnnnnnnnnnnnnnnnnnnnnnnnnnnnnnnnnnnnnnnnnnnnnnnnnnnnnnnnnnnnnnnnnnnnnnnnnnnnnnnnnnnnnnnnnnnnnnnnnnnnnnnnnnnnnnnnnnnnnnnnnnnnnnnnnnnnnnnnnnnnnnnnnnnnnnnnnnnnnnnnnnnnnnnnnnnnnnnnnnnnnnnnnnnnnnnnnnnnnnnnnnnnn

SEQ ID NO: 3594 - DNA, 862 bp, Homo sapiens
  misc_feature 2, 3, 4, 5, 6, 17, 22, 29, 33, 130, 468, 582, 587, 589, 590,591, 592, 593, 594, 595, 596, 597, 598, 599, 600, 601, 602,603, 604, 605, 606, 607, 608, 609, 610, 611, 612, 613, 614,615, 616, 617, 618, 619, 620, 621, 622, 623, 624: n = A,T,C or G
  misc_feature 625, 626, 627, 628, 629, 630, 631, 632, 633, 634, 635, 636,637, 638, 639, 640, 641, 642, 643, 644, 645, 646, 647, 648,649, 650, 651, 652, 653, 654, 655, 656, 657, 658, 659, 660,661, 662, 663, 664, 665, 666, 667, 668, 669, 670, 671: n = A,T,C or G
  misc_feature 672, 673, 674, 675, 676, 677, 678, 679, 680, 681, 682, 683,684, 685, 686, 687, 688, 689, 690, 691, 692, 693, 694, 695,696, 697, 698, 699, 700, 701, 702, 703, 704, 705, 706, 707,708, 709, 710, 711, 712, 713, 714, 715, 716, 717, 718: n = A,T,C or G
  misc_feature 719, 720, 721, 722, 723, 724, 725, 726, 727, 728, 729, 730,731, 732, 733, 734, 735, 736, 737, 738, 739, 740, 741, 742,743, 744, 745, 746, 747, 748, 749, 750, 751, 752, 753, 754,755, 756, 757, 758, 759, 760, 761, 762, 763, 764, 765: n = A,T,C or G
  misc_feature 766, 767, 768, 769, 770, 771, 772, 773, 774, 775, 776, 777,778, 779, 780, 781, 782, 783, 784, 785, 786, 787, 788, 789,790, 791, 792, 793, 794, 795, 796, 797, 798, 799, 800, 801,802, 803, 804, 805, 806, 807, 808, 809, 810, 811, 812: n = A,T,C or G
  misc_feature 813, 814, 815, 816, 817, 818, 819, 820, 821, 822, 823, 824,825, 826, 827, 828, 829, 830, 831, 832, 833, 834, 835, 836,837, 838, 839, 840, 841, 842, 843, 844, 845, 846, 847, 848,849, 850, 851, 852, 853, 854, 855, 856, 857, 858, 859-861: n = A,T,C or G
gnnnnngagcgcgtatngactnactatanggcnaattggagctccaccgcggtggcggccgaggtaccaatgcgcgcgcgcacacacacacgaacatgcgcgcatacacagacgctcgtgcacacacgcnaacaggcacatacgcgaacaaacacgggcgcgcacacacacgaacacgggcatatgcatacttgggcgcacaagaagatctggctggctcagtctgggttaagaatccccctttggccttggcatcggggcccaccgggtatcgtgtgtattgggagtagttgccagagatgggggaattgtgttcagctcaactgctaaccgcaagtaactcacccaattagtaaatgatggaggatttttctttctttccaaagttttggacttttcctaccacgctgtgtacctgcccgggcggccgctctagaactagtggatcccccgggctgcaggaattcnatatcaagcttatcgataccgtcgacctcgagggggggcccggtacccagcttttgttccctttaatgagggttaattgcgcccttggcgtaatcatggtcatagctgtgttcnggggnannnnnnnnnnnnnnnnnnnnnnnnnnnnnnnnnnnnnnnnnnnnnnnnnnnnnnnnnnnnnnnnnnnnnnnnnnnnnnnnnnnnnnnnnnnnnnnnnnnnnnnnnnnnnnnnnnnnnnnnnnnnnnnnnnnnnnnnnnnnnnnnnnnnnnnnnnnnnnnnnnnnnnnnnnnnnnnnnnnnnnnnnnnnnnnnnnnnnnnnnnnnnnnnnnnnnnnnnnnnnnnnnnnnnnnnnnnnnnnnnnnnnnnnnnnnnnnnnnnnnnnnnnnnnnnnng

SEQ ID NO: 3595 - DNA, 906 bp, Homo sapiens
  misc_feature 3, 18, 20, 22, 24, 436, 483, 545, 550, 596, 626, 633, 657,678, 684, 715, 718, 720, 730, 739, 750, 751, 755, 759, 760,761, 762, 764, 768, 769, 770, 771, 772, 775, 776, 777, 778,779, 781, 782, 783, 785, 786, 789, 790, 791, 792, 793: n = A,T,C or G
  misc_feature 794, 795, 800, 801, 803, 805, 806, 809, 810, 811, 813, 814,815, 817, 818, 819, 820, 821, 822, 823, 824, 825, 826, 827,828, 829, 831, 832, 833, 835, 836, 839, 840, 841, 843, 844,845, 846, 847, 848, 849, 850, 851, 852, 853, 854, 856: n = A,T,C or G
  misc_feature 857, 859, 860, 861, 862, 863, 865, 866, 867, 868, 869, 871,872, 873, 874, 875, 876, 877, 881, 882, 883, 884, 885, 886,888, 889, 890, 892, 894, 895, 897, 898, 900, 901, 903, 905: n = A,T,C or G
agnccgttatcgacatantntntngctgattggagctccccgcggtggcggcccgaggtacagagggtgccaggcactgtggtgcacacctgtagtcccagctacttgggaggcttgaggcgggcggatgcttgaggccaggagtttgaggctgcagtgtgctgtgattgctcctgtgagtagccactgcacttcagccctggcaacatagcaagaccctgactctaaatataaaaaaaagtatagcgggcacaaatggggcgaagccagggtgggatgcagagtctaaagggagatgaagctggagaggcaggcagtggtcaacatgtggccatggaaaatagtttaggtttgattctgatggcactgggctgccattagagggtttgaagcaggtcagtgatgtgatacaactaaagtcttcaacagatcattntggagacagtgctaacatggactggtgggcaaaagagtgagaagccnaagccttaatccagaaggaaatgaaatatgtctgaattcaggcagggcagtaaggcttgganagcangggcatggttaaacaggacagcaaagtacctgcccgggcggcccgntctaaaactagtggatcccccgggctgcangaattcnatatcaagcttatcgataccgtcnacctccaagggggggcccggntcccancttttgttcccttttaattgagggttaattngcncncttgggcgtnaatcatggncatagcttgtnntctngaannnnanaaannnnnatnnnnntnnntnnatnnnnnnnttatnntntnnttnnntnnnannnnnnnnnnnnntnnnannttnnnannnnnnnnnnnnanntnnnnntnnnnnannnnnnnatgnnnnnntnnnancnnanntnntnanc

SEQ ID NO: 3596 - DNA, 818 bp, Homo sapiens
  misc_feature 4, 7, 11, 12, 520, 537, 543, 546, 558, 559, 571, 573, 580,581, 583, 588, 590, 600, 606, 607, 609, 616, 624, 630, 637,646, 657, 659, 662, 673, 674, 675, 676, 677, 678, 679, 680,681, 682, 683, 684, 685, 686, 687, 688, 689, 690, 691: n = A,T,C or G
  misc_feature 692, 693, 695, 696, 697, 698, 699, 700, 701, 702, 703, 704,705, 706, 707, 708, 709, 710, 711, 712, 713, 715, 716, 717,718, 719, 720, 721, 722, 723, 724, 725, 726, 727, 728, 729,730, 731, 732, 733, 735, 736, 737, 738, 739, 740, 741: n = A,T,C or G
  misc_feature 742, 743, 745, 746, 747, 748, 750, 751, 752, 753, 754, 755,756, 758, 759, 760, 761, 762, 763, 764, 765, 766, 767, 768,769, 770, 771, 772, 773, 774, 775, 776, 778, 779, 780, 781,782, 783, 784, 785, 786, 787, 788, 789, 790, 791, 792: n = A,T,C or G
  misc_feature 793, 795, 797, 798, 799, 800, 801, 802, 803, 805, 806, 807,808, 809, 810, 811, 812, 813, 814, 815, 816: n = A,T,C or G
gatnggnctanntgttggctgattggagctccccgcggtggcggcccgaggtacatttttatatgttttattctttcaggctttgtgagagggggttatttatttcatttgcaaagcagtgaattgagatccagggatttgtccaaggtcacatggcttgttctgtgccattcctagtccctgctctttcttcccatcataccacacatgtcatttctgcctctagctcacagccacagtctagtcctttgataagaagcaattccagaaatgaagattcaaatcccagctattctgttctactcaaaatatggcccatggaccagcagcactgagatcaccagggagctacttagaaacctgcagtttcatacttgggaggctgaggtgggaggatcgcttgaacccagtttcaggctgcagtgagtgatgattgtaatcctgcactccagcctgggtgacagagcaagatcttgtctttaaaaaaaaaaaaaaaaaaaaagtccttcccgggggggcngtttaaaaattttgggncccccnggnttggggaatttnnaataaaactttntnaaccccnncnccccnanggggggcccngccccnncnttttttnccttttangggggnttaattnccccttggngaaaaaatggnanaangtttttccggnnnnnnnnnnnnnnnnnnnnntnnnnnnnnnnnnnnnnnnntnnnnnnnnnnnnnnnnnnntnnnnnnnnntnnnntnnnnnnntnnnnnnnnnnnnnnnnnnntnnnnnnnnnnnnnnnntntnnnnnnntnnnnnnnnnnnntc

SEQ ID NO: 3597 - DNA, 859 bp, Homo sapiens
  misc_feature 3, 13, 17, 20, 29, 30, 416, 417, 418, 419, 420, 421, 422,423, 424, 425, 426, 427, 428, 429, 430, 431, 432, 433, 434,435, 436, 437, 438, 439, 440, 441, 442, 443, 444, 445, 446,447, 448, 449, 450, 451, 452, 453, 454, 455, 456, 457: n = A,T,C or G
  misc_feature 458, 459, 460, 461, 462, 463, 464, 465, 466, 467, 468, 469,470, 471, 472, 473, 474, 475, 476, 477, 478, 479, 480, 481,482, 483, 484, 485, 486, 487, 488, 489, 490, 491, 492, 493,494, 495, 496, 497, 498, 499, 500, 501, 502, 503, 504: n = A,T,C or G
  misc_feature 505, 506, 507, 508, 509, 510, 511, 512, 513, 514, 515, 516,517, 518, 519, 520, 521, 522, 523, 524, 525, 526, 527, 528,529, 530, 531, 532, 533, 534, 535, 536, 537, 538, 539, 540,541, 542, 543, 544, 545, 546, 547, 548, 549, 550, 551: n = A,T,C or G
  misc_feature 552, 553, 554, 555, 556, 557, 558, 559, 560, 561, 562, 563,564, 565, 566, 567, 568, 569, 570, 571, 572, 573, 574, 575,576, 577, 578, 579, 580, 581, 582, 583, 584, 585, 586, 587,588, 589, 590, 591, 592, 593, 594, 595, 596, 597, 598: n = A,T,C or G
  misc_feature 599, 600, 601, 602, 603, 604, 605, 606, 607, 608, 609, 610,611, 612, 613, 614, 615, 616, 617, 618, 619, 620, 621, 622,623, 624, 625, 626, 627, 628, 629, 630, 631, 632, 633, 634,635, 636, 637, 638, 639, 640, 641, 642, 643, 644, 645: n = A,T,C or G
  misc_feature 646, 647, 648, 649, 650, 651, 652, 653, 654, 655, 656, 657,658, 659, 660, 661, 662, 663, 664, 665, 666, 667, 668, 669,670, 671, 672, 673, 674, 675, 676, 677, 678, 679, 680, 681,682, 683, 684, 685, 686, 687, 688, 689, 690, 691, 692-859: n = A,T,C or G
agngcgcgttatngacntantatatggcnnattggagctccaccgcggtggcggccgaggtaccaccacctatccacactctcacacaatcaccccttttgaagtaaagcctatattttaaaaataaccattacagattgtgagtgcagtctaggatcacatagcagaactaaaagctaactggcccacccacaaagtaaatgtgagacagagggctcggggtagccatactctagccaagtagtacctgcccgggcggccgctctagaactagtggatcccccgggctgcaggaattcgatatcaagcttatcgataccgtcgacctcgagggggggcccggtacccagcttttgttccctttagtgagggttaattgcgcgcttggcgtaatcatggtcatagctgttcctggnnnnnnnnnnnnnnnnnnnnnnnnnnnnnnnnnnnnnnnnnnnnnnnnnnnnnnnnnnnnnnnnnnnnnnnnnnnnnnnnnnnnnnnnnnnnnnnnnnnnnnnnnnnnnnnnnnnnnnnnnnnnnnnnnnnnnnnnnnnnnnnnnnnnnnnnnnnnnnnnnnnnnnnnnnnnnnnnnnnnnnnnnnnnnnnnnnnnnnnnnnnnnnnnnnnnnnnnnnnnnnnnnnnnnnnnnnnnnnnnnnnnnnnnnnnnnnnnnnnnnnnnnnnnnnnnnnnnnnnnnnnnnnnnnnnnnnnnnnnnnnnnnnnnnnnnnnnnnnnnnnnnnnnnnnnnnnnnnnnnnnnnnnnnnnnnnnnnnnnnnnnnnnnnnnnnnnnnnnnnnnnnnnnnnnnnnnnnnnnnnnnnnnnnnnnnnnnnnnnnnnnnnnnnnnnnnnnnnnnnnnnn

SEQ ID NO: 3598 - DNA, 847 bp, Homo sapiens
  misc_feature 10, 14, 17, 20, 412, 505, 506, 507, 508, 509, 510, 511, 512,513, 514, 515, 516, 517, 518, 519, 520, 521, 522, 523, 524,525, 526, 527, 528, 529, 530, 531, 532, 533, 534, 535, 536,537, 538, 539, 540, 541, 542, 543, 544, 545, 546: n = A,T,C or G
  misc_feature 547, 548, 549, 550, 551, 552, 553, 554, 555, 556, 557, 558,559, 560, 561, 562, 563, 564, 565, 566, 567, 568, 569, 570,571, 572, 573, 574, 575, 576, 577, 578, 579, 580, 581, 582,583, 584, 585, 586, 587, 588, 589, 590, 591, 592, 593: n = A,T,C or G
  misc_feature 594, 595, 596, 597, 598, 599, 600, 601, 602, 603, 604, 605,606, 607, 608, 609, 610, 611, 612, 613, 614, 615, 616, 617,618, 619, 620, 621, 622, 623, 624, 625, 626, 627, 628, 629,630, 631, 632, 633, 634, 635, 636, 637, 638, 639, 640: n = A,T,C or G
  misc_feature 641, 642, 643, 644, 645, 646, 647, 648, 649, 650, 651, 652,653, 654, 655, 656, 657, 658, 659, 660, 661, 662, 663, 664,665, 666, 667, 668, 669, 670, 671, 672, 673, 674, 675, 676,677, 678, 679, 680, 681, 682, 683, 684, 685, 686, 687: n = A,T,C or G
  misc_feature 688, 689, 690, 691, 692, 693, 694, 695, 696, 697, 698, 699,700, 701, 702, 703, 704, 705, 706, 707, 708, 709, 710, 711,712, 713, 714, 715, 716, 717, 718, 719, 720, 721, 722, 723,724, 725, 726, 727, 728, 729, 730, 731, 732, 733, 734: n = A,T,C or G
  misc_feature 735, 736, 737, 738, 739, 740, 741, 742, 743, 744, 745, 746,747, 748, 749, 750, 751, 752, 753, 754, 755, 756, 757, 758,759, 760, 761, 762, 763, 764, 765, 766, 767, 768, 769, 770,771, 772, 773, 774, 775, 776, 777, 778, 779, 780, 781-847: n = A,T,C or G
ggcgcgtatngacntantanagggctgattggagctccccgcggtggcggccgaggtacacttagcaatgaacgagaaaacacttgatagatgctagtgtcctccagagcagcattcctcttgtgtccctgaattaagatgaaacaatttgataggtcgcattatttagttgcgttgctttaaagaaaatagaaaacttttttcctctatatataagggatatatattctaaatataggggatatattttctgaaaacttttcccaaataccaactttctgataaggcaacatctgtgaacttcactgaagatcagaggcaaatctcagttaaaaggcaaatcacggccgctctagaactagtggatcccccgggctgcaggaattcgatatcaagcttatcgataccgtcnacctcgagggggggcccggtacccagcttttgttccctttagtgagggttaattgcgcgcttggcgtaatcatggtcatagctgtttcctggnnnnnnnnnnnnnnnnnnnnnnnnnnnnnnnnnnnnnnnnnnnnnnnnnnnnnnnnnnnnnnnnnnnnnnnnnnnnnnnnnnnnnnnnnnnnnnnnnnnnnnnnnnnnnnnnnnnnnnnnnnnnnnnnnnnnnnnnnnnnnnnnnnnnnnnnnnnnnnnnnnnnnnnnnnnnnnnnnnnnnnnnnnnnnnnnnnnnnnnnnnnnnnnnnnnnnnnnnnnnnnnnnnnnnnnnnnnnnnnnnnnnnnnnnnnnnnnnnnnnnnnnnnnnnnnnnnnnnnnnnnnnnnnnnnnnnnnnnnnnnnnnnnnnnnnnnnnnnnnnnnnnnnnnnnnnnnnnnnnnnnn

SEQ ID NO: 3599 - DNA, 854 bp, Homo sapiens
  misc_feature 1, 3, 11, 15, 18, 22, 28, 482, 483, 484, 485, 486, 487, 488,489, 490, 491, 492, 493, 494, 495, 496, 497, 498, 499, 500,501, 502, 503, 504, 505, 506, 507, 508, 509, 510, 511, 512,513, 514, 515, 516, 517, 518, 519, 520, 521, 522: n = A,T,C or G
  misc_feature 523, 524, 525, 526, 527, 528, 529, 530, 531, 532, 533, 534,535, 536, 537, 538, 539, 540, 541, 542, 543, 544, 545, 546,547, 548, 549, 550, 551, 552, 553, 554, 555, 556, 557, 558,559, 560, 561, 562, 563, 564, 565, 566, 567, 568, 570: n = A,T,C or G
  misc_feature 571, 572, 573, 574, 575, 576, 577, 578, 579, 580, 581, 582,583, 584, 585, 586, 587, 588, 589, 590, 591, 592, 593, 594,595, 596, 597, 598, 599, 600, 601, 602, 603, 604, 606, 607,608, 609, 610, 611, 612, 613, 614, 615, 616, 617, 618: n = A,T,C or G
  misc_feature 619, 620, 621, 622, 623, 624, 625, 626, 627, 628, 629, 630,631, 632, 633, 634, 635, 636, 637, 638, 639, 640, 641, 642,643, 644, 645, 646, 647, 648, 649, 650, 651, 652, 653, 654,655, 656, 657, 658, 659, 660, 661, 662, 663, 664, 665: n = A,T,C or G
  misc_feature 666, 667, 668, 670, 671, 672, 673, 674, 675, 676, 677, 678,679, 680, 681, 682, 683, 684, 685, 686, 687, 688, 689, 690,691, 692, 693, 694, 695, 696, 697, 698, 699, 700, 701, 702,703, 704, 705, 706, 707, 708, 709, 710, 711, 712, 713: n = A,T,C or G
  misc_feature 714, 715, 716, 717, 718, 719, 720, 721, 722, 723, 724, 725,726, 727, 728, 729, 730, 731, 732, 733, 734, 735, 736, 737,738, 739, 740, 741, 742, 743, 744, 745, 746, 747, 748, 749,750, 751, 752, 753, 754, 755-759, 760-848, 851-854: n = A,T,C or G
ngnggctaaangacntantatngggctnattggagctccaccgcggtggcggccgaggtacctggtttcctggcctgggccatgccatccaccagccactctcgcagcagaaagatctagcctccttaagacaggtcttatcagctacttttctttggcaggcgaaatcttgcaaatcctacaaaaagctcactaaagcagctctcacatgtaaacacaatcatactcgactcttttgctggagatttacaacgtgctcattgtctccgacgagcagcatattctatttgcgtgtctaggagggaatggtacctgcccgggcggccgctctagaactagtggatcccccgggctgcaggaattcgatatcaagcttatcgataccgtcgacctcgagggggggcccggtacccagcttttgttccctttagtgagggttaattgcgcgcttggcgtaatcatggtcatagctgtttcctggnnnnnnnnnnnnnnnnnnnnnnnnnnnnnnnnnnnnnnnnnnnnnnnnnnnnnnnnnnnnnnnnnnnnnnnnnnnnnnnnnnnnnnnannnnnnnnnnnnnnnnnnnnnnnnnnnnnnnnnnnannnnnnnnnnnnnnnnnnnnnnnnnnnnnnnnnnnnnnnnnnnnnnnnnnnnnnnnnnnnnnnannnnnnnnnnnnnnnnnnnnnnnnnnnnnnnnnnnnnnnnnnnnnnnnnnnnnnnnnnnnnnnnnnnnnnnnnnnnnnnnnnnnnnnnnnnnnnnnnnnnnnnnnnnnnnnnnnnnnnnnnnnnnnnnnnnnnnnnnnnnnnnnnnnnnnnnnnnnnnnnnnnnnnnnnnnnnnnnnnncgnnnn

SEQ ID NO: 3600 - DNA, 395 bp, Homo sapiens
  misc_feature 8, 12, 29: n = A,T,C or G
gatccgcntatngacatactatggggctnattggagctccccgcggtggcggccgaggtacagaacttaaacaccactatttgttgagatgaaaaaaagcatatataggaagccttcaaaatgaaatggtcaagggtgagtttacacagatagatagatttaggtctcttccttttgctttgtgaaagcatctagtgtttaggtgtcagagagggagatatccttacaaagcagagattatcattacaggtttacatttcttacaaagagtttcaaaataaacaggtaaatgccaaaaacatatattttggagacggattaattcactagttggtctattcaacttaacttgtttcctaatgagattaaattcatgcacaaataaccaaaccaac

SEQ ID NO: 3601 - DNA, 394 bp, Homo sapiens
  misc_feature 8, 13, 20, 31: n = A,T,C or G
gatccgcntaatngacatantatgttggctnattggagctccaccgcggtggccgggcaggtacgcgggggaacttcggaggatgttcatgtccaggagcagccccacgccctgtatggtcggtgtctagagcctcacggcaactaagaccaacccagctctcagaagaaggaatgtcaaaatgtcatgttcaattttacattcagtgcctggaatcttttcttcacaattgaaatgaaatgtgctgaaggaggtgaatccatgcattaatcttcagctcacaaaggaaatactacataagaagcaagaccacagactcaagacggacataattggattttttttgccatggcctggaaagaaaggtacctcggccgctctagaactagtggat

SEQ ID NO: 3602 - DNA, 400 bp, Homo sapiens
  misc_feature 2, 7, 12, 16, 22, 23, 29: n = A,T,C or G
anccgcntaatngacntacttnntggctnattggagctccaccgcggtggcggccgaggtgtaccacccagacccggccaaccgcccatccgtcgacggccagcccatcgtcgcccataccctcctccaaaggggcttgcccgtacagggcgtcatggtgattgccaacggcacagacccagagcgggtgttgtacacgccggatgcgcccgacggtttgagcttccgcgaactggcagaccaaaacgcactcaacaccctgctggataaaaacgaatggaagctctacaccgcgaaccggaagtcgccagtcaataaggatgacgtcgccaaggcaagggacgcgctcaaacagcaagccagcgctctgggcaccaatccggccgctctagaactagtg

SEQ ID NO: 3603 - DNA, 396 bp, Homo sapiens
  misc_feature 2, 13, 29, 30: n = A,T,C or G
gncccgcgtaatngacatactatggggcnnattggagctccccgcggtggcggccgtgatttgccttttaactgagatttgcccctgatcttcagtgaagttcacagatgttgccttatcagaaagttggtatttgggaaaagttttcagaaaatatatcccctatatttagaatatatatcccttatatatagaggaaaaaagttttctattttctttaaagcaacgcaactaaataatgcgacctatcaaattgtttcatcttaattcagggacacaagaggaatgctgctctggaggacactagcatctatcaagtgttttctcgttcattgctaagtgtacctcggccgctctagaactagtggatcccccgggctgcaggaattcgatatc

SEQ ID NO: 3604 - DNA, 399 bp, Homo sapiens
  misc_feature 12, 14, 19, 27, 30: n = A,T,C or G
gatccgcatatngncatanttgttgtnctnattggagctccccgcggtggcggccgcccgggcaggtactaattagatctgcccatccgttacttggcagaggaatgggctggaaatgggaaagggtcaacctttcacctgctggacactcaaggtgagaagaaaaaggaaaggggccaagaactaactgtctggctagacagtaatcatggactcaggctttaggtatttgatcttttagaattccaatttctgaaaaataaaggtgttatatgtaattaaatggttggaagtgggaggaacttcacatttaaatagaaaactataaataagccaatgaaaagaaaacactcataattatccaatataatttttttatagttcatagattaaaatata

SEQ ID NO: 3605 - DNA, 392 bp, Homo sapiens
  misc_feature 4, 8, 15, 19, 25: n = A,T,C or G
cgcntatngacatantatngggctnattggagctccaccgcggtggcggccgaggtacattttacttgcttgatctctgattcccctcactgggtcacccgcacctctgagtgccctcctcaccctgcatgagccttgacaccaggccctgagcctttcctctgtgtggttgtcctcacagtcctctgtgtgggatccagaactaggcaccaagctccccacgtaggagggtgccctccccattccctctgctgaggctcgaaccagcatgtcaggctgctcccccatgtggacacctgactctctttgggctcttactctacactggctgtacctgcccgggcggccgctctagaactagtggatcccccgggctgcaggaattcgatatc

SEQ ID NO: 3606 - DNA, 398 bp, Homo sapiens
  misc_feature 12, 14, 19, 20, 26: n = A,T,C or G
gatccgcatatngncatanntgttgnctgattggagctccaccgcggtggcggccgcccgggcaggtactgtgcaatgactggtgaatcacagtctctaaaggaagctttttgagatttttacacagatggctatgcaaagcataaataagtgtgaggaggaagggaaaagaaaggagggaaaaaataaatgtgtgggaggacaggcaactgcaactttcattgttctttattttcttgaccattgaactaactacttagataaaccctacaactcttctcttcaattgccattacatgtccacatagccttttaaaaactctaaatttcacctcattcgatttagaattttttttttaactttacaccttgtaagtgatttggggaatgagtttcta

SEQ ID NO: 3607 - DNA, 397 bp, Homo sapiens
  misc_feature 2, 7, 11, 18, 28: n = A,T,C or G
anccgcntatngacatantatggggctnattggagctccaccgcggtggcggccgaggtacatacgaggtttcattatgttgtcctggctggttttgagctcccggccttaagctatttgcttgcctcagcctcccaaagtgctgggattacaggcatgtgccattgagcctggccaataattattccttaaagatgaaaataataggtatttttaaaatcattttcagtggttccttaagaggggtgaatcactctcctcccctgataacatttggtagtgtctgttgacaatgcggtgttggggtgctgtggtgctgtcagcacctgataggtgaagaccagagatgaacaccctatcatgtgcagagtagtccccccaaccaagaattatccac

SEQ ID NO: 3608 - DNA, 400 bp, Homo sapiens
  misc_feature 8, 12, 23, 30: n = A,T,C or G
gatccgcntatngacatactatnttggctnattggagctccaccgcggtggccgcccgggcaggtacgcggggagatgtagtgaatctctgcctgtgtggacaaagagacacattcagaggtgagcccagagcgggtaaagtggactggggagaacttcggaggatgttcatgtccaggagcagccccacgccctgtatggtcggtgtctagagcctcacagcaactaagaccaacccagctctcagaagaaggaatgtcaaaatgtcatgttcaattttacattcagtgcctggaatcttttcttcacaattgaaatgaaatgtgctgaaggaggtgaatccatgcattaatcttcagctcacaaaggaaatactacataagaagcaagaccacagact

SEQ ID NO: 3609 - DNA, 395 bp, Homo sapiens
  misc_feature 2, 11, 18, 29: n = A,T,C or G
anccgcatatngacatantatgttggctnattggagctccaccgcggtggcggccgcccgggcaggtacagatgggggggttctcactatgttgcccaggatggtctggaacccccatgctcaagtgatcctcccaccttggcctcccaaaatgctgggattacaggtgtgagctacctcacctggcccagatgacaattcttgaaacacaccttacaatttctgcagtagtttcaaataactaatcgcattcctatcttcacaaccttctgaaataaggagaaaagttatctccattattcccactatccgacatcactcacccaggcaattcacatacttggaacctaaaatcaaatttcctgactcttcttatgaccctacggtgtctataa

SEQ ID NO: 3610 - DNA, 403 bp, Homo sapiens
  misc_feature 3, 4, 14, 25, 30, 31: n = A,T,C or G
gannccgcgtaatngacttactatngggcnnattggagctccaccgcggtggcggccgaggtacacacagttaaccacaaaacaggcctctctgaaaaagccattgccatggactgccagacagacaatgacaagacacaaataccttctggtgtgtgagccacgggacatgtgagcttccccgctgatgctcctcttatattaaagatcactttcacaagatgagcgactcaatatcttttatcaaaccaatgatcacctgcaagctatggtatatttttgcagctgtgtagagctatgtggcatgagaatgtgggacttataaattgctgatccaataaatagacattatgggcaacagtgtcttatcagctagtgtgtacctgcccgggcggccgctcta

SEQ ID NO: 3611 - DNA, 399 bp, Homo sapiens
  misc_feature 3, 4, 9, 15, 26, 32, 71, 103, 177, 255, 265, 332, 347: n = A,T,C or G
gannccgcnttatangacatactatngggctnattggagctccaccgcggtggcggccgggggccattganactgccatggaagacttgaaaggtcaccgtanctgaaacttctggagagaccattcaaggcttctggctcttgacaaagatagaccactggaacaatgagaagganagaattctactggtcacagacaagactctcttgatctgcaaatacgacttcatcatgctgagttgtgtgcagctgcancggattcctntgagcgctgtctatcgcatctgcctgggcaagttcaccttccctgggatgtccctggacaagagacnaggagaaggccttangatctactgggggagtccggaggagcagtctcttctgtcccgctggaaccca

SEQ ID NO: 3612 - DNA, 408 bp, Homo sapiens
  misc_feature 3, 7, 25, 144, 319, 353, 355, 388, 403: n = A,T,C or G
gcntatngacatactatgttggctnattggagctccaccgcggtggcggccgcccgggcaggtacagccagtgtagagtaagagcccaaagagagtcaggtgtccacatgggggagcagcctgacatgctggttcgagcctcancagagggaatggggagggcaccctcctacgtggggagcttggtgcctagttctggatcccacacagaggactgtgaggacaaccacacataggaaaggctcagggcctggtgtcaaggctcatgcagggtgaggagggcactcagaggtgcggttgacccattgaggggaatcangagatcaagcaagtaaaatgtacctcggccgctntngaactagtggatccccccgggctgcaagaattngatatgaagcttatngatac

SEQ ID NO: 3613 - DNA, 413 bp, Homo sapiens
  misc_feature 13, 19, 24, 54, 57, 59, 62, 66, 67, 68, 76, 77, 78, 84, 86,91, 92, 93, 94, 100, 107, 111, 114, 116, 118, 123, 125,131, 133, 135, 140, 142, 147, 148, 155, 158, 171, 174, 177,184, 186, 189, 190, 197, 211, 212, 218: n = A,T,C or G
cgcgtatcgactnactatngggcnaattggagctccaccgcggtggcggccgcnctngnacnagcnnntaccctgnnntgccananttgcnnnntggacntatcacntctngtncngntccangnggacgncnangctcncntactnntgttgantantaggagagggttnatncgnatcgctncngcnnagttcancggtatatattctnngtatcntgaaccataatagtaatttgcctactaactatgtaacattgaacaaactactgttttgtgagcctgaaaagttggtacctcggccgctctagaactagtggatcccccgggctgcaggaattcgatatcaagcttatcgataccgtcgacctcgagggggggcccggtacccagcttttgttccctttagtgagg

SEQ ID NO: 3614 - DNA, 413 bp, Homo sapiens
  misc_feature 8, 13, 20, 25, 31, 76, 211, 275, 289, 365: n = A,T,C or G
gatccgcntaatngacatantatgntggctnattggagctccaccgcggtggcggccgaggtacacattccctctnctggaggttgtccctcagcatgacgctgactgatgttcatcaagacttactgtcacactggctagtgctgccaagccatctagactacaacttattctagattcaccctggagagatcttagagggcatatcttnttcacccagagaaggcatttatgccttattgaggcctcagtttacccagaggaaacagctcttncctatgaccctganaggtgctggtgctactcaaggcacctgtgttctggtgcacctggccctttaactaaaagataatggggcaaagganaggggggggagcaagtgtaaatacctcattgtggagcagaggcagctc

SEQ ID NO: 3615 - DNA, 416 bp, Homo sapiens
  misc_feature 8, 12, 30: n = A,T,C or G
gatccgcntatngacatactatgtttgctnattggagctccaccgcggtggcggccgcccgggcaggtacagccagtgtagagtaagagcccaaagagagtcaggtgtccacatgggggagcagcctgacatgctggttcgagcctcagcagagggaatggggagggcaccctcctacgtggggagcttggtgcctagttctggatcccacacagaggactgtgaggacaaccacacagaggaaaggctcagggcctggtgtcaaggctcatgcagggtgaggagggcactcagaggtgcgggtgacccagtgaggggaatcagagatcaagcaagtaaaatgtacctcggccgctctagaactagtggatcccccgggctgcaggaattcgatatcaagcttatcgataccgtcg

SEQ ID NO: 3616 - DNA, 402 bp, Homo sapiens
  misc_feature 4, 8, 15, 24, 25: n = A,T,C or G
cgcntatngacatantatggggcnnattggagctccaccgcggtggcggccgcccgggcaggtacacatctgctcctgggcagaccttacaagtatctcaaactcatatctccatgagaggtagataagctacgtaaacaagggaagccaagataacagggaagacaggagactatctgcctatctaaaaacactcaaattcttttctataagcactgctgatttaatccattacaccaccagcagctgccagtttacaatctctgctacacaagccctccattgagtttaaagacaaccgtcaaaatatctctccagtttctccattcacctgactgttaccatagagaatacaggtattcccactctggcctgctgtgtgcagtgttttctcctatcaga

SEQ ID NO: 3617 - DNA, 419 bp, Homo sapiens
  misc_feature 10, 13, 20, 31: n = A,T,C or G
gatccgcgtnatngacatantatgttggctnattggagctccaccgcggtggcggccgaggtacacacagttaaccacaaaacaggcctctctgaaaaagccattgccatggactgccagacagacaatgacaagacacaaataccttctggtgtgtgagccacgggacatgtgagcttccccgctgatgctcctcttatatcaaagatcactttcacaagatgagcgactcaatatcttttatcaaaccaatgatcacctgcaagctatggtatatttttgcagctgtgtagagctatgtggcatgagaatgtgggacttataaattgctgatccaataaatagacattatgggcaacagtgtcttatcagctagtgtgtacctgcccgggcggccgctctagaactagtggatcccc

SEQ ID NO: 3618 - DNA, 408 bp, Homo sapiens
  misc_feature 4, 8, 15, 24, 25: n = A,T,C or G
cgcntatngacatantatggggcnnattggagctccaccgcggtggcggccgcccgggcaggtaccctaaaccctggcagcctggcctacaaaccgacatgaagtttgaagagaaactggtcttctgttttatcaaatactccaaatatacggaagtagcaaacattcaccccctcttcattcccttaaactcgatctaccaagtctagcttccgcagtgcatcatagagacattttaatagattcattttttttctctctctccaagagatatttcaacacttgctacgtgccaggctctgtacctcggccgctctagaactagtggatcccccgggctgcaggaattcgatatcaagcttatcgataccgtcgacctcgagggggggcccggtacccagcttttgt

SEQ ID NO: 3619 - DNA, 417 bp, Homo sapiens
  misc_feature 3, 6, 14, 21, 26, 32, 71: n = A,T,C or G
ganccntgtaatangacatantatgngggctnattggagctccaccgcggtggcggccgcccgggcaggtncacacagttaaccacaaaacaggcccctctgaaaaagccattgccatggactgccagacagacaatgacaagacacaaataccttctggtgtgtgagccacgggacatgtgggcttccccgctgatgctcctcttatatcaaagatcactttcacaagatgagcgactcaatatcttttatcaaaccaatgatcacctgcaagctatggtatatttttgcagctgtgtagagctatgtggcatgagaatgtgggacttataaattgctggtccaataaatagacattatgggcaacagtgtcttatcagctagtgtgtactaaggtttcaggaacagttgttctga

SEQ ID NO: 3620 - DNA, 630 bp, Homo sapiens
  misc_feature 61, 131, 151, 374, 386, 565: n = A,T,C or G
cgtatacgactcactatagggcgaattggagctccaccgcggtggcggccgaggtaccttnctttccaggccatggcaaaaaaaatccaattatgtccgtcttgagtctgtggtcttgcttcttatgtagnatttcctttgtgagctgaanattaatgcatggattcacctccttcagcacatttcatttcaattgtgaagaaaagattccaggcactgaatgtaaaattgaacatgacattttgacattccttcttctgagagctgggttggtcttagttgctgtgaggctctagacaccgaccatacagggcgtgggctgctcctggacatgaacatcctccgaagttctccccagtccactttaccccctntgggctcacctntgaatgtccccgcgtacctgcccgggcggccgctctagaactagtggatcccccgggctgcaggaattcgatatcaagcttatcgataccgtcaacctcgagggggggcccggtacccagcttttgttccctttagtgagggttaattgcgcgcttggcgtaatcatgggcataactgnttcctgtgtgaaattggtatccgctcacaattccacacaacatacgagccgggagcctaaagtgt

SEQ ID NO: 3621 - DNA, 629 bp, Homo sapiens
  misc_feature 605, 611, 627: n = A,T,C or G
cgcgtaataccgactcactatagggcgaattggagctccaccgcggtggcggccgaggtacctgccaccacacctggctaatttttgtattttcagtagagatggggtttcaccatgttggccaggctggtctcgaactcctgacctcaggtgatccgcccgcctcggcctcctaaagtgctgggattacaggtgtgagccaccacgaccagccagaggacactttcttaacaaaatattccctttagggtaagatctttccttagaaaagttattcatgaatattttctggtttctagctaaaatataagcttatcatatttatcaaaatatttcaatttaactctgaagatattatcacttggaataaagtttgttaaaaatttggaagaaatgcacaagttatattttgaaaacagttttgaaaaggagctatattttattcatataaatattaagaaaatgttatgaagtgaatagttatcactaactatactagattactgtacctgcccggcggccgctctagaactagtggatcccccgggctgcaggaattcgatatcaagcttatcgataccgtcgacctcgagggggggcccggnacccancttttgttccctttantg

SEQ ID NO: 3622 - DNA, 628 bp, Homo sapiens
  misc_feature 609: n = A,T,C or G
gtaacgactactatagggcgaattggagctccaccgcggtggcggccgaggtacctttctttccaggccacggcaaaaaaaatccaattatgtccgtcttgagtctgtggtcttgcttcttatgtagtatttcctttgtgagctgaagattaatgcatggattcacctccttcagcacatttcatttcaattgtgaagaaaagattccaggcactgaatgtaaaattgaacatgacattttgacattccttcttctgagagctgggttggtcttagttgctgtgaggctctagacaccgaccatacagggcgtggggctgctcctggacatgaacatcctccgaagttctccccagtccactttacccgctctgggctcacctctgaatgtccccgcgtacctgcccgggcggccgctctagaactagtggatcccccgggctgcaggaattcgatatcaagcttatcgataccgtcgacctcgagggggggcccggtacccagcttttgttccctttagtgagggttaattgcgcgcttggcgtaatcatggtcatagctgtttcctgtgtgaaattgttatccgctcacaattccacacaacatacnagccggggagcataaagtg

SEQ ID NO: 3623 - DNA, 619 bp, Homo sapiens
  misc_feature 570, 586: n = A,T,C or G
actactatagggcgaattggagctccaccgcggtggcggccgcccgggcaggtactccacaagcttgcctgccatgggctgtcgggatgtccacgcagccacagtcctttccttcctgtgtggaatcgcctcagtagcaggcctctttgcagggactctgcttcccaactggagaaaattacgattgatcacattcaacagaaacgagaagaacctgactgtttacacaggcctgtgggtgaaatgtgcccggtatgacgggagcagtgactgcctgatgtacctcggccgctctagaactagtggatcccccgggctgcaggaattcgatatcaagcttatcgataccgtcgacctcgagggggggcccggtacccagcttttgttccctttagtgagggttaattgcgcgcttggcgtaatcatggtcatagctgtttcctgtgtgaaattgttatccgctcacaattccacacaacatacgagccgggagcataaagtgtaaagcctggggtgcctaatgagtgagctaactcacattaattgcgttgcgctcactggcccgctttncagtcgggaaacctgncgtgccagctgcattaatgaatcggccaacgcg

SEQ ID NO: 3624 - DNA, 628 bp, Homo sapiens
  misc_feature 549: n = A,T,C or G
actactatagggcgaattggagctccccgcggtggcggccgcccgggcaggtacgcggggacattcagaggtgagcccagagggggtaaagtggactggggagaacttcggaggatgttcatgtccaggagcagccccacgccctgtatggtcggtgtctagagcctcacagcaactaagaccaacccagctctcagaagaaggaatgtcaaaatgtcatgttcaattttacattcagtgcctggaatcttttcttcacaattgaaatgaaatgtgctgaaggaggtgaatccatgcattaatcttcagctcacaaaggaaatactacataagaagcaagaccacagactcaagacggacataatttggatttttttgccatggcctgggaaagaaaggtacctcggccgctctagaactagtggatcccccgggctgcaggaattcgatatcaagcttatcgataccgtcgacctcgagggggggcccggtacccagcttttgttccctttagtgagggttaattgcgcccttggcgtaatcatggtntaagctgtttcctgtgtgaaattgttatccgctcacaattccacacaacatacgagccgggagcataaagtgtaaagcc

SEQ ID NO: 3625 - DNA, 626 bp, Homo sapiens
  misc_feature 341, 452: n = A,T,C or G
actactatagggcgaattggagctccccgcggtggcggccgcccgggcaggtacctgttatcatcattcctcaagagcagcatgtggcacagcaggaagccaggcaagctcctgccattagcacacaacggcaaaagtggatgtctgtgtcaacatttctgaagacccagaatgggccgtagataggcatgattttcctaatgactttcgcacacaggcaaaaaaatagtaatgataactactaatattataggtgcttcctatggccaggggatgtacctcggccgctctagaactagtggatcccccgggctgcaggaattcgatatcaagcttatcgntaccgtcgacctcgagggggggcccggtacccagcttttgttccctttagtgagggttaattgcgcgcttggcgtaatcatggtcatagctgtttcctgtgtgaaattggntatccgctcacaattccacacaacatacgagccgggagcataaaagtgtaaagcctggggtgcctaatgagtgagctaactcacattaattggcgttgcgctcactgcccgctttccagtcgggaaacctgtcgtgccagctgcattaatgaatcggccaacgcgcggggagag

SEQ ID NO: 3626 - DNA, 644 bp, Homo sapiens
  misc_feature 371, 426, 527, 542, 550, 552, 559, 566, 583, 593, 611, 616,620, 622, 634: n = A,T,C or G
cgtatacgactcactatagggcgaattggagctccccgcggtggcggccgaggtactgtgccgaaagactttacaggtatatccggagcaataagccagtcaccatcatttcggtcataagtcatccctcagatgtcatggaaatccgaatggtcaaagaaaattttaaagcaagaccttggtcagtatattactctacatttgtcccagtgtatcttgcattagaaaatcatccatttaccctcacaatgtgtccaactgaaaccaaagcaacatttggggttcatcttaaaatagtaggagactggacagaacgatttcgagatttactactgccttcatctagtcaagactccgaaattctgcccttnattcaattctagaaattatcccaagctggatattgatggtccttttggaagtccntttgagggatcactgaactatgaggtcagcctttgcgtggctggaggcattggagtaactccatttgcatcaatactcaacacccctgttggatgactggnaaccatacaagcttnagaaagantntactttntttgggnatgcagagatatccagncctttcggtnggtttggcagaatttacntctgnatgntngcataacaaggntttgggcaag

SEQ ID NO: 3627 - DNA, 648 bp, Homo sapiens
  misc_feature 492, 505, 572, 593, 621, 635, 644, 645: n = A,T,C or G
gtatacgactcctatagggcgaattggagctccccgcggtggcggccgcccgggcaggtacgcggggagaactccagcatttcatctagggggaggtggaagtgtggcttttagagataaaaggacagggttgttttggggtgctctgagaaggggaaaaggagaccagtgtataactttgagtagctagaacgggaagatttgagggggctgaatgaattgattgagagtgatttaacttaaaggactggggcattatctgtgggcccgggtatactagcttcacttttgaggaaaagtgaagctgggaaatgtgagatctactcagtgggtccggggaaatgtgagaggagtaaggaaagtgaagacacagatgttgttggaggctccaggctagcatggtaaagagaaagggtttcctggattctgattacagaatggacctgtgggggtctcagatttgaggccctaacagcatttaaaagggagcanctggtagaaccanatttggggaaatatttatggggagaagagaatgattaagtgagctacagaaataggtagagggcccntctaaatatcaggtttcccgnatgaggactacaccatacattgtgcaanctgaatgactaccntggacattnntct

SEQ ID NO: 3628 - DNA, 629 bp, Homo sapiens
  misc_feature 4, 570, 595, 599, 604, 624: n = A,T,C or G
actnctatagggcgaattggagctccccgcggtggcggccgaggtactttttagccagagggagtttatgctgctgtgtggccagtttttccacatgtctgcaacagttacaatttttgacagatatcttgagaagattatagattttgatagaggcagtaactttattagcaagactgatttcatattagaatgaaatctctgggtcttttttggattactttatgttccttaaaaagaaagacattgggccaggcacggtggctcacgcctgtaatcccagcactttgggaggccaaggcgggcggatcacgagatcaggagttcgagaccagcctgactaacatggtgaagcctcgtctctactgaagatacaaaaaaattagctgggcatggtggtgggcgcctgtgatcccagctactcaggaggctggggcaggagagctgcttgaacccgggaggcagaggttgcaatgagctgagatcgcaccattgcactctagcctgggcaacagagtgagacaacgtctcaaaaaaaaaaaaaaaaaacatttggctgggcttggcagnctttggggttttatttctgaactgngtanagttnggccaactcaggaattctanactag

SEQ ID NO: 3629 - DNA, 848 bp, Homo sapiens
  misc_feature 6, 8, 11, 13, 331, 632, 664, 672, 701, 710, 718, 726, 729,738, 743, 803, 836: n = A,T,C or G
tcactnantcncntaatacgactactatagggcgaattggagctccacccgcggtggcggccgcccgggcaggtacccgagaacctatgttggttgttactggtggcctgattcttgggcctcaaggtggcttgctcggatgccagtagtggcaggggtagaggggttctcaggctcctagatagctgctgtggcatgggcaatagcagtagccatggcaagatgatttctctgggtcctaatctgtgtgcattgatattggcaagtagctgtgatgggctgggcgggcctgtctccaggtccacagttggtgcttgcaggtatataccanctgaggaggtacctcggccgctctagaactagtggatcccccgggctgcaggaattcgatatcaagcttatcgataccgtcgacctcgagggggggcccggtacccagcttttgttccctttagtgagggttaattgcgcccttggcgtaatcatggtcataagctgtttcctgtgtgaaattgttatcccctcacaattccacacaacataccgaaccgggagcataaagtgtaaagcctggggtgcctaatgaagtgagctaactcacattaattgcgttgcgctcactgccccctttncaatcgggaaacctgtcctgccagcttcattnatgaatcngccaacccccggggaaaggccgtttgccntattgggcncttttccnctttcttnctnactgactcncttcnctcggtccttcggcttgcggcaagcggtataactcacttaaaggccggtaataccggtantccacaaaaatcagggggataacccagggaaanaacatgtgaact

SEQ ID NO: 3630 - DNA, 843 bp, Homo sapiens
  misc_feature 618, 635, 681, 694, 704, 706, 715, 728, 737, 753, 772, 790,791, 795, 802, 814, 817: n = A,T,C or G
cactacttagggcgaattggagctcccccgcggtggcggcccgaggtactaccgccagatgctgtttacacatagagttttgagctgtttctcaaggaggggcattggtggcatttgggcagaatgattctttgatgggcagaaaggtcccacccttcgcagaatgtctatcactaaactgcaatcattctcgccaatctttagggtggatgggaagagtaatgcccaaatgagagccctcccagatgttcagagcagcggatatgaagtcatacagccgggtttggtttttattccatccattcctctcctggggaccttagacaagtgataatgctctatgcttcagtttccccccttgtaaaatggtggtaattcccgcgtacctgcccgggcggccgctctagaactagtggatcccccgggctgcaggaattcgatatcaagcttatcgataccgtcgacctcgagggggggcccggtacccagcttttgttccctttaatgagggttaattgcccccttggcgtaaatcatgggtcatagctgttttcctgtgtgaaattggtatcccctcacaattccacacaacatacgacccgggagcataaaagtgtnaagccctggggtgcctnatgaggtgagctaactcacattaattgcgttgcgcttactgcccgntttccagtcgggnaacctgtcgngnccactgcantaaatgaatcggnccacccccnggagaggccggttgcntatttgggccctttttccncttcctggttactgactnnctgnccttggncgttcggcttgnggnaagcggtttaacttactccaaaggcg

SEQ ID NO: 3631 - DNA, 841 bp, Homo sapiens
  misc_feature 184, 208, 433, 470, 533, 538, 553, 566, 631, 634, 642, 696,701, 703, 705, 712, 713, 717, 719, 732, 744, 752, 756, 757,769, 770, 783, 789, 795, 810, 811, 837: n = A,T,C or G
tagggcgaattggagctccccgcggtggcggcccgcccgggcaggtacctggtttcaggttggagccagcggggtaaggagagaaaggaagtgagaaatgagagggaagggggttccagcgttcttggagggctggtgccaggcactggggcttggcaacagctcagtccttcttactccacangggctgagctacactgtagctttngcaaatgggcaggaccaggactccaggcttagaagtgctgccagacaagaaggggaaagagctggggacctccagtgggggagtcagtcacccgcaagttctgctcttgtgtggaccggggctggctgaaaggcagagtcctgcatttcaatcctgctttttcactgttacttaacagtagaggatgactcagcctaccctctaggaggattccttggtttgaancatcttgagtcacctgagtgggtggaatgaggcttantgacaacactacactttttacagattaaaggataaaatgggaaatattatgaacaacttattnctatncatttcaacagcttnagatgaaaatagnaaaaattcctttaatgataccacattacccaaagttttctcaaaaaagaaataagataagctgtntantccctacncttcttttaaaaattgaaattcataagttaaaaaggttttaataaaaaacttcnattcntncnaaatttnncaantngatataagtcccntggcccctctanaacttagngganncccccgggctgnnaggaatttcaatntcaagnttatcnatcccggcgacctcnnggggggcccggtaccccaactttttntcct

SEQ ID NO: 3632 - DNA, 864 bp, Homo sapiens
  misc_feature 5, 326, 327, 454, 498, 507, 572, 592, 602, 617, 622, 634,640, 653, 668, 675, 683, 693, 695, 701, 713, 718, 728, 734,735, 737, 752, 755, 760, 761, 765, 768, 769, 786, 787, 788,791, 792, 793, 799, 804, 809, 812, 819, 823, 831, 833: n = A,T,C or G
  misc_feature 834, 840, 845, 846, 847, 848, 851, 854, 862: n = A,T,C or G
ctgantgcgcgtaatacgactactatagggcgaattggagctccacccgcggtggcggcccgcccgggcaggtacctaaccccgagtgttagcttcctttgcatactactgttctgagatgtgttggttgaattattagtaaggatttgaaggctatgatgcattcaacactcagtgcggattatagatccaagaacacagactttcttaaagtatgaggcttacaggactttttgtttggctaattaaagtgatagtctgttttagaattctaattatttattcagagatggggtcttattatgttgcccaaggctggagtgcannggctattcacaaggcataaatctgagctcactgcagccctcaaactcctgggctcaagcaatccccctgcctcaagcctctgagtagctggggctgtttcaaaattttaacattggtgctgtaacanacgcactgtttattgattagttggggactggtgagaaaattgtngagtctctnaaaaacttaacttttagggagcataagtgcattcaaaactaaatccctattggactagcacaagngtttaaaaaaagatagttcngggcactttnggagggctgaggcangcaantcatttgaggtnaggaanccaagaaccagcngggccaaccctgggngaaaacnatctttantcaaaaaaananaaaaanaaaaaattatgnggttnttggaggccngtaccnngnattccttcttcttgnggnaactnnattngannaaatggtttggcccctnnnagnnnaggttntatanagctnaanaaccacnattnaccatggncnntaatanaaatnnnnggnatnccccgggnct

SEQ ID NO: 3633 - DNA, 839 bp, Homo sapiens
  misc_feature 3, 7, 10, 11, 12, 22, 560, 628, 638, 666, 692, 723, 751,753, 764, 777, 781, 833: n = A,T,C or G
tgntgantgnnnctctaatacnactcactatagggcgaattggagctcccccgcggtggcggcccgcccgggcaggtacaccaacaacagccaagctcagagccaaatcaggaaggcaataccattcacaactgccacaaaaagaataaaatacttaggaacacagccagccagagaggtgaaagacccctgcaatgagaatgcaaagcactcttcaaagaaatcagagatgacacaaacaaatggaaaaaaagtccatcctcatggagaagaagatttagaggctactgattaggagtttcagtggaaagtggggtctgaagccaaattgcagaagtctgaggtgtatgtatgcagtaagtaaagagacagcagataatgaatcttctttagaacacagagcaattgttttccatttttttttttttcatggaagggaaagcaagtgtctaatatatcatgacagccccatgttgttctctaaacactactatgcatcctgaattttctttgaattttgcactccacttattttacgtttgggagatactaaatattgngtatcctggttttgcaaactggagaaaagacttgggtgcaggcagaaaggtcagggaagaaaagaaangtgttagganggcatggtttgaactgggttgccctatnggcaactggagctgggcctcactganagctttggaggacccaacaagaacacacttntggggatcatcccttggaaggctggaangngggaaatgttncctgaccttcaangggngctgctcctgcctccaggccaaaagttgcttctaaggcattactccctggcncctcca

SEQ ID NO: 3634 - DNA, 868 bp, Homo sapiens
  misc_feature 345, 389, 412, 526, 559, 563, 579, 585, 591, 592, 616, 626,628, 662, 671, 682, 718, 722, 723, 732, 742, 744, 748, 749,750, 751, 763, 767, 793, 802, 806, 807, 809, 810, 828, 834,835, 846, 848, 849, 853, 861, 864: n = A,T,C or G
cactactatagggcgaattggagctccccgcggtggcggcccgaggtacctttctttccaggccatggcaaaaaaatccaattatgtccgtcttgagtctgtggtcttgcttcttatgtagtatttcctttgtgagctgaagattaatgcatggattcacctccttcagcacatttcatttcaattgtgaagaaaagattccaggcactgaatgtaaaattgaacatgacattttgacattccttcttctgagagctgggttggtcttagttgctgtgaggctctagacaccgaccatacagggccgtggggctgctcctggacatgaacatctccgaagttctncccagtccactttaccccctctggggctcacctttgaatgtgtntcccccgtacctgcccgggcggnccgtgctctagaactaagtggatccccccgggctgcagggaattcgatatcaagcttatcgatccgtccgacctcgaggggggggccccggtacccaacttttggttcctttantgaagggttaattgcgcgcttggcgtaaatcantggncaaaacttgtttcctngggtgnaaaatnnttattccgctcacaaattccccanaacattaccnancccggggagccataaaagtgtaaaaccctggggnggcctaatnaggggagcctnacctcacaattaaattgggggttggcgctcaactgncccnnttttcaatncggggaaaancntgtnnnncccaagatttgnattnaatgaattgggcaaccccccgggganaaggcggtnttgnntnnttggggcgctttttcccnttcctnngttaacttgantnntggncctcggcngtnggtc

SEQ ID NO: 3635 - DNA, 881 bp, Homo sapiens
  misc_feature 374, 523, 525, 550, 553, 561, 573, 595, 607, 608, 629, 631,634, 639, 650, 652, 664, 667, 671, 687, 688, 690, 698, 710,725, 742, 755, 757, 762, 763, 768, 769, 771, 774, 775, 777,786, 787, 788, 790, 797, 803, 810, 814, 816, 818, 824: n = A,T,C or G
  misc_feature 826, 828, 829, 832, 836, 841, 851, 853, 855, 863, 865, 866,867, 871, 872, 874, 880: n = A,T,C or G
actacttagggccgaattggagctccccgcggtggcggcccgaggtacagaaaccagttaagaggctgttattgcagcagtgcaggacagatatgatggaactctgaacttgagggatggatgtcaagatggaaagaagtgaacacatttaagaaataatgaaagagtaggtaatatcagtaagccttaacaatggattgacagtagaactgagggagaagcaaagatcaagcacagcccttaagctttagtcttctaaaactgaatggaccgttgagacagggaacattggataagttccaagttggaggagaaaccatatctttagaagaggaaaaaaattcaaatttatgcattcatatctttttcctcanaacatagaaaagggatattaggatatagaaaaacaaattacctacttctgaaagttgccttttagattaagggaaaagttatagcagtgactctatgaccattgattttttggagagccctcacttaaacatttctggccctaatcctnantttaatctatcttttgcccagttcntancaatattntctttgcagcancatggggggggcatgcagattnacctcacccccnntcttggttaccctgcccgggncnggnccgtnctttgaacctngnggatccccccgnggnctgncagggaaattccgatnncnaagcttancagatacccgtnaacacttgagggggnggggcccgggtccccancttttggtttccntnttatnnagggnncnaanncncgcttggcnnntntattgcncattanctgtttncccngngngaaatngntnnccnttancattncccccatatncntncctgggancnnnatanncnataccnc

SEQ ID NO: 3636 - DNA, 921 bp, Homo sapiens
  misc_feature 5, 128, 129, 161, 211, 370, 500, 504, 506, 514, 570, 584,589, 614, 615, 621, 632, 633, 643, 646, 662, 667, 676, 681,683, 691, 706, 714, 729, 735, 740, 743, 752, 759, 761, 766,772, 774, 786, 800, 802, 807, 811, 812, 819, 840, 845: n = A,T,C or G
  misc_feature 848, 853, 854, 868, 878, 895, 896, 900, 901, 904, 920: n = A,T,C or G
atggnccactacaaatactatagggcgaattggagctccccgcggtggcggcccgaggtacgcgggtattttgggatgtggatgccattcgccacacaaaaacacttgggattcattcctagataccnnaattcatcccaatttcccccctttaaagtcanatctcacctacctgtttggtcagagagatgtgtgttttaaaatccccaangaaggaggcaaggactgtgccctcagatgattattggtgaagtgggtttatgcttaatttcagcttaagagaatgttgctgggtctctgcctaggacaggcagcccactgtggccctgggtgatgaaggaagcccacagaggcccagggtttgtcaccngtggctgccagtggtctgcaaaagtcagaattgagctaatcctgtgaaaggatgaacgctgatgggcaagttgtatggtaggttgctatggggcttcttgatctctcaaattccaggtgacaaagatcantgcntncttgaggngatccctttccagcaagctcttggtggctacaaactggttcaggtgtgggaaagancataccaactttanccttnggtttttcttttgaaaaaccaaccnnttgaangacaggtgggnnccaagaaatnttncctttggcatgccaanaactnttttttggnaaaangnatgtttgntggcttttcccaccnttggcctnaaaaaaccttgcttnaaaatnggttnttnttaaaattnaaaaacncnaaatncttgtnangcttccaaaagnaaagggaatgcttntnccttnttgnnaagaggntaaatgaagtcatggaaaaantaatnccnaaagnntttggaaatttttnaaataatttnaaaaaaaaaaacctttnncccnncantttttttttgggcttnt

SEQ ID NO: 3637 - DNA, 887 bp, Homo sapiens
  misc_feature 10, 13, 16, 33, 308, 422, 489, 548, 554, 571, 578, 598, 613,614, 625, 627, 681, 685, 705, 741, 771, 775, 787, 792, 794,799, 805, 815, 819, 828, 839, 843, 877, 887: n = A,T,C or G
acgcgactantangantcactatagggcgaatnggagctcccccgcggtgggcggcccgaggtacacacagttaaccacaaaacaggcctctctgaaaaagccattgccatggactgccagacagacaatgacaagacacaaataccttctggtgtgtgagccacgggacatgtgagcttcccgctgatgctcctcttatatcaaagatcactttcacaagatgagcgactcaatatcttttatcaaaccaatgatcacctgcaagctatggtatatttttgcagctgtgtagagctatgtggcatgngaatgtgggacttataaattgctgatccaataaatagacattatgggcaacagtgtcttatcagctagtgtgtaccttgcccgggcgggccgttctagaactagtggatccccnggggctgcaggaattcgatatcaagcttatcgataccgtcgacctcgagggggggcccggtacccancttttgttccctttagtgaggggtaattgcgcgctttggcgtaatcatggtcatactgntcctgngtgaaaatggtattccnttacaanttcccacaacataccaaccnggagccttaaagtgnnaaacctggggngnctaatgagtgagctaactacattaattgcgtgggctcaatggccgttttcaatngggnaaactgtggtgccacttganttaagaatcggccacccccgggaagaggcggtttgntttttggcgcttttcccttcttggttaatnactncttgcttgggcnttcgntngggcnagcggnttaattaaancaangggggaatncggtttcacanaatnaggggatacccaggaaaaaattttaccaaagccncaaaggcccn

SEQ ID NO: 3638 - DNA, 939 bp, Homo sapiens
  misc_feature 8, 32, 308, 309, 566, 567, 578, 581, 605, 607, 615, 617,618, 628, 636, 643, 661, 672, 679, 687, 700, 715, 724, 725,728, 745, 760, 784, 786, 793, 810, 812, 823, 824, 825, 836,837, 838, 840, 850, 858, 861, 863, 864, 867, 876, 900: n = A,T,C or G
  misc_feature 901, 925, 933: n = A,T,C or G
acgcccgnatacgactactataggggcgaatnggagctccccgcggtggcggcccgcccgggcaggtaccccaagcggggacggtaaagtcagaaaagacaaggctgggggtaatcacagagaaatctaaaaacccgctcggcctcgctactcttctccttcctctgaggtgcagaggcgcggtgggacgacaaggagttgcgagaaagggcagagctcactgaggaggcaacagagaaagtccgctaacaatttttgaaggccgtaagttaaacatgttaaaaactgtagctactcactcagccganntctagtaaaaaagatgcggcaagatcaacaaggcatatagcttgcgcccgccagaagttccgggggcttcacacccatcccccccgcgtacctcggccgctctagaactagtggatcccccgggctgcaggaattcgatatcaagcttatcgataccgtcgacctcgagggggggcccggtacccaacttttggtccctttaatgagggttaattgcgccgcttggcgtaatcatgggcataacttgtttcttggtnnaaattgttttnccnttacaaattccacacaacattacnancccgggancnntaaaatggtnaaaacctnggggtgncctaattaagggaagctnacttacatttnaattggnggttgcgncttacttggcccntttttcaattcgggnaaacctttnntgnccaccttcatttaattnaattgggccaacccncccggggagaaggggggtttgggntntttgggnccttttcccctttcttngnttaaatgactnnnttgccttgggnnntncggtgggggnaaacgggnttnannttnattaaaagnggggattccggtttcccccaaatnnggggttaccccggaaaaaactttntccaaaangcccct

SEQ ID NO: 3639 - DNA, 913 bp, Homo sapiens
  misc_feature 1, 21, 426, 479, 492, 530, 537, 540, 547, 567, 596, 609,619, 636, 646, 657, 659, 683, 705, 709, 733, 743, 770, 780,784, 785, 793, 816, 822, 831, 832, 842, 844, 850, 852, 857,858, 861, 864, 868, 869, 870, 873, 876, 878, 880, 887: n = A,T,C or G
  misc_feature 888, 898, 900, 906, 910, 911: n = A,T,C or G
ngcactactatagggcgaatnggagctccccgcggtggcggccgaggtacttgcctaaaaagtagtctggcctttgccctctggtgctgaaaggtaatctatattacctctaagaggaatgtctagtgtttctgatgggggcttgctatgccagaaatactaatcaagggattcggggtaggagcttttggtcacgcagtatcagctgacctggacactaagattaaccatgtagacagttaatccaccaaccagtcaatcatgtctacatgctgaggccccaataaaaacttccaacatcagagctctggtgagcttctctagttggcgatagttggtgcctgttgtcacacatcaaagacagcagagtaatgagtcctgcttccacagggagaagacaccagaagctctgtgtctggaaccctnctggacttcaacttacgtacctgcccggcgggccgctctagaactagtggatnccccgggctgcangaattcgatatcaagcttatcgataccgtcgacctcanggggggnccngtccccncttttggtccctttaatgangggttaattgcgcgcctggcgtaatcatnggcataagctggnttcctggggngaaaattggtattccgntccaatttcncacaacatacnancccgggagcaataaagggttaaangcctgggggggcctaatgaggnagcntaccttacatttaattgggtttgngccccctggncccttttcaaatcgggaaaccttgcgngccaagttgnattnntggaatcngcccacccccggggagaaggggnttgggntttgggggnnttttcccttncntgttantngattnnttngcntggnnnttnggntngnggggaannggtttaattntnaaaagngggnntt

SEQ ID NO: 3640 - DNA, 924 bp, Homo sapiens
  misc_feature 368, 381, 565, 631, 647, 648, 704, 737, 743, 750, 752, 755,756, 759, 779, 790, 806, 807, 815, 821, 837, 846, 856, 864,873, 874, 894, 898, 900, 903, 908, 912, 917, 918: n = A,T,C or G
acgcactactatagggcgaattggagctccccgcggtggcggccgaggtactgtgtcaagctttttacattgagctagtgccattgggggtggggggtaaaaagctattcttatttttaaactcttcaacattttttaaagtcttcaacatgatctttatcatgttgtgatgtgaccgctagatttccattttgaggctctcatataatttacttgaccaagtccctactggttgacaggagaccatcatggttcctatgatttctcaaagtgtgacccccaacaaacacagtgtcctagaaacacctgtcccagaaacacccagtacctgcccgggcggccgctctagaactagtggatcccccggnctgcaggaattcnaatatcaaagcttatcgataccgtcgacctcgagggggggcccggtacccagcttttgttccctttagtgagggttaattgcgcgctttggcgtaatcatggtcatagctgtttcctgtgtgaaattgttatccgctcacaattccacacaacatacgaacccgggagcataaagtgtaaagcntggggtgcctaatgagtgagctaactcacattaattggcgttgcgcttactggcccgctttccaantcgggaaacctgtcgnnccacttgcattaatgaaatcggcccaccccccggggaaaagccggtttgcgtattnggcgctctttccctttcttgcttcacttgactngcttgncttcggncnttnnggntggggcgaagcggttttaanttacttcaaangcgggtaataccggtnnttcccaanaaatcngggggataacccaggnaaaaacatntgaccaaaanggccaccnaaagggccnngaaccctaaaaaggccccgnttgntngcnttttncaangttcnnccccct

SEQ ID NO: 3641 - DNA, 911 bp, Homo sapiens
  misc_feature 2, 95, 608, 664, 680, 689, 690, 696, 700, 728, 760, 763,768, 782, 787, 794, 805, 806, 833, 849, 861, 876, 880, 893,900, 902: n = A,T,C or G
antcactactatagggcgaattggagctccccgcggtggcggccgcccgggcaggtacgcggggacgttaagaactggacttacaagatggatangacctggtggcaactgtccttgaggaagccggagcctggagagacagatctcatgttatagcagagtacctcggccgctctagaactagtggatcccccgggctgcaggaattcgatatcaagcttatcgataccgtcgacctcgagggggggcccggtacccagcttttgttccctttagtgagggttaattgcgcgcttggcgtaatcatggtcatagctgtttcctgtgtgaaattgttatccgctcacaattccacacaacataccaacccgggagcattaaagtgtaaagcctggggtgcctaatgaagtgagctaactcacattaattgcgttgcgctcactgcccgctttccagtcgggaaacctgtcgtgccagctgcattaatgaatcggccaacgcgcggggagaggcggtttgcgtattgggcgctcttccgctttctcgctcactgactcgcttgcgctcggtcgttcgcttgcggcgaagcggtatcaactcactcaaangcgggaataccggtattcacagaatcaggggatacgcaggaaaaaacatgtgagcnaaaggccacaaaaggncaggaaccnnaaaaanggcncgttgcttgcgttttttcataggcttcngcccccttgaccaacattacaaaaaattgacnctnaaatnaaaagtggggaaancccanagggctnttaaaataccnngcgttttcccctggaaacctcccttgngcgccttttcttgttnccaaccctgccntttaccgggatcccntccncctttttcctttnggaaaangngggcctttt

SEQ ID NO: 3642 - DNA, 381 bp, Homo sapiens
gcgtaatacgactcactatagggcgaattggagctccaccgcggtggcggccgaggtacattaccctacgctccaagcgcagcaagccggccaatatccgtggcaccgtgaagcccaagcgcaggaaaaagcatgcagtggcatcggctgccccagggcaggaggctttggtcggaccatcccttcagccgcaggaagcggcaagggaagctgatgctgtagcacctgggtacctgcccgggcggccgctctagaactagtggatcccccgggctgcaggaattcgatatcaagcttatcgataccgtcgacctcgagggggggcccggtacccagcttttgttccctttagtgagggttaattgcgcgcttggcgtaatc

SEQ ID NO: 3643 - DNA, 392 bp, Homo sapiens
agcgcgcgtaatacgactcactatagggcgaattggagctccaccgcggtggcggccgggggccattgagactgccatggaagacttgaaaggtcacgtagctgagacttctggagagaccattcaaggcttctggctcttgacaaagatagaccactggaacaatgagaaggagagaattctactggtcacagacaagactctctagatctgcaaatacgacttcatcatgcttgagttgtgtgcagctgcagcggattcctctgagcgctgtctatcgcatctgcctgggcaagttcaccttccctgggatgtccctggacaagagacaaggagaaggccttaggatctactgggggagtccggaggagcagtctcttctgtcccgctgg

SEQ ID NO: 3644 - DNA, 392 bp, Homo sapiens
  misc_feature 3, 226: n = A,T,C or G
gcnccgcgtaataccgactcactatagggcgaattggagctccaccgcggtggcggccgaggtactttactttttatttttgtatctcaggccaagccaagttgaatgtgtagaaacatctgcacagaaagagagacccaaacagaaaccaaaattaaactgtaacacttttgaccctattaacggcataacagtaaggaaatctagctcctcgaaccaatatacnggggtcggcaatcattgtgccacaaagtttaacaatatttgtagagactatgaagccatttgcttcatgtcctctactgaaatccaatctttccattttatttccatccctcaatccaacctgctacctggtaccttcaacactgtgtctttgaaggattctgtaa

SEQ ID NO: 3645 - DNA, 391 bp, Homo sapiens
  misc_feature 5: n = A,T,C or G
gagcncgcgtaatacgactcactatagggcgaattggagctccaccgcggtggcggccgcccgggcaggtacgcggggcagagtcattaagatgggcaggagtcaaatcagataaggacatggggtaaactgcaggccaggcccatagattgttctgagagtcatgggagactattggtgggttttgagtaggagaatcacatttgctttttgtttttcaaaaagcattttggccgctctgcaggcctgcctgtattaaaggctagaatagaagccaggaaagcaatagtccagacaggagatcatgatggcgttggcttgggtggcagtaatggaagtggtgagaagcagtcaggctccagatacagtcaggctgaacacagaactggct

SEQ ID NO: 3646 - DNA, 385 bp, Homo sapiens
gtaataccgactcactatagggcgaattggagctccaccgcggtggcggccgaggtactagccctcatctgcaaatcatcctctgggatgggctgcatgccagatggtggctcttaattgcttgagggcattgagagagctgtgatcttcaagacctacctctcccaggtggcctgaaatagcaccaagtctgaaagcagggctctgggcagtgacttgggaaaacaggtgtggataccaagtgtgatgaggacccttgagcttagctttgttcctgtggtggcaagtggtgggtctcaccccccagacaacagcctggactatgaatagagaccacagcccccgagaacccacctggcccattcctcctccttcctccttccca

SEQ ID NO: 3647 - DNA, 397 bp, Homo sapiens
  misc_feature 17, 18, 33: n = A,T,C or G
gagcttttcgtaatacnnactcactataggttngaattggagctccaccgcggtggcggccgcccgggcaggtacgcgggggtggaaaactatgtccctggcaaactgtctgcaatgggcctgggatatgaagatatagacgagattgctcctcacatcatctattgttccatcacagggtatggtcagacaggtccaatttctcagcgagctggttatgatgctgttgcctcggctgtttctggtctgatgcacatcacagggcctgaggtggcgtgtttgtctcacatagctgcaaattatcttattggtcaaaaggaagcgaaacgttggggtacctcggccgctctagaactagtggatcccccgggctgcaggaattcgatatcaagcttat

SEQ ID NO: 3648 - DNA, 373 bp, Homo sapiens
  misc_feature 4: n = A,T,C or G
gtanacgactcctatagggcgaattggagctccccgcggtggcggccgaggtacaaagaaaccctttgcagacagctcatttatagagagaagctaagtatttatttacttgctactcaatttaaaatacgaccatggtaggcaaccaaccaggagaagagctaaaagtttgaaagcactgcccttttctctactatagaagttacagggtcaagccttggaaaatttccacaaaataaggctttgctaaacatatttaccttatcagaaagattgtatctcaaaaaagttaccgtttttcttcaggcaagacaagaaaaactgcctgtcctaatcgacagtacctgcccgggcggccgctctagaactagtg

SEQ ID NO: 3649 - DNA, 887 bp, Homo sapiens
  misc_feature 5, 6, 7, 8, 9, 22, 26, 28, 31, 88, 93, 143, 276, 410, 430,456, 511, 513, 517, 528, 529, 563, 585, 614, 618, 621, 631,637, 640, 648, 653, 658, 664, 681, 722, 731, 782, 794, 801,804, 812, 818, 826, 827, 830, 837, 846, 851, 876, 879: n = A,T,C or G
  misc_feature 881, 882, 886: n = A,T,C or G
atggnnnnntatagggcgagantgantntanggcgaattggagctccacccgcggtggcggaccgagctggactctggggcctgcggnggctncagcctcaactcagagggcaacagtggtagtggtgacagtagcagctatnacgcaccagctggcaactccttcctagaggactgcgaactctcccggcagatcggggcgcagcttaagctgctgcctatgaatgatcagatacgggagctacagaccatcatccgggacaagacagccagtanaggtgacttcatgttttctgcggatcgtttgatcagacttgttgtggaagagggattgaatcaagctgccatataaagaatgtatggtgaccactccaacagggtaccctcggccggtctagaactagtggatnccccgggctgcaggaattcnatatcaaagcttatcgatacccgtcnacctcgagggggggccccggtcccaacttttgttcctttaatgaggggtaaattncncccnttggcgttaannatggacataagctgtttccttgtgttgaaaattngttattccgcttacaaatttcnccaccaacaatacccaacccgggagcaanaaantgntaaaggcctnggggtngcnttaatgangtggngcctnactcanatttaaattgcggttgncggcttaattggcccgcttttccagtccggggaaaacctgntcgtggccnacttgcatttaaagaaattgggccaacccccccggggagaaggccggtttncggatttggggnctttttnccnttctttgnttattnaattcatnngcnttggtantttggttgnggcanccgggttaacttaattaaagggggnganannggtnt

SEQ ID NO: 3650 - DNA, 833 bp, Homo sapiens
  misc_feature 1, 642, 664, 718, 729, 751, 758, 781, 792, 800, 802, 808,809, 817: n = A,T,C or G
ncgcactactatagggcgaattggagctccccgcggtggcggccgaggtacacttagcaatgaacgagaaaacacttgatagatgctagtgtcctccagagcagcattcctcttgtgtccctgaattaagatgaaacaatttgataggtcgcattatttagttgcgttgctttaaagaaaatagaaaacttttttcctctatatataagggatatatattctaaatataggggatatattttctgaaaacttttcccaaataccaactttctgataaggcaacatctgtgaacttcactgaagatcagaggcaaatctcagttaaaaggcaaatcacggccgctctagaactagtggatcccccgggctgcaggaattcgatatcaagcttatcgataccgtcgacctcgagggggggcccggtcccagcttttgttccctttagtgagggttaattgcgcgcttggcgtaatcatggtcatagctgtttcctgtgtgaaattgttatccgctcacaattccacacaacatacgagccgggagcataaagtgtaaagcctggggtgcctaatgagtgagctaaactcacattaaattgccgtgcgctcactggccgctttccagtccggaaacctggcgtgnccactgcattaaatgaatccgncaaccccccgggagaggcgggtttgcgttttgggcgctttttccgctttcttgnttactgactcncttggcttcggtcgttcgggtncgggganccggtattaacttcacttcaaangcgggaatccnggtatccncnaaaatnnggggaaancccaggaaaaaaaatt

SEQ ID NO: 3651 - DNA, 834 bp, Homo sapiens
  misc_feature 578, 605, 606, 610, 633, 644, 652, 657, 665, 668, 671, 673,725, 742, 748, 785, 798, 822, 832: n = A,T,C or G
acgcactactatagggcgaattggagctccccgcggtggcggcccgaggtacagaagggctgaggcttctgtctgagttgaccgtgacctgtggttacagcattttaggacttcgtaacagaatgatccacagaggtcagcaggcccttgaaagaacgctgaaggaaacttgcatacaaacagtctcaaggaggcaaacacatgcttcagcgctgcccgcgtacctgcccgggcggccgctctagaactagtggatcccccgggctgcaggaattcgatatcaagcttatcgataccgtcgacctcgagggggggcccggtacccagcttttgttccctttagtgagggttaattgcgcgcttggcgtaatcatggtcatagctgtttcctgtgtgaaattgttatccgctcacaattccacacaacatacgagccgggagcataaagtgtaaagcctggggtgcctaatgagtgagctaactcacattaattgcgttgcgctcactgcccgctttccagtcgggaaacctgtcgtgccagctgcattaatgaatcgccaaccccggggagaggcggnttgcgtattgggcgctcttccctttcnngctnactgactcgcttgccttggtccntcgcttgcggnagccggtnttaancttacttnaangcngnaattccggtttttcccaaaaattaaggggaaaaccccagggaaaaaaacatnttgaaccaaaaggccancaaaanggcccggaacccgtaaaaagggcccgttggttggggntttttccttaggnttccccccccttgacgggctttanaaaaattgcnct

SEQ ID NO: 3652 - DNA, 859 bp, Homo sapiens
  misc_feature 1, 520, 568, 625, 646, 648, 697, 706, 709, 711, 717, 736,746, 757, 782, 837: n = A,T,C or G
nacgccgtaatacgactactatagggcgaattggagctccccgcggtggcggcccgcccgggcaggtacaatgggtgttcaaaatttctcttgtagggttgaaaattttcaaaataaaaagctggggataagatgatttgggtgggtctggccagaaataataagagcaggattctcagctctccttttttggccaccgtgcttctgcagtgggactcaaaaagaagtacctcggccgctctagaactagtggatcccccgggctgcaggaattcgatatcaagcttatcgataccgtcgaccctcgagggggggcccggtacccagcttttgttccctttagtgagggttaattgcgcgcttggcgtaatcatggtcatagctgtttcctgtgtgaaattgttatccgctcacaattccacacaacattaccagccgggaagcataaaagtgtaaagcctggggtgcctaatgagtgagctaactcacattaattgcgttgcgctcactgcccgctttncagtcgggaaacctgtccgtgccagcttgcattaatgaatcgcccacnccccggggagaggccggttttgcgtatttgggcgctttttccccttcttcgcttaantgactcgcttgcgccttcggncngttccggcttgcgggcgaaccggtattcagcttacttcaaaaggcgggnaataccggntantnccacanaaatcagggggaataaccnccagggaaanaacaatttaancaaaaaggcccaccaaaaaggcccngaacccgtaaaaaaggccccgttgctggcgtttttcataaggttcccccccctgncaagcataaaaaaaattgacct

SEQ ID NO: 3653 - DNA, 885 bp, Homo sapiens
  misc_feature 1, 25, 220, 307, 546, 557, 558, 567, 573, 575, 590, 597,601, 626, 641, 645, 647, 648, 655, 669, 680, 690, 769, 771,775, 776, 781, 787, 808, 809, 812, 814, 815, 823, 828, 829,836, 838, 863, 868: n = A,T,C or G
nagcactactatgggcgaattgaanctccaccgcggtggcggccgaggtactctgctataacatgagatctgtctctccaggctctggcttcctcaaggacagctgccaccaggtcctatccatcttgtaagcccccccgcgtacctgcccgggcggccgctctagaactagtggatcccccgggctgcaggaattcgatatcaagcttatcgataccgncgacctcgagggggggcccggtacccagcttttgttccctttagtgagggttaattgcgcgcttggcgtaatcatggtcatagctgnttcctgtgtgaaattgttatccgctcacaattccacacaacatacgagccgggagcataaagtgtaaagcctggggtgcctaatgagtgagctaactcacattaattgcgttgcgctcactgcccgctttccaagtcgggaaacctgtcgtgccaagctgcatttaatgaaatcggccaacgccgccggggaagaggcggtttgcgtaattggggcgctctttccgctttccttgcttnactggactcgnntggcgcttnggtcgntncgggcttgcggcgancgggtanttangctcacttcaaaaggcgggtaaaanccggttaatccaccngaantnngggggantaaccaagggaaanaaccttgttanccaaaagggncaagcaaaaagggccaggaacccgtaaaaaaggcccgcgtttgcttggcggtttttccaaagggctccgccccccttgncnagcnnttacnaaaaancgacccttaaagtacaaaggnnggngnnaaacccgncaggnnttttaanantcccgccgtttccccctggaaactnctttnggccctttccttttccc

SEQ ID NO: 3654 - DNA, 867 bp, Homo sapiens
  misc_feature 3, 6, 104, 424, 442, 443, 483, 541, 595, 665, 669, 672, 683,690, 696, 697, 703, 715, 718, 724, 761, 774, 777, 782, 786,789, 790, 791, 803, 806, 813, 816, 821, 825, 833, 849, 851,859, 860, 866: n = A,T,C or G
atncanttactatacggttttattggagctccccgcggttttggcccgcccgggcaggtacgcggggggacttacaagatggataggacctggtggcagctgtntttgaggaagccagagcctggagagacagatctcatgttatagcagagtacctcggcccgctctagaactagtggatcccccgggctgcaggaattcgatatcaagcttatcgataccgtcgacctcgagggggggcccggtacccagcttttgttccctttagtgagggttaattgcgcgcttggcgtaatcatggtcatagctgtttcctgtgtgaaattgttatccgctcacaattccacacaacatacgagccgggagcataaagtgtaaagcctggggtgcctaatgagtgagctaactcacattaattgcgttncgctcactgcccgctttnnagtcgggaaacctgtcgtgccagctgcattaaatgaaatnggccaaacgcgcggggagaggcgggtttgcgtatttgggcgctcttcccgctttcctngcttcactgactcgctgcgcctcggtcgttcggcttgcgggcgagccgtttcanctcactcaaaggcgggtaaatacgggttatcccacaagaatcaagggggattaacccaaggaaagaaccntttngancaaaaaggcanccaaaanggccannaacccntaaaaaaggccnccnttgctngccgttttttcattaaggcttcggcccccttgaccanccttacaaaaaanttnacgcntcanttnnnaggtggccaaanccngacgggnttntaaanaatncccaggcnttttccccctgggaancntcctttgnncctttnt

SEQ ID NO: 3655 - DNA, 845 bp, Homo sapiens
  misc_feature 2, 4, 5, 6, 7, 8, 9, 10, 678, 718, 720, 743, 755, 758, 771,799, 826: n = A,T,C or G
angnnnnnnnactactatagggcgaattggagctccaccgcggtggcggccgaggtacattaccctacgctccaagcgcagcaagccggccaatatccgtggcaccgtgaagcccaagcgcaggaaaaagcatgcagtggcatcggctgccccagggcaggaggctttggtcggaccatcccttagccgcaggaagcggcaagggaagctgatgctgtagcacctgggtacctgcccgggcggccgctctagaactagtggatcccccgggctgcaggaattcgatatcaagcttatcgataccgtcgacctcgagggggggcccggtacccagcttttgttccctttagtgagggttaattgcgcgcttggcgtaatcatggtcatagctgtttcctgtgtgaaattgttatccgctcacaattccacacaacatacgagccgggagcataaagtgtaaagcctggggtgcctaatgagtgagctaactcacattaattgcgttgcgctcactgcccgctttccagtcgggaaacctgtcgtgccagctgcattaatgaatcggccaacgcgcggggagaggcggtttgcgtattgggcgctcttccgcttcctcgctcactgactcgctgcgctcggtcgttcggcttgcggcgagcggtatcaactcactcaaangcggtaataccggtattcacaagaatcaggggatacccangnaaagaacatgtgaacaaaaaggncagcaaaaaggncangaaccctaaaaanggccgcgttggtggcggttttttcatangcttccgcccccttgacgagcattaanaaaaattgacccttcaagt

SEQ ID NO: 3656 - DNA, 847 bp, Homo sapiens
  misc_feature 2, 600, 628, 641, 647, 694, 696, 713, 717, 722, 723, 725,727, 733, 734, 738, 739, 744, 751, 753, 758, 760, 768, 770,772, 773, 787, 790, 799, 801, 807, 808, 812, 814, 819, 821,822, 826, 827, 829, 833, 839, 841, 843, 845, 847: n = A,T,C or G
gnctatcgactcactatagggcgaattggagctccccgcggtggcggccgaggtatcgcagcaaaatgcaaaaatcgtgtgaaaatcaacgtggaacaggaaatgaggtgcgggtgtcaactggttacaaagggtcagaagttgtctggtgcccgacaaggacacacatctcattcataacattggtggtaatttaaaaatgaagtgatgttattttttccttcgaattcatatgtattttttttcaggtggccacttagttgtaaggacataaatactcattaagttgtttggacctatttaataaatggacatgttaggtatttctcctgcccgggcggccgctctagaactagtggatcccccgggctgcaggaattcgatatcaagcttatcgataccgtcgacctcgagggggggcccggtacccagcttttgttccctttagtgagggttaattgcgcgcttggcgtaatcatggtcatagctgtttcctgtgtgaaattgttatccgctcacaattcccacaacatacgagccgggagcataaagtgtaaagcctggggtgcctaatgagtgagctaactcacattaattgcntttgcgcttactgcccccttttcaatcnggaaaacctgtcntgcccncctgcattaatggaatcggcccaccccccgggaagaggcggttttcntntttgggccccttttccncttncttgnntnantgactnnttgnnctcgnccgttcngnttgcngnaaccggtntnannttacttcaaaggcnggnaataccggntntccccnnaatnanggggntnncccnngnaaanaacatntnancnan

SEQ ID NO: 3657 - DNA, 875 bp, Homo sapiens
  misc_feature 3, 516, 528, 561, 578, 583, 587, 639, 647, 660, 746, 747,748, 760, 767, 798, 838, 851, 852, 853, 862: n = A,T,C or G
tanacgactactatagggcgaattggagctccaccgcggtggcggcccgaggtacctttctttccaggccatggcaaaaaaaatccaattatgtccgtcttgagtctgtggtcttgcttcttatgtagtatttcctttgtgagctgaagattaatgcatggattcacctccttcagcacatttcatttcaattgtgaagaaaagattccaggcactgaatgtaaaattgaacatgacattttgacattccttcttctgagagctgggttggtcttagttgctgtgaggctctagacaccgaccatacagggcgtggggctgctcctggacatgaacatcctccgaagttctccccagtccactttacccccttctgggctcacctctgaatgtccccgcgtacctgcccgggcggccgctctagaactagtggatcccccgggctgcaggaattcgatatcaagcttatcgatacccgtcgacctcgagggggggccccgtacccaacttttggtncctttaagtgangggtaattgcgccccttgggcgtaaatcatggncataactggtttcctgnggggnaaantggttattccgcttacaaatttcacaacaacataccaagcccgggagccatnaaagtgtnaaagcccgggggnggcctaatggaggggagcttaacctcacaattaattggggttgggccttaactggcccctttttcaaatcggggaaaacctggttnnngcccacttgcanttaatgnaattcggccaacccccccgggggagaaggcnggtttggggtatttggggcgcctttttcccctttctttgnttaaattgacttnnnttgggcttngggcgttcgggtg

SEQ ID NO: 3658 - DNA, 841 bp, Homo sapiens
  misc_feature 2, 4, 5, 7, 16, 64, 332, 379, 380, 557, 569, 576, 594, 598,606, 607, 629, 636, 649, 651, 656, 657, 658, 665, 678, 679,680, 690, 691, 693, 699, 705, 707, 711, 712, 714, 722, 725,727, 728, 730, 733, 744, 748, 759, 764, 772, 774, 779: n = A,T,C or G
  misc_feature 782, 795, 796, 819, 831, 836: n = A,T,C or G
angnntntcgactcgngtatacgactactatagggcgaattggagctccaccgcggtggcggcncgcccgggcaggtacaaaacagatcctcaaagatggggttccagggttgttttagacacatccttcactttcctttgtcataggtagttgtattgaaattaactttattgctatgggtcactgtggatagtgcaccaagtgtctcgggaacaaatagctactgtccttggttcttatggcacgtagtgatagctccaaaggcagtggagcaggaggctgctcctgggaggactagagtacctcggccgctctagaactagtggatccnccgggctgcaagaattcgatatcaagcttatcgataccgtcgacctnnagggggggcccggtacccagcttttgttccctttagtgagggttaattgcgcgcttggcgtaatcatggtcatagctgtttcctgtgtgaaattgttattccgctcacaattcacacaacatacgagccgggagcataaagtgtaaagcctggggtgcctaatgagggaacttactnacattaaatgcntgggctnaatggccggttttcaatngggnaacctgcnngccaacttgattaatgaatcgnccaaccncccgggaaaagcngntttgnnnttgggcncttttccgttctnnntaattaattnntnggcctngtcctncngttnngncaaccggnttnanntnaantaaaggggggnaatncggttttcaanaaaantcgggggntnacccnggnaaaaaaatgttgnnaaaagggcctccaaagggccggnacccttaaaaanggccngtttt

SEQ ID NO: 3659 - DNA, 850 bp, Homo sapiens
  misc_feature 2, 617, 625, 673, 687, 697, 717, 721, 735, 753, 756, 764,767, 788, 803, 811, 818, 842: n = A,T,C or G
angcgtatcgactactatagggcgaattggagctccccgcggtggcggccgaggtactgtgtcaagctttttacattgagctagtgccattgggggtggggggtaaaagctattcttatttttaaactcttcaacatcttttaaagtcttcaacatgatctttatcatgttgtgatgtgaccgctagatttccattttgaggctctcatataatttacttgaccagtccctactggttgacaggagaccatcatggttcctatgatttctcaaagcgtgacccccaacaaacacctgtcctagaaacacctgtcccagaaacacccagtacctgcccgggcggccgctctagaactagtggatcccccgggctgcaggaattcgatatcaagcttatcgataccgtcgacctcgagggggggcccggtacccagcttttgttccctttagtgagggttaattgcgcgcttggcgtaatcatggtcatagctgtttcctgtgtgaaattgttatccgctcacaattccacacaacatacgagcccgggagcataaagtgtaaagcctggggtgcctaatgagtgagctaactcacattaattgcgttgcgctcactgnccgctttncagtcgggaaacctgtcgtgccaacttgcattaatgaatcggccaacnccccgggagaggcngtttgcgtantgggccctcttccctttctngctnattgactcgcttgnctcggccttcggcttgcnggnaagcgggnttnaacttaactcaaaaggcgggnaaaacgggtattccncaaaaatnagggggntaacccccggaaaaaacatttgancccaaaag

SEQ ID NO: 3660 - DNA, 887 bp, Homo sapiens
  misc_feature 3, 4, 5, 6, 8, 9, 10, 18, 29, 229, 295, 344, 423, 442, 456,457, 480, 494, 496, 500, 509, 522, 548, 563, 572, 589, 590,595, 602, 606, 610, 619, 620, 622, 625, 667, 679, 703, 730,745, 755, 761, 769, 776, 781, 782, 784, 830, 834, 847: n = A,T,C or G
  misc_feature 855, 856, 869, 875, 876, 878: n = A,T,C or G
ggnnnntnnntacttatncactactatanggcgaattggagctccccgcggtggcggcccgcccgggcaggtacccaaccttgcaaatgggagctggccagtgggttggggtgaccaatcaatgaacaagagaggtctgagacctccctgtccgtcgggtctgaagggctgcgtgggggcatgtggcctcacctgttctctaaggtagaactgctccataaagggccangtgtgcaaatcctggtcctgggatgtgagtgctgctgagccaaggtgcacggagcattagttcatncttcttgaaacctgcggtggcaatggttcttgacaggtattgggttaanaattgacgactcattgacagctttggaccttctttccagagaagcacacatactgaaaccatcccgcattttgtgtgtngggaaaaagtttgcaaatntgggggagtcacanngtatttgaaattccaacattaanaaaaccctgttccntntaanaataaagtntgccctccttggntttgacaaaataaaatccctctccancttgtcttaaacccnaaaccttanttttgccaaattgtgcnnaattnactattncccntggnaggccattnntnaanccaccatgggctttggcctttcctttttaagggttttttccnaaaggacctttnttaaaaaggcttggggggtacctngggcccgttttaaaaaactaagggganccccccgggcctggnagggaattcnattttnaagctttnttgaatncccgnnancctttgagggggggggcccgggaacccaactttttgtccctttaangggngggttaaattgcncccttggnntaaaataatgggnaaaaanntntttccttgg

SEQ ID NO: 3661 - DNA, 892 bp, Homo sapiens
  misc_feature 4, 489, 529, 604, 614, 635, 643, 667, 673, 685, 691, 698,705, 708, 710, 721, 723, 728, 737, 749, 754, 773, 811, 852,853, 855, 872, 880: n = A,T,C or G
agcnatcgactactatagggcgaattggagctccaccgcggtggcggccgaggtacattaccctacgctccaagcgcagcaagccggccaatatccgtggcaccgtgaagcccaagcgcaggaaaaagcatgcagtggcatcggctgccccagggcaggaggctttggtcggaccatcccttcagcgcaggaagcggcaagggaagctgatgctgtagcacctgggtacctgcccgggcggccgctctagaactagtggatcccccgggctgcaggaattcgatatcaagcttatcgataccgtcgacctcgagggggggcccggtacccagcttttgttccctttagtgagggttaattgcgcgcttggcgtaatcatggtcatagctgtttcctgtgtgaaattgttatccgctcacaattccacacaacatacgagccgggagcataaagtgtaaagcctggggtgcctaatgagtgagctaactnacattaattgcgttgcgctcactgcccgctttccaagtcnggaaacctgtcgtgccagctgcattaatgaatcggccaacgcgcggggagaggcggtttggcgtattgggcgctntttccgcttnctcgctcacctgactcgctgngctcgggncgttcgggttgggggcgaagcggntttaancttacttcaaangggggnaatacgnttttcanaananttagggggatnancccanggaaagaanatttgaccaaangccancaaaagggcaggaaccctnaaaaggccccggttgttggcttttttcaataggtttcnccccttgacgagcattaaaaaaattacccttaagtaaaggnngngaaacccccccggcttnaagaaccnaggggttcccct

SEQ ID NO: 3662 - DNA, 831 bp, Homo sapiens
  misc_feature 3, 513, 547, 566, 568, 589, 599, 627, 682, 691, 696, 706,713, 714, 734, 743, 744, 746, 747, 752, 760, 761, 762, 764,769, 770, 771, 773, 776, 777, 778, 779, 793, 800, 807, 812,816, 817, 818, 828: n = A,T,C or G
cgnctaatacgactactatagggcgaattgtagctccccgcggtggcggccgggggccattgagactgccatggaagacttgaaaggtcacgtagctgagacttctggagagaccattcaaggcttctggctcttgacaaagatagaccactggaacaatgagaaggagagaattctactggtccagacaagactctcttgatctgcaaatacgacttcatcacgctgagttgtgtgcagctgcagcggattcctctgagcgctgtctatcgcatctgcctgggcaagttcaccttccctgggatgtccctggacaagagacaaggagaaggccttaggatctactgggggagtccggaggagcaagtctcttctgtcccgctggaacccatggtccactgaaagttccttatgctactttcactgagcatcctatgaaatacaccagtgagaaattccttgaaaatttgcaaggtgtctgggttcatgtctaaacttggtccagcttttcanaatgcccacaagaattcaactggatctggaagangaaagaaacctgatggtgntnactgaacccattttgattganacctacacanggctgatgtcattcatttggaaaaccgnaacaaactttggctatttcccttgccccgggggagtattgggtttttgagaagtnttttttggnccctnggcccttttnaaactanngggatccccccgggcctgcngggaatttnnannttaancctttttnnntncccgnnnanctnnnngggggggccccggnaccccanctttttntcccnttannngaggggtaantgg

SEQ ID NO: 3663 - DNA, 863 bp, Homo sapiens
  misc_feature 23, 490, 491, 511, 555, 576, 579, 591, 607, 649, 653, 655,667, 698, 714, 730, 731, 748, 749, 769, 773, 775, 778, 780,786, 787, 788, 793, 798, 808, 814, 815, 818, 820, 828, 833,835, 837, 842, 843, 846, 849, 853, 858: n = A,T,C or G
cgccgtaatcgactactatatgncactactatagggcgaattggagctccaccgcggtggcggccgcccgggcaggtacgcgggtctagaaacagtgattgttaaaattgcctataaacacacaatataaacaatatgccacagacccagaggcccccagcatagtttctggaaggtgaagtctcacctctgccagagtagagtcacagtgggaattgaggcttggcatctgggtgcctctgaagctcttcctgtggctcctgttagacaattgaccccgaaacacagaagatagagattgcacattgcgttcaagtaattgttgtttatttatgttatttctgaaaataaaagacagcacaggctgcttatctttaaaccacacagtacctcggcccgctctagaactagtggatcccccgggctgcaggaatttcgatatcaagcttatcgatacccgtcgacctcgaggggggggcccggtacccanntttttgttccctttagtganggttaattgcgcgctttggcgtaatcaatggtcatagctgtttncctgtgtgaaaattgttattnccnttcacaaattcnacacaacattaccaancccggggagcattaaagtgtaaaagccctgggggtgcctaantgangngagcctaacttnacaattaatttgccgttggcgcctcactggncccgcttttccaatcngggaaaaacctttttnngccaactggatttaatnnaatcgggccaaccccccggngaanangcngntttggnnnatttngggcncttttttccnttcttnnttnanttaaattnatggncntnggtcnnttnggnttgnggganacggg

SEQ ID NO: 3664 - DNA, 904 bp, Homo sapiens
  misc_feature 372, 391, 409, 416, 429, 439, 441, 444, 450, 452, 459, 473,488, 489, 494, 497, 502, 503, 506, 507, 509, 516, 518, 520,522, 525, 538, 539, 541, 542, 545, 551, 554, 559, 562, 564,567, 570, 571, 575, 580, 583, 585, 589, 597, 598, 599: n = A,T,C or G
  misc_feature 600, 602, 604, 608, 611, 615, 616, 625, 626, 632, 640, 643,644, 645, 650, 655, 659, 660, 665, 674, 676, 679, 681, 693,695, 698, 710, 714, 715, 718, 719, 720, 722, 726, 734, 736,737, 744, 747, 748, 749, 751, 754, 755, 756, 757, 759: n = A,T,C or G
  misc_feature 760, 762, 763, 765, 768, 774, 775, 776, 782, 783, 784, 785,786, 787, 789, 792, 793, 800, 801, 802, 807, 809, 811, 816,821, 822, 828, 834, 835, 837, 839, 840, 842, 844, 848, 852,853, 855, 856, 857, 858, 859, 861, 862, 865, 866, 869: n = A,T,C or G
  misc_feature 871, 872, 874, 875, 877, 879, 881, 883, 884, 885, 886, 887,888, 891, 892, 893, 896, 901: n = A,T,C or G
cggcgtatacgactcactatagggcgaattggagctcccccgcggtggcggccgggggccattgagactgccatggaagacttgaaaggtcacgtagctgagacttctggagagaccattcaaggcttctggctcttgacaaagatagaccactggaacaatgagaaggagagaattctactggtccagacaagactctcttgatctgcaaatacgacttcatcatgctgagttgtgtgcagctgcagcggattcctctgagcgctgtctatcgcatctgcctgggcaagttcaccttccctgggatgtccctggacaagagacaaggagaaggccttaggatctactgggggagtcgagcggccgccgtcnaggtacacctggtgccccnttgcttgcttcaatcatnggttatntgatggcaaaatngaccttttgncnctnaaggananagaaaanatgtgtgtctgatntggtctggatttttnngagcntgnccatnnatnntncctcggncnangnacncggggtgaggccnntnngtngcttgnagngtttnctngntgntanngaantggtntgnanatgnttctttgnnnngngntggntanatanntctgattannaaaggnactggctnaannnttcanataanaagnnctctnttttcttgnangtntnttcttatacttntntgngatatgagtacntaanntcnnntngtanctgtctantnntaattanatnnnancannnncnncnnanttnattctnnnaatatnnnnnntngtnntttcttnnnatatntntntaccnttctnnatattnatattnntntnntntngatntcgnntnnnnnannttnnagngnngnnantntngnnnnnntannnatngttgnacg

SEQ ID NO: 3665 - DNA, 897 bp, Homo sapiens
  misc_feature 199, 200, 201, 202, 203, 204, 205, 206, 207, 208, 209, 210,212, 213, 214, 215, 216, 217, 218, 219, 220, 221, 222, 223,224, 225, 226, 227, 228, 229, 230, 231, 232, 233, 234, 235,237, 238, 239, 240, 241, 242, 243, 244, 245, 246, 247: n = A,T,C or G
  misc_feature 248, 249, 250, 251, 252, 253, 254, 255, 256, 257, 258, 259,260, 261, 262, 263, 264, 265, 266, 267, 268, 269, 270, 271,272, 273, 274, 275, 276, 277, 278, 279, 280, 281, 282, 283,284, 285, 286, 287, 288, 289, 290, 291, 292, 293, 294: n = A,T,C or G
  misc_feature 295, 296, 297, 298, 299, 300, 301, 303, 304, 305, 306, 307,308, 310, 311, 312, 313, 314, 315, 316, 317, 318, 319, 320,321, 322, 323, 324, 325, 326, 327, 328, 329, 330, 331, 332,333, 334, 335, 337, 338, 339, 340, 341, 342, 343, 345: n = A,T,C or G
  misc_feature 346, 347, 349, 350, 351, 352, 353, 354, 355, 356, 357, 358,359, 360, 362, 363, 364, 366, 367, 368, 369, 370, 371, 372,373, 374, 375, 376, 377, 378, 379, 380, 381, 382, 383, 384,386, 387, 388, 389, 390, 391, 392, 393, 394, 396, 397: n = A,T,C or G
  misc_feature 399, 401, 402, 403, 404, 406, 407, 408, 409, 410, 412, 413,414, 415, 417, 418, 419, 420, 421, 422, 423, 424, 426, 427,428, 429, 430, 431, 432, 433, 434, 435, 436, 437, 438, 439,440, 441, 442, 443, 444, 445, 446, 448, 450, 451, 452: n = A,T,C or G
  misc_feature 453, 454, 455, 456, 457, 458, 459, 460, 462, 463, 464, 465,466, 467, 468, 469, 470, 471, 472, 473, 474, 475, 476, 477,478, 480, 481, 482, 484, 485, 486, 487, 488, 489, 490, 491,492, 493, 494, 496, 497, 498, 499, 500, 501, 502, 503: n = A,T,C or G
  misc_feature 504-524, 526-536, 538, 540-549, 551, 552, 554, 555, 557-558561-566, 568-571, 573-576, 578-583, 585-587, 589-604, 606-609,611, 612, 615, 616, 618-628, 630-640, 642, 644-646, 648-649,652-654, 656-660, 662-663, 665-667, 669-672, 674-676, 679-680: n = A,T,C or G
  misc_feature 682-686, 688-690, 692-710, 713-716, 718-727, 729-735,737-751, 753, 754, 756-759, 761-764, 766-779, 781-784, 786, 788,790, 793-794, 796-797, 799-803,805-836,838-840,842-849,851-854,857-862,864-869,871-872,874-875,878-881,883-885,887,890-894,897: n = A,T,C or G
cgccgtaatcgactactatagggcgaattggagctccaccgcggtggcggcccgcccgggcaggtacatcttggtccaagccaccatcttcatctcttggttggattagagcagtgactgcctgtagatctccttgcttctactcttgccaccaacaaaaaagtcagtaaaaatgaagtcagtatataattggagggtnnnnnnnnnnnnannnnnnnnnnnnnnnnnnnnnnnntnnnnnnnnnnnnnnnnnnnnnnnnnnnnnnnnnnnnnnnnnnnnnnnnnnnnnnnnnnnnnnnnntnnnnnntnnnnnnnnnnnnnnnnnnnnnnnnnnannnnnnnannntnnnnnnnnnnnntnnntnnnnnnnnnnnnnnnnnnntnnnnnnnnntnntntnnnntnnnnntnnnntnnnnnnnntnnnnnnnnnnnnnnnnnnnnntntnnnnnnnnnnnannnnnnnnnnnnnnnnntnnntnnnnnnnnnnnannnnnnnnnnnnnnnnnnnnnnnnnnnnnannnnnnnnnnnanannnnnnnnnntnntnntnnatnnnnnntnnnntnnnnnnnnnnnnnntnnnnnntnnntnnnnnntnnnntnnttnntnnnnnnnnnnnannnnnnnnnnntntnnntnnttnnnannnnntnntnnntnnnntnnnttnngnnnnnannntnnnnnnnnnnnnnnnnnnnttnnnntnnnnnnnnnntnnnnnnnannnnnnnnnnnnnnntnntnnnntnnnntnnnnnnnnnnnnnntnnnntntntnttnnanntnnnnntnnnnnnnnnnnnnnnnnnnnnnnnnnnnnnnntnnntnnnnnnnntnnnnatnnnnnntnnnnnntnntnnttnnnntnnntnttnnnnnaan

SEQ ID NO: 3666 - DNA, 824 bp, Homo sapiens
  misc_feature 2, 5, 518, 555, 625, 638, 668, 671, 674, 683, 715, 721, 738,777, 807, 814, 822, 823: n = A,T,C or G
gnctnaacgactactatagggcgaattggagctccaccgcggtggcggccgcccgggcaggtaccatggcgacgcgcggtggggctggggtggcaatggcggtttggtccctcttatccgcccgggccgtgaccgcgttccttctgttgttcctccctcgcttcttacaggcccagacctttctttccctttccagcagccggagaagtgcgacaacaaccagtacctcggccgctctagaactagtggatcccccgggctgcaggaattcgatatcaagcttatcgataccgtcgacctcgagggggggcccggtacccagcttttgttccctttagtgagggttaattgcgcgcttggcgtaatcatggtcatagctgtttcctgtgtgaaattgttatccgctcacaattccacacaacatacgagccgggagcataaagtgtaaaagcctggggtgcctaatgagtgagctaactcacattaattgcgttgcgctcactgcccgctttcagtcnggaaacctgtcgtgccaacctgcattaatgaatcggncaaccccccgggagaggcgggttgcgtattgggcgctctttccgctttcctggttaattgaactcgctgngctcggtcgttcngcttgcggcgagcggtattaactcaactcnaangcnggtaatacngttatccacaagaaataaggggataaacgcangaaaanaacatgttaaccaaaanggccaacaaaaaaggccaggaacccttaaaaaggccccngttggctggcgttttttcataaggctccgnccccctngacagcannt

SEQ ID NO: 3667 - DNA, 828 bp, Homo sapiens
  misc_feature 504, 540, 577, 587, 592, 662, 664, 665, 672, 679, 714, 738,755, 764, 777, 810, 826: n = A,T,C or G
cgactactatagggcgaattggagctccaccgcggtggcggccgcccgggcaggtacacgccagcctattctcagcacagctgctagagtgtccttatacccttcattgacttaaaatcccacagtggctctccatttcacttagtgaatgctatcatgtattcagtggcccacaagggctccatcacctagccctctgctccctagtacctcggccgctctagaactagtggatcccccgggctgcaggaattcgatatcaagcttatcgataccgtcgacctcgagggggggcccggtacccagcttttgttccctttagtgagggttaattgcgcgcttggcgtaatcatggtcataagctgtttcctgtgtgaaattgttatccgctcacaattccacacaacatacgagccgggagcataaagtgtaaaagcctggggtgcctaatgagtgagctaactcacattaattgcgttgcgctcactggccgcttttcagtcnggaaacctgtcgtgccagctgcattaatgaatcggncaaccccggggagaggcggtttgcgtattgggcgctntttccgcttncttgnttacttgacttgcttggcttcgggcggttcggcttggggcgagcggtattaagcttaacttcaaaaggcngnnaataacngttattncacaagaaatcaagggggataaaccccaggaaaanaaacatttttgaaccaaaaagggncagcaaaaaagggccanggaaccctnaaaaaagggccgngtttgcttggcgttttttccaaaagggttccgnccccccttgacgaggnat

SEQ ID NO: 3668 - DNA, 880 bp, Homo sapiens
  misc_feature 519, 642, 650, 677, 698, 707, 736, 784, 794, 821, 841, 864,871: n = A,T,C or G
actactatagggcgaattggagctccccgcggtggcggccgaggtacgcgggggagaacttcggaggatgttcatgtccaggagcagccccacgccctgtatggtcggtgtctagagcctcacagcaactaagaccaacccagctctcagaagaaggaatgtcaaaatgtcatgttcaattttacattcagtgcctggaatcttttcttcacaattgaaatgaaatgtgctgaaggaggtgaatccatgcattaatcttcagctcacaaaggaaatactacataagaagcaagaccacagactcaagacggacataattggatttttttgccatggcctggaaagaaaggtacctgcccgggcggccgctctagaactagtggatcccccgggctgcaggaattcgatatcaagcttatcgataccgtccacctcgagggggggcccgggtcccagcttttgtccctttagtgagggttaattgcgcgctttggcgtaatcatggtcatagctgttttnctgtgtgaaattggtatccgctcacaattccacacaacatacgaacccgggagcataaagtgtaaaagcctggggtgcctaatgagtgaagctaactacattaatttgcgttgcgcctactgnccgttttncagtcgggaaacctggcgtgccagctncattaatgaatcggcccaacncccggggangaggcggtttgcgtatttgggcgctcttncgctttctcgttacttgactccttgcgcttcgggtcgttcgggttgcngggaaccggntttaaacctcactcaaaaggcgggaanaccgggtattcacaaaaatnggggataaccccaggaaaaaaanatttgancaaaaggct

SEQ ID NO: 3669 - DNA, 845 bp, Homo sapiens
  misc_feature 497, 500, 522, 549, 559, 571, 617, 636, 639, 645, 697, 706,710, 721, 723, 776, 781, 786, 797, 808, 811: n = A,T,C or G
cgactactatagggcgaattggagctccacccgcggtggcggcccgcccgggcaggtacttgggtgtgattcaggagtatgcaagcctttctgccccactttgttgccttgttaactaagggaggctgagataagtcctctcaggtgcagtcagagtctgtcctaagatgggggtagggagttgctgtgcctcagtggtttactttctcaatatagactgttagccatatgtgtattacctgaaaccttaaggagaaagcatttttggccggcctggaaaggacacaagcaaatgtagccttgatggtggagaaacgtctctagcagggctgtgcatctgaatcagcattgaagcagcgccaccttgtggttgatgctgaatgagctgtgtattcggccaggttctgtgattcttaccctgtctgcatgctgttcgagtagctaaagtacctcggccgctctagaactagtggatcccccgggctgcaggaaattcnatntcaagcttatcgatacccgtcnaccctcgagggggggccccggtcccanctttttgttncctttaagtgangggttaaattgcgccctttggccgtaatcatgggcaataagcttgnttttcctggggtggaaaantgnttaatnccgctcacaatttccacaccaacattacccaagcccggggagccttaaaatngtaaaaagncctnggggggccctnantgaggtggagcttaacttcaacaatttaatttgcggttggcgcctcaactggncccgnttttncaagttcgggnaaaacctttcntgnccaaccttgatttaattaaattggccaacccccc

SEQ ID NO: 3670 - DNA, 830 bp, Homo sapiens
  misc_feature 2, 484, 509, 554, 559, 562, 569, 580, 586, 668, 682, 706,727, 761, 771, 777, 785, 795, 802, 803, 809, 813, 826: n = A,T,C or G
gnctaatctactactatagggcgaattggagctccaccgcggtggcggcccgaggtacgcggggacattcagaggtgagcccagagcgggtaaagtggactggggagaacttcggaggatgttcatgtccaggagcagccccacgccctgtatggtcggtgtctagagcctcacagcaactaagaccaacccggctctcagaagaaggaatgtcaaaatgtcatgttcaattttacattcagtgcctggaatcttttcttcacaattgaaatgaaatgtgctgaaggaggtgaatccatgcattaatcttcagctcacaaaggaaatactacataagaagcaagaccacagactcaagacggacataattggattttttttgccatggcctggaaagaaaggtacctgcccgggcggccgctctaaaactagtggatcccccgggctgcaggaattcgatatcaagcttatcgataccgtcgancttgagggggggccccggtacccancttttgttccctttaatgagggttaattgcccgccttggcgtaancaatnggnatagctngttcctgtggnaaattngttattccgctcacaatttcacacacataccaagcccggagccataaaaatgtaaaaccctgggggtgccctaatgagtgancctaactcacattnattggggtttgcgctcacttgccnttttccaattcgggaaacctntcttgccaacttgaattaatgaaatgggccaacnccccgggganaaggcnggttttgngtatttgggnctttttnnctttcnttgnttaaattaactcnctgc

SEQ ID NO: 3671 - DNA, 906 bp, Homo sapiens
  misc_feature 398, 534, 541, 605, 607, 618, 619, 628, 630, 644, 657, 661,675, 676, 681, 683, 699, 705, 721, 740, 742, 749, 757, 758,777, 783, 784, 786, 792, 795, 799, 808, 814, 815, 825, 826,829, 835, 838, 841, 855, 857, 859, 862, 868, 869, 870: n = A,T,C or G
  misc_feature 871, 876, 879, 905: n = A,T,C or G
actcactatagggcgaattggagctccccgcggtggcggccgaggtacaacttgtcataaatggcagtgtgggacatttacattcttttggtctacagttctgagactattttttatgcatgtatgtatttattcagtaaacatttatcctctgctgcacgtcaagcactatgccagacccgataggagagaacccagggtgagtgtgacccggcctctgcttggaacgagatgggtgtctctagccaggccaggtgcttaccatgtgcctggtgtggggtccatgacaccaagcagggcagacctaggcatcctgttggtgcagctctgtaaaggggacaaagacagacaacaaaccatgactccgagaaagtgcaacaggtgccacgaggaaacanaattccaggacaggaaggtcagggaatgccttttctggaccaaggggggaaaaagaaccagcaggggagggtattctggcagaaggggcagtagcttgaagccttcaaaagtggaagtgttattaattctttgganggggggnaaagggaaatgggagcttgggaaagggggggcagcattttcccatatcctccagaccgacaatntnggaactttggnntttggttantncccaagtgcctttnaagggcattggtngcanggatttttaagccnnggttnantgattagggaaatttnttttgnaaaaagataatttctnggttgcaaaggttagcttncntttgttnaagggganntttttaaaaggccctgaantagggnntnaaaccnaantttngccttttancttaannctgggggccnnttncttttnctnaanaatgggaccttatngntnccncctcannnnggggnaanggtttgataaataaaaaaggggcaana

SEQ ID NO: 3672 - DNA, 838 bp, Homo sapiens
  misc_feature 445, 538, 547, 582, 622, 624, 629, 703, 713, 726, 728, 740,743, 757, 770, 775, 792, 803, 816, 818, 832, 833: n = A,T,C or G
cgccttatacgactactatagggcgaattggagctccaccgcggtggcggcccgcccgggcaggtacaaggacaatagggataccctggagctgtcccagtccagcccgagaagggcattctccctacttgtgtgtcatcttagggactctcactttgaccctgagtgtgataggaaccatggggaagtctgagctgaggttggacgtgaaaggtctcatgttttaacagggtcactctggccccctccactgagaacaggctgaaggtggcagggactgagtggagagacctcttgggagaccactgcagcaagtcaggtgagagctggaggtggcttggcccaatgggtagctgtgaggtcgagagcaatggctggagccaggaaacctctgagtacctcggcccgctctagaactagtggatcccccgggctgcaggaattngatatcaagcttatcgataccgtcgacctcgagggggggcccggtacccagcttttgttccctttagtgagggttaattgcgcgcttggcgtnaatcatggncatagctgtttcctgtgtgaaaattgttattccgntcacaatttcacacaacataccaaccgggagccataaagntnaaagncctggggtgcctaatgaggtgagctaactcacatttattgcgttgcgcctaactggccggcttttcaatcgggnaaacctgttnttgcccaccttgnanttaatgaaatcnggnccaacccccggggnaaaagccgttttncctanttgggcgccttttttcncttttctttgnttaaattaaattngnttgggcctcgggcnnttccg

SEQ ID NO: 3673 - DNA, 902 bp, Homo sapiens
  misc_feature 566, 615, 643, 668, 669, 678, 682, 694, 701, 705, 707, 719,721, 732, 734, 735, 746, 748, 751, 753, 754, 766, 771, 781,792, 794, 804, 810, 815, 821, 824, 835, 838, 839, 840, 842,849, 852, 872, 873, 875, 890, 892, 900: n = A,T,C or G
gcgtatcgactactatagggcgaattggagctccccgcggtggcggccgcccgggcaggtaccctgagcctcctgtgccattcttgctagctggacagaagacattgctactgagccaagaagacttgatctctcttacaccgaggaagaagggaaggtctgatgcaatgaaacagcacgtttgttataattctagatcagaaccataatagtaatttgcctactatgtaacattgaacaaactactgttttgtgagcctgaaaagttggtacctcggccgctctagaactagtggatcccccgggctgcaggaattcgatatcaagcttatcgataccgtcgacctcgagggggggcccggtcccagcttttgttccctttagtgagggttaattgcgcgcttggcgtaatcatggtcatagctggttcctgtgtgaaattggttatccgctcacaattccacacaacatacgagccgggagcataaagtgtaaagcctggggtgcctaatgagtgagctaactcacattaattgcgttggcgctcactgcccgcttttcaagtngggaaaccttgtcggtgccagcttgcattaaatgaatcgggccacgccncggggaagaaggccggttttgcgtattngggcgcttttccgctttcttggttnnttgacttgnttgngcttcggcggtnggctggnggcnancgggtattaagntnattaaaaggcngnnaataccggttntncanannaatcagggggantaacnccaggaaaanaacaatgtgancnaaaaggccancaaaanggccntgaacntgnaaaaaggccgngtnnntngcgtttnttnataaggttccgcccccttgnnangattaaaaaaaattncncttaagtnct

SEQ ID NO: 3674 - DNA, 808 bp, Homo sapiens
  misc_feature 582, 608, 615, 687, 714, 737, 738, 761, 786, 787, 797: n = A,T,C or G
cgccgtatacgactactatagggcgaattggagctccaccgcggtggcggccgcccgggcaggtactgtgtttctccacctgacctagaaaaccttgattcctgaaaagcctcaccctaactttgccacaacctggcgatccatccatactgttcacagccctcaggagagactggataattatgaacacaccttgctttcttccatcatttcccttttccccaagggaacatagctgcactgagaacaccaatctctcaaccacaccctatcccaacccctgtggaaaatatagtagctacctcaccaatgggagttgagggaatgaagactcatgtcttctgggatctgggtcaagcccaggtcagccattcttcagacttgcacaagtacctcggccgctctagaactagtggatcccccgggctgcaggaattcgatatcaagcttatcgataccgtcgacctcgagggggggcccggtacccagcttttggtccctttagtgagggttaattgcgcgcctggcgtaatcatggtcatagctggttcctgtgtgaaaattggtatccgctcacaattncacacaacataccagcccggagcatnaagtggnaaagccctggggtgcctaatgagtgagctaactcacattaattggcgttgcgctactggccgctttcaatcngggaaacctgtcgtgccaacttgattnatgaatcggccacccccggggannaggcggttgcgtaatgggggctntttccgtttcttggttaaatgactnnttggcctcgncgttcgggtgg

SEQ ID NO: 3675 - DNA, 852 bp, Homo sapiens
  misc_feature 2, 3, 5, 12, 13, 65, 429, 462, 497, 523, 572, 595, 598, 604,605, 606, 607, 608, 610, 611, 618, 619, 620, 621, 622, 624,626, 632, 635, 638, 646, 649, 651, 658, 674, 677, 680, 684,688, 692, 697, 698, 703, 710, 713, 715, 719, 720: n = A,T,C or G
  misc_feature 724, 726, 727, 729, 735, 741, 744, 745, 746, 749, 758, 759,760, 761, 764, 768, 769, 771, 778, 783, 784, 786, 787, 788,790, 791, 794, 796, 797, 798, 800, 801, 802, 803, 807, 808,810, 811, 812, 813, 815, 817, 818, 819, 822, 824, 825: n = A,T,C or G
  misc_feature 826, 827, 829, 830, 836, 839, 841, 842, 846, 848, 849, 850,851: n = A,T,C or G
gnntntacgagnncgcgtaatacgactactatagggcgaattggagctccaccgcggtggcggcncgaggtactgggattacacgtgtgagccaccgcacccagcaactgttcacattttttaaaaaacagctctacctctgagttaaaactgatttttgtcaaattgtaaactttaaaatattagcctttccccagtgctatgtgctctttaagagcatagtgcttaaaatttggactgtaactattttaaaggcttttttttctttgctgccatgttccaggtcacgtctgttaagtgtttttgttgttgtcacagtgttttagaattattctgatgcaaaaaaaaaaagaattattctcatgcagtagctgaaaccaatgcagaatatgctggttttgcaacaatttcatgtcatgaaatgcttangccaattttcagttaatagaactacctccatangtttaaaaagttatgataaattagaagccatttgntcttttacattaataggaagcattanttcaagataaattacttcaggattagggattaccattaaataaagttangtcatataacctggataatgggnggntacccnnnnnannaaaaaannnnnangntcctgnccnggncgggccgnttntnaaaaacnagtgggattccccccnggnctnggangaanttcnaaaannaaagntttattngananccgnnaaantnnangggggnggaccnggnnnccnaattattgnnnnctntaanngnggggttnaaatnnannncnnggntnnnannnngggnnannnngnannntcnannnntnnaatttnatnanncccntnnnng

SEQ ID NO: 3676 - DNA, 830 bp, Homo sapiens
  misc_feature 581, 583, 597, 615, 643, 661, 662, 679, 697, 700, 703, 715,722, 729, 761, 762, 776, 788, 793, 796, 809, 814, 826: n = A,T,C or G
ggcgtatcgactactatagggcgaattggagctccaccgcggtggcggccgcccgggcaggtaccaccacctatccacactctcacacaatcaccccttttgaagtaaagcctatattttaaaaataaccattacagattgtgagtgcagtctaggatcacatagcagaactaaaagctaactggcccacccacaaagtaaatgtgagacagagggctcggggtagccatactctagccaagtagtacctcggccgctctagaactagtggatcccccgggctgcaggaattcgatatcaagcttatcgataccgtcgacctcgagggggggcccggtacccagcttttgttccctttagtgagggttaattgcgcgcttggcgtaatcatggtcatagctgtttcctgtgtgaaattgttatccgctcacaattccacacaacatacgagccgggagcataaagtgtaaagcctggggtgcctaatgagtgagctaactcacattaattgcgttgcgctcactgcccgcttttcagtcgggaaacctgtcgtgccagctgcattaatgaatcggccaacncnccgggagaggcggnttgcgtattgggcgcctnttccgcttttcttggttaattgactcgnttgggcttcgggccgttnnggttgcggggagccggnattaagcttacctaaaanggnggnaataccgggttntccccanaaattanggggattaaccccagggaaaaaaaaatgttgnnccaaaaaggccccnaaaaagggcccngaaanccnaaaaaagggcccntttgnttggggtttttncaaa

SEQ ID NO: 3677 - DNA, 815 bp, Homo sapiens
  misc_feature 567, 616, 621, 623, 631, 653, 655, 672, 686, 688, 693, 704,719, 762, 769: n = A,T,C or G
gcgtatcactactatagggcgaattggagctccccgcggtggcggccgcccgggcaggtacacggagaattttaaatgggcagaagagaatttaaaggtgttatttacataaatgtaaaagcccctaaagtggagaaatctctcataaggaatttcaaacatttgcttgactctggaggcctggcatactaaggaataggattcctcctaagaattacacatctgaaggctgtcctgaaagactttccatactcgatgatgctcttttgggtacctcggccgctctagaactagtggatcccccgggctgcaggaattcgatatcaagcttatcgataccgtcgacctcgagggggggcccggtacccagcttttgttccctttagtgagggttaattgcgcgcttggcgtaatcatggtcatagctgtttcctgtgtgaaattgttatccgctcacaattccacacaacatacgagccgggagcataaagtgtaaagcctggggtgcctaatgaagtgagctaactcacattaattgcgttgcgctcactggccgcttttcagtcnggaaacctgtcgtgccacttgcattaatgaatcgcccaccccccggganaggcngnttgcgtantggggcgctctttcgctttctngnttaactggactcgctgngctcggtccgttcngnttgcnggcgagccggnttaactcacttaaanggcgggaataccgggtattccacagaattaaggggattacccnaggaaanaaccttttgagccaaaaggcccccaaaagggcccggaaccctaaat

SEQ ID NO: 3678 - DNA, 936 bp, Homo sapiens
  misc_feature 2, 440, 498, 500, 522, 549, 564, 586, 592, 610, 618, 635,645, 646, 647, 655, 699, 706, 713, 716, 718, 722, 727, 731,732, 740, 743, 747, 754, 762, 769, 785, 795, 796, 797, 798,800, 802, 806, 809, 815, 816, 818, 819, 820, 827, 828: n = A,T,C or G
  misc_feature 831, 836, 840, 844, 849, 850, 851, 860, 867, 871, 879, 881,883, 887, 891, 892, 897, 906, 908, 910, 914, 918, 923, 924,932: n = A,T,C or G
gncccgtatcgactactatagggcgaattggagctcccccgcggtggcggcccgaggtacccgagtcggattaggagaggcggccaggggagcctgcctttagaaagagcttcggatgattcagatgcacacgtttgggaccgtgggctatgggggtcgccgcaataaccatgtgaggattaacgggggcttaaccgattgtgaaaatccccttagaagtgtcgcgtaaacaaccccaactcccactatggtgccggaccccagtgcctcactgtacctgcccgggcggccgctctagaactagtggatcccccgggctgcaggaattcgatatcaagcttatcgataccgtcgacctcgagggggggcccggtacccagcttttgttccctttagtgagggttaattgcgcgcttggcgtaatcatggtcataagctgnttcctgtgtgaaaattgttatccgctcacaaattcacaccaacataccaagcccgggnangcataaaagtgtaaaagcctgnggttccctaattgaagtgagcctaaantcacatttaatttgngtttgcgctcactggccccttntccaanaccggggaaaccttttcntgccagcntgcatttaatgaaatcnggcccaaccnnnccgggganaagccggttttgcttaatttgggcgcttttttcggctttcttgnttcactngaattcnctncncttnggtcntttnnggttgcgngcnaccnttttatnttcattcnaaaggcntttatactggttattnccaagaattnnnngnantaantcngtaaannannnttttaannaanatggnttcnaaanggtcnnnttaatcctntaaaagncccnttggttgngntntttnatanntttanccccctgtncngnttanaaanatttnnccttattnaact

SEQ ID NO: 3679 - DNA, 947 bp, Homo sapiens
  misc_feature 2, 4, 5, 7, 9, 10, 11, 30, 73, 80, 81, 87, 93, 329, 333,358, 458, 465, 471, 477, 481, 544, 549, 576, 591, 593, 605,627, 630, 638, 648, 652, 667, 674, 676, 679, 680, 687, 689,690, 695, 697, 700, 702, 711, 714, 715, 718, 722, 727: n = A,T,C or G
  misc_feature 735, 738, 742, 744, 757, 763, 776, 781, 782, 785, 787, 788,789, 792, 795, 798, 802, 815, 820, 825, 829, 840, 841, 843,845, 855, 858, 866, 867, 869, 870, 873, 874, 879, 883, 885,887, 893, 896, 898, 903, 904, 909, 910, 913, 915, 917: n = A,T,C or G
  misc_feature 919, 923, 926, 927, 929, 934, 937, 939, 942, 944: n = A,T,C or G
gngnntntnnnactcactatagggcgaatnggagctccacccgcggagctcccccgcggtgcgccgcccgacntacatgnnttcggntaatcngccagaaaaattacattagggtaacaggctagaacagtctgacttttcttgtttttctatcccttgctttcttgattagaatgaataggaggtgggtctggatatagcagctggaaacctgtgttccatgagtgatggggaagagagggagggaataggttcctctgatttttggcattttctaagacctgatgcccaccttgtcagagaatgcgatgactacttttgtgttcttncttntccctttttctcccaatataaaatngttttctctttcagaactgcagaagtgcattttggttctttgaccacttttgatgttgttaatttagctgaatacctaagtgaacattttgtgtcaaaanccccttngtttangaaatncagntggtctagtcacccttacattttctgcctcataattggccctaagcccttttttttggtagtnagctncttacctaagatttttgtctttcattnagaaagtttaaaagngnttttaaggtccnttacccaattctgggttctctnatntaaacctngccatttggntatntctgtaaaagctccnaaatgtngncannaaaggcntnntcttngnggncntcacacccntcnntcnccangctanctttgggnaancctnanatggggagccatnatttgngcccttaaagttngaggnntgnannntangcncantaancccccccctgggnctctnacccnggcnaacaaaatgannancntgtttttaancanacagattnncnnctnnatganaatntnanaacaanatnangttcnntccgnncgncnantntaanaanntntgganccncnggncngag

SEQ ID NO: 3680 - DNA, 935 bp, Homo sapiens
  misc_feature 3, 562, 612, 619, 672, 691, 698, 732, 739, 758, 768, 770,772, 777, 782, 790, 792, 809, 826, 829, 860, 861, 870, 874,876, 879, 884, 891, 898, 899, 904, 910, 919, 924, 925, 933: n = A,T,C or G
agnatcactactactactatagggcgaattggagctccccgcggtggcggcccgaggtacttctttttgagtcccactgcagaagcacagtggccaaaaaaggagagctgagaatcctgctcttattatttctggccagacccacccaaatcatcttatccccagctttttattttgaaaattttcaaccctacaagagaaattttgaacacccattgtacctgcccgggcggccgctctagaactagtggatcccccgggctgcaggaattcgatatcaagcttatcgataccgtcgacctcgagggggggcccggtacccagcttttgttccctttagtgagggttaattgcgcgcttggcgtaatcatggtcatagctgtttcctgtgtgaaattgttatccgctcacaattccacacaacatacgagcccgggagcataaagtgtaaaagcctggggtgcctaatgaagtgagctactcacattaattgcgttggcgctcactggccgctttccaagtcgggaaaacctgtcgtgccagctgcattaatgaaatcggncaacccgccggggagaggcggtttggcgtatttgggcgcttctttccgcntttcttngctcacttgacttcgcttgggccttcggtccgttccggttgcggcgaaccggnattcagcttacttcaaaanggcgggnaaataccggttttcccacagaaataagggggatnaccgcanggaaagaaacatgttgagncaaaaaggcncncnaaaangggcngggaaccngnaaaaaaggcccggttgntgggcgtttttttcatnagnttcccccccctggcgaggtttacaaaaattnnccctttaanttananggnggggnaaccccnccggccnnttaanaaaccnggcggtttnccccnnggaagatnct

SEQ ID NO: 3681 - DNA, 940 bp, Homo sapiens
  misc_feature 2, 3, 4, 5, 6, 7, 10, 14, 29, 366, 572, 655, 691, 707, 712,746, 750, 752, 770, 778, 784, 785, 787, 796, 798, 801, 834,840, 847, 848, 852, 861, 865, 867, 870, 889, 906, 909, 922,932, 939: n = A,T,C or G
gnnnnnnagngtancactactatagggtntagggcgaattggagctcccccgcggtggcggcccgcccgggcaggtacgcggggacacattcagaggtgagcccagagggggtaaagtggactggggagaacttcggaggatgttcatgtccaggagcagccccacgccctgtatggtcggtgtctagagcctcacagcaactaagaccaacccagctctcagaagaaggaatgtcaaaatgtcatgttcaattttacattcagtgcctggaatcttttcttcacaattgaaatgaaatgtgctgaaggaggtgaatccatgcattaatcttcagctcacaaaggaaatactacataagaagcaangaccacagactcaagacggacataattggattttttttgccatggcctggaaagaaaggtcctcggccgctctagaactagtggatcccccgggctgcaggaattcgatatcaagcttatcgataccgtcgacctcgagggggggcccggtcccagcttttgttccctttagtgagggttaattgcgcgcttggcgtaatcatggncatagcttgtttcctgtgtgaaattggttattccgcttacaatttccacacaacaataccgagcccgggagcataaaagtgtnaaagccctggggtgcctaatgagggagcttacttcncattaattggcgttgngcttnacttggccgcttttccaagtccggggaaaccttntcgngnccagcttgcatttaatgnaatcgggnccaacnncncgggggagnangcngtttgccgtatttgggccctttttccgtttctngcttanttgactnncttnggcctcggnccgntncgnttggggcgaagcgggtttnagcttacttcaaaaggnggnaataccggttttnccaaaaaatnagggggnt

SEQ ID NO: 3682 - DNA, 866 bp, Homo sapiens
  misc_feature 5, 7, 9, 20, 28, 33, 454, 494, 524, 542, 544, 545, 546, 547,548, 549, 551, 552, 553, 554, 555, 556, 557, 558, 562, 564,575, 590, 593, 595, 596, 601, 607, 616, 621, 623, 625, 631,633, 636, 638, 640, 641, 642, 651, 653, 655, 661: n = A,T,C or G
  misc_feature 663, 664, 666, 668, 670, 672, 674, 679, 684, 685, 686, 687,688, 691, 692, 693, 694, 696, 698, 699, 700, 701, 702, 707,708, 709, 711, 715, 717, 724, 731, 736, 745, 748, 749, 750,753, 755, 756, 763, 767, 770, 774, 776, 778, 779, 781: n = A,T,C or G
  misc_feature 783, 786, 788, 790, 796, 799, 801, 806, 812, 815, 820, 826,827, 834, 836, 838, 841, 843, 849, 852, 853, 854, 855, 856,857, 859, 861, 865: n = A,T,C or G
cgctntntnctactataggncgactcgntatcnggcgaattggagctccaccgcggtggcggcccgaggtacctcaagaaaactttatcacatgcgtgccaggtgcctgacatgattctagatgctgaggatgtagcagttagccaaagggatataactcttgctctcatgcagtttatattctaatttggatattctaaatatttcatgtagaatgtgaaataataccacaattaagatatcacataagaaagatactttcagagcttctctatttaataatttcatgtaggaaaagaaggtctccttagtgtatcttatctttcagacctttatatgtaataacatgatttttcctaatttagaattaacagtttctctagcatgtaaagaaaaaactggacctgtgttttggaaatcaagacctaaggttcaaatcaaggaccataaaccncaccattaaggttagggggaaaaggttggcctcttctatntataccaaatcagttctttcagtgtttcanggtggtgaaaatggaaanannnnnnannnnnnnnaaantnaaaataaaggngccctgcccggggtnttntnncccanaaaaanagggggttnacccngngnaaaaananttngntnnnaaaaagggncntnaaagantnnangncnanantaatngtgannnnntgnnnngntnnnnnaaaannngnttancncctttgnggtgagntatanaaaattttnacnnnatnanngggggtnggtnaanaccngngnngntntanananaacccnggngntgtgnccccgnggnaggantatttnntggcccntntnttntnttcccntcnnnnnntncngaang

SEQ ID NO: 3683 - DNA, 902 bp, Homo sapiens
  misc_feature 504, 518, 560, 584, 586, 593, 607, 647, 652, 657, 668, 669,674, 681, 686, 688, 694, 696, 698, 702, 703, 716, 717, 721,732, 735, 736, 743, 745, 747, 751, 752, 755, 770, 771, 773,774, 776, 779, 780, 781, 782, 791, 792, 793, 795, 797: n = A,T,C or G
  misc_feature 799, 800, 803, 805, 808, 809, 814, 815, 816, 818, 820, 821,824, 825, 826, 827, 828, 829, 830, 831, 832, 836, 838, 839,846, 849, 851, 854, 855, 856, 857, 859, 861, 864, 865, 866,870, 872, 874, 875, 876, 877, 879, 886, 890, 891, 892: n = A,T,C or G
  misc_feature 896, 897, 898, 899, 900: n = A,T,C or G
gcgtatacgactcactatagggcgaattggagctccaccgcggtggcggccgaggtacctgccaccacacctggctaatttttgtattttcagtagagatggggtttcaccatgttggccaggctggtctcgaactcctgacctcaggtgatccgcccgcctcggcctcctaaagtgctgggattacaggtgtgagccaccacgaccagccagaggacactttcttaacaaaatattccctttagggtaagatctttccttagaaaagttattcatgaatattttctggtttctagctaaaatataagcttatcatatttatcaaaatatttcaatttaactctgaagatattatcacttggaataaagtttgttaaaaatttggaagaaatgcacaagttatattttgaaaacagttttgaaaaggagctatattttattcatataaatattaagaaaatgttatgaagtgaatagttatcactaactatactagattactgnacctgcccggcggnccgctctagaactaagtggaatccccgggctgcaggaattcnatattcagcttatcgatacccgcnancttcgangggggggccccggnacccagcttttggttccctttaagtgaggggtaaattgcncgccntggcngtaaacatggnnaatanctggttncttgngngaaatngntntccnnttacaaattccanncaanataccaaaccnggnncattaanangnaaannccnggggggcctaatggnngnncnaannnnaattaatgnnntngncnnacngnccnntttcnnnangnnaannnnnnnnncccntnnattaaanaantngcnnnncncnggnnnaggngntnnnntntggggcntttnnntttnnnnnac

SEQ ID NO: 3684 - DNA, 932 bp, Homo sapiens
  misc_feature 4, 285, 288, 301, 305, 310, 336, 349, 380, 395, 405, 407,420, 423, 444, 446, 452, 455, 458, 465, 478, 497, 501, 518,531, 549, 557, 570, 572, 577, 582, 588, 589, 607, 608, 616,618, 626, 636, 642, 647, 653, 662, 673, 694, 715, 716: n = A,T,C or G
  misc_feature 724, 726, 736, 737, 740, 741, 748, 749, 751, 752, 754, 763,777, 785, 792, 797, 799, 800, 801, 817, 818, 822, 823, 825,846, 860, 870, 887, 892, 895, 899, 905, 910, 922, 929: n = A,T,C or G
gcgnaacactactatagggcgaattggagctccaccgcggtggcggccgccgggcaggtacgcggggaaaggccctgaggaaaacaaaccccagctgggaagcctgagaacacttagccttcatgagtgtccccaccatggcctggatgatgcttctcctcggactccttgcttatggataggagtggattctcagactgtggtgacccaggagccatcgttctcagtgtcccctggagggacagtcacactcacttgtggcttgagctctggctcagtctctantanttactaccccagntggnacctntgggcgcgctagaaatagatggggtnccccgggctgtgngaaaattatatcaagcttatatataccccgnacctctagggggggnccccggcccncntttttttttcctntanagagggggttaaatcgcgctntngggaanaantgngcataanatgttttctgtgngaaaaagttattttccttnaaantttccacaaaataatangcccgggggcatnaaaaagtgaaaaactccnggggcctncatagaggggggntnccacnccaanaaatanntgggggggctcacatgcnncctttttnanaaaggggnaaaaaacctntggggnccaanctgaanttaaagaantcccccacccnccgggggagaggggggtttgnattattggggcccttattccnnttttttgntnaatgacattnntgnncttcggnnanntnggtgggggngggcgttattatantttaatanaaggggngatantnnngttttccaaaaaaatnngggnnancacgcaagaaaaaatattttnaaaaaaggccaatnaaaggccagntacccaaaaaagggctngttgnctngcgnttttanaaagncccccccctatnaaaaaanaaa

SEQ ID NO: 3685 - DNA, 870 bp, Homo sapiens
  misc_feature 494, 517, 521, 542, 547, 564, 566, 590, 597, 609, 614, 615,620, 627, 634, 635, 640, 647, 654, 657, 658, 659, 667, 669,670, 673, 675, 691, 697, 711, 712, 714, 716, 728, 730, 736,739, 741, 749, 751, 755, 758, 759, 761, 765, 766, 769: n = A,T,C or G
  misc_feature 781, 790, 801, 802, 806, 815, 820, 827, 832, 835, 839, 840,843, 849, 858, 859, 870: n = A,T,C or G
actactatagggcgaattggagctccaccgcggtggcggcccgcccgggcaggtacctttctttccgggccatggcaaaaaaaatccaattatgtccgtcttgagtctgtggtcttgcttcttatgtagtatttcctttgtgagctgaagattaatgcatggattcacctccttcagcacatttcatttcaattgtgaagaaaagattccaggcactgaatgtaaaattgaacatgacattttgacattccttcttctgagagctgggttggtcttagttgctgtgaggctctagacaccgaccatacagggcgtgggactgctcctggacatgaacatcctccgaagttctccccagtccactttacccgctctgggctcacctctgaatgggtctctttgtccacacaggcagagattcgctacatctggaacttggctcctccagcttggaagtaaccatgaagatgtggttggggtggggtgggaaaccnccatgtttaaacaaaacttggtnaggnaaagagaacctttaccatttnccaanccaatctcccacccacnangcagggagcaatcccttccccggngtacctnggccggtcttanaactnngtggnacccccnggctgcnnggaantcatatnaagcctnatnnnatacccgncnnccncnagggggggccccggancccagntttttgttcccttnnangngggtaaatgccncntggcgnaananggcaaagngnttcnggnngnaaanngancccttccaatcncacaatacnagccgggaccnnaagngataagccnggggnctcaagnggggnctncccnnttnattggntggcccccnngcccctttccn

SEQ ID NO: 3686 - DNA, 902 bp, Homo sapiens
  misc_feature 4, 158, 172, 262, 330, 345, 378, 392, 396, 403, 414, 444,446, 455, 462, 487, 505, 509, 532, 538, 553, 572, 573, 574,586, 599, 602, 607, 609, 611, 624, 628, 645, 657, 660, 681,682, 685, 694, 695, 697, 699, 704, 708, 713, 714, 725: n = A,T,C or G
  misc_feature 727, 732, 733, 734, 739, 755, 760, 776, 784, 786, 789, 792,793, 800, 802, 817, 836, 840, 846, 854, 863, 865, 870, 875,885, 895, 896, 898: n = A,T,C or G
cganttggagctccccgcggtggcggccgaggtacccaaaagagcatcatcgagtatggaaagtctttcaggacacgccttcagatgtgtaattcttaggaggaatcctaattccttagtatgccaggcctccagagtcaagcaaatgtttgaaattncttatgagagattnctccactttaggggcttttacatttatgtaaataacacctttaaattctcttctgcccatttaaaattctccgtgtcctgcccgggcggncgctctagaactagtggatcccccgggctgcaggaattcgatatcaagcttatcgatccgtcgacctngagggggggcccggncccagcttttgttccctttagtgagggttaatngcgcgcttgggcgnaatnaatggtnatagatgtttnctgtgcgaaaattgttatccgcttcacaantncacacaacntacgacncccgggagcataaaagggaaagccntgggggtgccctaatgantganctaactcacattaattgcggttncgcttncctgccccggctttnccagtccggggaaacctgnnntggccccactgnattaaatgaaatnggncaacncncngggggagaaggcnggtntgcgatattgggcgccntttttcgctttnctnggatcacttgacattatttgnnctntggtcattnngntngcggntagncgggnnttaaatataantnaaggnnnggganaacgggttttcccaanaaatnatggggaaacccaggnaaaaaacnangtnacnnaaaggcncncataagggccacgancccaaaaagggccctatgntggngttttncataaggnttccccccngncgcgncattnaaaaaaattntctcaaatcnngngggg

SEQ ID NO: 3687 - DNA, 927 bp, Homo sapiens
  misc_feature 2, 7, 543, 547, 549, 583, 588, 593, 594, 605, 647, 652, 656,657, 661, 666, 669, 703, 711, 729, 741, 748, 754, 765, 778,781, 797, 804, 824, 828, 836, 847, 849, 850, 854, 867, 874,886, 890, 893, 894, 895, 900, 903, 911, 912, 919: n = A,T,C or G
  misc_feature 920: n = A,T,C or G
gnctatncactactctgactcactatagggcgaattggagctccccgcggtggcggcccgcccgggcaggtacgcggggggacttacaagatggataggacctggtggcagctgtccttgaggaagccagagcctggagagacagatctcatgttatagcagagtacctcggccgctctagaactagtggatcccccgggctgcaggaattcgatatcaagcttatcgataccgtcgacctcgagggggggcccggtacccagcttttgttccctttagtgagggttaattgcgcgcttggcgtaatcatggtcatagctgtttcctgtgtgaaattgttatccgctcacaattccacacaacatacgagccgggagcataaagtgtaaagcctggggtgcctaatgagtgagctaactcacattaattgcgttgcgctcactgcccgctttccagtcgggaaacctgtccgtgccagctgcattaatgaatcggccaacgccgcggggagaggcggtttgcgtattggggcgctcttccgcntttntngcttaactgacttcgcttgctctcggatcgtttngcttntggcnnagcggtatcancttacttcaaagggcggtaataccggttattcacagaattanggggntaannccangaaanaancattttaagcaaaaaggccctgcaaaaaggcctngaaccctnaaaagggcccggttgctngcgttttttcantaggctncgcccnctggccgagcntttcaaaaattcnccnttcaagttaaaaggtngtaaaancctccggaattttaaaaatnccangccttttnctctggaaggnanntttngcccttcctattnctaaccnttggccattccnattnctnnnctccnttnttcctttnngaaaggnngggtctt

SEQ ID NO: 3688 - DNA, 915 bp, Homo sapiens
  misc_feature 8, 486, 508, 516, 575, 602, 607, 608, 644, 659, 665, 697,705, 717, 728, 736, 752, 766, 779, 785, 787, 789, 790, 793,794, 795, 796, 809, 816, 823, 825, 830, 833, 853, 856, 859,882, 891, 900, 909, 911, 914: n = A,T,C or G
ggccttancacgtaatacgactcactatagggcgaattggagctccccgcggtggcggccgggggccattgagactgccatggaagacttgaaaggtcacgtagctgagacttctggagagaccattcaaggcttctggctcttgacaaagatagaccactggaacaatgagaaggagagaattctactggtcacagacaagactctcttgatctgcaaatacgacttcatcatgctgagttgtgtgcagctgcagcggattcctctgagcgctgtctatcgcatctgcctgggcaagttcaccttccctgggatgtccctggacaagagacaaggagaaggccttaggatctactgggggagtccggaggagcagtctcttctgtcccgctggaacccatggtccactgaaagttccttatgctactttcactgagcatcctatgaaatcaccaagtgagaaattccttgaaatttgcaagttgnctggggtcatgtctaagcttgntccactantccagaatgcccccaagaattcaactggatcttggaaaaaggaaagaaaactgatgggngttaactgaacccattttgattgaganctacnncagggcttgatgtcattcatttggaaacccccaccnaaccttggctatttnctttgncccgggggaagtatttgggtttttgagagtcntttttggnacctggcccggnggccgttttanaaataagnggatcccccgggcttncagggaattcaaanttaaacttatttnaacccncnannctnnnnggggggccccggnccccacntttggtncntttangangggtaaattgcccctggggnaanaanggcaaaactgttccttgggaaantgtattccnttccaattnccacaaaananaant

SEQ ID NO: 3689 - DNA, 923 bp, Homo sapiens
  misc_feature 25, 307, 399, 495, 564, 571, 575, 580, 585, 593, 620, 630,650, 661, 662, 665, 670, 676, 685, 704, 710, 717, 720, 728,730, 734, 742, 759, 772, 788, 791, 798, 808, 814, 823, 827,830, 836, 839, 840, 845, 846, 850, 852, 854, 858, 862: n = A,T,C or G
  misc_feature 864, 875, 888, 890, 892, 893, 896, 899, 901, 906, 910, 911,913: n = A,T,C or G
gccgtatcgactcactatagggcgnattggagctccccgcggtggcggccgaggtacctgagccctacctccagagtcaagtcccatgtcctacctcaatgccatgcctataaagggggtagcactgtgcttgacacaccatccaatctcctctctctttgcctgaagctttagattccctttcgattcagggttccttgtttgtggcttggagttggcctctgaggtctcttgtgcttaaagattccatgatttatggcattttatgtaaacattgaggacacactcagctctgcacaggacaganaggaaggaggagatacaggctggcatggtctctaattccaagacggtaacaataatgttagtgggggaggcaacacatccagatcagctgtnctctgcttcttctgtttatcctgaaacacccttaggccatgactgcaactcagccgacaagattcgctcctgcatctggctttgtgaagggatttngaaagggatggcacagcttgggatgaaccttgcacagaggacctggacactgggggcattatcccctgnggatggncacnccacngcaancggcattnactggagcattctactccatattaagncttcagagtnctccaatccttgcatctatnggctggcttcnnganggggnggcttnaacctgaantatcagtgctttccaaggncttcgntttcttnttntggaaaanangganattttttncaccttcaaataaaaancgttggttgggangatttaatggagaatnaanttgcccnggacggccgntattanaaattaatngaantcnccgggnttnnagganntccntngnaaancttnangattcccattncctccaggggggncncnntanccnanataantccnntnaaatagggag

SEQ ID NO: 3690 - DNA, 925 bp, Homo sapiens
  misc_feature 13, 21, 34, 273, 338, 369, 374, 378, 470, 489, 495, 502,503, 509, 535, 549, 567, 574, 575, 578, 579, 587, 592, 593,606, 610, 616, 617, 622, 630, 639, 640, 647, 658, 659, 669,671, 677, 679, 692, 704, 724, 730, 731, 736, 737, 742: n = A,T,C or G
  misc_feature 743, 747, 748, 749, 755, 757, 758, 768, 773, 774, 780, 781,783, 790, 797, 801, 804, 805, 814, 815, 818, 821, 825, 826,827, 828, 832, 847, 863, 866, 868, 871, 875, 877, 894, 899,913, 924: n = A,T,C or G
tttttcctatttnctactatngggcgaattgganctccccgcggtggcggccgggggccattgagactgccatggaagacttgaaaggtcacgtagctgatacttctggagagaccattcaaggcttctggctcttgacaaagatagaccactggaacaatgagaaggagagaattctactggccagacaagactctcttgatctgcaaatacgacttcatcatgctgagttgtgtgcagctgcagcggattcctctgagcgctgtctatcgnatctgcctgggcaagttcaccttccctgggatgtccctggacaagagacaaggagaaggccttangatctactgggggagttcggaggagcagtcnctttntgtnccgctggacccatggtccactgaagttccttatgctactttcactgagcattctatgaaattacaccagtgagaaattccttgaaatttgcnagtttgtctgggttcatgncttaancttggtnncagctntcccgaatgcccaacaagaaattcancttggatctggganggagggaaagaaacttgnggtggtnnacnngaccccanttttnnttggagacccttnccangggctnnatgtnacttcgtngggaacccnnaacaaancttggctattnncctttgcccngnggggantntttggttatttgngaagctttttgnggaaccttggcctcttttanaatttnnggatnnccccnngctnnntagggnanncaaatttaanctttnnaaaccnncnactcaanggggggnaccnggnnccacgtttnngtnccntttnnnnaggnataaaatgccccttngtccaaaaatgggtanacntngtncttngnggaaacgtgttttcgcnccaanttccctatctttanaatctggaatnt

SEQ ID NO: 3691 - DNA, 888 bp, Homo sapiens
  misc_feature 1, 5, 7, 10, 420, 504, 568, 589, 616, 700, 712, 713, 729,754, 774, 787, 789, 807, 812, 816, 819, 829, 833, 834, 848,859, 860, 869, 881, 886: n = A,T,C or G
nagcncntancgcgcgtaatacgactcactatagggcgaattggagctccaccgcggtggcggcccgaggtacaaggctgccctttcagaacaaacccaggacgttcattataaaatagcgaactggccttccagcacttgatgggaatgctgaataatgaaaatgtggtgtgaaatgtctcgaatatttatattttacataacaagagcagggattccaataggctttgaattttagagaaattacaatgagtaattttagttcctgagattttagaatatgatgctagtttgtaagcagggcaaaaggcaaaagtctcccagaagcaactataatgtgtttgaattataataaaagatttagtgtcccaaaaccattttttcaaagccaggaataggccaggtacctgcccgggcggncgctctagaactagtggatcccccgggctgcaggaattcgatatcaagcttatcgatcccgtcgacctcgagggggggcccggncccagcttttggtccctttagtgagggttaattgccgcttggcgtaatcattgggcatagctgnttcctgtgtgaaaatgttatnccctcacaattccacacaacataccancccggagcataaagtgtaaagcctggggtgcctaatgagggggctaactcacattaattgcgtgcgctcctgcccctttccagncgggaaaccctnncggccactgcattaangaatcggccaccccccgggagaggncggttgcgtattgggccctntttcctttcttgntnattactcgttggcttggncgttncggntgnggggagcggnttanntacttaaagggggnaaaccggtttnnccaaaatcnggggaaaccccngaaanat

SEQ ID NO: 3692 - DNA, 861 bp, Homo sapiens
  misc_feature 23, 35, 36, 37, 38, 41, 47, 52, 64, 66, 67, 516, 711, 719,724, 743, 755, 769, 783, 794, 803, 813, 815, 818, 821, 822,829, 833, 834, 835, 839, 840, 841, 842, 853, 856, 860: n = A,T,C or G
tagccgtatcgactactataggncgtataggaccnnnngcngctcgnccgcngtggcggccgangnncgcggggacacattcagaggtgagcccagagcgggtaaagtggactggggagaacttcggaggatgttcatgtccaggagcagccccacgccctgtatggtcggtgtctagagcctcacagcaactaagaccaacccagctctcagaagaaggaatgtcaaaatgtcatgttcaattttacattcagtgcctggaatcttttcttcacaattgaaatgaaatgtgctgaaggaggtgaatccatgcattaatcttcagctcacaaaggaaatactacataagaagcaagaccacagactcaagacggacataattggatttttttttgccatggcctggaaagaaaggtacctgcccgggcggccgctctagaactagtggatcccccgggctgcaggaattcgatatcaagcttatcgataccgtcgacctcgagggggggcccggtncccatcttttgttccctttagtgagggttaattgcgcgcttggcgtaatcatggtcatagcttgtttccttgtgtgaaattgttatccgctcacaattccccacaacatacgaacccgggagcataaagtgttaaagcctggggtgcctaatgagtggagctaactcacattaattgcgttgcgcttaatggccnctttccanccggnaaaccttcgtgccaactgnatttatgaaatnggccaacccccggnaaaagcggtttgcntatttggcctnttccctttnttggtaaatnantgnttnncttggtngtcnnnttcnnnnaacggttttanctnctcnt

SEQ ID NO: 3693 - DNA, 908 bp, Homo sapiens
  misc_feature 1, 310, 375, 493, 496, 526, 550, 562, 577, 597, 605, 633,635, 636, 650, 659, 682, 711, 716, 718, 727, 733, 740, 748,753, 757, 760, 774, 776, 779, 780, 790, 791, 792, 793, 800,807, 808, 809, 811, 812, 814, 818, 819, 821, 824, 827: n = A,T,C or G
  misc_feature 828, 829, 830, 831, 832, 834, 835, 836, 837, 838, 839, 846,847, 851, 855, 856, 863, 867, 869, 873, 874, 875, 883, 887,888, 889, 892, 903, 904, 908: n = A,T,C or G
nggcgcgtatacgactcactatagggcgaattggagctccaccgcggtggcggccgaggtactcactagcctacacctatgcaatgtgatatagaaagatagagtttcattttcattcaaatttatattccttttctcaatagtgatgttgaaattcacataatatgcttatcggagatacgtattcttcatttttgagctgtattgactcagttttagtgacataactcaattttttcaaaaaacaattttaaacacatagtaaattgaatcataaaacctataagtattactagccttttaacattgnttgatttccccatgcttgcttgtgggtggagcagttaaattttcaacatgagcacaaaggatacngttagaaaattctactttaaaaatattattcaaggccgggcacagtggctcatgcctgtaatcccagcactttgggaggtcgaggcaggtggatcacttgaggtcaggagtttgagancancccggccaacatggtgaaaccccatctggnctaaaaatacaaaaattaccaggngtggtggcaggncctggtaatcccagntacttgggtggctgaagcanaaaaattnctttggaccttgggaggagaaagcctgnanngagcccgaatcacncccttgganctccagctttgggcgaagagggngaacttgatctcaaaaaaaaaggaaatanataangnattatatgncatatnaaactgnatataggntatangcgnctncaatggggaagaangnganntttgtaatgnnnntatattnaataacnnnannangttnntncgngcnnnnnngnnnnnncaagggnntttntctnnttgctanaganantctnnnaattgtcnatannnganatacctctttnngcan

SEQ ID NO: 3694 - DNA, 882 bp, Homo sapiens
  misc_feature 443, 535, 543, 569, 578, 610, 642, 665, 671, 685, 690, 699,711, 720, 744, 755, 772, 776, 778, 794, 811, 813, 821, 838,841, 858, 875: n = A,T,C or G
gccgtatcgactactatagggcgaattggagctccccgcggtggcggttttttttcccccttgtaaatttctatacatgtcaaaggctaccaactcatttttatttagagtttgagatttgatttgaaaaatatactgcagccagctatatgaaaaacataagaggatattgttgacttttgatgaagggaagaaagaacaaggtagagctgcctagccatgaagaacgccagggtttttgtaacccctggtgtgctttgcacgcagaaggcacacacttaaattggcatggctcactttttttactgtgcctttgctgagcttgctgcaggctgagtgcactggtagaggagtgcagggctgtgttctggccatccctgcctgctcaggcctctcctgctcctttgtggatcgcccaggtctctgctgcttcctggtgctgnctcctggatcctcttgacatttttcccgtctgtaatttgattgacagttacagacaaggaaggggactgaaattcttaccgtttgtgacttnctaaaacnggaaaggaaatttggtgaatgagaangggaaaacnccttttggctgaaattatttacaggatttagnccccaggtttaatgtacctcgcccaaggactntaaaataacatcctgttgggctnctcagngcccctgccagacngaacncaattgccncagccaggtggngttaatatnggaaaatccccccggcccatgtcncccaaaagttnaccgcttgtccagggtntcantncatatggcaatctgtnccttcacaggaagggantngggcttgncccgggcggggaccttnccnggcggccgtttaaaaanggggtcccccggctganggattct

SEQ ID NO: 3695 - DNA, 919 bp, Homo sapiens
  misc_feature 5, 8, 361, 390, 408, 459, 502, 530, 540, 555, 563, 570, 573,594, 597, 622, 625, 626, 636, 644, 649, 650, 656, 657, 658,676, 682, 699, 702, 708, 713, 716, 724, 726, 729, 737, 739,758, 768, 800, 802, 814, 821, 826, 828, 829, 841: n = A,T,C or G
  misc_feature 857, 872, 877, 879, 882, 883, 891, 892, 895, 897, 898, 899,900, 909, 910, 917: n = A,T,C or G
taagnccntatacgactactatagggcgaattggagctcccccgcggtggcggccgcccgggcaggtccgggcaggtactttgttgggaattaaggatgatgatgcagatctgagtcaggctctttgtctggccatctccgtgtcagagatccttcaagcgaatcagctacaaggggaaggagtccggtctttgtggtggattgccgtcctgcagaacaatataatgctgggcatttatcaactgctttccacttagattcagacctgatgcttcagaatccatctgagtttgcacagtcagtaaaatccttgctggaagcacagaagcagtccattgagtctggctccatagctggtggngaacacctctgtttatgggccagtggcanggaggaagaagacatgtntattaacatggtctggcccactttttacaagaaaaacaaaaaatatgtgangtattggccagtggaaggaattattggcactggaagcaaccancctggccagaatttaatggtgggtgggnccagaaaatnggatttggccatttnggattggntattacnttnggccggttttaaaacttagtnggntccccccggccttcagggaatttcnatnntcaagccttnttcgaaanccggnnaacctnnnaggggggggccccggtancccacntttttgttcccttttanggngggttnaattngcnccttgggngnaantaaagggnanaaaatgttttcctggtggnaaaatgtgtnttcccgttccaaatttccccacaaaaattccnancccgggggcttnaaagttnaaaancnngggggccccctnatggggggcccaaccnccttttttttggttnggcgntnctnncccctttnnaantnnnnaaaaccttnnggccccnct

SEQ ID NO: 3696 - DNA, 875 bp, Homo sapiens
  misc_feature 4, 568, 640, 670, 673, 686, 688, 709, 757, 773, 780, 795,798, 814, 821, 839, 840, 851, 857, 862, 866, 873: n = A,T,C or G
tatncgcttatcgactactatagggcgaattggagctccaccgcggtggcggccgcccgggcaggtaccagaggaggagatggacgatcagagccatgcacctgtttcctgcaccccctgcgcactggttctatggccacaaggagtcttacccagtaaaagagtttgaggtgtatcctgagctgatggaaaaatacctatgtgccgttcccttgtgggttggaccctttacgatgttcttcaatatccatgacccagactatgtcaagattctcctgaaaagacaagatcccaaaagtgctgttagccacaaaatccttgaatcctgggttggtcgaggacttgtgaccctggatggttctaaatggaaaaagcacccgccagattgtgaaacctggcttcaacatcagcattctgaaaatattcatcaccatgatgtctaagagtgttcggatgatgctgaacaaatgggaggaacacattgcccaaaactcacgtctggagctctttcaacatgtctccctgatgaccctggacagcatcatgaagtgtgccttcagccaccagngcagcattcagtttggacaagtaccttcggccgctctagaactagtggatccccccgggctggaggaattcnatttcaagcttatcgatacccgtcgacctnganggggggcccggtncnagctttggtccctttaatgangggtaaattgccccccttggggtaatcatggcatagctggttcctgtnggaaaatggtttcccnttacaanttcccacaacatacnaanccggggagcataaaangttaaancctggggtgcctaatganngagcctacctnaatttnattgngttngcccacncg

SEQ ID NO: 3697 - DNA, 891 bp, Homo sapiens
  misc_feature 631, 642, 663, 711, 712, 715, 717, 747, 756, 781, 783, 789,798, 799, 806, 819, 821, 822, 825, 835, 838, 843, 844, 857,861, 873, 875, 879, 884, 885, 887, 889: n = A,T,C or G
agccgtatcgactactatagggcgaattggagctccaccgcggtggcggccgccgggcaggtacagcaaaacccacctgtgtaaacacacacagcaaagtgatgtaagaagtttccatataaagggctgcagtatggagaggtaatgtgcaggctggtttgcggctgtaggggccaccttgtgcagctctccactgatatggtacctcggccgctctagaactagtggatcccccgggctgcaggaattcgatatcaagcttatcgataccgtcgacctcgagggggggcccggtacccagcttttgttccctttagtgagggttaattgcgcgcttggcgtaatcatggtcatagctgtttcctgtgtgaaattgttatccgctcacaattccacacaacatacgagccgggagcataaagtgtaaagcctggggtgcctaatgagtgagctaactcacattaattgcgttgcgctcactgcccgctttccagtcgggaaacctgtcgtgccactgcattaatgaatcggccaacgcgccggggagaggcggtttgcgtattgggcgctctttccgcttcctcgctcacttgctcgctgcgctcggtcgttcggcttgcggcgagcggtntcagctcactnaaaggcggttaatcggttatncacaaaaataagggataacgcatgaaaagaacattgtgagcaaaaggnncancnaaaggccaggaaccgtaaaaaggccccgtngctggcgtntttccataggctccgcccccttgcnanccttanaaaaatctnncttaaanttaaaggtggcgnannccnccggactttnaantaccnngctttttcccctngaanctttttgggccntntctntttcnncntnct

SEQ ID NO: 3698 - DNA, 884 bp, Homo sapiens
  misc_feature 622, 695, 720, 722, 733, 809, 816, 864: n = A,T,C or G
gcgcgtatacgactcactatagggcgaattggagctccaccgcggtggcggccgaggtacaagttgtctttatgctgcgagataagtcctctcttggtttgagctcccaccttttcagtgaactcttacattttgggggatctgctcttgtaaaggacatcctttctggtgagtattcttttggttaatttttggtttggttatttgtgcatgaattcaatctcattaggaaacaagttaagttgaatagaccaactagtgaattaatccgtcaccaaaatatatgtttttggcatttacctgtttattttgaaactctttgtaagaaatgtaaacctgtaatgataatctctgctttgtaaggatatctccctctctgacacctaaaacactagatgctttcacaaagcaaaaggaagagacctaaatctatctatctgtgtaaactcacccttgaccatttcattttgaaggcttcctatatatgctttttttcatctcaacaaataagtggtgtttaagttctgtgcctcggcccgctctagaactagtgggatcccccgggctgcaggaattcgatatcaagcttatcgataccgtcgacctcgagggggggcccggnacccagcttttgttccctttagtgagggttaattgcgcgcttggcgtaaatcatggtcataactggttcctgngtgaaatggtatccgctcacaattncncacacatacgncccggagcataaagtgtaagcctggggtgcctaatgagtgagctaactcacaataatgcgtgcgctcactggccgntttcaanccgggaaactgcgtccagctgcattaatgaaacgccaacccccggganaggcggtttgcctattggct

SEQ ID NO: 3699 - DNA, 829 bp, Homo sapiens
  misc_feature 414, 419, 439, 455, 458, 463, 465, 470, 476, 477, 479, 485,488, 495, 526, 537, 539, 550, 555, 556, 564, 565, 566, 568,569, 571, 575, 579, 581, 582, 584, 595, 598, 604, 605, 609,611, 613, 617, 620, 621, 625, 631, 635, 641, 644, 645: n = A,T,C or G
  misc_feature 650, 651, 652, 654, 656, 665, 673, 674, 675, 677, 678, 680,681, 683, 684, 687, 691, 692, 693, 694, 695, 696, 698, 699,700, 701, 704, 705, 706, 708, 709, 710, 715, 719, 720, 721,722, 725, 728, 729, 731, 733, 735, 738, 739, 740, 741: n = A,T,C or G
  misc_feature 745, 746, 747, 749, 750, 751, 754, 755, 760, 761, 764, 769,772, 776, 777, 778, 779, 783, 785, 795, 796, 797, 799, 801,802, 803, 804, 805, 806, 808, 810, 811, 812, 813, 817, 823,824, 826: n = A,T,C or G
atcgactactatagggcgaattggagctccccgcggtggcggccgaggtacgcggggacattcagaggtgagcccagagcgggtaaagtggactggggagaacttcggaggatgttcatgtccaggagcagccccacgccctgtatggtcggtgtctagagcctcacagcaactaagaccaacccagctctcagaagaaggaatgtcaaaatgtcatgttcaattttacattcagtgcctggaatcttttcttcacaattgaaatgaaatgtgctgaaggaggtgaatccatgcattaatcttcagctcacaaaggaaatactacataagaagcaagaccacagactcaagacggacataattggattttttttgccatggcctggaaagaaaggtacctgcccgggcggacgnccggncatgtacatgacaaggtgcngctccctagccccttnaanttttnangggtntacatnncnactgtnatnaggggcnattactttagtgggggactgagtgtggcatnactcccaacantnagggttttttnttctnntggctctnnntnngntggnggananngnttttcctcttnganggaatnntggncntnaagncannaaantgtttntttnacaaantcnntttcnnncntnaaattaacntttccaannngnntnnanngcnaatnnnnnncnnnnttnnncnnntcaangggnnnnttnaanntntngnatnnnngggnnntnnnatnnaatannaantttanaanaccnnnnaaangnggggggcccnnnanannnnnntntnnnntttntatggnntnccc

SEQ ID NO: 3700 - DNA, 896 bp, Homo sapiens
  misc_feature 555, 594, 618, 630, 642, 677, 678, 682, 700, 709, 724, 730,743, 750, 761, 762, 773, 774, 785, 797, 799, 819, 820, 821,825, 831, 841, 855, 871, 874, 884, 892, 895: n = A,T,C or G
agcgcgtatcgctcctatagggcgaattggagctccccgcggtggcggcccgaggtacagaacttaaacaccactatttgttgagatgaaaaaaagcatatataggaagccttcaaaatgaaatggtcaagggtgagtttacacagatagatagatttaggtctcttccttttgctttgtgaaagcatctagtgttttaggtgtcagagagggagatatccttacaaagcagagattatcattacaggtttacatttcttacaaagagtttcaaaataaacaggtaaatgccaaaaacatatattttggtgacggattaattcactagttggtctattcaacttaacttgtttcctaatgagattaaattcatgcacaaataaccaaaccaaaaattaaaccaaaagaatactcaccagaaaggatgtcctttacaagagcagatcccccaaaatgtaagagttcactgaaaaggtgggagctcaaaccaagagaggacttatctcgcagcataaagacaacttgtacctcggcccgttctagaactagtggatnccccgggctgcaggaattcgatatcaagcttatcgatcnggcgacctcgagggggggcccggnacccagctttgntcctttagtganggttaattgccccttggcgtaaatcattggtcatnnccgnttcctgggtgaaaatggnaatccctcncaattcccccacaanataccnagccgggagcttnaagtgtnaagccttgggnnccttaatgggnngggctaacttncattaaattgcntnggcctacttgccccttttcnnncggnaaaccngcggcccacntgcattatgaatcngccaccccccgggggnggngggttgggtnttgggccnttna

SEQ ID NO: 3701 - DNA, 879 bp, Homo sapiens
  misc_feature 413, 464, 534, 574, 578, 615, 627, 653, 661, 671, 678, 679,690, 693, 695, 697, 714, 722, 723, 730, 732, 737, 738, 742,744, 745, 750, 754, 755, 756, 757, 758, 761, 762, 767, 768,769, 770, 789, 790, 791, 808, 812, 814, 815, 825, 826: n = A,T,C or G
  misc_feature 832, 838, 839, 851, 852, 853, 857, 859, 860, 861, 863, 869,870, 871, 876: n = A,T,C or G
gccgtatacgactactatagggcgaattggagctccccgcggtggcggccgaggtacgcggggacttcggaggatgttcatgtccaggagcagccccacgccctgtatggtcggtgtctagagcctcacagcaactaagaccaacccagctctcagaagaaggaatgtcaaaatgtcatgttcaattttacattcagtgcctggaatcttttcttcacaattgaaatgaaatgtgctgaaggaggtgaatccatgcattaatcttcagctcacaaaggaaatactacataagaagcaagaccacagactcaagacggacataattggattttttttaccatggcctggaaagaaaggtacctgcccgggcggccgctctagaactagtggatcccccgggctgcaggaattcnatatcaaagcttatcgataccgtcgacctcgagggggggcccggtacccanctttttgttcccttttagtgagggttaattgcgcccttggcgtaatcatgggcatagctggttcctgggngaaaatggtaatccgctcacaatttcacacaacataccancccnggagcataaagtgtaaaacctggggggcctaatgagngagctaaccccnaataattgggtgcccttacttgcccntttcaagngggaaacctnccggccnncttctttaaanaantngncaaccccccgggaaggnggttttgnntttgggncntttcnntttntnntaaanaaannnnngcnnggggnnnnggggggggggggggggttnnnttttttaaagggggganatcngnntttcccaaanngggggnaacccnnaaaaaaaattgnnnaaangnnncnaagggnnnaaccnaat

SEQ ID NO: 3702 - DNA, 856 bp, Homo sapiens
  misc_feature 1, 4, 5, 654, 667, 692, 723, 725, 732, 771, 775, 838, 849,856: n = A,T,C or G
ntgnngcgtatcgactactatagggcgaattggagctcccccgcggtggcggccgaggtacgggaggtgatatgagcaaatttaagtatgcctcttactcatgtttccctgtcctccaattttcttcctcagaggcaacctctctaacacatttttgtgtttaaatatattttttgcatgaacaaattacatgtgtatttgtatatatgcatatatattttctgacttttttccttctttcaaagaattattagtgatattctaagctccagtaacacacagggaaaggtggcttgctaatagtttttttgtgtaattttttgagactggggcttgctctgttgcccaggctggagtgcagtggcacgatcacaagctcactgcagcctctatcttacgggctacagtcaagcctcccaccttggcctcccgagaagctgggactacaggcatgtacctgccgggcggccgctctagaactagtggatcccccgggctgcaggaattcgatatcaagcttatcgataccgtcgacctcgagggggggcccggtacccagcttttgttccctttaagtgaggggttaattgcgcgcttggccgtaatcatggtcatagctggttcctgtgtgaaattggtatccgctcacaattncacacaacatacnaaccgggagcataaaagtgtaaagnccggggggcctaatgagtgagctactcacantnattgcgntgcgctcactggccgcttttcaagccggaaacctgtcgngccnctgcattaatgaatcggccacccccgggagagcggttgggtttggggctttttcgtttcttgnttactggactngtgggcn

SEQ ID NO: 3703 - DNA, 852 bp, Homo sapiens
  misc_feature 641, 651, 684, 687, 690, 734, 747, 762, 768, 780, 781, 793,799, 802, 805, 812, 816, 817, 824, 841: n = A,T,C or G
gccgcgtatcgactactatagggcgaattggagctccaccgcggtggcggccgcccgggcaggtactgtgtttctccacctgacctagaaaaccttgattcctgaaaagcctcaccctaactttgccacaacctggcgatccatccatactgttcacagccctcaggagagactggataattataacacaccttgctttcttccatcatttcccttttccccaagggaacatagctgcactgagaacaccaatctctcaaccacaccctatcccaacccctgtggaaaatatagtagctacctcaccaatgggagttgagggaatgaagactcatgtcttctgggatctgggtcaagcccaggtcagccattcttcagacttgcacagtacctcggccgctctagaactagtggatcccccgggctgcaggaattcgatatcaagcttatcgataccgtcgacctcgagggggggcccggtacccagcttttgttccctttagtgagggttaattgcgcgcttggcgtaatcatggtcatagctgtttcctgtgtgaaattggtatccgctcacaattccacacaacatacgaaccgggagcataaagtgtaaaagcctggggtgcctaatgagtgagctnactcacattnattgcgttgcgcttactggccgcttttcagtcnggnaanctgtcgtgccaactggattaatgaatcggccaacccccgggaanaggcggttgctantgggcgctttttcgnttcttngttaattaactnnttggcctcggcnttcggntgnggnaagcggnttannttacctnaaaggggggaaaccggntttcccaaaat

SEQ ID NO: 3704 - DNA, 709 bp, Homo sapiens
  misc_feature 704: n = A,T,C or G
cgtaatacgactactatagggcgaattggagctccaccgcggtggcggccgaggtacatcccctggccataggaagcacctataatattagtagttatcattactatttttttgcctgtgtgcgaaagtcattaggaaaatcatgcctatctacggcccattctgggtcttcagaaatgttgacacagacatccacttttgccgttgtgtgctaatggcaggagcttgcctggcttcctgctgtgccacatgctgctcttgaggaatgatgataacaggtacctgcccgggcggccgctctagaactagtggatcccccgggctgcaggaattcgatatcaagcttatcgataccgtcgacctcgagggggggcccggtacccagcttttgttccctttagtgagggttaattgcgcgcttggcgtaatcatggtcatagctgtttcctgtgtgaaattgttatccgctcacaattccacacaacatacgagccgggagcataaagtgtaaagcctggggtgcctaatgaagtgagctaactcacattaattgcgttgcgctcactgcccgctttccagtcggggaaacctgtcgtgccagctgcattaatgaatcggccaacgcgcggggaagaggcggtttgcgtattgggcgctcttccgcttcctcgcttcaattgactcgcttgcgctcgggccgttcngctgg

SEQ ID NO: 3705 - DNA, 872 bp, Homo sapiens
  misc_feature 2, 4, 5, 8, 9, 12, 15, 18, 506, 625, 686, 703, 713, 721,727, 740, 742, 746, 770, 777, 784, 789, 791, 803, 808, 820,828, 829, 833, 838, 842, 843, 847, 854, 857, 860, 861, 867,869: n = A,T,C or G
angnncgnntcnacntantacgactactatagggcgaattggagctccaccgcggtggcggcccgaggtacgcgggggagtttctaagcccccgcctgcggtctgaggcaccggctgaaccatgtcggagatcctgtgccagtggctcaacaaggagttgaaggtgtcccggaccgtgagtcccaagtcatttgcaaaggcattttccagtggctatctacttggagaagttctacacaagtttgaacttcaggatgatttttcagaatttttggacagcagggtttcaagtgccaaacttaataatttttctcgcttggagccaacacttcaccttctgggtgtgcagtttgatcagaatgtggcccatggcatcatcacagaaaagcctggggtggcaacaaagctgttatatcaattgtacctgcccgggcggccgctctagaactagtggatcccccgggctgcaggaattcgatatcaagcttatcgataccgtcgacctngagggggggcccggtacccacttttgttccctttagtgagggttaattgcgcgcttggcgtaatcatggtcatagctgtttcctgtgtgaaattgttatccgctcacaatttcacacancataccagccgggagcataaaagtgtaaaagcctggggtgcctaatgaatgaacctaactnacattaattgggtttgngcctcactgnccgctttncagtcnggaaaacctgtcntnccanctgcattaatgaatcggcccaacncccgggnaaaagcngtttncntatttgggcctntttcnctttcttggttnactgactnntttngcttnggtnngttngggttgnggngannggtatnanttt

SEQ ID NO: 3706 - DNA, 863 bp, Homo sapiens
  misc_feature 2, 588, 638, 643, 679, 690, 707, 722, 728, 736, 752, 767,780, 799, 821, 832, 850, 859: n = A,T,C or G
gnccgtatcgactactatagggcgaattggagctcccccgcggtggcggtaatcaggttgtgccagaggaggagatggacgatcagagccatgcacctgtttcctgcaccccctgcgcactggttctatggccacaaggagtcttacccagtaaaagagtttgaggtgtatcctgagctgatggaaaatacctatgtgccgttcccttgtgggttggaccctttacgatgttcttcaatatccatgacccagactatgtcaagattctcctgaaaagacaaggtaaaaaccaagaggggctcacagtacctcggccgctctagaactagtggatcccccgggctgcaggaattcgatatcaagcttatcgataccgtcgacctcgagggggggcccggtacccagcttttgttccctttagtgagggttaattgcgcgcttggcgtaatcatggtcatagctgtttcctgtgtgaaattgttatcccgctcacaattccacacaacatacgagccgggagcataaagtgtaaagcctggggtgcctaatgagtgagctaactcacattaattgcgttgcgctcactgnccgctttccagtcgggaaacctgtcgtgccagctgcattaatgaatcggnccacnccccgggagaggcggtttgcgtattggggccttttncgctttcttgnttaactgactcgcttgngctcggtcgttcggntgcggnaaccggtntaagcttacttcaaangcggtaatacggttnttcacagaatcanggggttaacgcagggaaanaacatttgagccaaaaggcccncaaaaggccangaaccgtaaaagggcccntttcttgcntttt

SEQ ID NO: 3707 - DNA, 848 bp, Homo sapiens
  misc_feature 750, 767, 789, 801, 808, 831, 842, 843: n = A,T,C or G
cgactactatagggcgaattggagctccaccgcggtggcggccgaggtacgggaggtgatatgagcaaatttaagtatgcctcttactcatgtttccctgtcctccaattttcttcctcagaggcaacctctctaacacatttttgtgtttaaatatattttttgcatgaacaaatatacatgtgtatttgtatatatgcatatatattttctgacttttttccttctttcaaagaattattagtgatattctaagctccagtaacacacagggaaaggtggcttgctaatagtttttttgtgtaattttttgagactggggcttgctctgttgcccaggctggagtgcagtggcacgatcacagctcactgcagcctctatcttacgggctacagtcagcctcccaccttggcctcccgagaagctgggactacaggcatgtacctgccgggcggccgctctagaactagtggatcccccgggctgcaggaattcgatatcaagcttatcgataccgtcgacctcgagggggggcccggtacccagcttttgttccctttagtgagggttaattgcgcgcttggcgtaatcatggtcatagctgtttcctgtgtgaaattggtatccgctcacaattccacacaacatacgagccgggagcataaagtgtaaagcctggggtgcctaatgaggtgagctactcacattaattgcgttgcgctcactggccgcttttcaagccgggaaanctgtcggccagctgcantaatggaatcggccaccccccngggagaggcggnttgggtnttgggcccttttccgtttcttgnttaatggactnngtggg

SEQ ID NO: 3708 - DNA, 863 bp, Homo sapiens
  misc_feature 1, 2, 3, 4, 5, 465, 533, 610, 687, 701, 703, 707, 709, 713,732, 749, 765, 771, 776, 778, 786, 789, 790, 798, 805, 806,810, 811, 815, 829, 837, 855, 862: n = A,T,C or G
nnnnncactactcgactcctatagggcgaattggagctccaccgcggtggcggcccgaggtacacactagctgataagacactgttgcccataatgtctatttattggatcagcaatttataagtcccacattctcatgccacatagctctacacagctgcaaaaatataccatagcttgcaggtgatcattggtttgataaaagatattgagtcgctcatcttgtgaaagtgatctttgatataagaggagcatcagcggggaagctcacatgtcccgtggctcacacaccagaaggtatttgtgtcttgtcattgtctgtctggcagtccatggcaatggctttttcagagaggcctgttttgtgggtaactgtgtgtacctgcccgggcggccgctctagaactagtggatcccccgggctgcaggaattcgatatcaagcttatcgataccgtcgacctcnagggggggcccggtcccagcttttggtccctttagtgagggttaattgccgcttggcgtaatcatggncatagctggtttctgtgtgaaaatggtatccgctcacaaattcacacaacatacgaacccgggagcataaaagggtnaaagcctgggggggcctaatgagggggctaacctcacaattattgcggttgcgcctcactggccccttttcaagtcngggaaaacctgcgngnccantngganttaatggaatcggcccacncccgggggagaggcggnttccgatttgggcccntttccnttctngnttaattanttnnttggcctnggcgttnnggtnngggnagcgggtttaactnactccaanggggggataccggtttcncaaaaant

SEQ ID NO: 3709 - DNA, 946 bp, Homo sapiens
  misc_feature 1, 7, 10, 11, 12, 15, 21, 32, 34, 36, 39, 41, 45, 46, 48,49, 53, 55, 58, 59, 61, 62, 63, 64, 66, 68, 72, 73, 74,79, 81, 87, 90, 92, 94, 99, 100, 101, 102, 103, 106, 107,108, 109, 110, 111, 114, 115, 116, 118, 120, 123, 130, 138: n = A,T,C or G
  misc_feature 147, 263, 265, 282, 293, 309, 467, 491, 534, 558, 573, 577,608, 626, 649, 653, 660, 665, 671, 674, 693, 705, 706, 709,723, 728, 734, 748, 752, 761, 768, 771, 773, 789, 793, 804,832, 834, 838, 853, 876, 881, 885, 886, 892, 904, 913: n = A,T,C or G
  misc_feature 915, 924, 926, 940, 941, 946: n = A,T,C or G
natgatngannngtntgtganttttgtttgcntntnttnantatnntnnttcntnttnntnnnngngnatannnataangnggttantanantntcctnnnnncannnnnnagnnngngnggngccgttnacgactcnctatacggntcactatagggcgaattggagctccaccgcggtggcggccgcccgggcaggtacctgctcaagatgcctggctgagagtgtgtgggagtctggttggagcccagattttatatatntntatattttatttagctntgaccaaaaantgaacataaaaactgngtcatggtaattaaaactaacagataatttatctaaaataaatcttgatctgactaacattggtcaaacatgacgtgactttttactccttagatgcaccttgtgacataaatagaatccttcccttgcattttataaatgggaaaccagaagcaccnggagatgaatttgaggggaacctnatcaagtggggaggacctaaaacttgcagcccagtcccaacantgccaggtcgaaacctagttttcncaatgaaggactgcntttncttgtcccttcgtctactcttttttcctacnagccttcacaccttccanttaattgacctattttactttgnaganggcattngcaanatttanatnggtttaaggaaacatgggnctctggtacccnntgngcgcggcttcttangaacntaagtngggattcccccccngggnttgcagggnaatttcnaantnttcaaagctttattcngatnacccgtccganccttaggaagggggggggggcccccggngnaccnccaaactttttatgnttcccccttatagttggaggggnttaanttannccgccncttttggcagtnaactcaatngngtcactaancntggtttttcctggnnggtgn

SEQ ID NO: 3710 - DNA, 896 bp, Homo sapiens
  misc_feature 2, 570, 597, 669, 676, 691, 692, 707, 734, 752, 772, 826,839, 846, 849, 850, 870, 875, 884, 888, 895: n = A,T,C or G
gnccgtaatacgactcactataggggcgaattggagctccaccgcggtggcggccgaggtacattaccctacgctccaagcgcagcaagccggccaatatccgtggcaccgtgaagcccaagcgcaggaaaaagcgtgcagtggcatcggctgccccagggcaggaggctttggtcggaccatcccttaccgcaggaagcggcaagggaagctgatgctgtagcacctgggtacctgcccgggcggccgctctagaactagtggatcccccgggctgcaggaattcgatatcaagcttatcgataccgtcgacctcgagggggggcccggtacccagcttttgttccctttagtgagggttaattgcgcgcttggcgtaatcatggtcatagctgtttcctgtgtgaaattgttatccgctcacaattccacacaacatacgagccgggagcataaagtgtaaagcctggggtgcctaatgagtgagctaactcacattaattgcgttgcgctcactgcccgctttccaagtcgggaaacctgtcgtgccaagcttgcattaatgaaatnggcaacgccgccggggaagaggcgggnttgcgtattggggccgcttttttccgctttccttgctcacttgaattcgcttgcgcctcggtcgttccggcntgcggcnaagccggttattaannttcacttaaaaggcnggtaataccggttattcaacagaaatnagggggataaccgcaagnaaagaacattttgaccaaanggccaacaaaaaggccaggaaccgtaaaaaaggccgcgtttgcttgcctttttncataaggcttccncccctgnacnngcatttacaaaaattgaccnttaanttaaaaggnggcnaaacccnt

SEQ ID NO: 3711 - DNA, 723 bp, Homo sapiens
  misc_feature 91, 184, 200, 245, 509, 597, 601, 665, 672, 679, 682, 696,698, 700, 709: n = A,T,C or G
taatacgactcactatagggcgaattggagctccccgcggtggcggcccgcccgggcaggtactttttttttttttttttttttttttggncgcctccattgttttattattttaagcagcagagagatctgcctactgtagtatgttcgttacagcttatatggtagaggggccacagcccanatcaggcaaacccaanatgaggcgatgttgtaaaaatactctgaggaatcccacagaaatntaagagcaggaactacagcacagctgggcttcctggtacctcggccgctctagaactagtggatcccccgggctgcaggaattcgatatcaagcttatcgataccgtcgacctcgagggggggcccggtacccagcttttgttccctttagtgagggttaattgcgcgcttggcgtaatcatggtcataagctgtttcctgtgtgaaattgttatccgctcacaattccacacaacatacgagccgggagcataaagtgtaaancctggggtgcctaatgagtgagctaactcacattaattgcgttgcgcttcactgcccgctttccaatcgggaaacctgtcgtgcccancttnatttaaatgaaatcggcccaaccccccgggggagaaggcgggttttgcggtatttggggcgctntttccgnttttctngcntcaattgaacttgntngncttcgggcngttcgggttgcggg

SEQ ID NO: 3712 - DNA, 893 bp, Homo sapiens
  misc_feature 549, 589, 659, 663, 667, 690, 723, 741, 743, 783, 814, 825,834, 858, 859, 861, 877, 878, 887, 891: n = A,T,C or G
gggcgtatacgactcactatagggcgaattggagctccccgcggtggcggccgcccgggcaggtacaatagatggcaggttctaaatcaacatcagagcaatgttatggtccaggaatgtgacatgggttgaatatcttctaactggacttagaaaaccagagatctataaacatgtttgtgaattccaactttcctccaccctgtttctgctaccagggcacattccacgttgatctcttgtatgccgatcaacatgattttattgctttttgtcgcacattttaaacactgattttcacagagttacagtccccgtggcctccccacaccacaaccaaacaaatgcgcttttactgcctcaaggaagatgtaagtaatttacttgtaaaagtgagctgagctctcaggagaaattcagcctcatgcttcgttctgatggatttcagttctcaatctgtccgggacaggtcaattaaagattaaagttggaattgaaagtgaaaccttccaaggctcgtttaggtaggggccagacaccctccatcangcccaaacaaggggatgggggataaagggatttggacctngctcttctcctgggggattgccagagaagactttttctagaaataaatagcctccactcggggtaatttntcangggncatactttaaccaaaaagatgcnatgaaaatgcacccaagcctttttggttaaaanttcttaatttggaacagncnttttttaaagtgggaaccccttgtaaaaatggaaagtggngaataatgtggggtgtgcccagccattatangggccatgccntggcataangggacctcggccgttctaaaaatnngngggatcccccgggctnnaaggaaatntaanat

SEQ ID NO: 3713 - DNA, 881 bp, Homo sapiens
  misc_feature 408, 430, 443, 447, 454, 467, 477, 484, 485, 486, 516, 527,543, 553, 565, 570, 571, 573, 575, 589, 597, 606, 613, 617,621, 631, 642, 650, 651, 653, 667, 668, 669, 682, 690, 703,706, 710, 712, 720, 721, 723, 724, 731, 736, 737, 742: n = A,T,C or G
  misc_feature 743, 744, 750, 755, 757, 764, 766, 770, 775, 783, 784, 793,799, 800, 801, 810, 813, 818, 822, 825, 830, 832, 836, 839,844, 846, 848, 850, 858, 859, 860, 862, 867, 869, 881: n = A,T,C or G
actactatagggcgaattggagctccaccgcggtggcggcccgaggtacctttctttccaggccatggcaaaaaaaatccaattatgtccgtcttgagtctgtggtcttgcttcttatgtagtatttcctttgtgagctgaagattaatgcatggattcacctccttcagcacatttcatttcaattgtgaagaaaagattccaggcactgaatgtaaaattgaacatgacattttgacattccttcttctgagagctgggttggtcttagttgctgtgaggctctagacaccgaccatcagggcgtggggctgctcctgggcatgaacatcctccgaagttctccccagtccactttacccgctctgggctcacctctgaatgtccccgcgtacctgcccaggcggncggttctagaactagtgggatncccctggctgcangaantccgatnatcaagcttattngataccggcngaccctnnnaggggggggccccggtaccccaactttttnttccctttagntgaggggttaattgcncgcttggccntaaacattggtnaatanntntnttcctggggtgaanttgatatncgtttaaantttccanacancatnactagccggnaggcttaaagngttaaagnntngggggggcctaaannnggggaacttactntcatttantggcgttggctcnatntccngntttttatnntnngaaaacntggtnnagccnnnctgganttatnanattggtnanattnctggntagggggnngttttgggnttatannnttttatgcnttntctangttnatngaatntntatntgnttatntnancnttggtaannnancgccngnaataaatctcan

SEQ ID NO: 3714 - DNA, 706 bp, Homo sapiens
  misc_feature 616, 617, 637, 651, 693: n = A,T,C or G
tactatagggcgaattggagctccaccgcggtggcggccgacgctagatcaactgagatgcaaaacccatgttcacatcatgagtgagtcttctaactcggacaatgcaatcaacaaattctaagaccaaattccggtggcactggctccaaaaaaaaaaaaaaaaaagtcctcggccgctctagaactagtggatcccccgggctgcaggaattcgatatcaagcttatcgataccgtcgacctcgagggggggcccggtacccagcttttgttccctttagtgagggttaattgcgcgcttggcgtaatcatggtcatagctgtttcctgtgtgaaattgttatccgctcacaattccacacaacatacgagccgggagcataaagtgtaaagcctggggtgcctaatgagtgagctaactcacattaattgcgttgcgctcactgcccgctttccagtcgggaaacctgtcgtgccagctgcattaatgaatcggccaacgcgcggggagaggccggtttgcgtattgggcgctcttccgcttctcgctcactggactcctgcgctcggtccgttcggctgcggcgagcggtatcagcttactcaaaggcggnnatacggttatccacagaatnaggggataacgcangaaagaaacatgtgaagcaaaagggccagcaaaaggcccagnaacccgttaaaaa

SEQ ID NO: 3715 - DNA, 865 bp, Homo sapiens
  misc_feature 538, 570, 598, 610, 616, 625, 629, 650, 672, 678, 706, 740,744, 745, 746, 770, 783, 785, 787, 797, 799, 805, 820, 824,827, 828, 829, 843, 844, 849, 863: n = A,T,C or G
gactcactatagggcgaattggagctccccgcggtggcggcccgaggtacagaaactctgccagccagccattttaatgttgatttctttacttatatttaaacttctaaataataataactaccattactgggtgcttcatttatgttggacactctgctaggtgttttgtatggtatttcatttcatctccctgttgaaagctatagattaggcagagaagctcagagaggtaaagtgaatttctgagaacacaaacttctaaatggaattgggatttgtgcttaattttaatctgtctgactttcacagtcatcttcagtatgaacagaagaaaatccctgaacacctttgaaatttaaagcaaattaaagcaaatactatgccattagagtatatacatatgaatatgattcactccctgtgaactctgctgtattctcctacctctaatgtgcctcgcctctgcttcattgggaagtaaaaaaccattttactacctgggaattgtgaagctatctggccttttaaaaatatnacacctcttctgagggcttttctgatgcctgnggatcaaaatgatgggggagaagaatcntctaagaaaatntatttngggggttancggnatgttggcattgatcattctnggctttatttaattaaaaggcnaaaccnttttacacaattaattgcttttttgggntaaaaacctttcctttgctaacttaattaattcngggnnngggattaattaaagggccctaccngctggttaaatantngnacctgtatgntnttaaangctggtaaaattaanacanttnnnatgaaaaggggaannttttngatacaaaattttntt

SEQ ID NO: 3716 - DNA, 883 bp, Homo sapiens
  misc_feature 2, 599, 662, 752, 760, 769, 784, 803, 821, 855, 859, 866,880, 882: n = A,T,C or G
gncgctatacgactactatagggcgaattggagctccaccgcggtggcccggcccgcccgggcaggtactgatagctgggcagtctactgagacttaaccttgtggttaactacttggaaaatacagaattggctagtgagccacagacccatttgaggccaagccatatggcaagacctttgggaaataggtcatcaaaaagaggtaactatttatcatgtgtcaggccatatgcctttggccacccctagtaatgatgaggcagatgccttggctaaggtcagatggtcagagtcagcaccaacacaagatgtgaccttgtggctacaccggaaactgggacatgcagggggtaaactgatgcaacaattcaataagtgttggggtctgtcccttccaagcaagacatttgtgaggcttgtcagaaatgcctggcatgtgttcagacatatcctaaaaagaggcagctgcccggtgttatacaacaagtaacaatagggtgagtgcccttgaccaggtgggaaagtagactacatcgggccgcttgccaaagtcgcgagggtataccgcatgccactaacggcttgtagacattggncacaggcctgttgttcacctaccccttgcaggggtgggccaacccaacagaacaccattccangcccctgcaacaacttatgttccctggtatgggtgtcctctggccatttgagaagtgattagggggaaccacattttacttggacaacangttccttnggcccgccnggccaggtacacctnttttgtctgggccttcggncagggtgcccagggccancattgacccaagaccaagggcgcaaatcacttgntttncattggngggcattgcttctntnt

SEQ ID NO: 3717 - DNA, 881 bp, Homo sapiens
  misc_feature 569, 574, 581, 611, 614, 615, 622, 629, 631, 653, 670, 681,689, 695, 700, 704, 710, 723, 725, 734, 744, 747, 756, 762,776, 782, 783, 796, 802, 806, 807, 812, 823, 824, 826, 829,832, 835, 841, 850, 854, 859, 872, 881: n = A,T,C or G
gactactatagggcgaattggagctccaccgcggtggcggccgcccgggcaggtaccatatcaagtggagagctgcagcaaggtggcccctacagcccgcaaaccagcctgcacattacctctccatactgcagccctttatatggaaacttcttacatcactttgctgtgtgtgtttaccaggtgggttttgctgtacctcggccgctctagaactagtggatcccccgggctgcaggaattcgatatcaagcttatcgataccgtcgacctcgagggggggcccggtacccaagcttttgttccctttagtgagggttaattgcgcgcttggcgtaatcatggtcataagctgtttcctgtgtgaaattgttatcccgcttacaattccacacaacataccaagcccgggagcataaagtgtaaaacctggggtgcctaatgagtgagctaactcacattaattgcgttgcgctcactggccgctttccagtccgggaaaacctgttgtgccaagcttgcatttaattgaatcgggccaacgccccgggggagagggcggttttgcntattngggcgcntctttcgggtttcttgcttaattgacttanttnngccttgntcggtcngnctgcgggggaagcggtattcancttactcaaaggctgtnaatacgggttnttccaaanaatcanggggnttancgccangaaagaacatgtngncataaaggncccgcaaaanggncaggaaccntaaaanggcccgtttttgcntatttnnataaggttcgacnccctgnaaanntttanaaaaatcgggnnanatntcngangtggcnaaaccctangggnttttnaatttaccgggcnttttccccn

SEQ ID NO: 3718 - DNA, 884 bp, Homo sapiens
  misc_feature 1, 140, 161, 162, 163, 338, 344, 349, 362, 379, 389, 394,400, 406, 408, 411, 414, 418, 429, 446, 448, 449, 451, 453,454, 457, 458, 462, 463, 486, 492, 493, 497, 498, 499, 505,506, 508, 517, 523, 525, 528, 529, 532, 533, 534, 535: n = A,T,C or G
  misc_feature 537, 548, 551, 556, 563, 564, 567, 572, 583, 586, 587, 588,589, 596, 605, 606, 607, 608, 609, 611, 618, 619, 621, 623,627, 631, 637, 638, 643, 645, 646, 648, 652, 655, 656, 659,666, 668, 669, 670, 671, 674, 677, 679, 682, 684, 692: n = A,T,C or G
  misc_feature 694, 697, 700, 701, 704, 705, 707, 708, 710, 714, 716, 722,724, 725, 726, 728, 729, 731, 732, 734, 735, 741, 742, 743,744, 746, 748, 751, 753, 756, 757, 758, 760, 761, 762, 763,765, 769, 771, 777, 784, 786, 790, 791, 792, 793, 794: n = A,T,C or G
  misc_feature 795, 801, 807, 808, 809, 810, 811, 812, 813, 820, 821, 823,824, 825, 826, 827, 829, 833, 834, 836, 838, 839, 840, 842,843, 844, 846, 848, 850, 852, 858, 859, 861, 862, 863, 864,868, 870, 872, 873, 879: n = A,T,C or G
ngcttatacgactcactatagggcgaattggagctccccgcggtggcggcccgaggtacatgtgaggaccgtccaggatagttttgaaatgagaaatgagagcagcatttccttggtgtcgtgaaaatatattatacatntattaaatattgaagaagtannngctgtcttggtggctcacgcctgtaatcccagcactttgggaagctgaggctggtggatcacctgaggtcaggagttcgagaccagcctgccaacatagtgaaaccccatctctactaaaaatacaaaattagccgggtgtggtgggtgcatgcctgtaatcccaagctctcggnaggctnaggcnggagaaccgcttnaacccaggaggcatagnttgcagaganccaanaccgcnccattncnctncangctnggcagaaagancaaactctggtctccangnntnannaanntgtnnggtatccctgtgcctgcccggancggccnnttcnnnatcatnngnactcccccngcttgnanganntcnnnnancaacctttttnatnccctntctaccnnganggggngggccccggtnccnnnngatttgntaacctttnnnnngngggttanntncnccanttgnttttannctagntnnangccnaannccngttaccngnnnncgnatnantgntnaaccctgntnagnctnnagnngnngnccancncacttntnnncnncnngnnccttcnnnntntnctnanctnnntnnnntncttncncctacntaacccntnatannnnnnaaatcnccttannnnnnnctttatnntnnnnncnttcnntnannntnnntncntntntccatnncnnnntttntntnnataaanagcct

SEQ ID NO: 3719 - DNA, 856 bp, Homo sapiens
  misc_feature 6, 11, 13, 28, 34, 154, 157, 162, 163, 164, 171, 173, 420,428, 435, 467, 568, 595, 628, 670, 679, 692, 693, 695, 697,704, 716, 735, 737, 740, 742, 766, 771, 778, 779, 781, 782,783, 789, 791, 794, 799, 800, 803, 809, 810, 817, 822: n = A,T,C or G
  misc_feature 827, 830, 833, 852: n = A,T,C or G
ggctancactnanctactccttagggcnaattgnagctccccgcggtggcggccgaggtacacacagttaaccacaaaacaggcctctctgaaaaagccattgccatggactgccagacagacaatgacaagacacaaataccttctggtgtgnganccacnnnacatgtnancttcccgctgatgctcctcttatatcaaagatcactttcacaagatgagccgactcaatatcttttatcaaaccaatgatcacctgcaagctatggtatatttttgcagctgtgtagagctatgtggcatgagaatgtgggacttataaattgctgatccaataaatagacattatgggcaacagtgtcttatcagctagtgtgtacctgcccgggccggccgctctagaactaagtggatcccccnggctgcangaattcnatatcaagcttatcgatacccgcgacctcganggggggccggtcccaacttttggtccctttaatgaggggttaattgcccccttggccgtaatcatgggcatagctgtttcctgtgggaaaatggtatccgntcacaatttcacacaacataccaaccnggagcataaaagtgtaaagcccggggtggcctnattgagtgactacttacattaattgcgtgcgcttactggccnttttcaatnggggaaaccttcnngncnacttcantaatgaatcggnccaccccccgggaaaggcngnttncntattgggccctttttccctttctngttanttaattnntnnnctcggncnttnggttnnggnaaccgnnttaactnacttnaaggnggnaantccggttttcccaaaatangggg

SEQ ID NO: 3720 - DNA, 870 bp, Homo sapiens
  misc_feature 4, 148, 153, 154, 167, 168, 169, 171, 174, 372, 425, 581,644, 650, 652, 654, 677, 687, 710, 714, 723, 727, 730, 739,740, 744, 757, 758, 766, 769, 772, 782, 783, 785, 790, 793,796, 812, 817, 820, 822, 824, 826, 833, 834, 846, 847: n = A,T,C or G
  misc_feature 853, 855, 860, 861, 865, 866, 867, 868, 870: n = A,T,C or G
ggcnatcactactctactcctatagggcgaattggagctccccgcggtggcggccgaggtacatgtgcacaacgtgcaggtttgttacatatgtatacatgtgccatgttggtgtgctattttttgactactggaaagggatgtgttngtaannaacatcttttttnnnancangttttccatgattgctaagtattgtctcctcccttgagagtttcagtggtgtgtttgctacattacttcagtcagtatttgcagcaaataacaggaataagctgagagagagagtcaccttcatctcagggttattaataaaaacatgaaaattgaccttatttgggatgtttttacttcagctgaaggtgaagttgnaagatactgcaaagaatacacatcttaagaaatcatgttagaagcaagtagcntttaataagccatccactataaaccccaaaagaaaactgatctttctggggaaaaatcaaagaatggcctcaaaggacttcaacttcctgaacaaaatgtatgtgctaattttcgcgatcttcttcctatattcatgcctgacaagattgccattngtattctattgacagaaaaatgatgatttttgaaagcttttctttcccataatttccttttgntgatangngnttgtttcccaatcattagcaacntgagaccctngtgagtgggggaggccataatancttncccgggccngccnttntaaaaaccnngggnaccccccggcttnnaggaattnganctnaaagctatcnnanccccncgnccncgagggggggcccggncccanctntngntnccttaanngagggatattgnncccttngncatanncagnnnncn

SEQ ID NO: 3721 - DNA, 847 bp, Homo sapiens
  misc_feature 358, 457, 472, 541, 594, 598, 603, 607, 627, 630, 633, 635,641, 659, 661, 662, 669, 672, 679, 689, 692, 693, 696, 709,713, 716, 721, 722, 723, 724, 725, 726, 730, 731, 734, 735,736, 739, 746, 757, 761, 764, 770, 772, 773, 774, 778: n = A,T,C or G
  misc_feature 780, 781, 782, 783, 784, 785, 788, 789, 790, 793, 794, 795,796, 797, 798, 799, 800, 801, 803, 804, 805, 806, 807, 808,809, 810, 811, 812, 813, 814, 815, 816, 817, 818, 819, 820,821, 822, 823, 824, 825, 826, 827, 828, 829, 830, 831: n = A,T,C or G
  misc_feature 832, 833, 834, 835, 836, 838, 839, 840, 841, 843, 844, 847: n = A,T,C or G
ggctatcactactatagggcgaattggagctccccgcggtggcggccgaggtactaacatcaataagtcgagaaaattatattaactgaaagaaaacaaaataatagagaattttattaaacgtatttctaatgtttctcttcatgtttggagaaaagctgccacataattaaaacaattcttccctgtaaaactgattgtcttccaatctcaggaggtttacattaacaggaatatagaataagaaacaggcctatggccgggctccgtggctcacgcctgtaatcccaacactttgggatgccgaggcggacggatcacgaggtcaggaaatccagaccatcctggctaacacggnaaaacctagtctctactaaaaatacaaaaaaaaaaagaaagaaagaaagaaaaaaagtcctgcccgggcggcccgctctagaactaagtggatcccccnggctgcaggaattcnatatcaaagcttatccgatcccgcgacctcgagggggggcccggtcccacttttggtccctttagtgangggttaattgcccccttggcgtaatcatggcatagctggttcctgtgtgaaantgtnatccnctcncaattcccaccacattccanccnggncnttaagngtaaagcccggggtgccnanngagtggnctncctcccnttaattgcgntgnnctnctgccccttttcnagtnggnaaacnnnnnngccnnctnnnttnatgaatnggccacccccngggngangcggtntnnntttngnnnnnnttnnnttnnnnnnnnntnnnnnnnnnnnnnnnnnnnnnnnnnnnnnnnnnntnnnntnntcn

SEQ ID NO: 3722 - DNA, 862 bp, Homo sapiens
  misc_feature 39, 485, 497, 502, 551, 619, 621, 631, 653, 708, 712, 713,718, 722, 726, 759, 761, 763, 766, 781, 788, 789, 790, 792,801, 804, 816, 822, 824, 826, 832, 837, 839, 847, 854, 858: n = A,T,C or G
gcgcttatcgactactatagggcgaattggagctccccngcggtggcggccgaggtaccttctcagccagcagttagccattgtggaggtgccaggggagttaatgcccttaggagcaactcttggtccttggaggcaggagtcagcacccactgaacgtcagcatacatttcccaccttccagcccttccaagggatgatcctcagaagtgtgttctgctgggttcctccaaagctctcagtgaggcccagctccagttgcccatagtggcaacccagctcaaccatgccctcctaacaccttttctttcttccctgacctttctgcctgcactcaagtcttttctcaatttgcaaaaccaggatacacaatatttaagtatctcccaaacctaaaataaagtggagtgcaaaaattcaaagaaaattcaggatgcatagtagtgtttaaaagaacaacatgggggcttgtcatgatatattanacacttgctttnccttncatgaaaaaaaaaaaaatggaaaacaaattgctctgtgttctaaagaanattcattatctgctggctctttacttactgcattacatacaccttaaactttttgcaatttggctttnanaccccctttncactggaaactcctaatcaganccctttaatctttttcttcatgagggatggactttttttccatttggttggggcnaccnntattncttngaanaaggctttcttttcaattgcaaggggtttttancntnttnggtggctgggttccnaaaattnnntnttttgggcnaanggaaatggattncctccnantnggcttnacttngntgtgtggngaacctncggnggcc

SEQ ID NO: 3723 - DNA, 916 bp, Homo sapiens
  misc_feature 1, 18, 20, 25, 28, 30, 346, 457, 490, 499, 538, 581, 586,594, 636, 653, 680, 703, 710, 711, 716, 745, 756, 774, 775,786, 790, 801, 803, 813, 815, 820, 858, 860, 869, 879, 901,913, 915, 916: n = A,T,C or G
ncctatcgactactatantnctatnggncnaattggagctccccgcggtggcggccgccgggcaggtactgttctggttcccactcagagatctctcgtaagatgcaatctatcaggcaatgtctaccacacacacatgcgcgagtgcgcgcgcacacacgcacacacacacagaggaagacagacaaaacctcagacagattacatcacagcaaagtcagactagaaaaaccagaggaaacacaagatacttctcatttctaacaccaactctcccaagtcacatcacagagtcagccaacccagagaccactggctcctgtggttatttgggttaaacaagcancatgatgctccctcttcaactctaaccaacagaattaacaatgaccccttctccaacacatgatttacacagccaacaaaaagagccacaagggacaatatggagcaggantcctcgccgctctaaaactaagtggatcccccnggcttgcangaatttcgatatcaagcttatcgatacccgtcgacctcnaggggggggccccggtcccaactttttgttccctttaaatgangggtnaattggcncccctggccgtaatcatgggcaaaagcctgtttccttggggngaaaatgtttatcccgntcacaaatttccacacaaacattaccnaccccgggagccataaaagggtnaaagccnnggggnggccttaatgaggggagcttacttaacanttaattggggntgggcctcaattggcccnnttttccaattngggnaaaactttttntngcccaccttnanttaantgaattcggccaacccccccggggaaaaggccgttttncnttttggggncccttttccnttttcttggttaaatgacttcnttgggctcgggngnn

SEQ ID NO: 3724 - DNA, 483 bp, Homo sapiens
  misc_feature 2, 3, 4, 158, 214, 223, 226, 229, 238, 239, 243, 265, 267,288, 334, 381, 440: n = A,T,C or G
gnnnaagtattccctatactactactatagggcgaattggagctccccgcggtggcggccgaggtacgcggggagggattgctccctgcattgtgggtgggagattgggttgggaaatgtaaagctctctttccttaccaagtttgtttaacatggcncttcccaccccaccccaaccacatcttcgtgctacttcaagctgggaggagccaanttccaaatntanccnaattttttnncccntgttggacaaagagacacattnanaggttgagcccagagggggtnaagtggactggggagaacttcggaggatgttcatgtccaggagcanccccacgccctgtatggtcggtgttctagagcctcacagcaactaanaccaacccaactctcataagaaggaatgtcaaaatgtcatgttcaattttacatttcantgccttgggaaatcttttcttcacaatttggaaatggaaaatg

SEQ ID NO: 3725 - DNA, 450 bp, Homo sapiens
  misc_feature 204, 215: n = A,T,C or G
tagggcgaattggagctccaccgcggtggcggccgcccgggcaggtacctttctttccgggccatggcaaaaaaaatccaattatgtccgtcttgagtctgtggtcttgcttcttatgtagtatttcctttgtgagctgaagattaatgcatggattcacctccttcagcacatttcatttcaattgtgaagaaaagattcccnggcccttgaantgtaaaaaattgaacattgacattttgacattccttcttctgagagctgggttggtcttagttgctgtgaggctctagacaccgaccatacagggcgtggggctgctcctggacatgaacatcctccgaagttctccccagttccactttacccgctctgggctcacctctgaatgtgtccccgcgtacctcggccgctctagaactagtggatccccccgggctgcaaggaatt

SEQ ID NO: 3726 - DNA, 511 bp, Homo sapiens
  misc_feature 2, 3, 4, 9, 11, 237, 239, 265, 287, 315, 326, 354, 373, 376,417, 420, 428, 430, 459, 463, 466, 469, 485, 489, 491, 498,499, 505: n = A,T,C or G
gnnntagcnancactactatagggcgaattggagctccccgcggtggcggccgcccgggcaggtacgcggggagtggcatcctttgaactcacggatccagtcataactgaagttccatctacacctggggtcttcagacccaggctctggaaaagatcctgttacttacaagcaaaagaaattctgcctcttaccctcagcatgtgagtacctcggcccggttttaaaacctagtngnatccccccggggctgcaggaattcanatatcaaagccttatcgatacncgtcgacctctgaggggggggcccggtncccagcttttngttccctttagtgagggttaattgcgcngcttggcgtaatcatggtnatngcttgtttttctgtgtgaaatttgtttatccgctcacaaanttnccaccacnancatacctaggcccggggagctattaaaanttgntanaanccttgggggttgcccntaantngaagttnnaagccnttaccc

SEQ ID NO: 3727 - DNA, 483 bp, Homo sapiens
  misc_feature 136, 144, 191, 204, 207, 218, 227, 265, 358, 365, 378, 404,417, 419, 428, 429, 432, 434, 436, 440, 446, 448, 451, 460,474: n = A,T,C or G
ggcgaattggagctccccgcggtggcggccgcccgggcatggtaccccaaaaccacggggctgcagctccagcaattgggaaggccaagttttcttgcacactccccagaaaaggggccaagtccatggggctgancagtgatngactgcagacctcaccaccactgaaccttgtaggataaggcccactngcctggggattgnttnttgaggcccanccctaagtnccttctgagttctccagctgggagcagctctacacttntccggcatgcagctttccaaagagagaggcagtccacctttttgctgtctcgcaacccttccttcctgctgctctcaggcttgggagggtgcnccagctnttaagggtctatnaacagaaccccatcaccagtgcattntggtgaaaccttnanaaaaaattnnacnangntggnaaacanancanaaccatttnccccattttttaanaccgctatc

SEQ ID NO: 3728 - DNA, 920 bp, Homo sapiens
  misc_feature 1, 543, 595, 605, 614, 617, 619, 643, 657, 675, 681, 685,688, 691, 693, 698, 699, 701, 712, 720, 723, 727, 729, 743,744, 759, 763, 767, 769, 773, 775, 783, 787, 799, 800, 813,822, 835, 837, 841, 846, 847, 848, 856, 869, 870, 877: n = A,T,C or G
  misc_feature 881, 882, 898, 905, 906: n = A,T,C or G
ncgatcgactactatagggcgaattggagctccccgcggtggcggcccgccgggcaggtacagtggtgcagtcatagctcattgcaaccttgaacttcaggctcaagagatccttttgccttactcagcctcccaagtagctgggactacaggcatgtgccaccatgcccagctaattttcattttaattttttgtagagacggagttttgctatgatgcccgggttgatcttgaactcctggcttcaagtgatccttctgccttggcctcccaaagtgctagcattataggcatgagtcactgtgcctggccttgaatatttttacattgcgttgtcacaagtgagctgtgtcattttggtatattttaattaaaaggcaaggtttctactttgatattatttaaaatccacacccttgtatcttacatcaaaatttaagaatcagtcagctttaaattatttgcttttattcttctctaggagctgctgttttgaggattcctattctgtatggggaagttgaaaaagctcgaagaaaggnctgtgactgttatggtttggataaaagtgcagttcaagcaacaagtcagccnaacatggatnactggcagnaanangtttccccacacatgtcaaagatnggggccactgggtncccggcagctaacaaaanaaaaanaatnctngtnanaaagnntncctggagtccntgtcttancgnaagntncactttgtcttttnnatgctggaacttttnacangctntngccntnggccggtntaanaaccaagtgggnncccccgggctgcnaggaaattngattcaaatcttntntaancccgnnntacccttnagggggggcccgnncccaacntttnnttcctttaagggaggntaaatannccgctgggcgaaat

SEQ ID NO: 3729 - DNA, 904 bp, Homo sapiens
  misc_feature 4, 6, 8, 9, 11, 17, 22, 161, 254, 285, 310, 331, 337, 358,462, 467, 575, 586, 638, 653, 657, 678, 684, 686, 697, 718,729, 769, 777, 780, 783, 784, 786, 791, 793, 796, 816, 823,828, 831, 835, 846, 848, 870, 884, 901: n = A,T,C or G
tgancncnncngcggtngcggnacgcccgggcaggtacagtgaagctttgacctgaggagctcttctgtaggtgaagagtggttaactatggttcctgtgtgcctggggccccccactcctaggactcatccaccccctacccagaacttactagtacctnggccgctctagaactagtggatcccccgggctgcaggaattcgatatcaagcttatcgataccgtcgacctcgagggggggcccggtacccancttttgttccctttagtgagggttaattgcncgcttggcgtaatcatggtcatagntgtttcctgtgtgaaattgtnatccgntcacaattcacacaacatacnagccgggagcataaagtgtaaagcctggggtgcctaatgagtgagctaactcacattaattgcgttgcgctcactgcccgctttccagtcgggaaacctgtcgngccanctgcattaatgaatcggccaacgcgcggggagaggcggtttgcgtattgggcgctcttccgctttctcgctcactgactcgatgcgctcggtcgttcgggttgcggcnagccggtattnagcttaacttaaaaggcgggtaattaccggttattcaacaagaaattaaggnggataaccccaaggnaaanaaacattgttgagccaaaaanggccancnaaaagggccangaaacccgtaaaaaaggcccngttgctgggcnttttttccataaggctcccgccccccttgacgagcattanaaaaattnacnctnnanttcananggngggcgaaaccccgccgggantattaangatancangcgntttcccctggnancttccttgtgtcgcctttcttntttccgaacctgcngcttacccggtaacctncct

SEQ ID NO: 3730 - DNA, 926 bp, Homo sapiens
  misc_feature 2, 636, 655, 662, 686, 687, 701, 715, 733, 741, 758, 777,779, 789, 795, 801, 804, 810, 820, 823, 841, 843, 851, 852,855, 870, 887, 894, 905, 913, 918, 921, 922: n = A,T,C or G
gncgtatacgactactatagggcgaattggagctccaccgcggtggcagctacttgggaggctgaggtgggatgactgcttgagcccaggaggttgaggctgcactgagccacagtcacgccactgcactccagcctgggtgacagagcaagaccctgtctctagttttgtccatctgtcttcatggtcctagctgaaaagtatctttttagattccctatttccttcgacttccctcccctagaatataaactccatgagctccttgtccacccaactctctgcagtcttctgtacctcggccgctctagaactagtggatcccccgggctgcaggaattcgatatcaagcttatcgataccgtcgacctcgagggggggcccggtacccagcttttgttccctttagtgagggttaaattgcgcgcttggcgtaatcatggtcatagctgtttcctgtgtgaaattgttatccgctcacaattccacacaacatacgagccgggagcataaagtgtaaagcctggggtgcctaatgagtgagctaactcacattaattgcgttgcgctcactgcccgcttttcaatcgggaaacctgtcgtgccacttgcattaatggaatcggcccaacgccnccgggagaggcgggtttgngtaattnggcgcttttttccgcttttcttgnntaacttgacttggnttgcgcttcggtcngtttcggcttgccggcgnagccggtnttaacctcacttcaaanggcggtaataccggttttncncaagaattanggggantaaccncangaaaanaacatttganccnaaaggcccccaaaaaggncngggaaccnntanaaaaggccccgttgnttggcggttttcataanggctccncccccctgacnagccttanaaaantcnnccct

SEQ ID NO: 3731 - DNA, 902 bp, Homo sapiens
  misc_feature 4, 666, 674, 677, 712, 739, 751, 807, 838, 854, 858, 865,873: n = A,T,C or G
gatncactactatagggcgaattggagctccaccgcggtggcggccgaggtacaagaagggctgaggcttctgtctgagttgaccgtgacctgtggttacagcattttaggacttcgtaacagaatgatccacagaggtcagcaggcccttgaaagaacgctgaaggaaacttgcatacaaacagtctcaaggaggcaaacacatgcttcagcgctgcccgcgtacctgcccgggcggccgctctagaactagtggatcccccgggctgcaggaattcgatatcaagcttatcgataccgtcgacctcgagggggggcccggtacccagcttttgttccctttagtgagggttaattgcgcgcttggcgtaatcatggtcatagctgtttcctgtgtgaaattgttatccgctcacaattccacacaacatacgagccgggagcataaagtgtaaagcctggggtgcctaatgagtgagctaactcacattaattgcgttgcgctcactgcccgctttccagtcgggaaacctgtcgtgccagctgcattaatgaatcggccaacgcgcggggagaggcggtttgcgtattgggcgctctttccgctttcttgctcactgactcgctgcgctcggtcgttcggctgcggcgaagcggtatcagctnactcaaangcnggaatacggttttccacaaaattaggggaataacncaaggaaaaaacaatgtgaaccaaaanggcaacaaaaanggccaggaacccgtaaaaaagggcccgttggctggcgttttttcataaggctccgnccccctggccaagcattaaaaaaaattgacncttaaattaaaagggngggnaaccccncagggctnttaaaaataccagcggtttcccctggaat

SEQ ID NO: 3732 - DNA, 914 bp, Homo sapiens
  misc_feature 583, 610, 632, 664, 669, 680, 698, 709, 720, 728, 738, 753,760, 764, 786, 793, 803, 832, 853, 857, 860, 862, 866, 873,913: n = A,T,C or G
tcgatcgactcactataagtctagggcgaatcgggagctccacccgcggtggcggcaagagtaaaatcaaggctggtaaaagaacacagcacgtttcaagcctaagcagcttaagtgcaaagtggctccgggtggaaatgatgagagagcaagagcacaaagaggaccctctaaaacagagccagtgaccatgtgagctgagggggagggcttctcacagggcaaacggtacctcggccgctctagaactagtggatcccccgggctgcaggaattcgatatcaagcttatcgataccgtcgacctcgagggggggcccggtacccagcttttgttccctttagtgagggttaattgcgcgcttggcgtaatcatggtcatagctgtttcctgtgtgaaaattgttatcccgctcacaattccacacaacatacgagccgggagcataaagtgtaaagcctggggtgcctaatgagtgagctaactcacattaattgcgttgcgctcactgcccgctttccagtcgggaaacctgtcgtgccagctgcattaatgaatcggcaaccgcgcggggagaggcggnttgcgtatttgggcgctctttcgcttnttcgctcactgacttcgcttgngctcggtccgttcggcttgcggcgaagcggtntcagntcacttcaaangccggtaatccggttatncacaaaatcanggggattaccncaggaaangaacattgtnaaccaaaaaggccanccaaaanggcnaggaacccgtaaaaagggccgngttgctnggcgtttttncataaggcttccgccccccttgcgaggantaaaaaaatttggcccttaantcanaangnggcnaaacccnccggacttttaaaatcccggcgttttccctggaaactccnt

SEQ ID NO: 3733 - DNA, 910 bp, Homo sapiens
  misc_feature 2, 3, 394, 576, 606, 637, 665, 696, 699, 710, 740, 749, 765,771, 773, 779, 781, 785, 786, 788, 794, 797, 798, 799, 803,804, 813, 815, 819, 821, 834, 837, 840, 847, 859, 868, 870,879, 890, 900: n = A,T,C or G
tnnatagaacgactactatagggcgaattggagctccaccgcggtggcggccgcccgggcaggtactggtgactcaccattctgccagcggccactttgcactgggcaccagcacataccagcccccatcaggaaatgtgcacagtccatctcatcttgtttcatcttcattttattaatgaggaactgagagtccaagaaggttcaatcatttgctcaaggacaaagaagtgcatatcgactcaagatctgagcgactccaaagcccaagctctgtgcccccgataacactaaagggctctggaaccttccctcactgtgccaaattctggtcaccacactttaggaaaggtacctcggccgctctagaactagtggatcccccgggctgcangaattcgatatcaagcttatcgataccgtcgacctcgagggggggcccggtacccagcttttgttccctttagtgagggttaattgcgcgcttggcgtaatcatggtcatagctggttcctgtgtgaaattgttatccgctcacaatttcacacaacatacgagccgggagcataaagtgtnaaagcctgggggtgcctaatgagtgagctnactcacattaattgcgttgcgcttcactggnccgcttttcaagtcgggaaaacctttcntgccagcttgtattaattgaatctggccaanccncgggggaggangcgggtttgcggtattgggcgccttttccnctttcttgnttactgacttcttgcnctcggncnttcggntnaggnnancgggtntannnttanntcaaaaggngngaanancgggtttccccanaantanggggatnaccccggaaaanaacattttngncaaaaggcnccaaaagggcnggaaccctanaaaaggccct

SEQ ID NO: 3734 - DNA, 911 bp, Homo sapiens
  misc_feature 19, 425, 570, 574, 575, 576, 577, 578, 579, 580, 581, 582,583, 584, 585, 586, 587, 588, 589, 590, 591, 592, 593, 594,595, 596, 597, 598, 599, 600, 601, 602, 603, 604, 605, 606,607, 608, 609, 610, 611, 612, 613, 614, 615, 616, 617: n = A,T,C or G
  misc_feature 618, 619, 620, 621, 622, 623, 624, 625, 626, 627, 628, 629,630, 631, 632, 633, 634, 635, 636, 637, 638, 639, 640, 641,642, 643, 644, 645, 646, 647, 648, 649, 650, 651, 652, 653,654, 655, 656, 657, 658, 659, 660, 661, 662, 663, 664: n = A,T,C or G
  misc_feature 665, 666, 667, 668, 669, 670, 671, 672, 673, 674, 675, 676,677, 678, 679, 680, 681, 682, 683, 684, 685, 686, 687, 688,689, 690, 691, 692, 693, 694, 695, 696, 697, 698, 699, 700,701, 702, 703, 704, 705, 706, 707, 708, 709, 710, 711: n = A,T,C or G
  misc_feature 712, 713, 714, 715, 716, 717, 718, 719, 720, 721, 722, 723,724, 725, 726, 727, 728, 729, 730, 731, 732, 733, 734, 735,736, 737, 738, 739, 740, 741, 742, 743, 744, 745, 746, 747,748, 749, 750, 751, 752, 753, 754, 755, 756, 757, 758: n = A,T,C or G
  misc_feature 759, 760, 761, 762, 763, 764, 765, 766, 767, 768, 769, 770,771, 772, 773, 774, 775, 776, 777, 778, 779, 780, 781, 782,783, 784, 785, 786, 787, 788, 789, 790, 791, 792, 793, 794,795, 796, 797, 798, 799, 800, 801, 802, 803, 804, 805: n = A,T,C or G
  misc_feature 806, 807, 808, 809, 810, 811, 812, 813, 814, 815, 816, 817,818, 819, 820, 821, 822, 823, 824, 825, 826, 827, 828, 829,830, 831, 832, 833, 834, 835, 836, 837, 838, 839, 840, 841,842, 843, 844, 845, 846, 847, 848, 849, 850, 851, 852-911: n = A,T,C or G
gcctatcgctacttcggcnaattggagctccccgcggtggcggccgcccgggcaggtacgcggggggagacacattcagaggtgagcccagagcgggtaaagtggactggggagaacttcggaggatgttcatgtccaggagcagccccacgccctgtatggtcggtgtctagagcctcacagcactaagaccaacccagctctcagaagaaggaatgtcaaaatgtcatgttcaattttacattcagtgcctggaatcttttcttcacaattgaaatgaaatgtgctgaaggaggtgaatccatgcattaatcttcagctcacaaaggaaatactacataagaagcaagaccacagactcaagacggacataattggattttttttgccatggcctggaaagaaaggtacctcggccgctctanaactagtggatcccccgggctgcaggaattcgatatcaagcttatcgataccgtcgacctcgagggggggcccggtacccaacttttgttccctttagtgagggttaattgcgcccttggcgtaatcatggtcatagctggttcngggnnnnnnnnnnnnnnnnnnnnnnnnnnnnnnnnnnnnnnnnnnnnnnnnnnnnnnnnnnnnnnnnnnnnnnnnnnnnnnnnnnnnnnnnnnnnnnnnnnnnnnnnnnnnnnnnnnnnnnnnnnnnnnnnnnnnnnnnnnnnnnnnnnnnnnnnnnnnnnnnnnnnnnnnnnnnnnnnnnnnnnnnnnnnnnnnnnnnnnnnnnnnnnnnnnnnnnnnnnnnnnnnnnnnnnnnnnnnnnnnnnnnnnnnnnnnnnnnnnnnnnnnnnnnnnnnnnnnnnnnnnnnnnnnnnnnnnnnnnnnnnnnnnnnnnnnnnnnnnnnnnnnnnnnnnnnnnnnnn

SEQ ID NO: 3735 - DNA, 871 bp, Homo sapiens
  misc_feature 2, 276, 378, 443, 445, 470, 471, 472, 473, 474, 475, 476,477, 478, 479, 480, 481, 482, 483, 484, 485, 486, 487, 488,489, 491, 492, 493, 494, 495, 496, 497, 498, 499, 500, 501,502, 503, 504, 505, 506, 507, 508, 509, 510, 511, 512: n = A,T,C or G
  misc_feature 513, 514, 515, 516, 517, 518, 519, 520, 521, 522, 523, 524,525, 526, 528, 529, 530, 532, 533, 534, 535, 536, 537, 538,539, 540, 541, 542, 543, 544, 545, 546, 547, 548, 549, 550,551, 552, 553, 554, 555, 556, 557, 560, 561, 562, 563: n = A,T,C or G
  misc_feature 564, 565, 566, 567, 568, 569, 570, 571, 572, 573, 574, 575,576, 577, 578, 579, 581, 582, 583, 584, 585, 586, 587, 588,589, 591, 592, 593, 594, 595, 596, 597, 598, 600, 601, 604,605, 606, 607, 608, 609, 610, 611, 612, 613, 614, 615: n = A,T,C or G
  misc_feature 616, 617, 618, 620, 621, 622, 623, 624, 626, 627, 628, 629,630, 631, 632, 633, 634, 635, 636, 637, 638, 639, 640, 641,642, 643, 644, 645, 646, 647, 648, 649, 650, 652, 653, 654,655, 656, 657, 658, 659, 660, 661, 662, 663, 664, 666: n = A,T,C or G
  misc_feature 667, 668, 669, 670, 671, 672, 674, 676, 677, 678, 679, 680,681, 682, 683, 684, 685, 686, 687, 689, 690, 691, 692, 693,694, 695, 696, 698, 699, 700, 701, 702, 703, 704, 705, 706,707, 708, 710, 711, 712, 713, 714, 715, 716, 717, 719: n = A,T,C or G
  misc_feature 720-731,733, 734, 736, 738, 739, 741, 742, 743, 744,745, 746, 748,749, 750, 751, 752, 753, 754-757, 758, 759,761,762-766, 768, 769, 771-773, 775-783, 785-787, 790-793,795-800, 802-803, 805-832, 834-841, 843-856, 858-861, 865-869: n = A,T,C or G
cntaaacgacttactatagggcgaattggagctccccgcggtggcggccgcccgggcaggtacatcgaataggcaagaacacaggcagtagggcagctttgacagcctcagtaatttccaagggtattttttgacagaagtatcacaagtcttaaagtgattgcatcgaaaatttctgattcatttgggtaagtgattatctttccatttgccaaggacctgttgtatgtatagtggtaaaacaatttgtatatttataagggagatatgaggtanaacgtaagacttctttggggagccgacagtacctcggccgctctagaactagtggatcccccgggctgcaggaattcgatatcaagcttatcgataccgtcnacctcgagggggggcccggtcccagcttttgttccctttagtgagggttaattgcgcccttggcnantcatggtcatagctgtttcctggannnnnnnnnnnnnnnnnnnnannnnnnnnnnnnnnnnnnnnnnnnnnnnnnnnnnnncnnngnnnnnnnnnnnnnnnnnnnnnnnnnngannnnnnnnnnnnnnnnnnnnannnnnnnnnannnnnnnntnnaannnnnnnnnnnnnnngnnnnngnnnnnnnnnnnnnnnnnnnnnnnnngnnnnnnnnnnnnngnnnnnnnancnnnnnnnnnnnncnnnnnnnnannnnnnnnnnngnnnnnnnngnnnnnnnnnnnnngnntngnngnnnnnntnnnnnnnnnnnnannnnnnannannnannnnnnnnnannnttnnnncnnnnnncnntnnnnnnnnnnnnnnnnnnnnnnnnnnnntnnnnnnnnannnnnnnnnnnnnngnnnncatnnnnncc

SEQ ID NO: 3736 - DNA, 936 bp, Homo sapiens
  misc_feature 2, 3, 4, 5, 6, 7, 8, 9, 10, 11, 12, 13, 16, 39, 43, 240,490, 491, 492, 493, 494, 495, 496, 497, 498, 499, 500, 501,502, 503, 504, 505, 506, 507, 508, 509, 510, 511, 512, 513,514, 515, 516, 517, 518, 519, 520, 521, 522, 523, 524: n = A,T,C or G
  misc_feature 525, 526, 527, 528, 529, 530, 531, 532, 533, 534, 535, 536,537, 538, 539, 540, 541, 542, 543, 544, 545, 546, 547, 548,549, 550, 551, 552, 553, 554, 555, 556, 557, 558, 559, 560,561, 562, 563, 564, 565, 566, 567, 568, 569, 570, 571: n = A,T,C or G
  misc_feature 572, 573, 574, 575, 576, 577, 578, 579, 580, 581, 582, 583,584, 585, 586, 587, 588, 589, 590, 591, 592, 593, 594, 595,596, 597, 598, 599, 600, 601, 602, 603, 604, 605, 606, 607,608, 609, 610, 611, 612, 613, 614, 615, 616, 617, 618: n = A,T,C or G
  misc_feature 619, 620, 621, 622, 623, 624, 625, 626, 627, 628, 629, 630,631, 632, 633, 634, 635, 636, 637, 638, 639, 640, 641, 642,643, 644, 645, 646, 647, 648, 649, 650, 651, 652, 653, 654,655, 656, 657, 658, 659, 660, 661, 662, 663, 664, 665: n = A,T,C or G
  misc_feature 666, 667, 668, 669, 670, 671, 672, 673, 674, 675, 676, 677,678, 679, 680, 681, 682, 683, 684, 685, 686, 687, 688, 689,690, 691, 692, 693, 694, 695, 696, 697, 698, 699, 700, 701,702, 703, 704, 705, 706, 707, 708, 709, 710, 711, 712: n = A,T,C or G
  misc_feature 713, 714, 715, 716, 717, 718, 719, 720, 721, 722, 723, 724,725, 726, 727, 728, 729, 730, 731, 732, 733, 734, 735, 736,737, 738, 739, 740, 741, 742, 743, 744, 745, 746, 747, 748,749, 750, 751, 752, 753, 754, 755, 756, 757, 758, 759-936: n = A,T,C or G
gnnnnnnnnnnnnacnccgtaaacgactactatagggcnaatnggagctccccgcggtggcggccgcccgggcaggtacatcgaataggcaagaacacaggcagtagggcagctttgacagcctcagtaatttccaagggtattttttgacagaagtatcacaagtcttaaagtgattgcatcgaaaatttctgattcatttgggtaagtgattatctttccatttgccaaggacctgtngtatgtatagtgggtaaaacaatttgtatatttataagggagatatgaggtaaaaacgtaagacttctttggggagccgacagtacctcggcccgctctagaactagtggatcccccgggctgcaggaattcgatatcaagcttatcgataccgtcgacctcgagggggggcccggtacccagcttttgttccctttagtgagggttaattgcgcgcttggcgtaatcatggtcatagctgtttcctggnnnnnnnnnnnnnnnnnnnnnnnnnnnnnnnnnnnnnnnnnnnnnnnnnnnnnnnnnnnnnnnnnnnnnnnnnnnnnnnnnnnnnnnnnnnnnnnnnnnnnnnnnnnnnnnnnnnnnnnnnnnnnnnnnnnnnnnnnnnnnnnnnnnnnnnnnnnnnnnnnnnnnnnnnnnnnnnnnnnnnnnnnnnnnnnnnnnnnnnnnnnnnnnnnnnnnnnnnnnnnnnnnnnnnnnnnnnnnnnnnnnnnnnnnnnnnnnnnnnnnnnnnnnnnnnnnnnnnnnnnnnnnnnnnnnnnnnnnnnnnnnnnnnnnnnnnnnnnnnnnnnnnnnnnnnnnnnnnnnnnnnnnnnnnnnnnnnnnnnnnnnnnnnnnnnnnnnnnnnnnnnnnnnnnnnnnnnnnnnnnnnnnnnnnnnnnnnnnnnnnnnnnnnnnnnnnnnnnnnnnnnnnnn

SEQ ID NO: 3737 - DNA, 938 bp, Homo sapiens
  misc_feature 2, 5, 7, 9, 10, 12, 40, 80, 82, 84, 90, 124, 125, 133, 144,154, 180, 181, 206, 216, 218, 245, 254, 290, 434, 435, 436,437, 438, 439, 440, 441, 442, 443, 444, 445, 446, 447, 448,449, 450, 451, 452, 453, 454, 455, 456, 457, 458, 459: n = A,T,C or G
  misc_feature 460, 461, 462, 463, 464, 465, 466, 467, 468, 469, 470, 471,472, 473, 474, 475, 476, 477, 478, 479, 480, 481, 482, 483,484, 485, 486, 487, 488, 489, 490, 491, 492, 493, 494, 495,496, 497, 498, 499, 500, 501, 502, 503, 504, 505, 506: n = A,T,C or G
  misc_feature 507, 508, 509, 510, 511, 512, 513, 514, 515, 516, 517, 518,519, 520, 521, 522, 523, 524, 525, 526, 527, 528, 529, 530,531, 532, 533, 534, 535, 536, 537, 538, 539, 540, 541, 542,543, 544, 545, 546, 547, 548, 549, 550, 551, 552, 553: n = A,T,C or G
  misc_feature 554, 555, 556, 557, 558, 559, 560, 561, 562, 563, 564, 565,566, 567, 568, 569, 570, 571, 572, 573, 574, 575, 576, 577,578, 579, 580, 581, 582, 583, 584, 585, 586, 587, 588, 589,590, 591, 592, 593, 594, 595, 596, 597, 598, 599, 600: n = A,T,C or G
  misc_feature 601, 602, 603, 604, 605, 606, 607, 608, 609, 610, 611, 612,613, 614, 615, 616, 617, 618, 619, 620, 621, 622, 623, 624,625, 626, 627, 628, 629, 630, 631, 632, 633, 634, 635, 636,637, 638, 639, 640, 641, 642, 643, 644, 645, 646, 647: n = A,T,C or G
  misc_feature 648, 649, 650, 651, 652, 653, 654, 655, 656, 657, 658, 659,660, 661, 662, 663, 664, 665, 666, 667, 668, 669, 670, 671,672, 673, 674, 675, 676, 677, 678, 679, 680, 681, 682, 683,684, 685, 686, 687, 688, 689, 690, 691, 692, 693, 694-938: n = A,T,C or G
gnccntntnnantactccgtaatacgactactatagggcnaattggagctccaccgcggtggcggccgcccgggcaggtncncngggatngtcacaatgagatgtcttgcaccctgccactctnnccatttgnctgaattctantatcactcangtgatctggaatctaattctcacccnnaactttaattgcatgaaaaactaanatatatagtngntagctttccaccatttgcatcttgcangaaatgtcngaaatatattggagtggccggccgctctagaactantggatcccccgggctgcaggaattcgatatcaagcttatcgataccgtcgacctcgagggggggcccggtacccagcttttgttccctttagtgagggttaattgcgcgcttggcgtaatcatggtcatagctgtttcctggannnnnnnnnnnnnnnnnnnnnnnnnnnnnnnnnnnnnnnnnnnnnnnnnnnnnnnnnnnnnnnnnnnnnnnnnnnnnnnnnnnnnnnnnnnnnnnnnnnnnnnnnnnnnnnnnnnnnnnnnnnnnnnnnnnnnnnnnnnnnnnnnnnnnnnnnnnnnnnnnnnnnnnnnnnnnnnnnnnnnnnnnnnnnnnnnnnnnnnnnnnnnnnnnnnnnnnnnnnnnnnnnnnnnnnnnnnnnnnnnnnnnnnnnnnnnnnnnnnnnnnnnnnnnnnnnnnnnnnnnnnnnnnnnnnnnnnnnnnnnnnnnnnnnnnnnnnnnnnnnnnnnnnnnnnnnnnnnnnnnnnnnnnnnnnnnnnnnnnnnnnnnnnnnnnnnnnnnnnnnnnnnnnnnnnnnnnnnnnnnnnnnnnnnnnnnnnnnnnnnnnnnnnnnnnnnnnnnnnnnnnnnnnnnnnnnnnnnnnnnnnnnnnnnnnnnnnnnnnnnnnnnnnnnnnnnnnnnnnnnnnnn

SEQ ID NO: 3738 - DNA, 970 bp, Homo sapiens
  misc_feature 9, 12, 23, 38, 167, 218, 242, 304, 335, 336, 337, 338, 339,340, 341, 342, 343, 344, 345, 346, 347, 348, 349, 350, 351,352, 353, 354, 355, 356, 357, 358, 359, 360, 361, 362, 363,364, 365, 366, 367, 368, 369, 370, 371, 372, 373, 374: n = A,T,C or G
  misc_feature 375, 376, 377, 378, 379, 380, 381, 382, 383, 384, 385, 386,387, 388, 389, 390, 391, 392, 393, 394, 395, 396, 397, 398,399, 400, 401, 402, 403, 404, 405, 406, 407, 408, 409, 410,411, 412, 413, 414, 415, 416, 417, 418, 419, 420, 421: n = A,T,C or G
  misc_feature 422, 423, 424, 425, 426, 427, 428, 429, 430, 431, 432, 433,434, 435, 436, 437, 438, 439, 440, 441, 442, 443, 444, 445,446, 447, 448, 449, 450, 451, 452, 453, 454, 455, 456, 457,458, 459, 460, 461, 462, 463, 464, 465, 466, 467, 468: n = A,T,C or G
  misc_feature 469, 470, 471, 472, 473, 474, 475, 476, 477, 478, 479, 480,481, 482, 483, 484, 485, 486, 487, 488, 489, 490, 491, 492,493, 494, 495, 496, 497, 498, 499, 500, 501, 502, 503, 504,505, 506, 507, 508, 509, 510, 511, 512, 513, 514, 515: n = A,T,C or G
  misc_feature 516, 517, 518, 519, 520, 521, 522, 523, 524, 525, 526, 527,528, 529, 530, 531, 532, 533, 534, 535, 536, 537, 538, 539,540, 541, 542, 543, 544, 545, 546, 547, 548, 549, 550, 551,552, 553, 554, 555, 556, 557, 558, 559, 560, 561, 562: n = A,T,C or G
  misc_feature 563, 564, 565, 566, 567, 568, 569, 570, 571, 572, 573, 574,575, 576, 577, 578, 579, 580, 581, 582, 583, 584, 585, 586,587, 588, 589, 590, 591, 592, 593, 594, 595, 596, 597, 598,599, 600, 601, 602, 603, 604, 605, 606, 607, 608, 609-970: n = A,T,C or G
ggcgctatngantactcctatangactactatagggcnaattggagctccaccgcggtggcggccgcccgggcaggtacgcgggggacttacaagatggataggacctggtggcagctgtccttgaggaagccagagcctggagagacagatctcatgttatagcanagtacctcggccgctctagaactagtggatcccccgggctgcaggaattcnatatcaagcttatcgataccgtcnacctcgagggggggcccggtacccagcttttgttccctttagtgagggttaattgcgcgctnggcgtaatcatggtcatagctgtttctggannnnnnnnnnnnnnnnnnnnnnnnnnnnnnnnnnnnnnnnnnnnnnnnnnnnnnnnnnnnnnnnnnnnnnnnnnnnnnnnnnnnnnnnnnnnnnnnnnnnnnnnnnnnnnnnnnnnnnnnnnnnnnnnnnnnnnnnnnnnnnnnnnnnnnnnnnnnnnnnnnnnnnnnnnnnnnnnnnnnnnnnnnnnnnnnnnnnnnnnnnnnnnnnnnnnnnnnnnnnnnnnnnnnnnnnnnnnnnnnnnnnnnnnnnnnnnnnnnnnnnnnnnnnnnnnnnnnnnnnnnnnnnnnnnnnnnnnnnnnnnnnnnnnnnnnnnnnnnnnnnnnnnnnnnnnnnnnnnnnnnnnnnnnnnnnnnnnnnnnnnnnnnnnnnnnnnnnnnnnnnnnnnnnnnnnnnnnnnnnnnnnnnnnnnnnnnnnnnnnnnnnnnnnnnnnnnnnnnnnnnnnnnnnnnnnnnnnnnnnnnnnnnnnnnnnnnnnnnnnnnnnnnnnnnnnnnnnnnnnnnnnnnnnnnnnnnnnnnnnnnnnnnnnnnnnnnnnnnnnnnnnnnnnnnnnnnnnnnnnnnnnnnnnnnnnnnnnnnnnnnnnnnnnnnnnnnnnnnnnnnnnnnnnnnnnnnnnnnnnnnnnnnnnnnnnnnnn

SEQ ID NO: 3739 - DNA, 906 bp, Homo sapiens
  misc_feature 5, 6, 8, 9, 13, 35, 438, 470, 579, 580, 585, 587, 588, 589,590, 591, 593, 594, 595, 596, 597, 598, 599, 600, 601, 602,603, 604, 605, 606, 607, 608, 609, 610, 611, 612, 613, 614,615, 616, 617, 618, 619, 620, 621, 622, 623, 624, 625: n = A,T,C or G
  misc_feature 626, 627, 628, 629, 630, 631, 632, 633, 634, 635, 636, 637,638, 639, 640, 641, 642, 643, 644, 645, 646, 647, 648, 649,650, 651, 652, 653, 654, 655, 656, 657, 658, 659, 660, 661,662, 663, 664, 665, 666, 667, 668, 669, 670, 671, 672: n = A,T,C or G
  misc_feature 673, 674, 675, 676, 677, 678, 679, 680, 681, 682, 683, 684,685, 686, 687, 688, 689, 690, 691, 692, 693, 694, 695, 696,697, 698, 699, 700, 701, 702, 703, 704, 705, 706, 707, 708,709, 710, 711, 712, 713, 714, 715, 716, 717, 718, 719: n = A,T,C or G
  misc_feature 720, 721, 722, 723, 724, 725, 726, 727, 728, 729, 730, 731,732, 733, 734, 735, 736, 737, 738, 739, 740, 741, 742, 743,744, 745, 746, 747, 748, 749, 750, 751, 752, 753, 754, 755,756, 757, 758, 759, 760, 761, 762, 763, 764, 765, 766: n = A,T,C or G
  misc_feature 767, 768, 769, 770, 771, 772, 773, 774, 775, 776, 777, 778,779, 780, 781, 782, 783, 784, 785, 786, 787, 788, 789, 790,791, 792, 793, 794, 795, 796, 797, 798, 799, 800, 801, 802,803, 804, 805, 806, 807, 808, 809, 810, 811, 812, 813: n = A,T,C or G
  misc_feature 814, 815, 816, 817, 818, 819, 820, 821, 822, 823, 824, 825,826, 827, 828, 829, 830, 831, 832, 833, 834, 835, 836, 837,838, 839, 840, 841, 842, 843, 844, 845, 846, 847, 848, 849,850, 851, 852, 853, 854, 855, 856, 857, 858, 859, 860-906: n = A,T,C or G
ggccnntnnatantcctatcgacttacttagggcnaattggagctccccgcggtggcggccgaggtacgcggggacacattcagaggtgagcccagagcgggtaaagtggactggggagaacttcggaggatgttcatgtccaggagcagccccacgccctgtatggtcggtgtctagagcctcacagcaactaagaccaacccagctctcagaagaaggaatgtcaaaatgtcatgttcaattttacattcagtgcctggaatcttttcttcacaattgaaatgaaatgtactgaaggaggtgaatccatgcattaatcttcagctcacaaaggaaatactacataagaagcaagaccacagactcaagacggacataattggattttttttgccatggcctggaaagaaaggtacctgcccgggcggccgctctanaactagtggatcccccgggctgcaggaattcnatatcaagcttatcgataccgtcgacctcgagggggggcccggtacccagcttttgttccctttagtgagggttaattgcgcgcttggcgtaatcatggtcatagctgnnttttngnnnnnannnnnnnnnnnnnnnnnnnnnnnnnnnnnnnnnnnnnnnnnnnnnnnnnnnnnnnnnnnnnnnnnnnnnnnnnnnnnnnnnnnnnnnnnnnnnnnnnnnnnnnnnnnnnnnnnnnnnnnnnnnnnnnnnnnnnnnnnnnnnnnnnnnnnnnnnnnnnnnnnnnnnnnnnnnnnnnnnnnnnnnnnnnnnnnnnnnnnnnnnnnnnnnnnnnnnnnnnnnnnnnnnnnnnnnnnnnnnnnnnnnnnnnnnnnnnnnnnnnnnnnnnnnnnnnnnnnnnnnnnnnnnnnnnnnnnnnnnnnnnnnnnnnnnnnnnn

SEQ ID NO: 3740 - DNA, 902 bp, Homo sapiens
  misc_feature 23, 25, 30, 41, 337, 344, 405, 417, 422, 476, 481, 491, 517,553, 555, 572, 577, 580, 581, 585, 587, 588, 589, 590, 592,593, 594, 595, 596, 597, 598, 599, 600, 601, 602, 603, 604,605, 606, 607, 608, 609, 610, 611, 612, 613, 614: n = A,T,C or G
  misc_feature 615, 616, 617, 618, 619, 620, 621, 622, 623, 624, 625, 626,627, 628, 629, 630, 631, 632, 633, 634, 635, 636, 637, 638,639, 640, 641, 642, 643, 644, 645, 646, 647, 648, 649, 650,651, 652, 653, 654, 655, 656, 657, 658, 659, 660, 661: n = A,T,C or G
  misc_feature 662, 663, 664, 665, 666, 667, 668, 669, 670, 671, 672, 673,674, 675, 676, 677, 678, 679, 680, 681, 682, 683, 684, 685,686, 687, 688, 689, 690, 691, 692, 693, 694, 695, 696, 697,698, 699, 700, 701, 702, 703, 704, 705, 706, 707, 708: n = A,T,C or G
  misc_feature 709, 710, 711, 712, 713, 714, 715, 716, 717, 718, 719, 720,721, 722, 723, 724, 725, 726, 727, 728, 729, 730, 731, 732,733, 734, 735, 736, 737, 738, 739, 740, 741, 742, 743, 744,745, 746, 747, 748, 749, 750, 751, 752, 753, 754, 755: n = A,T,C or G
  misc_feature 756, 757, 758, 759, 760, 761, 762, 763, 764, 765, 766, 767,768, 769, 770, 771, 772, 773, 774, 775, 776, 777, 778, 779,780, 781, 782, 783, 784, 785, 786, 787, 788, 789, 790, 791,792, 793, 794, 795, 796, 797, 798, 799, 800, 801, 802: n = A,T,C or G
  misc_feature 803, 804, 805, 806, 807, 808, 809, 810, 811, 812, 813, 814,815, 816, 817, 818, 819, 820, 821, 822, 823, 824, 825, 826,827, 828, 829, 830, 831, 832, 833, 834, 835, 836, 837, 838,839, 840, 841, 842, 843, 844, 845, 846, 847, 848, 849-902: n = A,T,C or G
agccgtatcgactactcgcgtanangactnactatagggcnaattggagctccaccgcggtggcggccgaggtacccctttcacggcatagcttccttgagggctggggtaagaaacccacagttcttctgtttctgctggatttttccctgtggttaatccttaaccaagaggcacttctcaatcaactcttcttccaaaagaaggacccagatcagtatctttgggtggcttatgcttattttaaaataatatccagttgctgcttgttgcacgaagtccagactcaagagagaatgagcatcattcagataatgcctcactgaaaaaaaaaaancagcagntgaacccacacctcctactctccatgaaattaattgcctatcccaccttaaaaaacatgtnacctgcccccgnttacntgcccggcggccgttttaaaactagtggatcccccgggctgcaggaattcaatntcaancttatcaatnccgcaacctcaagggggggcccggtncccaccttttgttccttttaatgagggttaattgcncncttggcgtaatcatggncatanctnntttngnnnnannnnnnnnnnnnnnnnnnnnnnnnnnnnnnnnnnnnnnnnnnnnnnnnnnnnnnnnnnnnnnnnnnnnnnnnnnnnnnnnnnnnnnnnnnnnnnnnnnnnnnnnnnnnnnnnnnnnnnnnnnnnnnnnnnnnnnnnnnnnnnnnnnnnnnnnnnnnnnnnnnnnnnnnnnnnnnnnnnnnnnnnnnnnnnnnnnnnnnnnnnnnnnnnnnnnnnnnnnnnnnnnnnnnnnnnnnnnnnnnnnnnnnnnnnnnnnnnnnnnnnnnnnnnnnnnnnnnnnnnnnnnnnnnnnnnnnnnnnnnnnnnnnnnnnn

SEQ ID NO: 3741 - DNA, 737 bp, Homo sapiens
  misc_feature 1, 2, 3, 4, 5, 6, 7, 9, 10, 11, 12, 13, 14, 17, 19, 20, 35,37, 39, 45, 55, 59, 213, 224, 263, 306, 425, 477, 562, 577,579, 580, 581, 582, 583, 584, 585, 586, 587, 588, 589, 590,591, 592, 593, 594, 595, 596, 597, 598, 599, 600, 601: n = A,T,C or G
  misc_feature 602, 603, 604, 605, 606, 607, 608, 609, 610, 611, 612, 613,614, 615, 616, 617, 618, 619, 620, 621, 622, 623, 624, 625,626, 627, 628, 629, 630, 631, 632, 633, 634, 635, 636, 637,638, 639, 640, 641, 642, 643, 644, 645, 646, 647, 648: n = A,T,C or G
  misc_feature 649, 650, 651, 652, 653, 654, 655, 656, 657, 658, 659, 660,661, 662, 663, 664, 665, 666, 667, 668, 669, 670, 671, 672,673, 674, 675, 676, 677, 678, 679, 680, 681, 682, 683, 684,685, 686, 687, 688, 689, 690, 691, 692, 693, 694, 695: n = A,T,C or G
  misc_feature 696, 697, 698, 699, 700, 701, 702, 703, 704, 705, 706, 707,708, 709, 710, 711, 712, 713, 714, 715, 716, 717, 718, 719,720, 721, 722, 723, 724, 725, 726, 727, 728, 729, 730, 731,732, 733, 734, 735, 736, 737: n = A,T,C or G
nnnnnnngnnnnnnccntnntggacttactctaantncnacttantatagggccnaatnggagctccaccgcggtggcggccgaggtaccaacctggtctccaaagtcctctgggaatttccacaataccacaggatcttcattttcagaggcatgacatttcactttcaacaccaagtcaaaggttctgtctggatttgccctctgaccagnttctgcttgtnctcccttatctttgttcctcaatctgccagacattgtanaacttaaaacagtccttggagttcagaacaaagaataattgangcagagtgtcaccaacagatggtaatcagtggagtcaaattttcttcagagattctttgaggattctcctttggacttcaagaaagagtgctgtcccgcgtacctgcccgggcggccgntctagaactagtggatcccccgggctgcaggaattcgatatcaagcttatcnataccgtccacctcgagggggggcccggtacccagcttttgttccctttagtgagggttaattgcgcgcttggcgtaatcatggncatagctgtttcccngnnnnnnnnnnnnnnnnnnnnnnnnnnnnnnnnnnnnnnnnnnnnnnnnnnnnnnnnnnnnnnnnnnnnnnnnnnnnnnnnnnnnnnnnnnnnnnnnnnnnnnnnnnnnnnnnnnnnnnnnnnnnnnnnnnnnnnnnnnnnnnnnnnnnnnnnnnnnnnn

SEQ ID NO: 3742 - DNA, 889 bp, Homo sapiens
  misc_feature 4, 566, 670, 724, 743, 750, 751, 782, 827, 832, 833, 836,837, 843, 844, 849, 854, 868, 873, 889: n = A,T,C or G
gggngccgcgtaatacgactcactatagggcgaattggagctccaccgcggtggcggccgaggtacacaggtaaccacatttagatggactgggatgttgccacacatacaagcattgataactggcttctcattacctgaatacattcttctgtcagagcaacagactcagctatgcttctggcaaaattgttcttaattctctattgattaatttattcggtaagtatttattgggtattttctgtctgaaaagtgcgattccaggggctttatgtgtctctggggtgggggtgttatataaatacttataatactgtatccatactcttgaaaagcttagttgggaaggcaaggcatgcaataaggaacacaagaattttaagtcattccacaaccatctgttgaatggctgctattgttagtatcgtgggtggaaactggagaaagcaaaagatgactataataggatctcttttctgggagatgccacagtggacaccgtagttatatgaatgaatgaataaagggacctcccagaatagttcttatacattgatgctctnggggccccaatgccagaattcttgattgaagaaaaccaaattaaacctctttttttggcttgcttcccttgaaaaaagggggtaaatttggccacctcaagganggttttttggccctttttgacccaacattaaaaaaagggaagttgttgagttgnaaaggcttaaaaaggtgtncccttgnncccggggccgggccggtttttaaaaaactangggggatccccccgggcctggcagggaattccgatattcaaagcnttttnnaannccggcnnacccncgaanggggggccccggtnccaanctttttgttccccttn

SEQ ID NO: 3743 - DNA, 805 bp, Homo sapiens
  misc_feature 495, 633, 668, 690, 692, 700, 715, 726, 743, 772, 798: n = A,T,C or G
taatacgactcactatagggcgaattggagctccaccgcggtggcggccgaggtacaaggtctgaggagaaggttgaggtctccccaagacttctctagaacacttggtgagaggcgccatgaggacaggtgatgcttgggcttatagctctgactcaggacatcactgctcaacagcctgaagcccacatccaaaactcatgtcatgctggcaattgaaggggtagcagagcccaaaagtccagaggggctcagcacagggagcagatgtctgtgagcaggagagacagcggctgtagggatcgatgagacttggtaagcatgatgtgctcttgtcagcatagcatctttgagctcacacaataattgatgtagaattgtccatttcagtaaggagtttccacatccactatcttccacgattctcacaagggccttgagtaaatattacctgcatgttatggggtgagaaaggggtagtttagagagctgaanggatttggtgaaggccacataatgagtaagcctgaaatcaaggaccagacccccaggcttctaaatgttagtcttgggctccttggttcatgggactattatcatcccttgtacctgcccggggcgggccgctctaanaactagtggatccccccggctgcaggaatttcgantttcaagcttatcgatacccgncnacctcganggggggggcccggtncccagcttttngtttcccttttagtgangggtaaattggcgccccttggccgttaancatgggccattagcttgttttcctgnggtgaat

SEQ ID NO: 3744 - DNA, 819 bp, Homo sapiens
  misc_feature 3, 4, 5, 6, 704, 750, 814: n = A,T,C or G
ggnnnnggcgcgcgtaatacgactcctatagggcgaattggagctccaccgcggtggcggccgcccgggcaggtacaaacctttgcccttctcaaacctttgctagataaaatcatatcaggttttcacttacatttaaatccttatttaggcatgtgtgcagccttaatttccatattttaagctatattgcaggttacttatagcaatgctagaattcagtgaaatataaataacactttttgagacccactgaagattgtaaacaaatgcttaaaaattgcaaaagtgtaagtaggcagatgttaatagcagtagcaatcatgcatgtatttcattaaaattaaaaatcagtttatatggaaatctgcaaatgtgctaaagactttaaaggacatcttcatcagagttctttgtgacttggagagagaacacctttggagaaaccactgtacctcggccgctctagaactagtggatcccccgggctgcaggaattcgatatcaagcttatcgataccgtcgacctcgagggggggcccggtacccagcttttgttccctttagtgagggttaattgcgcgcttggcgtaatcatggtcatagctgtttcctgtgtgaaaattgttatccgctcacaatttccacacaacatacgagcccgggagcataaaagtgtaaagcctggggtgcctaatgaggtngagcttactcaccattaatttgcgttggcgctcactgcccgctttncagtccgggaaaactgtccgtgccagcctgctttaaatggaattcgggccacccccccgggganaggcc

SEQ ID NO: 3745 - DNA, 786 bp, Homo sapiens
  misc_feature 3, 562, 696, 701, 724, 727, 748, 783, 785: n = A,T,C or G
gtnatacgactcactatagggcgaattggagctccaccgcggtggcggccgcccgggcaggtacaactgtgatctgtcccaacttccttttgctttcagacccccatcagcctttagccaggatccttatacatgcagcaacgaaagcatcctatgaagtcattctaattacgttaccatccagctcagaagtcaccagtgactgccagctaccaacacagacacactggctcctcagagcagaactcatgcctaacttccacaggtagaggactagacaaaggacatactagaaatgtggctgaataacagcaccagaaaagcaaggcagctataatctctccctaaatggcctaaaaaacagtttcttttctaaatggctgctagttttttgacgtgctgcctacaatataaaatactctcaaaaataccaagctacgcaatatttgttcacacctacccaggaactatttcagaggttagaaacactggtgaaggagggagaaggagggagagactcatgataaagaacaggtttctaaaacctaaaataataactacnaaaagaaataacaaaaacaaatcagtcttaagataaacgtgccagtaagaaaaaaaacagataaaattatgacatatcaaacagtaaatcctttgatgtgataagagatcccatttcaaactgagatttcaaanggcanggataacacctgccagatggagnatnctttttaagaatggactggcnctaaggggtaaaaagcagcaacataatacctcggncng

SEQ ID NO: 3746 - DNA, 1154 bp, Homo sapiens
  misc_feature 3, 5, 8, 11, 12, 13, 17, 19, 21, 24, 27, 28, 30, 31, 36,37, 38, 43, 48, 51, 53, 54, 55, 56, 58, 60, 61, 65, 66,69, 71, 72, 75, 84, 85, 86, 87, 88, 92, 93, 94, 167, 429,437, 512, 539, 545, 566, 597, 645, 671, 696, 697, 731, 744: n = A,T,C or G
  misc_feature 755, 766, 777, 786, 798, 801, 802, 819, 859, 868, 877, 883,886, 890, 891, 908, 910, 914, 928, 932, 935, 936, 937, 939,954, 960, 966, 973, 980, 981, 983, 995, 998, 1004, 1005,1006, 1009, 1023, 1040, 1050, 1052, 1066, 1070, 1071: n = A,T,C or G
  misc_feature 1073, 1078, 1080, 1085, 1088, 1099, 1110, 1113, 1115, 1121,1122, 1127, 1129, 1130, 1140, 1141, 1143, 1146, 1151: n = A,T,C or G
cgntntgnttnnntgtntncnctnctnnannttaannnaatangtggnttngnnnntntnntggnnttntnntantatattcannnnntttnnnggggtcttgccttatcctctcactatagggcgaattggagctccaccgcggtggcggccgaggtacagaactnaaacaccactatttgttcgagatgaaaaaaagcatatataggaagccttcaaaatgaaatggtcaagggtgagtttacacagatagatagatttaggtctcttccttttgctttgtgaaagcatctagtgttttaggtgtcagagagggagatatccttacaaagcagagattatcattacaggtttacatttcttacaaagagtttcaaaataaacaggtaaatgccaaaaacatatattttggtgacggattaattcacntagttggnctattcaacttaactttgtttcctaatggagattaaattcatgcaccaaataacccaatcccaaaaatttaaacncataaagaaatacttcacccagaaagngatggntccttttacaagaagcagganccccccaaaaatgtaaagagttcacttgaanaaggtggggaagctcaaaaccaaggaggaaggacctttattttcgcantcataaaagcccaaactttgttaccntcgggcccgcttcttaagaacctanntgggattccccccgggggctggcaagggaaattngtattaattcaanccttttattcngattacccggncggacccttcntaggggggngggggcccccgngtnnccccaatctttttttgnttcccctttttaagtcggagggggttttaattttgccacnccttggggngataaaatncattgnggnaatnngccctggctttcccctngnggcnggaaaatttgtttntttnctnnntnaacaaattgcccccnaccaancaattncggtaanccctggnnangccataaaaaanggngtaaannnccntggggggttgcccnaaattggaggtgcagcnaaaccttcananttaaaatttgccgnttgnngncttcncntgtcnccnctttttccaantccgggaaaanccngntctttnnccatntnnatttttaatnntnacntcgcnacc

SEQ ID NO: 3747 - DNA, 879 bp, Homo sapiens
  misc_feature 641, 714, 761, 769, 778, 791, 793, 820, 821, 825, 832, 844,847, 858, 861, 868, 879: n = A,T,C or G
gtaatacgactcactatagggcgaattggagctccaccgcggtggcggccgaggtactcaagccacctgcctgtcatggccccccaaaatgctgggattgcaggccaccataaccggtcatcggggcaactatccttcagggcttcctccagtagggctccccaggttggccttgagggccacaataaaaaatctgacttagctatactccttccctgtccccaaccacagttattcttgtggatgaggcaaatggcagcaggacagctggagtataccagagttgactcatttattttatgcatgcttagtgtggcatccctggggacatgaaattccagtgaaatccagtctttgtgctggagaagctcatagatctgtggaggaggcagatgcccacccactcactgtacctgcccgggcggccgctctagaactagtggatcccccgggctgcaggaattcgatatcaagcttatcgataccgtcgacctcgagggggggcccggtacccagcttttgttccctttagtgagggttaattgcgcgcttggcgtaatcatggtcatagctgtttcctgtgtgaaattgttatccgctcacaattccacacaacatacgaagccgggagcataaagtgntaaagcctggggtgcctaaatgagtgagctaacctcacattaattgcggttgcgcctcactggcccgcttttncaagtccgggaaacctgttggtgccagctgcatttaatgaatccggnccaacccnccggggaanaggcggtttgcgnanttggggcgctctttccgctttccttgnnttanttgaatncgcttgggcttnggnccgtttcgggntgncgggggngcgggtttcan

SEQ ID NO: 3748 - DNA, 928 bp, Homo sapiens
  misc_feature 179, 197, 280, 305, 476, 480, 518, 533, 538, 567, 571, 573,581, 599, 621, 623, 625, 638, 670, 686, 694, 696, 711, 714,730, 743, 747, 750, 763, 764, 767, 772, 782, 790, 792, 799,800, 809, 813, 814, 820, 824, 831, 833, 840, 844, 848: n = A,T,C or G
  misc_feature 850, 852, 853, 855, 863, 865, 867, 870, 875, 877, 880, 886,893, 896, 911, 913, 916, 917, 927: n = A,T,C or G
ggagctccaccgcggtggcggccgcccgggcaggtactgatatgctgggcaagtctactgaggcttaaccttgtggttaactacttggaaaatacagaattggctagtgagccacagacccatttgaggccaagccatatggcaagacctttgggaaataggtcatcaaaaagaggtanctatttatcatgtgtcangccatatgcctttggccacccctagtaatgatggggcagatgccttggctaaggtcagatggtcagagtcagcaccaacacangatgttgaccttgtggctacaccgnaaactgggacatgcagggggtaaactgatgcaacaattcaataagtgttggggtctgtcccttcccaagcaagacatttttgaggcttgtcagaaatgcctggcattgtgttcagacatatcctaaaaagaggcagctgcccggtgttatacaacaagtaacaatagggtnagtngccctttgaccagggtgggaaagttagactaacatcgnggcccgctgccaaantcgcngagggttataccgcattgccactaaacgntttntngaacatgngctcaacaaggcccttgntttgtttcacccttaccccttngnangggtgggccaaanccaaacaagtaacacccatcccatggcccctncaaacactttaatggnttcccctngntttgggtcgaccctnttnggcccattttgaagangtgaatagggggnaacncantttttactttggnnaancaggntgccttaggncccggttntngaacctnngtgggatancccnngggctngtanggagttncntttttcnaaanttangngnntnccggtgtnancnttnagggngnggngcccgnggacccnaantttttggttcccttnanggnngggtttattng

SEQ ID NO: 3749 - DNA, 892 bp, Homo sapiens
  misc_feature 464, 692, 705, 731, 752, 754, 758, 759, 771, 772, 778, 781,782, 808, 821, 836, 839, 840, 841, 842, 854, 855, 863, 881,883, 884: n = A,T,C or G
tagggcgaattggagctccaccgcggtggcggccgaggtacaaagaaaccctttgcagacagctcatttatagagagaagctaagtatttatttacttgctactcaatttaaaatacgaccatggcaggcaaccaaccaggagaagagctaaaagtttgaaagcactgcccttttctctactatagaagttacagggtcaagccttggaaaatttccacaaaataaggctttgctaaacatatttaccttatcagaaagattgtatctcaaaaaagttacgtttttcttcaggcaagacaagaaaaactgcctgtcctaatcgacagtacctgcccgggcggccgctctagaactagtggatcccccgggctgcaggaattcgatatcaagcttatcgataccgtcgacctcgagggggggcccggtacccagcttttgttccctttagtgagggttaattgcncgcttggcgtaatcatggtcatagctgtttcctgtgtgaaaattgttatccgctcacaattccacacaacataccgaacccgggagcataaagtgtaaagcctggggtgcctaatgagtgagctaactcacattaatttgcgttgcgctcactggccgggttttccagtcggggaaacctgtcgtgccagcttcattaaatgaaatcggcccaaccccccggggggangaggccggttttngcgttattggggccgcttttttccgnttttctcgcttaacttgactncncttnngcttcgggtccnnttcggnttnnggcgagccgggtattaaacttaactncaaaaggcgggtnattaccggggtttcnccnnnnaattaatggggnntacccccnggaaaaaaaaattttggngnnaaaaggcg

SEQ ID NO: 3750 - DNA, 891 bp, Homo sapiens
  misc_feature 343, 402, 462, 507, 514, 577, 608, 653, 661, 667, 674, 677,700, 716, 719, 755, 763, 767, 769, 773, 783, 787, 789, 796,809, 810, 814, 818, 820, 832, 834, 843, 845, 846, 852, 854,878, 880, 885, 886, 891: n = A,T,C or G
ggcgaattggagctccaccgcggtggcggccgaggtacctttcctaaagtgtggtgaccagaatttggcacagtgagggaaggttccagagccctttagtgttatcgggggcacagagcttgggctttggagtcgctcagatcttgagttgatatgcacttctttgtccttgagcaaatgattgaaccttcttggactctcagttcctcattaataaaatgaagatgaaacaagatgagatggactgtgcacatttcctgatgggggctggtatgtgctggtgcccagtgcaaagtggccgctggcagaatggtgagtcaccagtacctgcccgggcggccgntctagaactagtggatcccccgggctgcaggaattcgatatcaagcttatcgataccgncgaccttcgagggggggcccggtacccagcttttgttccctttagtgagggttaattgcncgcttggcgtaatcatggtcatagctgttcctgtgtgaaaattgntatccgnttcacaattccacacaacaatacgagcccgggagcataaaagtgtaaagcctgggggtgcctnaatgagtgagctaaccttcacattaattgcntttgcgcttaactgcccgctttttccagttcggggaaaacctgtngttgccangcttgnatttaantgnaaatccggcccaaaccccccggngaagaaggccgttttnccntatttggggcgcctttttcccttttctttggttcanttacttcncttncncttnggtcctttcngttngnggccgangccggtattcaannttcncttnanaaggccggtaantncgggttatncnnaaaaantnggggggttactccaaggaaataanantttgnnccaan

SEQ ID NO: 3751 - DNA, 898 bp, Homo sapiens
  misc_feature 118, 136, 153, 410, 484, 539, 568, 633, 637, 641, 645, 662,664, 681, 691, 694, 696, 705, 709, 711, 720, 724, 725, 729,733, 738, 740, 741, 749, 750, 753, 756, 761, 772, 778, 782,787, 792, 797, 805, 806, 826, 827, 828, 838, 842, 845: n = A,T,C or G
  misc_feature 846, 849, 862, 863, 867, 880, 882, 886, 888, 889, 891: n = A,T,C or G
gactcactatagggcgaattggagctccaccgcggtggcggccgaggtacgcgggggagaacttcggaggatgttcatgtccaggagcagccccacgccctgtatggtcggtgtctanagcctcacagcaactaanaccaacccagctctcanaagaaggaatgtcaaaatgtcatgttcaattttacattcagtgcctggaatcttttcttcacaattgaaatgaaatgtgctgaaggaggtgaatccatgcattaatcttcagctcacaaaggaaatactacataagaagcaagaccacagactcaagacggacataattggattttttttgccatggcctggaaagaaaggtacctgcccgggcggccgctctagaactagtggatcccccgggctgcaggaattcngatatcaagcttatcgataccgtcgacctcgagggggggcccggtacccagcttttgttccctttagtgagggntaattgcgccgcttggcgtaatcatggtcataagctgtttcctgtgtgaaattgntatccgctcacaattccacacaacatacnaagccgggagcataaagtgtaaaagcctgggggtgcctaatgagtgagctaactcacattaattngcgntggngctnacttggcccggtttccnanattggggaaaacctttncctggcccangcntngcatttatngaantntgggccaancccnngggngaanaaggncnnggtttggnntanttngggcnctcttttccgnttttcntcantttanttgantcccntgaccttnnccccccgccccccccccccnnnaacaggtttnaagnttnnttnaaaaggcggggtnntttntgttaattccaananaaantnngncccccct

SEQ ID NO: 3752 - DNA, 880 bp, Homo sapiens
  misc_feature 593, 617, 735, 754, 766, 784, 786, 788, 796, 827, 829, 835,837, 853, 859, 865, 866, 872, 876, 879: n = A,T,C or G
gactactatagggcgaattggagctccaccgcggtggcggccgcccgggcaggtacagtgaagctttgacctgaggggctcttctgtaggtgaagagtggttaactatggttcctgtgtgcctggggccccccactcctaggactcatccaccccctacccagaacttactagtacctcggccgctctagaactagtggatcccccgggctgcaggaattcgatatcaagcttatcgataccgtcgacctcgagggggggcccggtacccagcttttgttccctttagtgagggttaattgcgcgcttggcgtaatcatggtcatagctgtttcctgtgtgaaattgttatccgctcacaattccacacaacatacgagccgggagcataaagtgtaaagcctggggtgcctaatgagtgagctaactcacattaattgcgttgcgctcactgcccgctttccagtcgggaaacctgtcgtgccagctgcattaatgaatcggccaacgcgcggggagaggcggtttgcgtattgggcgctcttccgcttcctcgctcactgactcgctgcgctcggtcgttcggctgcggcnagccggtatcaagctcctcaaaangcgggtaataccggttattcacaagaatcaagggggataaccccagggaaagaacatgtgaacaaaagggccagcaaaaggcccagaaaccgttaaaaaggccgcggttgcttggcgntttttcataagggttccgnccccccctggcnaagcattacaaaaaattngncncctcaaanttcaaaagtgggggaaaaccccgaccgggantnttaaanantcccaagggggttttncccctnggaagnntccctngggngcnc

SEQ ID NO: 3753 - DNA, 900 bp, Homo sapiens
  misc_feature 353, 498, 540, 543, 572, 607, 614, 619, 630, 632, 658, 699,732, 733, 748, 751, 777, 783, 784, 787, 792, 800, 809, 810,814, 816, 820, 826, 839, 840, 843, 854, 857, 859, 861, 863,868, 870, 872, 880, 888, 890, 891, 897: n = A,T,C or G
ggcgaattggagctccaccgcggtggcggccgcccgggcaggtacttcatggttaccatagaaagcagcaacagcagcaggtgcacgcagtaagttacccataagtagctacacagagagaagacatccatgggagaggcttgtgtgtggtaaccagaactgcctgggttataagtatatgaactacaagactaggcatccctaagacacaataagtgctttttggagcagtgctggagttcttgttctacacaggagagggtaaaagtcagtgcagttcaagtcactcctgccaaagaatgcttggtagccatgggctagtgagacctggagaaatgcacattgcacaacantttaaaatgtattgaagacctactcaatgcttgtcactaaagctggattctgtggggagtatgcaatgtctaaggcactgcctggacattaactgaatgaacaaatgcatgaatggatgaacatattaagatggttaaacacatnccaaggccagtggtttcttcaaagtgtggccctggaaccaancancattcagctttcacctagaaatttgtttnagaaaatgaaaaatcctcaaaaccccacccggganacttatnggaanccgggaaactngnaggacagttcttggtttcaataccanatatttgaaaacaaagccctccagggtgacttggccccttngttgaggaagcccccaaaaaagaaatgggggcnnggcccaggtaggganganctggaatggatggcccaaacgaaagnaagggnncangaaanacctaaanaggtggggnngggngnttcnaaaacnaatttttggcagnntantttaagggccntcntntncnttttngncncttttttnaaaaaaancnnttatcnttg

SEQ ID NO: 3754 - DNA, 872 bp, Homo sapiens
  misc_feature 2, 6, 7, 8, 9, 10, 67, 70, 72, 75, 85, 89, 99, 109, 111,114, 116, 122, 123, 152, 163, 165, 173, 174, 175, 177, 181,186, 188, 195, 196, 197, 199, 207, 208, 212, 214, 215, 218,220, 222, 228, 231, 232, 234, 237, 239, 241, 242, 249: n = A,T,C or G
  misc_feature 254, 255, 258, 260, 267, 270, 275, 276, 277, 278, 281, 283,284, 289, 291, 295, 303, 308, 309, 314, 315, 316, 320, 322,323, 324, 329, 333, 335, 336, 340, 342, 347, 350, 352, 358,360, 361, 362, 365, 371, 372, 373, 374, 375, 376, 379: n = A,T,C or G
  misc_feature 382, 384, 385, 389, 405, 408, 410, 465, 493, 525, 526, 527,557, 571, 573, 669, 706, 722, 737, 791, 792, 800, 804, 809,815, 818, 819, 822, 826, 828, 829, 830, 832, 834, 843, 847,865: n = A,T,C or G
gntagnnnnngacgcgcgtaatacgactcactatagggcgaattggagctccaccgcggtggccggncgncnggncaggtgctcntggncttcctgctngggctgtatngnaancnggcttnntcacagctcatgattacctcacgaaatgnaggctctaaangntcaatgannnangctnttctnancagactnnngntcatggannccanannagntnanaccttngannangtnangnntgctgtntatcnnctnantgagaangcnattgnnnntgntnntctcnangaanacaagaanctctnnttttnnnacgntnnnctganaaangnnattnancaacngananactaantnnnttntgcaannnnnnaanacntnncgangcagacactatttacntangnggatctcggccgctgggagcgaattcttatcaagcttatcgataccgtcgacctngagggggggcccggtacccagcttttgntccctttaatgagggttaattgcgcgcttggnnnaatcatggtcataccttgtttccttgtgtngaaattgttatccngnttcacaatttccacacaacattacgagccggggagcataaagtgtaaagcctggggttgcctaatgagtgagctaacttacattaattgcgttggngctcactggccgctttttcagtcgggaaaacctgtcntgccagcttgcatttnatgaatcggccaacnccccggggagaaggcggtttgcgtatttgggcgctttttcgctttcttgcttanntgactttnttcnccttnggtcanttnnggntgcngnnnancnggtttcaancttnacttcaaaaggcggtaanttccggt

SEQ ID NO: 3755 - DNA, 890 bp, Homo sapiens
  misc_feature 2, 3, 4, 5, 6, 7, 8, 20, 575, 636, 672, 685, 692, 695, 706,710, 721, 722, 729, 740, 743, 751, 756, 768, 775, 784, 789,794, 797, 799, 806, 813, 816, 817, 819, 821, 823, 825, 828,829, 830, 831, 846, 860, 861, 863, 867, 868, 869, 870: n = A,T,C or G
  misc_feature 874, 883, 888: n = A,T,C or G
gnnnnnnntttaaagccttntaatacgactactatagggcgaattggagctccaccgcggtggcggccgaggtacacactgcgtgcaagactctgctgtgtgcagtcagccctgcatcgtttctaaccagttatactggccttactttcatcatctttgaggccagagctacacatgttgatgccgaagagtggaaggaaggagagcagagagtaaagggggtagattatgtagattatacagacatgagcgagggagggtcacagatactgaacaaccagtgagttcccctatgtggattgccagaacatgaaatatctgagaagaaaacaaaattgtcttacaaggtagtagacgtctgggtaaactgtgatgcttgcaggatcggtacctgcccgggcggccgctctagaactagtggatcccccgggctgcaggaattcgatattcaagcttatcgataccgtcgacctcgagggggggcccggtacccagcttttgttccctttagtgagggttaattgcgcgcttggcgtaataatggtcatagctgtttcctgtggtgaaattgtatncgctcacaattcccacaacatacgagccgggagcataaaagtgtaaagcctgggggtgccntaatgaagtgagctaacttcacattaattgcggtgngctcactgaccgnttttcanccngggaaaacttntctntgcccacttgnntttaatnaaattggcccnaancccccggngaaanaggcggttttgncttattnggggccttntttcngtttnccncnctttaantggaatnttnntnanantnggnnnnttttggggttggggngggggggggttttnngntccnnnnaaanggggggaanttctntt

SEQ ID NO: 3756 - DNA, 889 bp, Homo sapiens
  misc_feature 2, 3, 4, 5, 6, 618, 621, 661, 689, 706, 730, 733, 756, 762,763, 765, 783, 784, 790, 793, 794, 795, 796, 801, 802, 804,806, 808, 809, 810, 811, 813, 820, 821, 824, 826, 827, 828,830, 831, 841, 842, 844, 847, 850, 855, 857, 859, 860: n = A,T,C or G
  misc_feature 861, 863, 865, 870, 873, 881, 884: n = A,T,C or G
gnnnnngagcgcgcgtaatacgactcactatagggcgaattggagctccaccgcggtggcggccgcccgggcaggtaccgatcctgcaagcatcacagcttacgcagacgtctactaccttgtaagacaattttgttttcttctcagatatttcatgttctggcaatccacataggggaactcactggttgttcagtatctgtgaccctccctcgctcatgtctgtataatctacataatctaccccctttactctctgctctccttccttccactcttcagcatcaacatgtgtagctctggcctcaaagatgatgaaagtaaggccagtataactggttagaaacgatgcagggctgactgcacacagcagagtcttgcacgcagtgtgtacctcggccgctctagaactagtggatcccccgggctgcaggaattcgatatcaagcttatcgataccgtcgacctcgagggggggcccggtacccagcttttgttccctttagtgagggttaattgcgcgcttggcgtaatcatggtcatagctggtttcctgtgtgaaaatggtattccgctcacaaattccacacaacatacgagccgggagcataaagtgtnaancctggggtgcctaatgagtgagctaacctcacattaattncgttgcgcttacttggcccctttttcantcgggaaaacctgtttntgccagcttgcattaaatgaattnggncaaccccccggggagaaggcggntttggnntnttttgggcggcctttttnncttttntcnnnntaaanngnantnnnntngggctcnnggngnnntnnggttggtggnnangcnggntttanantnnncntnaaaanggngggaaatncgnttttt

SEQ ID NO: 3757 - DNA, 856 bp, Homo sapiens
  misc_feature 6, 8, 9, 78, 83, 86, 87, 92, 94, 97, 99, 118, 135, 136, 142,145, 150, 155, 165, 166, 171, 192, 213, 232, 295, 297, 413,445, 498, 507, 584, 591, 592, 593, 595, 596, 604, 614, 646,672, 675, 684, 691, 693, 700, 714, 718, 742, 746: n = A,T,C or G
  misc_feature 759, 778, 785, 787, 788, 789, 795, 803, 816, 828, 830, 834,836, 839, 840, 842, 846, 853, 854: n = A,T,C or G
gatagntnngacgcgcgtaatacgactcactatagggcgaattggagctccaccgcggtggcggccgaggtaccatangtggncanntgatngnatngnaagggagggatctttaaancttgcctaagatgttannatatanggnctganattgnaacacaagcnntctgnttctagagtccctgtatcatntttggtatccttcaccaaggnaaggatggtctctttcagncttagttttctgacactttgttgttatttttaagttttagatgaacagttgttgaatgttatnanatgcttttcaaacatctgttggaatgaccctgtcattttcctttggtctgttaatatagtaattagcagtatcttttctcattttgaactgtgcttattttaggctaaatacttgntagcattcacactttggttttgttttcaaatntatttagacttttctctaaccatactacaaaaaaatgttaaaggcagtttttnaggcccaangaaaatgataccagatggaaatcggatctatacaaaggaattaaaagctctagaaatggtaaccacacactgaaaantaaattnnnannataaagtncctgcccggncggccgctctaaaaactagtggatcccccggncttgcaggaattcgatatcaagcttntcnatcccgtcnaccctcnanggggggncccgggtcccagcntttngtttccctttaaagaagggttaantggngccgctttggccntaatcatggtcatagctgnttccctngnnnaaattngttttccnatccccaaattgncacaaaaaaatnanaaancncgnngnggcntcaaatnngt

SEQ ID NO: 3758 - DNA, 840 bp, Homo sapiens
  misc_feature 657, 668, 748, 751, 762, 765, 770, 787, 791, 792, 802, 803,806, 808, 812, 817, 822, 824, 834: n = A,T,C or G
ggcgaattggagctccaccgcggtggcggccgcccgggcaggtacacactagctgataagacactgttgcccataatgtctatttattggatcagcaatttataagtcccacattctcatgccacatagctctacacagctgcaaaaatataccatagcttgcaggtgatcattggtttgataaaagatattgagtcgctcatcttgtgaaagtgatctttgatataagaggagcatcagcggggaagctcacatgtcccgtggctcacacaccagaaggtatttgtgtcttgtcattgtctgtctggcagtccatggcaatggctttttcagagaggcctgttttgtggttaactgtgtgtacctcggccgctctagaactagtggatcccccgggctgcaggaattcgatatcaagcttatcgataccgtcgacctcgagggggggcccggtacccagcttttgttccctttagtgagggttaattgcgcgcttggcgtaatcatggtcatagctgtttcctgtgtgaaattgttatccgctcacaattccacacaacatacgagccgggagcataaagtgtaaagcctggggtgcctaatgagtgagctaactccattaattgcgttgcgctcactgccccgcttttccagtcnggaaacctgtngtgcccagctgcattaatgaatcggcccaccccccggggaagaggcggtttgcgtatttgggggcgctttttccgctttnctngcttaattgantcncttgngcctcgggcgttcgggnttgnnggggagcggnnttnancctnactcnaaaangngggggatacngggttt

SEQ ID NO: 3759 - DNA, 876 bp, Homo sapiens
  misc_feature 84, 113, 160, 205, 209, 361, 463, 472, 483, 497, 510, 543,545, 603, 611, 627, 630, 689, 691, 705, 719, 730, 751, 752,764, 771, 780, 786, 787, 790, 795, 800, 801, 808, 815, 816,827, 836, 851, 854, 858, 862, 876: n = A,T,C or G
gtaatacgactcactatagggcgaattggagctccaccgcggtggcggccgaggtacttttttttttttttttttttttttttngagaaatggggtctcactatgttgcccanactgttctcattctcctgggctcaagcagccctcctggctcagcctntcaaagtgctgggattacaggtgtgaggaattgcacctggcccanactnttattaaagtaaaacaggatggaataggtaaaaaatgccagcagataatcaaaatattagcctaagagcccatgtgtaataccacaattcctagcaataatttgagttgagctttctcatattttcctttccatgtaaaagatactcatctnttccccttgtttaccatatccagccccactagctgccttttaggtttttgattaccacttaggatctggtatgcgaaattccttctgcctaaaaagcctttntccccagtnatcacattggngtctccttgttggntcttttgttatanaacttaaccgtcatttttcagagaggttttctntnactaccctatccaaagtgctcagtgaatgttaattgctgtcatttattaaatgagatntcccttgntattctttgggctgancancctgtatttccttcatagcattgaccacattttggaaatttcttttggttattggctgncncttacaagctaganttttaaagttttgngaggtcccggnaacccttgtttttttttttcnnaccttggttttncccattnattttaatnaggggnnttnttgtnccttnnccggggnggggccnntttaaaaaaantttgggatnccccccggggggtgngangaantttnaaattttaaacatn

SEQ ID NO: 3760 - DNA, 880 bp, Homo sapiens
  misc_feature 6, 9, 10, 11, 12, 72, 74, 78, 79, 84, 87, 91, 93, 96, 103,104, 106, 107, 108, 110, 114, 118, 121, 132, 134, 136, 147,153, 158, 162, 166, 167, 192, 197, 226, 230, 238, 270, 320,428, 457, 467, 486, 495, 507, 517, 524, 555, 558, 594: n = A,T,C or G
  misc_feature 598, 642, 649, 680, 685, 686, 709, 710, 711, 724, 725, 726,736, 740, 741, 763, 765, 770, 772, 779, 782, 787, 791, 798,799, 800, 811, 813, 814, 848, 854, 861, 866, 869, 870, 872,876: n = A,T,C or G
gatagnttnnnngacgcgcgtaatacgactcactatagggcgaattggagctccaccgcggtggcggccgangnaccnnttccnaanctgngnctnaagaggnntnnntngctnctgnacnctttggaactntntnactgatgtgancacgtnaacangctnactnngtggaaggggagcagctaaatggancaganccaagtcattttacttgagtctggccctntcanaccagccntcagccatctgaccaaaaatgtgttaagacanaacagccaacatcagcagagccacctacctaacttgtacctgcccgggcngccgctctagaactagtggatcccccgggctgcatgaattcgatatcaagcttatcgataccgtcgacctctagggggggcccggtacccagcttttgttccctttantgagggttaattgcgcgcttggcgtaatnatggtcatanctgtttcctgtgtgaaatngttatccgntcacaattccanacaacatacnagccggnagcataaagtgtaaagcctggggtgcctaangantgagctaactcacattaaattgcgttgcgctcactncccncttttccattcggggaaacctgtcgtgccaagcttgcattaatngaatccngcccaacacgccgggaaaaagccggttttcnttatnngggcgcttttttcgcttttcttnnnttacttgaacttnnntttagcttcngttnnattcggctttgcagccaaaacnanaattnanccttacnttnaaaanggcnggtaatnnncggtttttccncnnaaatttacgggggtttaaccccaataaaaaaacntttttnccaaaangggcnaannanaaangcct

SEQ ID NO: 3761 - DNA, 860 bp, Homo sapiens
  misc_feature 2, 6, 7, 8, 9, 95, 113, 156, 196, 200, 666, 679, 723, 729,730, 751, 755, 762, 764, 767, 776, 785, 786, 795, 796, 812,819, 837, 849, 858: n = A,T,C or G
gntagnnnngagcgcgcgtaatacgactcactatagggcgaattggagctccaccgcggtggcggccgcccgggcaggtacaagactccacattnttttagtttgatataggnacatttcatgcttcataggaaacaattaatttcatctattaanagaaaccaaatgagaaaacctccaactaaatctatcactnattnaacctataagcccagaaaaaaatttagcttcttcttgcctcggtttatctacattagctcctgaacgaatacactggggcagggagaaagtcattttctagtcttgttgccatacaaacttgagttcttctccctgaataacaggagtaacagtccaattttaccagaacaccagttctgagagaatcaactgaaggaacaaggtatcacttcagccactgtgtctttctaaaagtttctttcagggatgataccttaatttatttttccattgcctttctctttctcctaaaatactaagtatacaccaggttggataaataattggcattcagtaaatacacttattattatctttttaatccataaagatctttctctttttgtgtgtgggttattttttatgacacggtcttgctctgtcacctgggctggagttgcagtggcactccacaccaaaaatggntcactgtactttnacctcctggactcaagcccatccctttacctcgggcggtctagnaactannggatccccccgggcttgggangaanttcgatntnaangcttatttnattcccgtnnacccttggnngggggggggccccggntacccanctttttggttcccttttnagggagggtttnattggcgcncg

SEQ ID NO: 3762 - DNA, 930 bp, Homo sapiens
  misc_feature 374, 376, 378, 379, 380, 381, 382, 383, 384, 386, 388, 389,390, 391, 392, 393, 395, 396, 397, 398, 399, 400, 402, 404,406, 407, 408, 409, 410, 411, 414, 416, 417, 418, 419, 420,421, 422, 423, 426, 427, 428, 429, 430, 433, 435, 436: n = A,T,C or G
  misc_feature 438, 441, 442, 443, 444, 445, 446, 449, 451, 452, 453, 454,455, 459, 460, 461, 463, 464, 465, 466, 469, 471, 472, 474,475, 476, 481, 483, 484, 485, 486, 489, 493, 494, 495, 496,497, 500, 501, 504, 505, 506, 507, 508, 509, 510, 511: n = A,T,C or G
  misc_feature 512, 513, 515, 516, 517, 518, 520, 521, 523, 524, 526, 527,528, 529, 532, 535, 536, 537, 539, 540, 541, 546, 548, 552,554, 555, 556, 557, 558, 559, 560, 561, 562, 564, 565, 566,567, 568, 569, 570, 571, 572, 573, 574, 576, 577, 578: n = A,T,C or G
  misc_feature 579, 580, 581, 583, 584, 585, 586, 589, 590, 592, 594, 595,596, 597, 599, 600, 601, 603, 604, 605, 606, 607, 608, 609,611, 612, 614, 615, 616, 622, 623, 624, 625, 626, 627, 630,636, 638, 639, 641, 642, 643, 644, 645, 650, 651, 652: n = A,T,C or G
  misc_feature 654, 655, 659, 660, 662, 663, 664, 665, 666, 667, 670, 671,672, 673, 674, 675, 677, 678, 682, 683, 684, 685, 686, 687,689, 691, 692, 693, 694, 695, 698, 700, 702, 703, 704, 705,706, 707, 709, 710, 712, 713, 714, 715, 716, 717, 718: n = A,T,C or G
  misc_feature 719, 720, 722, 724, 725, 727, 728, 730, 733, 735, 736, 738,741, 742, 743, 744, 749, 751, 753, 754, 755, 756, 758, 760,761, 762, 763, 765, 769, 771, 772, 773, 775, 776, 779, 782,783, 787, 790, 791, 792, 794, 795, 799, 800, 801, 803: n = A,T,C or G
  misc_feature 805, 807-808, 811-813, 815-816, 818, 820, 822, 825, 832,834-837, 839, 840, 842-847, 849, 851, 853-856, 861, 863-867,869, 870, 872, 874, 876, 877, 879-880, 885, 888-890, 892-894,897-900, 904, 906-909, 914-916, 918-920, 922-924, 926-928: n = A,T,C or G
gcgtaatacgactcactatagggcgaattggagctccccgcggtggcggccgaattggactggagtagctgcagcaactgcgacctggcagcaagtaaccggacgaaatggacagatggccgtggaggagaagcctgacctgactgagggagaggactgatccgaccaggaggggagtccccctgagcctctgggggggcttaggaggtgtcccctcccgggtttcggcaccaatgaaaggcaatggaagggcaccatggatcaataaggctgagaggtgagaaaaagagggcaaaaatcttctttattgagccctcgggcgaggttcactggtccgcagggggagggccagggaagtcgcgcccccgcgtacntntnnnnnnntntnnnnnntnnnnnncnantnnnnnnttntnnnnnnnntannnnntgntnntnttnnnnnnatntnnnnntttnnntnnnnttntnngnnntattntnnnnttntatnnnnnttnnttnnnnnnnnnntnnnnanntnntnnnnttntcnnntnnnctttntntatntnnnnnnnnntnnnnnnnnnnntnnnnnnannnnttnntntnnnntnnncnnnnnnntnngnnnctttcnnnnnnctntttttntnntnnnnnttttnnntnnattnncnnnnnnatnnnnnntnnttannnnnncnannnnnatntncnnnnnntnntnnnnnnnnnantnntnntnatntnnanttnnnntaatncncnnnngntnnnntntctntnnnannttnttnntatnttnnntnncttnnntntncnnacnnntnntnantnttnccctttntnnnntnntnnnnnntntntnnnnaaatntnnnnngnnanantnntnnatatnctnnntnnnatnnnngttntnnnnttttnnngnnnannnannncc

SEQ ID NO: 3763 - DNA, 914 bp, Homo sapiens
  misc_feature 2, 22, 23, 69, 72, 77, 83, 201, 407, 451, 475, 494, 504,545, 556, 583, 626, 642, 655, 656, 662, 664, 677, 684, 693,697, 713, 715, 718, 719, 747, 755, 780, 788, 789, 794, 800,802, 803, 824, 833, 843, 846, 856, 863, 864, 870, 875: n = A,T,C or G
  misc_feature 878, 889, 892, 898, 914: n = A,T,C or G
gntagttttgaggcgcgcgcgnnatacgactcactatagggcgaattggagctccaccgcggtggcggnctnacatntgtagngaacaaagatcagaattataaaatcaaaaataaaaatgtagccctatttccaggctgaagtgagctgacaagccacatccactatgtgcctgggggtccctgtcttgggtcattcagnctcccagaactgtccacaaaccagtagacagtttccttctcatcttggagaggtggggagagctggggtcctgagttgaaaggcttgagctactggcaatggctctgacatgaaaacaagccctatctctctgtacctcggccgctctagaactagtggatcccccgggctgcaggaattcgatatcaagcttatcgatacccgtncacctcgagggggggcccggtacccagctttttgttccctttantgagggttaattgcgcgcttggcntaatcatggtcatagctgnttcctgtgtnaaattgttatccactcacaattccacacaacatacgaagcngggagcataangtgtaaaagcctggggtgcctaatgantgagctaacctcacattaatttgcgtttgcgcttacttgcccngctttttcaaattccnggaaaaccttgtnngtgccnanctgccatttaatngaaatcnggcccaacngccncgggggaagaaggcgngnttnnccgttaattgggggcgcttctttccgcnttacctcnggctcaactggaacttcgcttgcanctcggtcnnttccnggcttngnnggccaagccgggaattcaatnttcactttnaaaaaggcgnggntattaacggnttttttnncacaanaattnatnggggataacgncanggaaangaaacattttgaaccn

SEQ ID NO: 3764 - DNA, 839 bp, Homo sapiens
  misc_feature 613, 691, 718, 741, 792, 797, 806, 810, 819, 820, 835: n = A,T,C or G
taatacgactcactatagggcgaattggagctccccgcggtggcggccgcccgggcaggtacgcggggacattcagaggtgagcccagagggggtaaagtggactggggagaacttcggaggatgttcatgtccaggagcagccccacgccctgtatggtcggtgtctagagcctcacagcaactaagaccaacccagctctcagaagaaggaatgtcaaaatgtcatgttcaattttacattcagtgcctggaatcttttcttcgcaattgaaatgaaatgtgctgaaggaggtgaatccatgcattaatcttcagctcacaaaggaaatactacataagaagcaagaccacagactcaagacggacataattggatttttttttgccatggcctggaaagaaaggtacctcggccgctctagaactagtggatcccccgggctgcaggaattcgatatcaagcttatcgataccgtcgacctcgagggggggcccggtacccagcttttgttccctttagtgagggttaattgcgcgcttggcgtaatcatggtcatagctgtttcctgtgtgaaattgttatccgctcacaattccacacaacatacgancccggagcataaagtgtaaaagcctggggtgcctaatgagtgagctaactcacattaatttgcgttgcgctcacttgnccgctttccagtcgggaaacctgtctngccacttgcattaatgaatcggnccacccccggggaggaggccggtttgcgtatttggcgctttttcgtttctngctanttgactttncttnggcttgggnnttcgggttgggggancggg

SEQ ID NO: 3765 - DNA, 867 bp, Homo sapiens
  misc_feature 706, 751, 765, 779, 811, 820, 821, 833, 836, 838, 842, 846,855, 861, 864, 866: n = A,T,C or G
gtaatacgactcactatagggcgaattggagctccaccgcggtggcggccgaggtacgcggggacattcagaggtgagcccagagcgggtaaagtggactggggagaacttcggaggatgttcatgtccaggagcagccccacgccctgtatggtcggtgtctagagcctcacagcaactaagaccaacccagctctcagaagaaggaatgtcaaaatgtcatgttcaattttacattcagtgcctggaatcttttcttcacaattgaaatgaaatgtgctgaaggaggtgaatccatgcattaatcttcagctcacaaaggaaatactacataagaagcaagaccacagactcaagacggacataattggattttttttgccatggcctggaaagaaaggtacctgcccgggcggccgctctagaactagtggatcccccgggctgcaggaattcgatatcaagcttatcgataccgtcgacctcgagggggggcccggtacccagcttttgttccctttagtgagggttaattgcgcgcttggcgtaatcatggtcatagctgtttcctgtgtgaaattgttatccgctcacaattccacacaacatacgagccgggagcataaaagtgtaaagcctggggtgcctaatgagtgagctaactcacatttaattgcgtttgcgctcactgcccgcttttcagtcnggaaacctgtcgtgccagcttgcattaatgaatcggccaaccccncgggggaggaggcngttttgcgtatttnggcgcctctttccctttcttcgctcacttganctcgcttgnnccttcgggtcgntcngnttgnggcnaagcgggtntcaacntcncnt

SEQ ID NO: 3766 - DNA, 814 bp, Homo sapiens
  misc_feature 2, 8, 10, 11, 13, 566, 594, 635, 637, 638, 641, 642, 699,730, 737, 750, 753, 760, 763, 783, 791, 797: n = A,T,C or G
cngctccnanntnactatagggcgaattggagctccccgcggtggcggccgaggtacaaatcccagtgataggcatggctggtctcaagatgggtctggggctgggggtgtgagtgctcagggaactgccatacagcttgaagaagcagaggtgggattccgggctccaaagcctctttccacgccactacttttgccatcttcttaaaaaccatcatttttcacacaattcattagaaatacagaatttctaccctatgacagaattacatgcttataatcaatatattttgtatattgtaaccttttcttatatattattctgttgtaaggtgtaaagggaaaattagaaagaacagaacaggaacgttctatgcattttacatcccttaaaatctcctgcagaatatacagtgattacttagcacaatgccaagtatatggcacactcagtaagctatagttattgttatctgtgttataatattattgcaatttcaacatgatgaaaattgtatttgtaagtgaaggcaatgtgacccagaggttacacaactagatgtcangccccagaactggcctgattcccccgcncatggttaccgcactacactatgctggtattcctacctgtntnnttnnacgcagtacctgccccggccggccgctctaagaactagtggatcccccgggctgcangaatcgatataaaggcttattgaataccgtngaccttnaaggggggggccnggnccccccnccnttttgttccctttagtgggngggttaantggccncccttgggggttaattt

SEQ ID NO: 3767 - DNA, 1145 bp, Homo sapiens
  misc_feature 1, 5, 6, 7, 10, 12, 13, 14, 16, 17, 18, 19, 21, 23, 25, 27,29, 30, 31, 34, 35, 37, 38, 39, 42, 44, 45, 47, 48, 49,51, 52, 53, 54, 57, 58, 59, 61, 68, 69, 72, 74, 75, 76,80, 83, 86, 88, 89, 90, 91, 92, 94, 96, 106, 107, 109, 111: n = A,T,C or G
  misc_feature 113, 132, 213, 222, 253, 341, 361, 397, 415, 495, 503, 589,617, 619, 622, 624, 629, 635, 639, 662, 667, 668, 669, 671,673, 674, 677, 681, 682, 692, 695, 697, 711, 714, 731, 735,736, 737, 739, 744, 745, 746, 749, 750, 751, 752, 763: n = A,T,C or G
  misc_feature 766, 768, 770, 772, 779, 780, 781, 787, 792, 793, 796, 800,801, 810, 811, 814, 815, 817, 819, 826, 829, 830, 831, 839,845, 848, 855, 872, 876, 883, 886, 892, 893, 896, 897, 903,905, 906, 908, 909, 912, 918, 919, 930, 931, 932, 934: n = A,T,C or G
  misc_feature 939, 942, 943, 945, 950, 952, 953, 954, 955, 960, 970, 977,979, 988, 992, 999, 1001, 1003, 1004, 1005, 1006, 1020,1024, 1025, 1031, 1032, 1033, 1037, 1048, 1052, 1056, 1057,1058, 1061, 1062, 1063, 1065, 1066, 1068, 1071, 1075, 1081: n = A,T,C or G
  misc_feature 1082, 1089, 1090, 1093, 1094, 1097, 1099, 1102, 1104, 1105,1107, 1111, 1114, 1120, 1121, 1122, 1125, 1128, 1130, 1131,1132, 1138, 1140, 1143: n = A,T,C or G
ntccnnnaangnnngnnnnantntncntnnnctnnannncangnngnnngnnnntcnnntntactatnngantnnntctntanttntnnnnntntntagagtgctnngncncncgtaatacgactcactatngggcgaattggagctccaccgcggtggcggccgaggtacttttgctctctgtctttgccaatatttacttttgatctttgnttttgcctntatttgcttttgctctgtttaaaacaggctnttcagaaaggcaataaggaagctgcaagaatacatgctgaaaatgcaatccaccagaaaaatcaagcaattgatttcttaagaatgantgctagagttggtgctgtgngcagtcagaggtcaaaatgcagtaacaatgggcagngacttctgccttgatggnacaaattcaaacaccagttttgaaaacactgggatattcaaacaccaacaaaaatgggaaagataaaaatggaggtagcntcttacanccctaataacacccacatcaccttaacatgttggtttagtcaaatggaaaaagaagaacctttgtttatttacttaccttttgggnatgcctaaattattgggaaacataatancnttngnttaanaaaaanagantaaaggttacccttggccccggngtttnnntnanntcntttnngagccacttnttnantttaaacgctattntanatacaaagtcgttggcnaggnnntngagannntannnnttcgtttgganagnantnanattattnnntacatnccttnnagnatgnngagacccgnnganntncntgccccnccnnntagtatancatganctnttagtgncactctctctctcgagnttcntgtgacntgntcttgnnttnnctcgantnncnntgnggcctnntttagcgtatnnntnttcgnganncntttgnannnnggtgngtttcaatanctttgancntctcattangtgntcctggngntnnnngtcttattgatctngatnntcttgnnnaagncgttaattgtngctnatgnnnttnnntnntncanttcnattcannatcgttnncgnnttnanttntnntnactntcngtgcannntancantnnntcctcncncgncg

SEQ ID NO: 3768 - DNA, 466 bp, Homo sapiens
  misc_feature 1, 9: n = A,T,C or G
ntacaactnctattgggcgaattgggccctctagatgcatgctcgagcggccgccagtgtgatggatatctgcagaattcgccctttcgagcggccgcccgggcaggtacgcggggacattcagaggtgagcccagagcgggtaaagtggactggggagaacttcggaggatgttcatgtccaggagcagccccacgccctgtatggtcggtgtctagagcctcacagcaactaagaccaacccagctctcagaagaaggaatgtcaaaatgtcatgttcaattttacattcagtgcctggaatcttttcttcacaattgaaatgaaatgtgctgaaggaggtgaatccatgcattaatcttcagctcacaaaggaaatactacataagaagcaagaccacagactcaagacggacataattggattttttttgccatggcctggaaagaaaggtacctcggccgc

SEQ ID NO: 3769 - DNA, 837 bp, Homo sapiens
  misc_feature 91, 92, 96, 582, 593, 598, 607, 611, 623, 635, 672, 679,689, 692, 701, 714, 720, 729, 732, 735, 737, 744, 746, 747,749, 751, 755, 762, 766, 768, 772, 775, 779, 783, 784, 786,788, 790, 791, 795, 800, 810, 811, 814, 815, 821, 825: n = A,T,C or G
  misc_feature 826, 835: n = A,T,C or G
gctccaccgcggtggcggccgcccgggcaggtactttcttcagggtatcctgtcttggtagtgaatggaagagggcctggtccctggggcnntgcntaaggcactttgatcatctcactcactgcaaatgtcatgtgaggtttcatggaagtattaagagatccaattaagaagaatagttctgagtctaaaccagcccagagtggcttctctaggggaaactccccgctcagctggtacctcggccgctctagaactagtggatcccccgggctgcaggaattcgatatcaagcttatcgataccgtcgacctcgagggggggcccggtacccagcttttgttccctttagtgagggttaattgcgcgcttggcgtaatcatggtcatagctgtttcctgtgtgaaattgttatccgctcacaattccacacaacatacgagcccgggagcataaagtgtaaaagcctggggtgcctaatggagtgagctaactcacattaaattgccgttgcgctcactgcccgctttcagtcgggaaacctgtcgtgcccagctgcattaaatgaaattcggcccaacnccccggggagnaggcnggtttttgngttnttggggcgcctnttttccggtttncttcgcttcacttgacttcggcttgcgcctcgggtcngttcggnctggcggggnaanggcgggttntcagacttcaccntcaaangggcgggtnatntcngnttttttncnnanancccncgggggngaangnccgnganaaanaacnntntntnncaanagggngccccccaannggnncggaancccnncaaaagggntt

SEQ ID NO: 3770 - DNA, 885 bp, Homo sapiens
  misc_feature 400, 450, 669, 749, 766, 772, 774, 775, 785, 786, 789, 792,793, 804, 819, 823, 824, 833, 836, 837, 839, 842, 848, 865,866, 875: n = A,T,C or G
gcgtaatacgactcactatagggcgaattggagctccaccgcggtggcggccgcccgggcaggtactatcccattttcctttgccatgcacctgtcttcctcttcaggattgatcacaaaatcaaaaccattcctaccagccagaggtgggcacatgacccaggtcagaccagtcacagttcctgattcccggccacagtgcttgatgggggaatgagcatatatcaaaccaggacagtccaagtccttccggggactttgctgccacagttgacagggggaggtatttgcataacttcaccacacacagctaagctggtgatcctgctgcttggcagcatcttcccagcgtacctcggccgctctagaactagtggatcccccgggctgcaggaattcnatatcaagcttatcgataccgtcgacctcgagggggggcccggtacccancttttgttccctttaatgagggttaattgcgcgcttggcgtaatcatggtcataagctgtttcctgtgtgaaattggtatcccgctcacaattccacacaacatacgagccggggagcataaaagtgtaaaagcctggggtggcctaatgaagtgaagcctaactcacattaattgcgttgcgcttcactgccccctttttcagtcgggaaaacctgtngtgcccagctggctttaatgaaatacgggccaacccccccggggagaaggcggtttgcggtatttgggcgctttttcccnttccttggttcaaattnaatcantnngcctcgggcnnttnagnntggcggggagnggggtttaattttantttnnaaggggggngannancgntttttncccaaaaaaaagggggnnaacccccgnaaaaaaaaat

SEQ ID NO: 3771 - DNA, 1384 bp, Homo sapiens
  misc_feature 22, 35, 77, 110, 115, 179, 235, 321, 322, 323, 325, 328,331, 332, 335, 338, 339, 340, 342, 346, 355, 393, 464, 494,504, 508, 543, 568, 591, 601, 612, 626, 633, 655, 670, 689,733, 742, 823, 850, 881, 885, 906, 923, 958, 980, 996: n = A,T,C or G
  misc_feature 1046, 1064, 1073, 1081, 1111, 1125, 1140, 1146, 1155, 1161,1163, 1165, 1168, 1175, 1176, 1201, 1211, 1212, 1221, 1250,1266, 1277, 1278, 1279, 1302, 1303, 1304, 1321, 1323, 1327,1335, 1365, 1379, 1383: n = A,T,C or G
ctcacttataagggggccgaanatttggggaagcntcccacccgcgggtggggccgggcccgaaggtacccccaacnttaaaaaggaccgtttaggggtcaaaaggggtngttancccccattggaggggtggggccaaggaaaaaatggggcctaacaattttttcttaacccccaanaaaaaacttaccgaataggcccctttatttgaaaactttaaagggggttccgaaanggtggggaatttttaagccaagttaaaaacttgaagaagttaaggaaggtggccttttaagtttggaaacaagggcccaaaaaatnnnanaanatnnaanaannntntatnaaaaggttncccttgccccccggggggccgggcccggcttcttaagnaaaccttaggttggggaatcccccccccgggggcctttgcaaggggaaaattttccgaattattcaaaagncttttaattccggaattaaccccggtccgnaccccttcgnaagnggggggggggggccccccgggttaccccccaaacnttttttggtttccccctttttaagnttggaagggggttttaaaatttnggccgcccgncctttgggccngttaaaattccaantggggtnccaattaaggccttggtttttncccttggtgggtggnaaaaaattttggtttttanttccccgccttccaaccaaaatttttcccacccaccaaaaccantttacccgnaaggcccccggggggaaggccaattaaaaaaagttggttaaaaaaaggccccttgggggggggttggccccttaaaattgnaaggtggggaaggccttaaaaccttcnaccaattttaaaattttggccggtttgggcnggcnttcaaactttggcccccggcnttttttcccaagttccngggggaaaaaacccctttgttccgttggccccaanccttggccaattttaaaatggnaaaattcgggggcccnaaaaccgcccccggggggggaaaaaaagggcccggttttttggccgtttnttttgggggccggccttnttttcccgnctttttcncttcgggttttcaactttgaaactttcccncttggccgcttttngggttccgttttccnggcttnggcgggggnaaagancngnttntttcaannctttcaaactttaaaaaagggggcnggggaaattnnccgggtttntttcccacaaaaaaaattttggggggggntttaacccccacgggnaaaaaaaaaannnttttttgtggccaaaaaaaggcnnnaaaaaaaaaaaaagaancnccgnaaaccccntttaaaaaaaggggcccccctttttttttngggccttttttttnccant

SEQ ID NO: 3772 - DNA, 905 bp, Homo sapiens
  misc_feature 200, 563, 566, 674, 681, 685, 709, 715, 728, 763, 776, 800,834, 862, 863, 887, 890, 905: n = A,T,C or G
cgtaatacgactcactatagggcgaattggagctccaccgcggtggcggccgcccgggcaggtacgcgggtagggatgcagaactggccacagtcagggctggccaacaagggatgggatggcaagggaaccagtgggagactgtttacacctttgacttcctcttcacaggtcaaggcaggactgtagcattaggtctnagagatgcaatgaacaggacaaatacacttccccttcatctggacctgaggctctgggcaagtcagtacctcggccgctctagaactagtggatcccccgggctgcaggaattcgatatcaagcttatcgataccgtcgacctcgagggggggcccggtacccagcttttgttccctttaagtgagggttaattgcgcgcttggcgtaatcatggtcatagctgtttcctgtgtgaaattgttatccgctcacaattccacacaacataccagccgggagcataaagtgtaaaagccctggggtgcctaaatgagtgagctaactcacattaattgcgtttgcgctcactggccgcttttcantcngggaaaccttgtccgtgccaacttgcattaatgaatcggcccaacccccccggggaaaaggccgtttgcagtattggggcgctcttttccgctttcttggtttaattnacttcgnttgngcttcgggccgtttcggcttggtnggcgangccggtaatcaancttaacttcaaaaaggcgggtaaataaccgggttnttccacaaaaatnaagggggattaaccccaggaaaanaaacatttttgaatccaaaaaggcccaccaaaanggcccgggaacccgttaaaaaaagggcnnggttggcttggcggttttttcctnaangttcccccccccctn

SEQ ID NO: 3773 - DNA, 920 bp, Homo sapiens
  misc_feature 441, 481, 503, 512, 519, 535, 536, 596, 605, 607, 625, 644,671, 675, 705, 743, 758, 759, 768, 772, 774, 787, 794, 795,808, 822, 843, 844, 845, 847, 854, 855, 857, 859, 869, 870,874, 877, 880, 895, 901, 905, 906, 909, 910, 916, 918: n = A,T,C or G
  misc_feature 919: n = A,T,C or G
tatagggcgaattggagctccaccgcggtggcggccgcccgggcaggtacgcggggacacattcagaggtgagcccagagcgggtaaagtggactggggagaacttcggaggatgttcatgtccaggagcagccccacgccctgtatggtcggtatctagagcctcacagcaactaagaccaacccagctctcagaagaaggaatgtcaaaatgtcatgttcaattttacattcagtgcctggaatcttttctccacaattgaaatgaaatgtgctgaaggaggtgaatccatgcattaatcttcagctcacaaaggaaatactacataagaagcaagaccacagactcaagacggacataatttggatttttttgccatggcctggaaagaaaggtacctcgggcccgctcttagaactagtggatcccccgggctgcanggaattccgatatcaagcttatcgatacccgtccaccctngagggggggccccggtacccancttttgttncctttantgagggttaatttgcnncgcttggcgtaaatcatgggcctagctggtttcctgtgtggaaaattgttattcggcttnacaaaattncnccaccaacaatacgaagnccgggggagccttaaaagnggtaaaagccctgggggtgccttaatngagntgaagccttaacctccacatttaaattggnggttggcggcttcaactttgcccggttttttcaattcngggaaaaaccttgtnngtggccaancttncnttaaattgaaatngggcccnncccccccgggggngaaggggggatttngggaattggggggcctttttnnncnttctttnntntnattaaaattnntttngcntcnggtccttttcaggtngcgggngagnnggnnttaaantnnt

SEQ ID NO: 3774 - DNA, 915 bp, Homo sapiens
  misc_feature 2, 3, 4, 5, 7, 34, 39, 44, 45, 51, 54, 259, 464, 607, 658,692, 693, 708, 710, 717, 750, 779, 794, 805, 812, 820, 829,830, 851, 852, 853, 879, 884, 886, 888, 899, 902, 906, 914,915: n = A,T,C or G
gnnnncncgcgtaatcgactcactatagggcganttggngctcnncggagntgnccgcggtggcggccgggggccattgagactgccatggaagacttgaaaggtcacgtagctgagacttctggagagaccattcaaggcttctggctcttgacaaagatagaccactggaacaatgagaaggagagaattctactggtcacagacaagactctcttgatctgcaaatacgacttcatcatgctgagttgtgtgcagntgcagcggattcctctgagcgctgtctatcgcatctgcctgggcaagttcaccttccctgggatgtccctggacaagagacaaggagaaggccttaggatctactgggggagtccggaggagcagtctcttctgtcccgctggaacccatggtccactgaagttccttatgctactttcactgagcatcctatgaaatacaccangggagaaattccttgaaatttgcaagttgtctgggttcatgtctaagcttgttccagctatccagaatgcccccaagaatttaactgggatctggaagaggaaaagaaaactgatggtgttaactgaacccattttgattganacctacacaggggcttgatgtcattcatttgggaaacccgccaaccaaacntggcttatttcccttttgccccgtggggagaatnngggttttttgagaantnttttttnggttaccttgccccgggccgggccgcttttaanaaactaagggggatcccccccgggccttncggggaatttccatnttcaaagcttnttcgaanacccgtgnaacctcggnnggggggggggcccggtccccnnntttttttttcccttttaaaggggggngtaantngncccccttgggnggnaaanaatggggnn

SEQ ID NO: 3775 - DNA, 1069 bp, Homo sapiens
  misc_feature 3, 4, 5, 6, 7, 8, 9, 10, 15, 16, 18, 20, 21, 22, 23, 24,25, 26, 28, 29, 30, 33, 34, 35, 36, 37, 38, 39, 40, 41,42, 43, 44, 46, 47, 49, 51, 53, 54, 55, 56, 57, 58, 60,61, 62, 63, 64, 66, 67, 68, 69, 70, 71, 72, 73, 74, 75,76, 77: n = A,T,C or G
  misc_feature 78, 79, 80, 81, 82, 83, 84, 85, 86, 87, 88, 91, 92, 96, 99,100, 102, 103, 107, 119, 142, 198, 203, 223, 224, 229, 231,233, 234, 243, 267, 333, 353, 414, 537, 615, 633, 742, 765,792, 813, 824, 831, 838, 842, 843, 849, 851, 877, 882: n = A,T,C or G
  misc_feature 888, 890, 896, 897, 905, 906, 907, 909, 920, 928, 931, 948,974, 977, 997, 998, 1001, 1003, 1009, 1012, 1014, 1015,1019, 1020, 1022, 1025, 1028, 1039, 1042, 1044, 1047, 1049,1060, 1065, 1067: n = A,T,C or G
ctnnnnnnnnactanntntnnnnnnncnnnggnnnnnnnnnnnntnnantntnnnnnntnnnnngnnnnnnnnnnnnnnnnnnnnnnnagnnaggnggnngnnatcntttagggagtcnatcgactcactatagggcgaatnggagctccaccgcggtggcggccgaggtacacatacagtttttaaacctaaagttnctggngaaacaagcttgctattacnnagatntntnntgaatgtcntaaagctataaatccactcatcgntgtgtttaaggaggaactgaagcacaattgttaagaacaagtgaattaggtgaatatacattgacnaaaggttgataataaagttngtcaggaatttcaaaaataatttagtgtgacttgaaatctttaaaatcatgttatattaanattaagtaacactttactgatttaaattatttggagtcatttctaagggaaaatactgaaatatcaattgcttaacaagaaagttttaaaatataacggtaatttgggcatcctgggttttcncatgttatgggaaaaagccttaaaccattatttgggggcctggttaatttaaaagggccataaaaaattatttttatngaagaatggtgttccatntgcaaaaatactaacatggatggcacttcaaaaatgcttacctaaatttttcacctaagaaattaaggttacctaaagaagttaatttaaaattaattattttggaagntaattttaaaacttcgaaaattnattgaagggggaaaccaaatttcttgntacccttcgggcccctcttangaaacctaggnggggaanccccccngggnncttggnangggaaatttcccgattttttcaaagnctttnttcggntncccggnncccccttnnnanggggggggggncccccggnacnccccaaaattttttggntttcccctttttgagggggagggggnttnaatttgccccccccttgggnnttnanacatanggncnnaatnncnttnttnccccggggganaanantgngntttcccccccnccccncncc

SEQ ID NO: 3776 - DNA, 889 bp, Homo sapiens
  misc_feature 2, 3, 5, 8, 10, 486, 606, 607, 624, 638, 647, 659, 675, 677,700, 709, 711, 722, 731, 735, 736, 740, 742, 744, 756, 761,763, 773, 778, 779, 789, 798, 810, 818, 821, 828, 829, 830,831, 837, 838, 847, 850, 851, 852, 853, 860, 868: n = A,T,C or G
  misc_feature 883: n = A,T,C or G
gnngnccncntaatacgactcactatagggcgaattggagctccaccgcggtggcggccgcccgggcaggtacaagttacctaccctttccttgcctcagtttcctcctttgtgacaatggggacaataacagaaactgccacacaagagggatgttagagaactgaccaagcgaatgtaagtaatgacttggagcaacgtatggctaagagtaagttaggggttgttacgatgactttcctgagataaacagggagatcttttagctgtgggtcaagtgcaggaggacagtggagctcaaggcctaatggaaactaacactaattgtacctcggccgctctagaactagtggatcccccgggctgcaggaattcgatatcaagcttatcgataccgtcgacctcgagggggggcccggtacccagcttttgttccctttagtgaggggttaattgcgcgcttggcgtaatcatggtcatagctgnttcctgtgtgaaattgttatccgcttcacaattccacacaacataccagccgggagcataaagtgtaaagcctggggtgcctaatgagtgagctaactcacattaattgcttgcgctcanntgccgctttttcagtcngggaaacctgtcgngccagcttnattaatgaattnggccaacccgcggggnanaggccgttttgcgttttgggccnctctttcgntncttggcttaantggactccnttgnncttngngnttttcggttggngggcnanccggttttanccttnntttaaaaggnggggaaatnacggggttttcnaaaaaaantcngggggtnnnncggggnnaaaaaaaanttnnnnccccaangggccccnaaaaagggccccaanccccct

SEQ ID NO: 3777 - DNA, 896 bp, Homo sapiens
  misc_feature 2, 3, 549, 679, 681, 684, 686, 693, 758, 778, 782, 789, 797,801, 803, 807, 812, 814, 815, 831, 835, 836, 843, 849, 852,863, 874, 875, 876, 878, 881, 886, 888, 896: n = A,T,C or G
gnngacgcgcgtaatacgactcactatagggcgaattggagctccccgcggtggcggccgcccgggcaggtacgcggggacgttaagaactggacttacaagatggataggacctggtggcagctgtccttgaggaagccagagcctggagagacagatctcatgttatagcagagtacctcggccgctctagaactagtggatcccccgggctgcaggaattcgatatcaagcttatcgataccgtcgacctcgagggggggcccggtacccagcttttgttccctttagtgagggttaattgcgcgcttggcgtaatcatggtcatagctgtttcctgtgtgaaattgttatccgctcacaattccacacaacatacgagccgggagcataaagtgtaaagcctggggtgcctaatgagtgagctaactcacattaattgcgttgcgctcactgcccgctttccagtcgggaaacctgtcgtgccagctgcattaatgaatcggccaacgcgcggggagaggcggtttgcgtattgggcgcttcttnccgctttctcgctcactgactcgctgcgctcggtcgtttggctgcggcgaagccggtattaagctcacttaaaagcggtaataccggttattccacaaaatcaagggggataaccccaggaaaagaacantnttnancaaaaanggccagccaaaaaggccagggaaccctaaaaaaagggccgcgttttgcttggcgttttttccatnaaggttccgccccccttggncggngctttanaaaaattngacncnttanttttnannggggggggaaaccccncccnngattttnaaaaanaanaggggtttttnccccgggaaannncnctnggggncntttttttn

SEQ ID NO: 3778 - DNA, 884 bp, Homo sapiens
  misc_feature 583, 614, 620, 634, 643, 659, 664, 679, 695, 699, 702, 716,721, 722, 723, 739, 740, 751, 757, 758, 762, 766, 767, 788,799, 800, 808, 814, 816, 829, 832, 833, 834, 846, 857, 860,863, 864, 878: n = A,T,C or G
gtaatacgactcactatagggcgaattggagctccaccgcggtggcggccgcccgggcaggtacttaccggggagcacagtggactaggggatgcccttgataatgacggtttcctaggtgcaagatcagagcatgtgcctacaccttgtgccctgatgccgaggtggagaccattgggaaataattaatagatatttttctggggggaaatcacaagtcactgaggtgtttgtttgtttgttaggcagtgctagagcttgaagccactcaagccagttggggaggaaagggatgcggaggtacctcggccgctctagaactagtggatcccccgggctgcaggaattcgatatcaagcttatcgataccgtcgacctcgagggggggcccggtacccagcttttgttccctttagtgagggttaattgcgcgcttggcgtaatcatggtcatagctgtttcctgtgtgaaattgttatcccgctcacaattccacacaacatacgagccgggagcataaagtgtaaagcctggggtgcctaatgagtgagctaactcacattaattgcgttgcgctcactgnccgtttccagcggggaaacctgtcgtgccanctgcanttaaatgaatcggnccaaccccnccggggagaaggccgntttgnggtattgggcccctnttttccctttcttggnttanttnaaataatttggccntgggnnnttttggggtggggggnnagggggttttnactttnntttnaaannggggggatttccggttttttnccccaaaaatnngggggttnaacccncnaaaaaaaaatttntgnnnaaaaggcccccnaaaaaggcccncanccnnttaaaaagggcccntttttt

SEQ ID NO: 3779 - DNA, 582 bp, Homo sapiens
  misc_feature 555: n = A,T,C or G
gactcactatagggcgaattggagctccccgcggtggcggccgcccgggcaggtacccaagcttcacagccctgtctctgccatggagagcaggcccacacactgctgcctgctggagcaaccgtgctggtcacagggccagaggcagagagccctaacaagcagtcagggcgctaatgaggaaggggggacaacctgtcctctacagaaaataatgagattaatatgttcaacaactcccatccagaatccagcaggaagttaaaccaaacgacacatgattctctgacgaagaaataagaatacggttgactggttttttatatttatttacctgaaagcttctaatgtttctaactagtgacatatttcaggccaggaattctgtttgcctagatcatgatgtctaaacactgcacacttgaccaactttggatccaaataactagctttgtatgctcttgggccctgcagtacctcgggccgctctagaactagtggatcccccgggctgcaggaattcgatatcaagcttatcgataccgtcgaccctcnagggggggcccggtacccaactttttg

SEQ ID NO: 3780 - DNA, 586 bp, Homo sapiens
  misc_feature 76, 159, 287, 321, 498, 537, 540, 547, 564, 576, 581, 586: n = A,T,C or G
gactactatagggcgaattggagctccaccgcggtggcggccgaggtacacacacgttaaccacaaaacaggcctntctgaaaaagccattgccatggactgccagacagacaatgacaagacacaaataccttctggtgtgtgagccacgggacatgngagcttccccgctgatgctcctcttatatcaaagatcactttcacaagatgagcgactcaatatcttttatcaaaccaatgatcacctgcaagctatggtatatttttgcagctgtgtacagctatgnggcatgagaatgtgggacttataaattgctgatncaataaatagacattatgggcaacagtgtcttatcagctagtgtgtacctgcccgggcggccgctctagaactagtggatcccccgggctgcaggaattcgatatcaagcttatcgataccgtcgacctctaggggggcccggtacccagcttttgttccctttagtgagggttaantgcgcgcttggcgtaatcatggtcatagctgtttcctgngtnaaattgntatccgctcacaattgnacacaacatacnagccngggan

SEQ ID NO: 3781 - DNA, 801 bp, Homo sapiens
  misc_feature 1, 5, 7, 8, 9, 11, 12, 15, 17, 20, 22, 23, 26, 29, 32, 34,37, 38, 42, 43, 45, 48, 51, 52, 53, 54, 56, 57, 58, 60,61, 63, 64, 65, 68, 69, 70, 71, 74, 75, 78, 82, 83, 87,88, 89, 91, 93, 100, 101, 115, 120, 479, 588, 610, 615,617: n = A,T,C or G
  misc_feature 626, 636, 645, 654, 656, 660, 667, 677, 678, 679, 688, 700,702, 715, 716, 733, 746, 758, 769, 784, 795, 796: n = A,T,C or G
nccancnnncnntcnanttnanntantcnccngntannacgnntncanctnnnncnnntnntnnnctnnnnatnnctnttannaatnnnangnggtattnnatcatatacgactnactcnactcactatagggcgaattggagctccaccgcggtggcggccgcccgggcaggtacgcgggtgacggtgtgtaacaggttcaaataaagattaaaaagtcaaacgtgcaccaaggctctcctctgaggccaggcacagagctaggaacaaagggcaagtcatgagctggccaatctgcaatatcgtgaataccctaatcatcctggtttatttacagggtggagctgtatgatctgtaaattcgcttctacatttacatttctgtgattgatcattcagcctaattagagttttgtttggaatgtcaaaatgtttatggggaaaagacatcagggagccaaggaaaccattggggactnggggaagtcttaagccacaaggaatcttgcctcattaggccccacttataccaaccaaaacagggagggatatttatggagggggattttctgtgtcccaacttaacantttcacctcccacaacctttgnggttntnttcttcttntttttaggangacgggagntttttttcntntccncccaagnccctggggannntacccttcngggcccgcttcntnagaaaaaccttanngtgggaattcccccccngggccttggcaangggaatttttcnattattccaangcctttaattggaantaccccggggnnaaccc

SEQ ID NO: 3782 - DNA, 786 bp, Homo sapiens
  misc_feature 4, 5, 6, 7, 8, 11, 15, 17, 18, 19, 23, 24, 26, 27, 31, 32,33, 36, 38, 39, 42, 43, 45, 47, 48, 51, 53, 55, 56, 57,59, 62, 63, 64, 65, 66, 67, 68, 69, 70, 72, 73, 74, 81,82, 83, 85, 87, 90, 91, 114, 116, 117, 127, 277, 357, 373,415: n = A,T,C or G
  misc_feature 438, 588, 612, 720, 723, 746, 753: n = A,T,C or G
cacnnnnncantacntnnnatanncnntcannnttntnnttnntntnnatnanannngnatnnnnnnnnnannngtatagnnnangntcnncactgcgtaaacgactcatatangnnctatagggcnaattggagctccaccgcggtggcggcccgaggtacgatggccgggcgcggtggctcacgcctgtaatgccagcactttggaagcctgaggcgggtggatcacttgaagtctggagttcaagaccaggctggccaacatggtgaaacccantctctactaaaaatacaaaacttagctgggcgtggtggcaggctcctgtaatcccaactctcaggagcctgagacagcanaatcgcttgaacctangaggcggaggtttgcaagtgagccaagatttgtgccacttgnactccaggccttggacaacaagnagccgaggactaccgtctcaaaaaaaaaaaaagggataccgatttccttatttaatttaatgacctaaattacttttcccaaagggcccttacctcctggaatatcatcacccatggggtgtttagggattttttggacattattaattnttaggggccacattaaaccttttnaagactaacagcccatgcacttcagaaattttattatccaaaacattttttaccttggacctttaaggaggaggaggaaaattaatttttttcaaaaaaaaaaatggnttntcctttcccttcaaattaatttnccaggcntttttcccacccaaaatttctttttccaccaag

SEQ ID NO: 3783 - DNA, 585 bp, Homo sapiens
  misc_feature 585: n = A,T,C or G
ctcctatagggcgaattggagctccccgcggtggcggccgaggtacacgcctgtagtcctagctactcaggaggctgaggcaggaggatggcttgagctgaggaggcagaggctgcagtgagccaacattgcaacactgcaccccagcctgggcattagagccagacctagtctcaaaaaataaataaaataaaataaaataaaataaaatgtttaataatgcctactcagacaaagaaaggctcaggcaaaagactgagtctgatcttctacattgaggagaccatgttgattagtgttatattcaaaaaaaccaattcccaagtaatgcatacacagctgaaagaaggaagtattccagctacaccctccaagttttctacatctcagtaaacggcatcgccacccacctagaaactgggcatcatttggttcctcgttctcctttttttttttttttgagatggagtctctgttgactccgggttcaagccccgcgtacctgcccgggcgggccgctctagaactagtggatcccccgggcctgcagggaattcgattatcaagctttatcgataccggccn

SEQ ID NO: 3784 - DNA, 590 bp, Homo sapiens
  misc_feature 508: n = A,T,C or G
gtaatacgactcactatagggcgaattggagctccaccgcggtggcggccgaggtacaagttgtctttatgctgcgagataagtcctctcttggtttgagctcccaccttttcagtgaactcttacattttgggggatctgctcttgtaaaggacatcctttctggtgagtattcttttggtttaatttttggtttggttatttgtgcatgaatttaatctcattaggaaacaagttaagttgaatagaccaactagtgaattaatccgtcaccaaaatatatgtttttggcatttacctgtttattttgaaactctttgtaagaaatgtaaacctgtaatgataatctctgctttgtaaggatatctccctctctgacacctaaaacactagatgctttcacaaagcaaaaggaggagacctaaatctatctatctgtgtaaactcacccttgaccatttcattttgaaggcttcctatatatgctttttttcatctcaacaaatantgggtgtttaaagttctgtacctcggccgctctagaactagtggatcccccgggctgcaggaattcgatatcaagcttatcc

SEQ ID NO: 3785 - DNA, 581 bp, Homo sapiens
  misc_feature 520, 530, 534, 537, 539, 540, 541, 543, 544, 546, 549, 552,553, 554, 570, 581: n = A,T,C or G
atagggcgaattggagctccaccgcggtggcggccgaggtacaacagtcctaggaactcttactgtctgtagtggagatagggaaacaggtttataaggaattaataatttattgctcaagagtaagagtaaatgaataactaggagataatgaatgtcctggccatttattctcaaagagcatgaatatacagaataggctgatttgagacattatactgctttcttcctggaaactgactttggtggaatggtcaagctcttactttagaagtcataaagagctgtgtatggagaaggtaacagtcggtatgttaaaacaacagatccggccatagaataggtgcctaatggttctgaaatataagcaaacatgctggacaactttatcattatttctggcatggctggctctggggctcatgtttgtgatcccaactctctgggaggcccgaggcagggagattgcttgagcctaggagtttgagaccagcccgggccgacataacgaaaccatgtntttacaaagnaatnganannncnntnaanaannngttccctgcccggggngggcccgtttn

SEQ ID NO: 3786 - DNA, 586 bp, Homo sapiens
  misc_feature 552, 564: n = A,T,C or G
gactactatagggcgaattggagctccaccgcggtggcggccgcccgggcaggtacacactagctgataagacactgttgcccataatgtctatttattggatcagcaatttataagtcccacattctcatgccacatagctctacacagctgcaaaaatataccatagcttgcaggtgatcattggtttgataaaagatattgagtcgctcatcttgtgaaagtgatctttaatataagaggagcatcagcggggaagctcacatgtcccgtggctcacacaccagaaggtatttgtgtcttgtcattgtctgtctggcagtccatggcaatggctttttcagagaggcctgttttgtggttaactgtgtgtacctcggccgctctagaactagtggatcccccgggctgcaggaattcgatatcaagcttatcgataccgtcgacctcgagggggggcccggtacccagcttttgttccctttagtgagggttaattgcgcgcttggccgtaatcatggtcatagctgtttcctgtgtgaaattgttatncgctcacaattncacacaacatacgagccgggag

SEQ ID NO: 3787 - DNA, 641 bp, Homo sapiens
  misc_feature 3, 4, 5, 6, 641: n = A,T,C or G
ggnnnngagcgcgcgtaatacgactcactatagggcgaattggagctccaccgcggtggcggccgaggtaccaggttgggctaagagatgaaaaaccaggctcaagttgggccagagatggacaatgagtcacttccaccagaattcccagccacatatgcccacctctgggtcagaagagccaaacgtatttatcgcttttgctcagggccaacatagacacttgattctctctcagggctgtgttttcccccaaatgtatcaatacatccctattttcttccccctttgttttcctttccctggtgacctgctaccccacaccccagcacactgatggtgttccctccaccacaccgagaccccgccacaagctctcagccctcgtagagcacaggccccaccctgaaagttggcagagcaccgggctatcaagctgtgtcatgtggagccagcaagcccggcacaaccgtggatcccgggtacctgcccgggcggccgctctagaactagtggatcccccgggctgcaggaattcgatatcaagcttatcgataccgtcgacctcgagggggggcccggtacccaagcttttgttccctttagtgagggttaattgcgcgcttggcgtaatcatggtn

SEQ ID NO: 3788 - DNA, 974 bp, Homo sapiens
  misc_feature 109, 226, 279, 335, 375, 398, 401, 454, 471, 481, 491, 522,586, 592, 600, 613, 616, 629, 639, 641, 642, 647, 656, 661,662, 665, 679, 683, 697, 698, 715, 721, 723, 737, 739, 742,743, 752, 754, 756, 760, 765, 767, 776, 793, 794, 798: n = A,T,C or G
  misc_feature 809, 810, 822, 825, 833, 836, 837, 845, 870, 873, 874, 876,881, 888, 890, 891, 893, 896, 909, 910, 917, 925, 927, 928,929, 931, 934, 938, 940, 946, 948, 956, 957, 963, 965, 966,971: n = A,T,C or G
gtggagcgcgcgtaaacgactactatagggcgaattggagctccaccgcggtggcggccgcccgggcaggtacctgtctttgggctttatgtcatgtaatactcacccnagtgacctttaggggagatgtcaccgtcgtcgtcgtcatcatcatcgtcatcatcccgacgtcatcgttcctattgagaaatgagaccactgaggtttggggaggtgaactgacttnccaagttcttacaatgaacagcaacagggctgggtgggacataaatccatttnacttacagtaaaagccaaattctttattatgctccacatgatcctgtccctgcatntcctgacctcttcccccatcccccttccgatcactcactncagccacactggcttggctgttnctnaaacacaccaggcagccttcaactccagggcctttgcaagaggtcattccttntgcctggaacacttttnccccaaaacnaccgcatggnttacttcaagaatgtgcttcaaatgtcaatntttttaaaagggaattcttttttgtgaacttttcctgtttttaacaatttctttaacaacttgntccaanctttcaanaaacctttttggnccnttgccaaatttcncagggaaganannggggnaaaaatcgnaaaannganaggtccctttcggnccgntttttagaaactannggggaatcccccccggnccttgnanggaatttcgaaaantnaannctttattcnantncccngtccnanccttaaaangggggggggccccgggnncccnaaattttttgnntccccttaaaanggnggggggtnaannttgccccnccttgggggggaaaaacattggggncannangctgnttttccngnntnggnaaatttggttatnncgtttancaaatttntnnnanaanaatncnaaatcncnggggggcnnaaaatntnntaaancct

SEQ ID NO: 3789 - DNA, 894 bp, Homo sapiens
  misc_feature 2, 3, 12, 13, 14, 19, 20, 26, 526, 578, 598, 638, 684, 716,717, 727, 737, 741, 762, 777, 783, 785, 792, 793, 794, 802,805, 807, 817, 820, 828, 850, 859, 873, 879, 881, 883, 884,887, 888, 889: n = A,T,C or G
gnngaccgcgtnnnacgtnntactantactatagggcgaattggagctccaccgcggtggcggccgcccgggcaggtactggggattgattagccacagtctttgccacagactcttttggactgagccgataggtcaaaggttagcttatgcagtagcatgggctgtaggttttttgcactgatcaacaccggaacttttagaagacttttagaagatttgttgctgctgtgagtgacatcagttcacacagcctgagagagaactctcagtccatgctgtccctccgtgggcccactcaagcgaaatgggtcgagctgcaacactgtgcggtgccaaccgggagaaatctgcctatcggggctgagagacatcctgtagtggctacccgtctcctttgccccaaatgtcaagtggaagaggtgcttcacatatttatttcttcctacatgggctcatttattgtaagcccattgtggacccttggaaagccaagcttttatcttgattttggagtgtgatcaangtgacagttgttctccggatgacagggaatctgactttggttttgctttttncatagaggtcagttggcctnaaatttggggccaatttgcattttggagggagacctccanggacagaagccttggtcctcattaagctaatttggtcaggcaagtnttttcctggggtggcacaaaaacctttttaanngaattttttncttcaaaacntcgntttttggttgggccagggccnttgccttgccttttntttttntnggaaaannnggccttgngtntntttgtggggnacntggaatcncatgggggggcgtttttttttncccaaaaantttcctttttcccnatatananannccnnntgtat

SEQ ID NO: 3790 - DNA, 888 bp, Homo sapiens
  misc_feature 2, 6, 7, 8, 633, 666, 668, 680, 688, 702, 707, 729, 733,734, 741, 748, 752, 754, 762, 770, 780, 781, 783, 789, 797,808, 822, 826, 836, 848, 851, 853, 865, 867, 869, 870, 885: n = A,T,C or G
gntagnnngacgcgcgtaatacgactcactatagggcgaattggagctccaccgcggtggcggccgcccgggcaggtacgcggggagactttccctgccggcacatggacctggcccaaccctcacagccagtagacgagctggagctctcggtgctcgagcggcagccagaagagaacacgcctctcaatggtgccgacaaggtcttcccttctttggacgaggaggtccccccggccgctctagaactagtggatcccccgggctgcaggaattcgatatcaagcttatcgataccgtcgacctcgagggggggcccggtacccagcttttgttccctttagtgagggttaattgcgcgcttggcgtaatcatggtcatagctgtttcctgtgtgaaattgttatccgctcacaattccacacaacatacgagccgggagcataaagtgtaaagcctggggtgcctaatgagtgagctaactcacattaattgcgttgcgctcactgcccgctttccagtcgggaaacctgtcgtgccagctgcattaatgaatcggccaacgcgcggggagaggcggtttgcgtattgggcgctcttccgctttcctcgcttactgactcgcttgcgctngggtccgttccgggcttgcggcgaagcgggttntnaagcttcaattnaaaaggcnggtaataccgggtnattcnaaaaaaatttagggggtttaancccnngggaaanaaaactntttngncccaaaanggcccccnaaaagggccnngnaacccntaaaaaangccccgctttntttggctttttttncaanagggctcccnccccctttgganggntnttaaaaaaaaantncnnccttcaaatataaanggg

SEQ ID NO: 3791 - DNA, 761 bp, Homo sapiens
  misc_feature 2, 3, 4, 5, 9, 638, 651, 672, 688, 692, 702, 708, 709, 711,728, 729, 743, 744, 745, 748, 752, 758, 761: n = A,T,C or G
gnnnngcgngcgcgcgtaatacgactcactatagggcgaattggagctccaccgcggtggcggccgcccgggcaggtacagacggggtttcacccgttggccaggttgttctcaaactcctgacctcaagtaggccgttcggctcggcctcccaaagtgctgggactacaggcgtaagccactgagcctggccagactgaacattttaaccatgtctactcctcccaaatgaacttatagatctaatacactctgggcatgaatcaggtttgaattcaaggatcacattccttaagacattgacaacctaactcaaatagcagcctgctcttccagccagcgctcattctcctcttcccctgttttattttttatagcatgtctcatcatctgaaattacctttttgttctttcgtctccagtttccccggtagaattttgtaaatgccatcagggctggtgtgcccttttctgagtattcccagtacctcggccgctctagaactaagtggatcccccgggctgcaggaattcgatatcaagcttatcgataccgtccaacctcgaggggggggcccgggtacccagcttttgttccctttagtgaggggtaattgcgcccttggcgtaatcatggncataagctggttnctgggtggaaaaatggttatnccctccaaattccccncaanaatacccaanccgggnncnataaaagggtaaaaccnnggggggcccaatgnnnggngccnaccccncan

SEQ ID NO: 3792 - DNA, 689 bp, Homo sapiens
  misc_feature 4, 5, 6, 124, 361, 362, 373, 377, 383, 386, 391, 400, 405,410, 413, 414, 424, 434, 436, 440, 442, 447, 458, 463, 466,469, 472, 476, 480, 483, 490, 492, 495, 501, 502, 504, 505,508, 509, 514, 517, 518, 520, 523, 530, 531, 535, 538: n = A,T,C or G
  misc_feature 543, 550, 551, 552, 555, 562, 564, 566, 567, 568, 570, 572,573, 575, 577, 582, 583, 589, 597, 599, 605, 608, 609, 617,619, 629, 630, 631, 637, 652, 657, 659, 660, 661, 662, 666,669, 673, 677, 682, 683, 684, 689: n = A,T,C or G
ggtnnngcgacgcgcgtaatacgactcactatagggcgaattggagctccaccgcggtggcggccgaggtacagctgtgattccagaactaaaatccccatttccttgccagttgtcagctganagcccgtcccagcttctaggcactgctcacattctttgccttgtggttccctttctatttcttttgttttcaaagcctgcaatagctggtcagtttcttctcatgctttgaatctctcctgcctcttgttctgttttgcatctccccaacaaaaccttctgccttccttttgcactttttgtttgtttgtttgtttttttgagacggagtctcgctctgtcgcccaggctgtattgnngtggaaccatnatantcttantgnagccnataagaacngcccngtaanaannaatttttccnaaattaaggntnggangntaaantgggggttacnagggncanaanaantttnattnggncccaagncnttngcctannanngcnntttcnttnnanaanaagtttnngttnagngggcntggactnnnggnggaacgntnannncncnngnanatggnnaaaaanacatttcntnggaaanccnntgaaggangnggattctttnnnggtggnttttcaaaatccctnggggncnnnngctnggnggtncaanccccnnnttttn

SEQ ID NO: 3793 - DNA, 625 bp, Homo sapiens
  misc_feature 5, 102, 105, 108, 110, 113, 115, 119, 123, 138, 152, 173,196, 209, 210, 257, 263, 268, 275, 284, 287, 303, 323, 334,336, 345, 360, 362, 371, 423, 425, 463, 470, 494, 501, 522,536, 538, 541, 544, 551, 553, 587, 590, 592, 602, 604: n = A,T,C or G
  misc_feature 605: n = A,T,C or G
ggttngacgcgcgtaatacgactactatagggcgaattggagctccaccgcggtggcggccgaggtactttttttttttttttttttttttttttttttttnggnttngnttngntttngttngttttttttgtaaanacagaatctccctntgttgcccaggctgatttcanactcctgggctcaggggctcctnccacctcaacctnntgaaagtgctgggattacaggggtgagtcactgtgcctggcaagaanatgaanttttnatccctnaactgacanctntgccctggaggcccancatgggcttcaggctgcctntgcccctgctnanagggcattntatttagttcagctntnacccattgnggataaaggagattcacttcacattttatgttttacaattttagtataagcncnaatgtttaaatgataacaagggaaggagctccccaaanactctgnaccatcttgatttctgggattaanattttantctgggtaaaacaaggatttntattattcccaaancnttnttnataattnanagcccggggggggttttttttaaaaaataccctnttntncaaaaatttncnntccaagggaaaatttttttt

SEQ ID NO: 3794 - DNA, 785 bp, Homo sapiens
  misc_feature 1, 6, 77, 87, 154, 459, 570, 605, 617, 624, 625, 630, 631,636, 639, 643, 658, 661, 663, 685, 704, 710, 719, 720, 725,726, 728, 744, 747, 750, 751, 758, 765, 768, 770, 773, 776,784: n = A,T,C or G
ngtttngccgcgtaatacgactactatagggcgaattggagctccaccgcggtggcggccgcccgggcaggtaccancaagccctgngggccgagagttctgcctggtcccacctgatcactctgtcatgacctcagttcatgtgaacctttcncccaccttcgtctcaaacccagccctgagcccctccatgctgggatgtgtgcagggaccccgtgcaggcttcccagagcaggggagcactcaactatgcagaacatgtcaactccacagatacacagcaggtcgtgactgaaatgacttcccaagggaactgtccttgtcatcctttttaaaaacattaaatgtcagaaagacgatatgagagctcagactgcgcccacgtggggaactgagagagagaggcccagtacctcggccgctctagaactagtggatcccccgggctgcaggaattcnatatcaagcttatcgataccgtcgacctctgagggggggcccggtacccagcttttgatccctttagtgagggttaattgcgcgcttggcgtaatcatggtcatagctgtntcctggtgtgaaaattggtatccgctcacaaattncaacacaacatncgaagcnnggggnngcatnaanttgnaaaagcctggggggnggncntaaattgagtggagctaacttnaaatttaattttgcgtttngcgctnaattgcccnnttttnnangtcggggaaaaccttnttnttnnccaagcnttcattnaantnaantcnggccaaanc

SEQ ID NO: 3795 - DNA, 831 bp, Homo sapiens
  misc_feature 3, 5, 6, 9, 12, 13, 14, 15, 16, 19, 21, 24, 25, 26, 28, 29,33, 34, 35, 36, 37, 38, 39, 45, 48, 49, 50, 55, 57, 58,59, 65, 67, 69, 70, 72, 73, 74, 76, 77, 78, 79, 80, 81,83, 84, 90, 93, 98, 100, 103, 111, 178, 179, 187, 195, 197: n = A,T,C or G
  misc_feature 198, 201, 206, 209, 212, 243, 279, 388, 422, 424, 427, 460,468, 509, 527, 561, 594, 608, 612, 619, 622, 629, 634, 638,641, 646, 649, 655, 661, 662, 671, 678, 687, 705, 714, 718,722, 725, 729, 734, 735, 737, 749, 756, 767, 772, 784: n = A,T,C or G
  misc_feature 790, 802, 813, 825: n = A,T,C or G
ccncnnatnttnnnnntananatnnnanntttnnnnnnnaaactnttnnnttttncnnnactaantntnncnnncnnnnnngnngggtgntcnccatncnccnatatggcntttgggccctctagatgcatgctcgagcggccgccagtgtgatggatatctgcagaattcgcccttnngagcgggngcccgganannaanaaaanatnctntttttctgatcagaaccctggctgaacggtnttaaaattcaggttccaaaatgagccagtggtaaanaagaaatagagtggaaatttaacacatccatttattatacactgcaaaatgcaacagggacagatgccccatgaatatttctcctcagcttgtgatcactttctctacnatgttcgaactaagttggctcttgctctaggggncnatntggacaattaccttgcaagctttggagtcattnaccgggangatgaatcgtacaagggaactgggctcattagggggttacnacttcacctggctctagnttcctaaactttccctgtgttaaaaaccaacccnccttgggaagcctttaaaaccttttttgccttnaatccttaataatntaanaaaaaanttntggcccncattnaagnttntcctnaanatatgntttaannaaaaaaatnttatttnataaaattnttaaaatttcttaaaaantggtcaaancttnaccnagnatanggccnngnaaaatttttccntcccctntttttttgggncaaancaaccttgtttnttttanaaggttttaaanaaataataagnattttttgggcnccatcc

SEQ ID NO: 3796 - DNA, 797 bp, Homo sapiens
  misc_feature 1, 2, 5, 6, 7, 8, 10, 19, 25, 32, 43, 535, 540, 582, 587,664, 670, 675, 681, 689, 697, 718, 725, 746, 747, 758, 767,776, 786, 793: n = A,T,C or G
nnagnnnntncgcgcgttntacganctcactntagggcgaatnggagctccaccgcggtggcggccgaggtacgcgggagggaagagtggccttatggctactcaagccacgtgtttacctaaaatgtgctcctagtcgcatagcttctcagaatagtcaaagaagaaaggaaaagaaagctggatgtcccgggtttattttttctgcatctttgcaaatatgagacacaactctgttccaggagctttcgatgcgcttctacaggtatttcttttttctttgtgtcaaggataaatgtgaagatagctgtggaattgtccgaacatttttgccttgaaattaagcaatgttttatgcctaatttcccaaaggacaagttatttatgccagtattaaaagcagcaacttatatattctacgcaaaacagaaaaccagaaagatctaaattttgacaagtccctagtttgatgaattgaaagacagggaagatgactacatcacagcagataaaagagatattttcataaactaanctctnggaaacagaatacccaaattacccatgtccaccaactactgntcatngggttccccaaaggacttgtgtgccggattatacgagtcattggccccagttgggaaaagtctcagttttgaaaacnattatntttancccatngggccagnaacttatnaacctatttaggtctattatnaatgganacccttttttttttaagttgnnaaatttttttntacccaganggcaaaaancccccaaaantatttgntttt

SEQ ID NO: 3797 - DNA, 770 bp, Homo sapiens
  misc_feature 1, 2, 4, 5, 6, 7, 30, 31, 33, 34, 54, 80, 394, 420, 535,546, 574, 598, 625, 656, 657, 680, 697, 701, 716, 718, 722,753, 754, 759, 761, 765, 767: n = A,T,C or G
nngnnnnacgcgcgtaatacgactcactanngnncgaattgaagctccactcgnggtggcggcccgcccgggcaggtacncgggggaaaacaaagaggagattaaatgtgtgggtggcatgggaagggtgagttggtatgggttgggaaaggcagcaacaacttcatttccctgagcagtttccattgtaatcaatgtattgggtcagcaccaacctctacctgaggtaaaatatttaacgcatgtttctgtcagccttggaatatgctttgccctcttaggtttatatttgtgagtttggggtctgggttaggcccaaaactagtggcctagccttaggccaacctcttccatgaggtgtgtttttttttttttcttttgactgagtctcctntgttgcccaggctggaatgcaatggngcaatctcagctcactgcaacctctgcctaccgggttcaagcgattctcctgcctcagcctcctgagtagctggaattacaggcacgcgccaccatgcccagctaatttttttgnatttttagtanaagatgtcatttcatcgcgttagccaanatggtcttaatcttctgaccttcnaatccgccccccttgtccttcccaaantgctgggattaaaaggcgttgaaccaattgnncctggcctttcattaagtttttntttccccctttttcccntttntgggcccccattttntnaaanttttttggaaattgaaccaaaaattttaagnnacggnancaananaaa

SEQ ID NO: 3798 - DNA, 896 bp, Homo sapiens
  misc_feature 17, 23, 33, 67, 71, 75, 76, 78, 105, 107, 109, 114, 131,133, 140, 228, 240, 263, 318, 363, 369, 371, 374, 423, 427,479, 489, 507, 508, 517, 526, 531, 535, 547, 556, 572, 579,583, 597, 605, 609, 613, 618, 626, 629, 640, 651, 656: n = A,T,C or G
  misc_feature 657, 658, 659, 661, 670, 674, 679, 687, 692, 702, 718, 719,720, 725, 726, 731, 734, 749, 757, 764, 765, 766, 770, 774,778, 779, 781, 782, 784, 785, 795, 796, 798, 800, 809, 810,811, 813, 816, 818, 822, 831, 839, 841, 842, 855, 858: n = A,T,C or G
  misc_feature 860, 862, 867, 868, 872, 875, 880, 883, 884, 886, 890: n = A,T,C or G
ggttaagcctttgaaanaccacnccttttgggncgaatcggagctccaccgcggtggcggccgcccnggcnggtnntntgctttcaatcatttcggcaatactgntnanccttnaaccaaatggaacttanancccattnaaattgacgtttcaattcaatctagtcaaattggggaaagacaaaatcaagagaattaaaacaattttttcttaaagtgtcattcttncataaaatatcntttattatttatttattcatttntaaaacagagtcttgctctgtcgcccaggctggagtgcagtggtgcgatctcagntcactgcaacctctgcctcccaggttcaagctatttttgtgcctnagcctncngantagttgggattacaggggctatgatgttgtcaacatgatggaataatcncgcnactatgaaaaaaaacgaaagactatgagagaaacatttaaagggcatgatcncaactaaaangcctttcatggagggggnngggctcaanggccctatnaaatncccnaaacaacttttngggaagggngctaccattggggaangaaccancttngagggtcacggganttttaaanaaancagnccttntgcccacnatnaccaaaaattntttggttttcnccccnnnnanaaaaataanttanttccntaatttantccangggtttttgngggccctggggccctnnnggggnncccgnctntctttttgggaaagncttttttnttggggnnngtanggcnttgnnanncnnccaaattttnngnantttgaaggnnngnccngntagncttttttancccccccncnntgtttttctatanccntngnccaanngggnccnataanttnngntagnttaaat

SEQ ID NO: 3799 - DNA, 785 bp, Homo sapiens
  misc_feature 2, 4, 5, 6, 7, 15, 640, 677, 699, 716, 727, 733, 737, 738,760, 767, 769, 774, 775: n = A,T,C or G
gntnnnncgcgcgtnatacgactcactatagggcgaattggagctccaccgcggtggcggccgcccgggcaggtactgtgctttcaatcatttggcaatactgctaagcctttaaccaaatggaacttagaacccattaaaattgacgtttcaattcaatctagtcaaattggggaaagacaaaatcaagagaattaaaacaattttttcttaaagtgtcattcttccataaaatttcttttattatttatttattcatttttaaaacagagtcttgctctgtcgcccaggctggagtgcagtggtgcgatctcagctcactgcaacctctgcctcccaggttcaagctatttttgtgcctgagcctcctgagtagttgggattacaggggctatgatgttgtcaacatgatggaataatcacgcaactatgaaaaaaaacgaagactatgaggaaacatttaaaggcatatcagaactaaaggcttcatgaggtggtggctcaagcctataatcccaacactttggaaggccaacatggaagatcacttgagggcaggagttcaagaccagcctgtgccacataccaaatctctggtttcacaccaaaaaaataattatcataattaatcagggtttgnggcctgtgcctggggtcccacttctttggaagcttangtggggaggagctttgagaccnggaatttggaaatttgnggctgcgttangctttnaacnncccattggtttccaccctgganaaaaggnanaaaanntgcctttaaa

SEQ ID NO: 3800 - DNA, 750 bp, Homo sapiens
  misc_feature 2, 3, 4, 5, 7, 549, 587, 626, 692, 704, 725, 750: n = A,T,C or G
gnnnngnccgcgcgcgtaatacgactcactatagggcgaattggagctccaccgcggtggcggccgcccgggcaggtacgcgggatagcattcagctcccaacagaacccttcattttctttttatgtaattttctctttaaagaacaactggtcaggtctagtgtatggagagcccttgtgaggacagagccctaatatctggatgatgtttctgaatttagttgacattgtccacttggatgtctagtggtcattttaggcaaacatgtccaaactgaactcctgtcttccctggaccctgcctcctgtggcctggctgtcttagtcagtgtcagccctccatgagcttaggcaaaaagtcctggggttatctctgacttctctctactttccacaaaccatatcaagctctcagcaagtcctattggctctgccttcaagtgtagatagaatctgccctctgcttatccactgcgttgctgttactcggcacaagttgttacctcctactggatcacaaagaacttccacattggactcctgcttncacctgccccttcagtctgttttctgtgcagcacccanagctggcctgttaaagcattaatcagatcacatcacttncctgtccaaaccctcaaacagctcggctttactctgaggaaaaccccacattcactgcttcttggncttctggctaanaatcaagtgtaaaaaaagccncaggacctatgaagggccctcgccn

SEQ ID NO: 3801 - DNA, 762 bp, Homo sapiens
  misc_feature 2, 3, 4, 5, 13, 15, 18, 19, 20, 21, 25, 492, 636, 658, 664,669, 680, 682, 696, 713, 721, 728, 729, 736, 744, 745, 748,752: n = A,T,C or G
gnnnngggcgcgncncgnnnnactnactatagggcgaattggagctccaccgcggtggcggccgaggtacttatctcatagagtaattgtgagaacgaatgctttgagcacagtgcctgccacagagttagagctataagcttctctttggtctatgtgggagttttcttcccaggtgaattaccagatccttagggccagagaattcctgaattctctgtgagtatatagtgtagtaacttgcctctagaaaataccaacatatatttattaaattattaaagattagattgttttagagtaggtcaggggaaataaacagaacttgggtcatgagaataaaacatttcttgatattgattgattaatgcacattgtggtggatgagtctttttgtgaatgttgtgaacatttacttagatcatttctaaaagggtgctagagaatctgccggttcaccctaattgatgccccctctaagtagcaaagcanaagaaccaaaattcagtctcagcactttaaaggttttgattcctaaacttggtgttggtcccctgcctgcttgaacattgaaacactttccaaaaaaatgacttaccccacgggcacagcctcaacccctgtgggcccccaggncaagtagagcaatgccacaggnggaggncaggnccatattcaantncattttggttattnagttccaccttggcaancccccatngggaatnnggctttnttttaaannaancccncaaaattttg

SEQ ID NO: 3802 - DNA, 742 bp, Homo sapiens
  misc_feature 1, 2, 5, 585, 597, 604, 624, 663, 678, 693, 698, 700, 736: n = A,T,C or G
nnttngacgcgcgtaatacgactcactatagggcgaattggagctccccgcggtggcggccgcccgggcaggtacaaactttgaatggagtaatggagcagtaatgtctgttttaatcgccctggcccctctttgccttatggaggcaccaggatgaaggaggtgaaaggctgacttaagagtcaggtaaactacctcctgctgtgttttaatactaatgcattgtgaccttgaacaagaacttgaacaagagttcacatctgcataagagaggtcttatctactggtctccaaaggatctggggatatggagcaggatccagccatcaccctgtaaattacctgccattcttaaaaacccacccttacacgtagcttgggaatcagcaatctgatttcatgcgggagatgctggaaacatctgctgaaattaattctccagtaatttggaaagatcaaaactcaaaccttttctgaccctaagaaagagggtcctaagctccctacagctggacttccagataagaaggatctagtagtgaggaaaaaaaactctaaaaatacaatttgggacttgggacccangtggcagttcangaatcanggctggaacacaaaaaagangtgaaagggacaccaggatcgacgtttggaaacaaaacngtggccaccccctgnttccactgacaaggngattncntggcttggcttgacatttttttttaaaaaaaaaggnggcctt

SEQ ID NO: 3803 - DNA, 776 bp, Homo sapiens
  misc_feature 2, 3, 4, 5, 6, 628, 657, 666, 681, 684, 685, 695, 697, 729,732, 734, 735, 739, 757, 760, 761, 769: n = A,T,C or G
gnnnnngccgcgtaatacgactcactatagggcgaattggagctccccgcggtggcggccgcccgggcaggtacgcgggggatgccagaattgagagtccataggacccgtttaacggatcccacattcagtagacggttttttgtatgcttcgagggaaggaaggtattttcaaatgcaacttcttttttttttcttgctctagttagggctgattttaccactgggcaaattgcatacatttggatccatgccacgctaaatactgtttattttggagatctgtcagaggcaagcacatggaagacaaggggattctggtttgaaaaggcaattctcatccagacagattcagatggagaggagcggtgtggattaaaatgcgccgaagtgacagcgtctcaccctgtcacgtaggctggagtgcagtggtgagatcacggctcactgcagcctcgacttcatgggctcaagcgattctcctgcctcagcctcctaagtagtcgggatcataggcacttgccaccacatccggctaatttttttgtagagacaggatttcaccacattacacaaggctggtttcaaactccgaggctcaaagtgatctgcctgcatcggccttccnaagcgcctgaagattaccaagcggggggnccacttacncctttgccttcacanaannctttgctttngnggtttaaaagaattttaacccaagaccccccnggngnnacanctcttttttttggggggnccnnttttaaangggaact

SEQ ID NO: 3804 - DNA, 781 bp, Homo sapiens
  misc_feature 491, 630, 640, 642, 662, 672, 682, 686, 714, 715, 724, 728,764, 766, 769, 770, 773, 774: n = A,T,C or G
gtaatacgactcactatagggcgaattggagctccaccgcggtggcggccgaggtacccatgaacatagtttttactctttttaaaagctgtaggcactggaaggtcagtgttcagccatgacagtggaaggtcagtgttcagccatgacaaggcccaatgtcatgggccctctgtcatcatcctctgtccgtagtgatccccagacacttttgcatggctgtttagacagaattttcctgcagctcttttgggagtagctcttgaaagtttaacccctgacagttaatgaagaacagtgaggcttaggaggcaggtaggcctttgagcaaataactctgagcaactggttgccattgtcagttctcctatcaagtatgcgtttgatttttaaaaggattccccaaagttctatttaggactacagagtctctaagaatgtatttctgttgtcaaggtcaggagcaagatcatctctgtggacctgtccgntttgaaggagttgcaagatattctcatcattcattgatttatatactcaaaaaacatatatttgcatgtgccaaggaaaaggtaaggaaagggagccttcatgtgccagcccctgtgctgagcccctggaactgtaaanatgaaatgangnggatttttgtctttaaaaantttgccgatngggaccaaanctgncaatctctctttcctgggcctgacccgnngacaaagcncttnttagttacccctggggaatacccgatgccattccgncnagnnaannaacttgt

SEQ ID NO: 3805 - DNA, 776 bp, Homo sapiens
  misc_feature 2, 4, 5, 6, 11, 12, 13, 15, 511, 527, 543, 551, 557, 579,592, 602, 623, 627, 636, 647, 683, 704, 706, 708, 710, 721,757, 770: n = A,T,C or G
gntnnntttannncnttcgtaatacgactcactatagggcgaattggagctccaccgcggtggcggccgaggtactttgagaggccaaagcaggaggattacttgagcccaagactttgaaaccagcctgggcaacatagtgagaccctgtctctacaaaaatttaaagattagctgagtgtgatggtatgtgcctttggtcccagatactcaggaggctgaggcgggaggatcacttgagtccaggaggtcaagactgcagtgagctgtgttcgtgccactgtactacaaatcagaacccctccccttcgaactgctgttaaacatctactagagactatcagtgttgttatttatagaatcaggaaatgctaggcttctccttcttctaagtcctagatgctgagacttcagaaattcactggttttgttgaggtcaggagtccaagaccagcctggccaacattgtgaaaccccgactctactaaaaatacacaaaattagctgggtntggtggtgggtgcctntagtcccacatactcnggaggctnaggcangagaatcacttgaacccgggangtggagattgcantgggctgaanatcatgccacttgcactccancctnggcaagaantgagaactctntcccttcacccaaaaaaaaagaaaaggaaattaatnggttttgttaccttattgaantngngnggtgaaccgancaaattttccaagtttcattttgcccagccctaaanaatgggctttttnccccct

SEQ ID NO: 3806 - DNA, 827 bp, Homo sapiens
  misc_feature 2, 4, 5, 6, 8, 12, 550, 564, 582, 591, 631, 637, 693, 694,709, 718, 772, 783, 786, 796, 807, 812, 815, 822, 825: n = A,T,C or G
gntnnncnttcncgcgtaatacgactcactatagggcgaattggagctccaccgcggtggcggccggtgattgctttccaaggccaccgagggtatctgagactcccaggccctggttggtcctgcctcttctccttcatagcgtcccagtgttgtcaggagggcgctggtggtagcttggaccttgtgtgccaacgcttcctcaggtctgggcctaacagcctccactgcctgggctcactcagggagcgcctcattatttgggcagccatggattctatcccagccccaccatcagttcagggacacaacctgactgaagatgccagacatcctgagagttggcagaacacaggaggctattctgaaggagatgcagtatcacagccacagatggcactagaggaggtgtcagtgtcagatccactggcaagcaaccaaggacagtcactcccaggatcctcaagggagcacatggcacagtgggaagtgagaagccagacccatgttccaaacagagaacctgttcagggcactggctttcttttgncacccggaaacgtntggacaagaaacgttcantgccctgtngccactgtagaactggaaaaaaaaaaggttaaaaactttngctttnattggcccaaaccccctacaaaggcctgaccaattaaggatttttcaaaaaagggnnaaaatttgggaagcnaaaaaaatnaaggactttgggcccccccaatttaaaaaaaaaaaagtttccttaaatttaaanaaaaatttttnaanttcccccaanttcctggaaanttttnccncaacttnccncc

SEQ ID NO: 3807 - DNA, 621 bp, Homo sapiens
  misc_feature 165, 256, 325, 327, 341, 371, 388, 395, 415, 423, 424, 431,434, 460, 463, 480, 498, 530, 554, 566, 575, 605, 606, 614: n = A,T,C or G
cgaattggagctccaccgcggtggcggccgcccgggcaggtacgcgggtagggatgcagaactggccacagtcagggctggccaacaagggatgggatggcaagggaaccagtgggagactgtttacacctttgacttcctcttcacaggtcaaggcaggactgnagcattaggtctcagagatgcaatgaacaggacaaatacacttccccttcatctggatctgaggctctgggcgagtcagtacctcggccgntctagaactagtggatcccccgggcttgcaggaattcgatatcaagcttatcgataccgtccgacctcnanggggggccccggtncccaacttttgttccctttagtgagggttnattgccgcgcttggcgnaatcatnggcatagcttggtatactgngtgaaaanngttatcncgnttcacaatttcccacacaacataccnagnccggggtagcataaaanttgtaaagccttgggggntgcctttaatggagttgaagcttaaacttcanatttaatttgccgtttggcgcttnacttgccccgcntttttcaantccggggaaaaacccttgtcctttgcccanncctggcanttaattg

SEQ ID NO: 3808 - DNA, 632 bp, Homo sapiens
  misc_feature 3, 25, 42, 46: n = A,T,C or G
ggngtcgcccacgcgtccggtaggnatgtttgtaaagtcagnaggnaggttagctttacaactgctttgtcagaaatatgggtaacatacaaataatcctatcaggaaaaattgtatatcccttcatttttgttgtggctatgaatagactgttttgcgaattcttttagaatgagcctatctgacatgcccatccatgctctgatgtgagacgcttctctttaggacgtcagctgtacatactgcactaggtgtggtctaagtaggaggttgcccaggcagatgattggctgcttgatcacgaacctacaaaagcccagataaatagtgtggcataaaccacaaacattttccagccaccgtgcctggcttgtgcattcttttttcattatttgatcgttaccttgctttctggcacaggatgttccaggcttgccctgtagtttgccttagtcctgaaattgactgtttcttccaagagccttataaaataagaaatgcttagaaaccaagatatggacacaagtagtgctgattgctgctggggtgttaattgcatcaagcagacagtactaaggaaatatattaaccttcaatataccagaaaaagcagtcatcaccatttaccatct

SEQ ID NO: 3809 - DNA, 602 bp, Homo sapiens
  misc_feature 523, 526, 529, 575, 591: n = A,T,C or G
gcgcgtaatacgactactatagggcgaattggagctccaccgcggtggcggcccgagaaggtcaagcaccggcttcgtccagtccgatttcaagggcgacgtgctgggacgcgagctgcgcctgaacgccggcgtgcgctggtcgcagacgaagctcgacatcgacaacttcaagaggagcggcagcggcaacacctaccagcccaacagcgaacagggcaagtacaccaatgtgctgccggccgctctagaactagtggatcccccgggctgcaggaattcgatatcaagcttatcgataccgtcgacctcgagggggggcccggtacccagcttttgttccctttagtgagggttaattgcgcgcttggcgtaatcatggtcatagctgtttcctgtgtgaaattgttatccgctcacaattccacacaacatacgagccgggagcataaagtgtaaagcctggggtgcctaatgagtgagctaactcacattaattgcgttgcgctcactgcccgctttncantcngggaaacctgtcgtgccagcttgcatttaatgaatcgggccaaacnccccgggggagaggcngtttgcgtatt

SEQ ID NO: 3810 - DNA, 804 bp, Homo sapiens
  misc_feature 2, 3, 4, 5, 6, 211, 246, 252, 262, 389, 481, 507, 519, 530,543, 573, 608, 614, 649, 653, 661, 673, 700, 707, 727, 738,745, 747, 757, 766, 770, 775, 780, 781, 789: n = A,T,C or G
gnnnnnaccgcgtaatacgactcactatagggcgaattggagctccaccgcggtggcggcccgaggtactttttttttttttttttttttttgatgctagttgtgatttcctgtaattctcatttgcaagggggtaaagggggatcaatgagatgatacagaaaggaggagctgacaattcttttgtccatcacatcatgacaaatacgtntcaacagtcctgcactgaagttttactggcagctnttactntgggaagaanagaaaaggggaaggaagcattacattttaaaagccacgagggaagtgttctccttacacgatgagttttccccttctaggcaatcctccccagctgcatttactgagggaggagggatgagacaganaagtgtcagccctgagagcaacaggagggccagcctggctcccaaaaatgtagctcctccctctgaagcctgacccctccacctggccactnttgccgtccctgacatcctaaaccanggagagaagcancagggcaatancagggtgaacagnggtgctttttggaagggttgccattaaccnggatttcctaatctttcttcccaaaaagaagtatnatttgncatgtcttaaaactttttaaaaaacaagcttctangggnaacaaaanttgaaaagtgcncccttttcaaaaggaaaaataccttgncccgggngggccgttttaaaacttaangggatcccccnggcttgnangaaatttgantttaaagcntttnggaanccccnnaccttcangggggggggccccgg

SEQ ID NO: 3811 - DNA, 811 bp, Homo sapiens
  misc_feature 361, 506, 523, 530, 532, 581, 588, 591, 608, 640, 665, 707,708, 711, 713, 717, 724, 725, 732, 739, 756, 767, 772, 774,780, 787, 797, 807, 811: n = A,T,C or G
tactatagggcgaattggagctccaccgcggtggcggccggtgattgctttccaaggccaccgagggtatctgagactcccaggccctggttggtcctgcctcttctccttcatagtgtcccagtgttgtcaggagggcgctggtggtagcttggaccttgtgtgccaacgcttcctcaggtctgggcctaacagcctccactgcctgggctcactcagggagcgcctcattatttgggcagccatggattctatcccagccccatcatcagttcagggacacaacctgactgaagatgccagacatcctgagagttggcagaacacaggaggctattctgaaggagatgcagtatcacanccacagatggcactagaggaggtgtcaagtgtcagatccactggcaagcaaccaaggacagtcactcccaggatccttcaagggagcacatggcacagtgggaagtgagaagccagacccatgttccaaacagagaacctgtttnaggcactggctttcttntgccagncngaaacgttttggacaaaaaaacgttcagtgccttgtaccccacttgtcnaaactgnaangaaaaaagaaggttcangaacttcttgcctttaagtgcccaagcccccntacaagggccttgacccaatcatgnatttacaaaggaaggggaacaagaattgggaacccaagaaannttnangganattgggnncccccanaattagnaaccccagtttccttangttccaagaanaattntnaaattnccccaanttccttgaangaatttaccncacn

SEQ ID NO: 3812 - DNA, 827 bp, Homo sapiens
  misc_feature 6, 10, 13, 29, 32, 35, 37, 39, 41, 45, 143, 144, 145, 528,558, 570, 600, 616, 619, 630, 650, 668, 670, 684, 698, 722,742, 765, 768, 784, 786, 793, 804, 805, 806, 808, 821, 824,826: n = A,T,C or G
agtttngacncgngtaatacgacttactnttnggncnantngaanctccaccgcggtggcggccgaggtacgcgggactctgtaaatactatgaattggtatcttgactctttgtgatgccaaatattcatttgactacattnnnttcatttcaaaatttaaaattttacttttcaaacaaacaaaagttgtgattcagagtaattggaggggaaaagaaagcgatctttggcccagcgcggtggctcacacctgtaatcccagcactttgggaggctgagacgggcggatcgtgaagtcaggagattggataccatcctggctaacatggtgaaaccttgtgtctactaaaaatacaaaaaaattagctgggcatggtggcaggcgcctgtagtcccagctagtcgggaggctgaggcgctctagaactagtggatcccccgggctgcaggaattcgatatcaagcttatcgataccgtcgacctcgagggggggcccggtacccaacttttggtccctttagtgangggtaattgcccccttggcgtaatcatggncataactggttnctgtgtgaaaatggtatccctcacaaattncccacaacataccaanccnggagcattaantgtaaagcctggggtgcctnatgaggggactactccantnaatgggttgcgctnctggcccttttcantcgggaaacttttgtgccactgcnttatgaatcggccacccccnggaaaagcggtttgctattgggngcntttcccttctttgttnanttaatcnttggcttgggnnntngggtgggggaaanggntnt

SEQ ID NO: 3813 - DNA, 608 bp, Homo sapiens
  misc_feature 2, 3, 4, 5, 6, 7, 8, 11, 21, 22, 23, 29, 435, 535, 559, 576,590, 608: n = A,T,C or G
gnnnnnnnccncgtaatacgnnngcgtantacgactcactatagggcgaattggagctccaccgcggtggcggccgcccgggcaggtacgttccaggaatggtagatagagcatacatatagggcaggctgagaggctggaagggctgccttgaatgccaggctaaggaatttggacttcctaaggaagcatggagtgaattttaggctgggaagggataggatcagatctatgttaatattgctcaccccaattgcagcgtagaggatgggatagaagggaatgtatggattcagggagatggcttagaaccctaagattcatggtagcagggtctcgagcaggggcttgcttgagcaagcaggtcccgtggagcaggtttgtcttaactctcgttgtctttctgaatgggtatcaaagaggggcttcctgcancctggatgaccggggctgccttcctttgtttgtggggagggacgcatgcctggcaacttcatagaggtccaggccatgggcattgccagaggctgaacanaccatgctgaagaaagccaccccnagtgcctggtcccacangccttattatctgnagctggctttgaatgctn

SEQ ID NO: 3814 - DNA, 586 bp, Homo sapiens
  misc_feature 8, 11, 15, 146, 257, 258, 264, 315, 346, 374, 377, 380, 461,468, 486, 500, 556: n = A,T,C or G
ctatacgnctnactntagggcgaattggagctccaccgcggtggcggccgcccgggcaggtactttttcttcttcttctttttttttttttaaagagaacatctgaatgatgtattcggaaaaaaacatttcccaagaatatgganaaagggaattgaacataattcccagtgtaagagtggaatgagcatgtggccctgtgggcctagtcccagtttgttaatcttgtgagcagagctgctggcggctgctctcannccgctnatcgggctctttctctgtcacgtggacaggagactgctcacagggttgcanttggctgctgccctgcatagacagctggttntaattgtgcagagctacttagatacctnggncgntctagaactagtggatcccccgggctgcaggaattcgatatcaagcttatcgataccgtcaacctcgagggggggcccggnaacccancttttgttccctttattngagggttaattgcncgcttggcgtaatcatggtcatagcttgtttcctgtgtgaaattgttatccgcttnacaatttcacacaacatactagccgggagc

SEQ ID NO: 3815 - DNA, 834 bp, Homo sapiens
  misc_feature 3, 4, 5, 576, 626, 659, 661, 665, 671, 677, 713, 723, 726,734, 745, 763, 782, 789, 805, 806, 807, 811, 817, 825, 829: n = A,T,C or G
agnnnttgcgcgcgtaatacgactcactatagggcgaattggagctccccgcggtggcggccgaggtacgcgggagttacttaagaaccacagttcctaaaacattttatttgggagctcaacttctggcttcctacttaccaagaggcagtaagttataacctctggcctttgtctttacattttcaactttctggatccctaacctctggtcccaagttactacgcttgcctatatccactaaccactcactaggtcacaaagttgatggctctggcttgacccagtgaatgagaagtgtcctagatgtttttttttttttttttcgcaaatcttcataggcacagttgcctgtttaattttttcttcagcccttcccttagaggagggagccttaagttacctttcaaggttgggggttaggaatctatcataactagtctagagatttctcaccaagggaaattttccttatctaaaagaggaacttcaggtctcaaccctgccagtcacacccaattaatgtccttcacaaaaataaacagcatatgttccctttcaatttgagttcaagnggcccacacaaaaaattaccctttaattttttttaaccaaatcccagacnaatttccaagggtgagattagataaagaattcngntttnccgtantgccanccctggcgcccaattttccaaaaaagcccggctccncttttctggnccncatccaanccccaaaaatntttacccgaaattaaccngggagactccgtggtttanaaaaaanattttttttttaaccnnncctnggccgntttaaaanaaanggaac

SEQ ID NO: 3816 - DNA, 848 bp, Homo sapiens
  misc_feature 634, 642, 645, 675, 697, 701, 704, 706, 728, 771, 782, 790,793, 798, 804, 814, 815, 817, 820, 843: n = A,T,C or G
gcgtaatacgactcactatagggcgaattggagctccaccgcggtggcggccgcccgggcaggtacccatgaacatagtttttactctttttaaaagctgtaggcactggaaggtcagtgttcagccatgacagtggaaggtcagtgttcagccatgacaaggcccaatgtcatgggccctctgtcatcatcctctgtccgtagtgatccccagacacttttgcatggctgtttagacagaattttcctgcagctcttttgggagtagctcttgaaagtttaacccctgacagttgatgaagaacagtgaggcttaggaggcaggtaggcctttgagcaaataactctgagcaactggttgccattgtcagttcccctaccaagtatgcgtttgatttttaaaaggattccccaaagttctatttaggactacagagtctctaagaatgtatttctgttgtcaaggtcaggagcaagatcatctctgtggacctgtcggtttgaaggagttgcaagatattctcatcattcattgatttatatactcaaaaaacatatatttgcatgtgccaggaaaaggtaaggaaagggagccttcatgtgccagcccctgtgctgagccctggagctgtanaaaatgangtnagggtggatttttttgtctgtaaagagttncccgaatgggacccaagtctgncatnttntntttttcctggcctggacccgangaaaaagcccttttttaaattaacccctggggaaatacccgantgccttcccgncagtcaanaantttgnttaacngggaacaccnncntgnaggggccaggcacccgggctttnaaagg

SEQ ID NO: 3817 - DNA, 843 bp, Homo sapiens
  misc_feature 3, 4, 5, 6, 7, 9, 16, 709, 725, 727, 744, 753, 802: n = A,T,C or G
agnnnnncncgcgtcncgcgtaatacgactactatagggcgaattggagctccaccgcggtggcggccgggtgtggtggcttatggagtccctaacgtttgcacaaaatggttgctacattccacactcccatgtgccctgagcaacctccagggaaacttcagataccgtggggcttggcctgccagctgagctgacccagcgatcctttctatcacagctttgatcttcactgggttgggagcctgtctgaatctaaacatctgcctctctactgcccaccccttcggcatttcctagctctccctgaaaggtgcaaacatgcatgcagttactcaaacagaatatttatccttaactccctgtccctcacaatttcttttaaaacaatccactattgtctacccccgcccccgcatcaccctttcatccaggtgcccattcccttctctctagtcctgcaatacctaagcatcgatctgcctttagcacatccatccccgccttattctccacgcaggagctgagtgacctgcacaaaatcccctgctaaatacgggacctcggccgctctagaactagtggatcccccgggctgcaggaattcgatattcaagcttatcgataccgtcgacctcgagggggggcccggtacccagcttttgttccctttagtgagggttaattgcgcgcttggcgtaatcatggncatagctgtttcctgngngaaaatggttatccggntcacaattncaccacaacataccaagcccggggagcataaagtgtaaaaccctggggngcctaatgagtgagctaaactacattaaattggggtggcgg

SEQ ID NO: 3818 - DNA, 885 bp, Homo sapiens
  misc_feature 3, 4, 5, 6, 8, 9, 19, 23, 384, 425, 436, 439, 452, 455, 456,463, 469, 471, 474, 487, 488, 489, 490, 493, 494, 495, 499,504, 507, 511, 515, 520, 522, 524, 527, 528, 529, 530, 531,532, 535, 536, 537, 539, 541, 543, 545, 546, 547: n = A,T,C or G
  misc_feature 558, 563, 565, 567, 570, 571, 572, 575, 578, 579, 581, 585,587, 588, 589, 590, 591, 596, 597, 598, 600, 604, 605, 606,607, 611, 612, 613, 614, 615, 618, 619, 620, 621, 623, 626,627, 628, 634, 635, 637, 639, 648, 649, 650, 651, 654: n = A,T,C or G
  misc_feature 655, 656, 660, 661, 666, 667, 668, 669, 673, 676, 677, 678,680, 682, 683, 684, 685, 689, 691, 693, 694, 695, 696, 698,699, 700, 701, 702, 703, 705, 707, 708, 710, 711, 715, 716,718, 720, 721, 722, 723, 724, 725, 726, 727, 728, 729: n = A,T,C or G
  misc_feature 730, 734, 736, 737, 738, 740, 741, 742, 743, 744, 745, 748,749, 750, 751, 754, 755, 756, 757, 758, 760, 764, 772, 773,778, 779, 780, 781, 783, 784, 785, 787, 789, 790, 791, 792,793, 794, 795, 796, 797, 798, 800, 801, 802, 804, 806: n = A,T,C or G
  misc_feature 812, 813, 814, 815, 816, 819, 820, 821, 822, 823, 826, 828,829, 830, 831, 835, 839, 840, 841, 844, 845, 846, 847, 848,849, 850, 851, 856, 857, 859, 860, 862, 863, 864, 865, 866,869, 871, 877, 878, 879, 881, 882, 884: n = A,T,C or G
agnnnncnnctcacgcgtntacnactcactatagggcgaattggagctccaccgcggtggcggccgcccgggcaggtacaccatgtccagtgattcatgtctggacagaggctaagtcttgggtcactcgcttcacaaagaggcatcactgttcactcaggggctcctacctgaatcccagagcagacggattcaaataaatgcaccaacctctatagacctgccttgcaacctcaaacctcttggggtcaaaagcaagaagaaatgtttatgatcctagattgtaggggaaataatggtgatttttaaaaacacaattccccgctgggcgcggtggctcacacctgtaatcccaacactttgggaggctgaggcaaggcagancatgagttcaggagatcaagaccatcctggctaacacgggngtttccccatnttngccagggctgggnctnnaactccngacctnangtnatctacccacctnnnnttnnntaantgctnggnattncgtngactngnanccnnnnnnccnnnancntntnnnatttcataagngtatntncncannnttnttnngnattnannnnncagannntntgtnnnntttnnnnnttnnnncnaannnggggtnnangngaacccaannnngtnnnatcnntttannnntaanggnnnanannnngggntncnnnntnnnnnntngnnannaggnnantnnnnnnnnnnnaaantnnnannnnnnttnnnnaannnnnanaaancatttttnnttttnnnnannnanannnnnnnnnncnnngngnttcctnnnnnagnnnnntcnannnnaatnaatnnnttnnnnnnnnactgnntnntnnnnnttngnaaaaannngnntng

SEQ ID NO: 3819 - DNA, 865 bp, Homo sapiens
  misc_feature 4, 5, 6, 7, 686, 707, 714, 733, 740, 756, 765, 791, 804,812, 819, 847, 851: n = A,T,C or G
aagnnnnccgcgtaatacgactactatagggcgaattggagctccaccgcggtggcggccgaggtactgggcctctctctctcagttccccacgtgggcgcagtctgagctctcatatcgtctttctgacatttaatgtttttaaaaaggatgacaaggacagttcccttgggaagtcatttcagtcacgacctgctgtgtatctgtggagttgacatgttctgcatagttgagtgctcccctgctctgggaagcctgcacggggtccctgcacacatcccagcatggaggggctcagggctgggtttgagacgaaggtgggcgaaaggttcacatgaactgaggtcatgacagagtgatcaggtgggaccaggcagaactctcggcccccagggcttgctggtacctgcccgggcggccgctctagaactagtggatcccccgggctgcaggaattcgatatcaagcttatcgataccgtcgacctcgagggggggcccggtacccagcttttgttccctttagtgagggttaattgcgcgcttggcgtaatcatggtcatagctgtttcctgtgtgaaattgttatccgctcacaattccacacaacataccgaagccggggagcataaagtgtaaagcctggggtgcctaatgagtgagctaactcacattaaattgcgtttncgcttcactgcccgctttcantccgggnaaaccctgtccgtgcccancttgcanttaaatggaatcgggnccaacgccnccggggagaaggccggttttggcgtnattggggcgcctnttttcccntttcctnggtttaattgactcgcttgggcttcggntcgnttcgggttggcggg

SEQ ID NO: 3820 - DNA, 833 bp, Homo sapiens
  misc_feature 4, 6, 8, 11, 29, 34, 653, 671, 688, 692, 695, 707, 717, 728,735, 743, 745, 746, 747, 750, 752, 753, 754, 758, 759, 791,806, 814, 815, 818, 828, 832, 833: n = A,T,C or G
aatngnanctncaccgcggtggcggccgnccggncaggtaccagggcactccaaatatgtaatttaacacattcattaataactatgataaatagatattttattccaagaacaatatcattagagagttagattggagggcaaggggattaagtatcttaagtttattgtttcccgagtgaccatttttaaaagcctccttccaggaactgtggaatgcctaccaggctccctgactgctgtctggtgagggtccctactggtgctgtggacagcacaatacacaatggggcacaagaaagccacgcagcctccccctcctagacacatgctgtgcacccccttggctctgcttggaaggttcagctctgcaaatggaaggttgcaaacatcagacaccttctttctgtttctgtctctctccccttcttctccccacagtgtccagccttggcccctgacttttcctggggttggggaggcctgtaggttcagaagctgagcagctgggtgaagacctcccttactcaatgtgctctggccatagggagcagacaagcaagctgagtttgggtagccctagacacatggaaaaagaaacagctttcttaaccttcaccccttcataaaatgacttcattaaaatgtcgctnggttaataagggaaaaanggtagcacttcccttgnttanggncaaacccccctnaaaaagggantggtttttttnaaaaaanaaaatttntnnnaanannnaaannggtcccctcggcccctttaaaaactaggggancccccgggcttgganggaattcnnaantcaagccttnttcnn

SEQ ID NO: 3821 - DNA, 641 bp, Homo sapiens
  misc_feature 405, 421, 468, 470, 483, 510, 517, 525, 529, 540, 546, 559,568, 570, 578, 588, 615, 619: n = A,T,C or G
gaattggagctccaccgcggtggcggccgaggtacactggctgtgctgtttctagcaccataaggcagtcatcattattgagccaggggctgtgcaaaattggggtgattgcagagccaaaaagcgggctggagggtggtttctggaatgcctgttttactattcttcctgttcctttgctctttctgccaacttcagaatccttcctttccttaaaacatttagtgatatccctgaatttatttaattgctacgtgagtgatttttgccccacagcactggaagataattggaatgcattctagcttatgtgctctggataatatgcaatttaccagccagctggagagtaggtatgcctttgtctcacaatgtcttgtaatttttaaaaagtttctcctattngctgggagtctcttgnacctttcttacggccatcatatatcctactaatgggggtcccttatngnctgaaatgtgtanaacacttctttttggtaatactggaanaagcttnctgggccnaatnaggggaagaanacccgncttttggtttttngtgaatggncncttgtgcnagtatgggcnccccaaattaaaacccctaccgggaanttgncccccccccccccccccccccc

SEQ ID NO: 3822 - DNA, 633 bp, Homo sapiens
  misc_feature 441, 519, 584, 609: n = A,T,C or G
gcgtaatacgactcactatagggcgaattggagctccaccgcggtggcggccgcccgggcaggtacctactcagttctgctgatggtagcgtaaacgccactatatacataaagaaatgggtgtggtggtgtcaataaaactttatttacagacaggcagtgtcctgacttgggtcccattggctgtcgtttgctgacccctgcaacttgacgctgcaaagtgaacagcccagcacctcccaggctgcggttaggacctcagcccgtcaccgtcatctcctgggtctcagttttctcatctgtaaagtggggctgaagccacctgcctcatgtttctcctgggatttttgtaaaatagtgcacaaaagtagacagaaagctccaaaggcagtttgcaaataggaagacacaatcaagtctatctgtgaaaaacatttattntgagaatctaaaatctggacaaaagtacctcggccgctctagaactagtggatcccccgggctgcaggaattcgatancaagcttatcgatacccgtcgacctcgaggggggggccccggtacccagcttttgttccctttantggaagggttaaattgcgccccttnggcgtaaatcatggtcataagctg

SEQ ID NO: 3823 - DNA, 661 bp, Homo sapiens
  misc_feature 372, 489, 522, 523, 532, 539, 550, 554, 561, 566, 568, 574,580, 584, 589, 591, 595, 599, 608, 609, 611, 612, 614, 615,616, 617, 623, 632, 637, 646, 648, 653, 654, 658, 660: n = A,T,C or G
gtaatacgactcactatagggcgaattggagctccaccgcggtggcggccgaggtaccaggttgggctaagagatgaaaaaccaggctcaagttgggccagagatggacaatgagccacttccaccagaattcccagccacatatgcccacctctgggtcagaagagccaaacgtatttatcgcttttgctcagggccaacatagacacttgattctctctcagggctgtgttttcccccaaatgtatcaatacatccctattttcttccccctttgttttcctttccctggtgacctgctaccccacaccccagcacactgatggtgttccctccaccacaccgagaccccgccacaagctctcagccctngtagagcacaggccccaccctgaaagttggcagagcaccgggctatcaagctgtgtcatgtggagccagcaagcccggcacaaccgtggatcccgggtacctgcccgggcggcccgnttctagaactagtggaaaccccctgggcttgcnnggaaatttngatattnaggctttattngatnacccggncggancntttggngggggnggtncaaananaaancggnaaacatttnngnntnnnncatggnagatagatnggggnaaaatttgngngactnntaanang

SEQ ID NO: 3824 - DNA, 740 bp, Homo sapiens
  misc_feature 188, 208, 210, 212, 215, 216, 219, 221, 228, 232, 234, 235,236, 254, 255, 259, 262, 266, 268, 272, 276, 277, 279, 285,287, 290, 294, 295, 301, 312, 325, 329, 332, 333, 337, 339,353, 354, 362, 364, 366, 371, 373, 382, 387, 390, 391: n = A,T,C or G
  misc_feature 397, 400, 404, 411, 421, 422, 434, 440, 443, 446, 451, 453,455, 466, 471, 472, 473, 475, 477, 478, 479, 480, 482, 484,499, 512, 514, 518, 525, 526, 529, 535, 537, 542, 551, 554,558, 560, 564, 566, 567, 568, 569, 570, 572, 576, 580: n = A,T,C or G
  misc_feature 581, 583, 584, 585, 586, 587, 589, 590, 597, 598, 599, 603,611, 615, 616, 621, 622, 627, 632, 633, 635, 651, 655, 663,676, 682, 693, 694, 696, 697, 705, 710, 720, 723, 725, 739: n = A,T,C or G
ggcgaattggagctccccgcggtggcggccgaggtacacacacgcatgccagcatgggatgggaggcaaggtctactcacacatgcaccagtaaagcaatgtgtgtgtgtcaaggggggaggggaggtagtggtccatgcctgagtaagtgccagcaaagcagcagtggggaggctgtagtgggtgangttgtaggtgggttggtgtntnanaannaanancctgtanttgntnnnagctcttcagatcgtcanngccnatnactntnagtnaatnntntattananatnaatnnctttangaaagcacctnttgtttagtgtcnttgncanngcanantacttttatatttnntgttggcnantnctttntngcacactangtaantanntcacantcnacantattatnttgcactttnnataaatacatanctttancantcnatatnantnttttattatanatacnnnanannnntncnaccatatcctacttnattaaaccacttncnctcnataaatnnttnaaatcncntttanatgtaaagnttncatntntcanannnnntngggnacgnnannnnngnnttttttnnnttcnttacattntttnnacttnnattgnatttnnanctctacatatttcctntttntttttctnctaacgaatactnaattcntttgtcccccnnannatttacantgganccctcccccnccncnccccccctttcttnt

SEQ ID NO: 3825 - DNA, 657 bp, Homo sapiens
  misc_feature 143, 191, 295, 300, 303, 307, 324, 328, 343, 381, 407, 418,420, 435, 440, 452, 464, 470, 473, 477, 491, 497, 506, 513,527, 530, 536, 537, 539, 554, 557, 559, 565, 571, 577, 583,593, 597, 603, 606, 613, 614, 615, 623, 627, 633, 636: n = A,T,C or G
  misc_feature 638, 640, 645, 646, 647, 648, 652, 655, 657: n = A,T,C or G
gtctcgagcgcgcgcgccatcggcagcatcggcgtgatgccgatgccgcccgcgatcagcacggtgcgggtgctccccgggtgcagcgtgaatccgttcagcggcaggctgacctcgagcgccatgcccggctcgaattcgtnatgcagcacgcgcgagccgccacgcccgccttcctcgcgctggaccgngatgcgcagcattccgccctcctcgcccaccacggaataggcgttgcggtggcgggcgccggcgcgcgaagtgaatgcgagttcgacgtgggcttcgggctgtnacggnggnaagnggctgcgcccgccattnctgngccaggcgggaattncactgaccactgggcctgtggcaggacgatgggccgtntatcaagatacattcatgaaagttanctcatgacttnanggccttcttaccggncggantttgaaaccggnggatgggcggtnccaggntanttcnccaagttacaaggncgcctngttggtcgncggcggntgccaaatatgcanatnctgttnngnaatcgacgtatattngananaaaatncgtacngggtgnccagancgctttaaanggcntagatncgngaattcnnncacttggncaanttccangantntntattnnnnaggngcntn

SEQ ID NO: 3826 - DNA, 624 bp, Homo sapiens
  misc_feature 489, 492, 537, 538, 559, 595, 615, 623: n = A,T,C or G
ggcgaattggagctccaccgcggtggcggccggggggacctcctcgtccaaagaagggaagaccttgtcggcaccattgagaggcgtgttctcttctggctgccgctcgagcaccgagagctcctgctcgtctactggctgtgagggttgggccaggtccatgtgccggcagggaaagtctccccgcgtacctgcccgggcggccgctctagaactagtggatcccccgggctgcaggaattcgatatcaagcttatcgataccgtcgacctcgagggggggcccggtacccagcttttgttccctttagtgagggttaattgcgcgcttggcgtaatcatggtcatagctgtttcctgtgtgaaattgttatccgctcacaattccacacaacatacgagccgggagcataaagtgtaaaacctggggtgcctaatgagtgagctaacttcacattaattgcgtttgcgctcactgcccgctttccantcngggaaaccctgtcgtgccagctgcattaattgaatccggccaacnncgccggggaagaaggccggtntttgcgttattggggcgcttcttccgctttccttanctaaactgacttcgcttggngcttgggna

SEQ ID NO: 3827 - DNA, 578 bp, Homo sapiens
  misc_feature 501, 523, 550, 551, 570: n = A,T,C or G
gactcactatagggcgaattggagctccaccgcggtggcggccgaggtaccagctacttgggaggctgaggcaggagaatggcgtgaacccaggaggcggagcttgcagtgagctgagatcatgccactgcactccagcctgggcgacagagcgagactccatctcaaaaaaaaaaaccaaaaaaaacagtgcttgttgttcttttgttgttattgttaaaggatcattatctcattatcaacaacattggcaggtaattgagcaactgtttgtctccttgtcaatgtggagatagaaaattgcctacgaggttggacaaggtgctggagcagcgtcaaggaagagagatcgaacaagaagactgctttgcccttggacagctttgtttctgaagcactttctcatattctcccatttaatcatcccctccctgccaacttttccaacagggtgcatacttaggtagagctattctttatcagcctggggctaagatttgntcctgggcaggttatctttggnctctgcctggatagaagcagggggcanntagaagtttgtccatgcantcccagac

SEQ ID NO: 3828 - DNA, 880 bp, Homo sapiens
  misc_feature 2, 5, 9, 13, 14, 15, 20, 22, 25, 27, 28, 30, 31, 33, 34,37, 41, 43, 46, 48, 52, 63, 64, 69, 75, 76, 77, 78, 80,82, 83, 84, 90, 92, 96, 100, 101, 103, 104, 344, 409, 422,425, 432, 433, 438, 439, 459, 460, 465, 480, 491, 540, 543: n = A,T,C or G
  misc_feature 547, 558, 566, 571, 590, 608, 616, 617, 619, 624, 626, 628,652, 656, 666, 670, 675, 676, 680, 683, 707, 713, 752, 768,769, 784, 788, 795, 814, 832, 844, 855, 856, 868, 876, 879: n = A,T,C or G
cntantctnggcnnntgtancnttntnnannannccngaancntanancccnttcatttactnnattcntgtttnnnncnannntccacngnggantttnncnntcgtaaacgactcactatagggcgaattggagctccaccgcggtggcggccgaggtacaaaactcaaacaaaagcatattctgtgaaaagcaagtgttctctaccccctgccttcccatttctctccctggaggcagccgatgatcctggtccttctgtgtcctgctaggaatgttctagcataaagcttttagatgctgtccgggacactaacgtcaggattctgcttgctgagaaggngttaggagctggctgtctttgagacagaaaacactgagtatgttttgagttcatgggagatgaanatttgtccctggnganaattttnnttggnntttgcttttggagaagcccnnaccanatcagaaattaaacntctaacaccangggaaacaaaaaagattttggtttgccccgggggtgccttgttttgggntcngtgnttctttccctncattttanggccnttgttttcttgaattgggnggaaaaaaaggcttttcnttgggggnncnttccnangncccttggcaaaaggggttaagagnaagnggggaacctnttgnttttnngccngcnttcagccaaagaaatcctttgggnaaaagnggggaattctggaaaagtttggaacttttattccgttgnaaggggtccaccaacnnccccttgggcccttnaagnccccaantggggcaagggttcccccntaggtagtttccctgganttccccaaaacncttctgggaannaaccttttaaantttccccnctng

SEQ ID NO: 3829 - DNA, 829 bp, Homo sapiens
  misc_feature 1, 2, 3, 4, 5, 7, 10, 13, 15, 16, 18, 19, 20, 22, 24, 26,28, 30, 32, 33, 34, 37, 38, 40, 42, 44, 48, 49, 51, 52,55, 56, 58, 60, 66, 67, 72, 73, 83, 84, 89, 91, 94, 98,101, 108, 114, 406, 420, 428, 433, 449, 453, 488, 491, 497,614: n = A,T,C or G
  misc_feature 628, 654, 660, 667, 734, 745, 779, 789, 799, 803, 813: n = A,T,C or G
nnnnnangtnatntnnannntntntntnangnnntgnngngntncgtnntnnttnncncncagccnntactnnattttttatnnttttngnagnggtnttnggacgtntccgtnatacgactcactatagggcgaattggagctccaccgcggtggcggccgaggtactttaggagacccaggcgggcagattgcctgaggtcaggagtttgagaccagcctggctaacatggtgaaaccctgtctctactaaaaatacaaaaattagccgggcatggtggctcacgcctgtagtcccaactgcttgggaggttgaggcaagagaatcgcttgaacccaggaggtggaggttgcagtgagccgagatcgcgccactgcactccagcatgggccgactagagcaagnactccattctcaanaataaagnaaagnaaagaaaacaaagaanaagnaaaagcttatatttgaacttctcttaataaaaagnaangaaagnagcaaagccttggattgccacaccaaaattctaaaaattttggggcaagttcgatcaaatttaaaagggattaattttatttttggcaatcaccaaaaaattaaatttctttttacnttcccccccccaanaaaaattcaaattaaaaaaaagtttncaaaanttaggcnaaacctttttttcccttaaattggttggttttagaaaaattggttaattccaaccccaaaatttacnatttgttggtncccccccaaaacctttcttttttcccaggtgtantaaaatttcnttattttgtnggtnaaaaggtggnagggggtaattacccg

SEQ ID NO: 3830 - DNA, 601 bp, Homo sapiens
  misc_feature 427, 442, 484, 529, 601: n = A,T,C or G
gtaatacgactcactatagggcgaattggagctccaccgcggtggcggccgcccgggcaggtactacaagatcaagatttttttcctaaagagccatttgtcttattttagcttcaagccaagccagggcatctgagaaataccaagcctccgttgtgatgtgtcgccatgaaaatgttggctgccctctggatgcaagtctgcttgtgctgtgctgtggctcagagttaaatttagataaaaatcagttaggagctaagaatattcccagctttcctgacaggttgtatccgtcattatgggaggaaaaacaaggaactggctgcctggcgacagggagcgggccaggctgagtgtgaggtcaggcctcggctggaatctcacggacttgaaaggacagagacgtttcctgagatgtctgcggcanaatgtgggaggcttnagccttgaggaaagttcaagtttgggagagaaaggttgccanaccctttgaggtgacccacactggctttataacttctaagaaggntcttttaggggaaacctgctttagaatgaaaacccctgaaaacgtcccttttgcttgccttcctttaacaan

SEQ ID NO: 3831 - DNA, 577 bp, Homo sapiens
  misc_feature 457, 530, 550, 551, 564, 577: n = A,T,C or G
ctatagggcgaattggagctccaccgcggtggcggccgaggtacagttgttcagggtgaagatttttacagaattcagtaaggatggattataatatgctgaacatttggttgcttttgtaataatagaggtggacagctgagacaaatctagacaaaatcttacactgactgttttgtaacgacatacgaatgaccctgaactttttaagtaacttaagaaataggccgggcacggtgcctcacacctgtaatcccagcactttgggaggccaaggcgggtagatcacaaggtcaggagttcgagaccagcctggccaacgtggtgaaaccccatctctactaaaattacaaaaattggccgggcgtggtgctgcgtgcctataatcccagctacttgggaggctgaggcaggaggattgcttaaacctgggaggcaaaggttccagtgagttganatcatgccactgcacaacagcctaggtgatagagcgagatcgcgtctttggaaaaaaggaaagaaaaggaaangttagcttgaccactctttnngaaaataatactngaaaaggaaaaan

SEQ ID NO: 3832 - DNA, 634 bp, Homo sapiens
  misc_feature 368, 377, 381, 383, 399, 407, 409, 410, 414, 421, 424, 426,428, 429, 432, 436, 437, 439, 448, 454, 455, 457, 458, 459,462, 464, 465, 466, 470, 472, 473, 479, 480, 486, 492, 494,496, 501, 504, 507, 512, 514, 515, 517, 520, 521, 523: n = A,T,C or G
  misc_feature 524, 528, 529, 530, 532, 542, 546, 549, 553, 557, 558, 562,563, 564, 570, 578, 583, 584, 587, 589, 596, 597, 598, 602,603, 608, 610, 611, 614, 618, 629, 630, 633, 634: n = A,T,C or G
gaattggagctccaccgcggtggcggccgcccgggcaggtatccctgttgtctgtgctatactgcagggggattggtcaacaggatgcattcctttctgtcacagttcattatactggtcagagttctgaggtcaccagctaacctgagcataatcagttccttggaagacattgggtggagtgacctcatagactcataggaaacctgaaaagaagccaggggagaaacaattgttttgaaggagtagggagatttcccaaagcccagctggaatgctgttgccaggaggaggaaccagttaaggggcagggaccagcctttttggaaatgctttgtaagaatgccctagggaagaggaaatacatnaacccttgntcangntccaaacatacttttngaaatatngnnttanatcctgnttnancnntgnccanngntcattttantaggtnngnnntcntnnnactntnntttgtnncctttntttacntntnttgtnctnatnttgcntnncnaanntnnttannntnaacattactngcgnttngganaacnnactnnncgaatnttatactncgcannggnanctgtgtnnnccannggatngnngcngatntatcatgatgnntann

SEQ ID NO: 3833 - DNA, 600 bp, Homo sapiens
taatacgactcactatagggcgaattggagctccccgcggtggcggccgaggtacgcgggtccagaagtaatttattggcctgacaccaggctgtgtataaattcacaaacgtatataacctactcccagaggaccatgtgcatgtgggagggattggacagattgttctatatttcctgggtgacaggctgtggtgggaaagggctggggaccctgagtgtttggcttgtagcctacacctaacaccagcttttcttggtcagtgctggtgatgccaaggcaacgagcgagcttgtggttcagcgctttgcatgatgtggggctcccttaaagaaccaaagtgtggggagagtgccttcagggcagggctgctgggaagtggcagggcgaggaggcttccttctgtccccatgattccctcacatagggtagtgctaagccgaggtccagagaaggtaaatgggagaagtctcataaagagttgaacttgtaggaatcaggggtgcccgttcagcatggcaattgaatccttgatcctcagggagttagctagatccgactcacacctgctggaccgtggagagccaatgtccctcccc

SEQ ID NO: 3834 - DNA, 612 bp, Homo sapiens
  misc_feature 561, 612: n = A,T,C or G
gtaatacgactcactatagggcgaattggagctccaccgcggtggcggccgaggtacaaagatctgtcacttggtttcagatcatagctgtatgagtgaaccttcaacccattagtgacctgaagtagtctcatgagtcccagataaatgtgcacctacagtgctgcccctcagttaaacccactccagggccttgtttttccctgtctttacccagtccacatggaccttgcaccttggtttgagttaatctcactctcacagcctttatttctttcacattcaaccctcatttgaagtcacaaacaggagcttctaacctcccaaactgttttttttaatctccgcctgtgacctcaggagttgcagctctaggccttcttttcagactgttgcctctccttgcataatgctgacatcacgttgtagtagtggtaaacctgtgcctggattgcatttcaattgtgctagccctaatagactaggaatgccaatttcagagaggagggactagagccaagattgagaaagaaacaggaacagaacagggcactgggcctngagtcctgtttgaaggtgaagagggagaaaaagttgtattaccctcggaan

SEQ ID NO: 3835 - DNA, 591 bp, Homo sapiens
  misc_feature 475: n = A,T,C or G
gactactatagggcgaattggagctccaccgcggtggcggccgaggtacccgcccggcgcagccccgatgccttcctgtgaatgggacagattgccatatggatgaagacactgaacaagctgtaaaactcttggcgacatgtgcccggggggattgtcccatattaacaccacctgggctgtggcaattgtgctctgtctgtgcagtggcactgaggagcccaacaggatgttattttagagtacctgcccgggcggccgctctagaactagtggatcccccgggctgcaggaattcgatatcaagcttatcgataccgtcgacctcgagggggggcccggtacccagcttttgttccctttagtgagggttaattgccgcgcttggcgtaatcatggtcatagctgtttcctgtgtgaaattgttatccgctcacaattccacacaacatacgagccgggagcataaagtgtnaagcctggggtgcctaatgagtgagctaactcacattaattgcgtttgcgctcactgcccgctttccagtcgggaaacctgtcgtgccagctgcattaatgaatcggccaacgccc

SEQ ID NO: 3836 - DNA, 598 bp, Homo sapiens
  misc_feature 65, 98, 202, 290, 393, 404, 411, 428, 463, 465, 497, 529,532, 574, 576, 583: n = A,T,C or G
gtaatacgactcactatagggcgaattggagctccaccgcggtggcggccgaggtacacgcctgnggacctgtgggtcaactaaacctcttatcctgntaaattacccagggttttccactggctatgacatacccaaatggaaatatcaagtaagcagttggatatacaggtcttgagttcatgagggaatgaaaccaaanctggaggtagtaaatctgggaaccaaccacagatagatgggatcaacaccaagctaatacatacaaggatctgctatttaaataccanttatgaaccatgctaattctatgatcttgagaaaataacgacctcactcctccatcttctcatctgaaaaatgggaatgaaagtaatgcttttttagggtggntgtgaggattnccgcgtncctgcccgggcggccgntctagaactagtggatcccccgggctggaggaatncnatatcaagcttatcgataccgtcgacctcaanggggggcccggtacccagcttttgttcccttnagngagggttaattgcgcgcttggcgtaatcatgggcatagctgntncctgtgngaaattgttatccgc

SEQ ID NO: 3837 - DNA, 603 bp, Homo sapiens
gcgcgtaatacgactcactatagggcgaattggagctccaccgcggtggcggccgcccgggcaggtacctcctttttaacctctagctgatcttggaatttcttttgtagtgtataattgggaaacaatagggatcaatgctctttcctgatctcaaagaagcccactctctagagagaaaagcaagacctataatattgaagatttgagaaaaagttaaattgtgataaaacatgctgatttctcacactgacttaggaaaagcacctaagcctcaaaaacgagaattgtcttaggagttaatgctgtggctattcttgtcctggcatttgggtgaatgcatgaattctttatttcagtttatagaataagataaactatcgagaacttcaggttgctgcataattttgacagccattccctgtacctcggccgctctagaactagtggatcccccgggctgcaggaattcgatatcaagcttatcgataccgtcgacctcgagggggggcccggtacccagcttttgttccctttagtgagggttaattgcgcgcttggcgtaatcatgggcatagctggttcctgtgtgaaattggtatc

SEQ ID NO: 3838 - DNA, 603 bp, Homo sapiens
gcgtaatacgactcactatagggcgaattggagctccccgcggtggcggccgcccgggcaggtacccatgaacatagtttttactctttttaaaagctgtaggcactggaaggtcagtgttcagccatgacagtggaaggtcagtgttcagccatgacaaggcccaatgtcatgggccctctgtcatcatcctctgtccgtagtgatccccagacacttttgcatggctgtttagacagaattttcctgcagctcttttgggagtagctcttgaaagtttaacccctgacagttgatgaagaacagtgaggcttaggaggcagataggcctttgagcaaataactctgagcaactggttgccattgtcagttcccctaccaagtatgcgtttgatttttaaaaggattccccaaagttctatttaggactacagagtctctaagaatgtatttctgttgtcaaggtcaggagcaagatcatctctgtggacctgtcggtttgaaggagttgcaagatattctcatcattcattgatttatatactcaaaaaccatatatttgcatgtgccaggaaaaggtaaggaaaggggagccttcatgtg

SEQ ID NO: 3839 - DNA, 900 bp, Homo sapiens
  misc_feature 543, 566, 616, 654, 665, 672, 673, 692, 696, 697, 699, 713,716, 718, 741, 762, 771, 783, 789, 800, 805, 811, 812, 816,823, 824, 825, 826, 829, 837, 848, 850, 853, 856, 862, 863,872, 874, 876, 884, 885, 888, 889, 896: n = A,T,C or G
gcgtaatacgactcactatagggcgaattggagctccaccgcggtggcggccgcccgggcaggtacgcgggtgtcttcttccttttttctttttcattcttcttacacttgaataaaatccaaaaattattcttggcccacagaccatatttgcccacccctgctttaaggtgattctttcatgtttgatacatccaaaaaatgagagctgatacctgattctcaaacaaattaatatttttgcctaaatgaatttcatggtttgccatggtggcccccatctgtaatcccagcactttgggaggccaagttgggggcaaatcccctgaggtcaggagttcgagaccagcctggactacatggtgaaaccccatctctactaaaagaacaaaaattagccaggtgtggtggcagatgcctgtaatcccagctacttgggaggcagaggcaggagaattgcttgaacccgggaggtggaagttgcagtgagctgtacctcggccgctctagaactagtggatcccccgggctgcaggaaattcnatatcaaagcttatcgaaaccgncgacctcgaggggggggccccggtaccccactttttggtcccttttagtngaggggttaaattgcccgcttggcgttaattcaatggncaataagctgnttcctgnnggggaaaattggttattcngctnnanaaatttccacacanacntnccaaacccggggagcaataaaantgtaaaaccctgggggtgccntaatggaanggaacctatacnttaccnttaatttgggnttggnccttanntggncaccttnnnnctngggaaaancttttccctgncnggntangatttnntgaaatttntncnaccccccnncgnnaagggcntttt

SEQ ID NO: 3840 - DNA, 900 bp, Homo sapiens
  misc_feature 59, 62, 146, 176, 202, 244, 302, 350, 357, 370, 379, 392,403, 408, 445, 459, 461, 464, 478, 490, 496, 523, 531, 538,566, 583, 600, 609, 639, 640, 644, 645, 648, 661, 703, 704,720, 726, 732, 748, 754, 763, 779, 784, 788, 795, 797: n = A,T,C or G
  misc_feature 798, 802, 814, 815, 820, 829, 830, 831, 842, 843, 849, 853,854, 856, 860, 864, 865, 870, 871, 873, 879, 885, 887, 891,893, 897, 899: n = A,T,C or G
gaattggagctccaccgcggtggcggccgaggtactttttttttttttttttttttttnttnctacactaatttaatctccttgcctaatgttctttagtcctccaacaggtctgcctacttaaacaatttctagtcacaggatgnggctgccacagttttatctccatctggcanaacataaccaacccgcttgagctctnagctcctgttttatagcaactaaagtttccttgttcacccgntcccccacgccacctccatgacgtgcatttctcgtaaaactacagatcagtaaactanctcagggaacttgcagtaatgtttgacaaaaaaaaaaaaatcaaaaancaaaaanctagtacccctgngatgtgtancaaaattcatcanactagcttgtntgttntggcactgattgccaggcaagcttccattgtgccttnatagctcatacacngngcnctttccctgtattnaggccccttgtngggttntctggatccatgggcaaaaaacttgantagggggngggaaanaaagggaaagcaacaatacctttttaangtcaaaaactggaaaantaaatagaatggcttantttctttcntattatgccaaagggggatgaaaaaatatnncctnntgnacccctttttcanctgggggaaaatgctttaagggtttggttttaagcaaatttnnttacttgggaaaatgnactggnctttanaaaagtatggcaaaangtcttnaaaaaatangttaaggtgaaccatnttttngatngggaatnannatcnccctggttaaanntttcntaaaaatgnnncaaaatttttnnaaaccnttgnngnaggntccnntgccnngngcggtncggttntnaaanantaangng

SEQ ID NO: 3841 - DNA, 1250 bp, Homo sapiens
  misc_feature 1, 3, 6, 10, 11, 16, 20, 24, 26, 27, 28, 29, 32, 36, 38,39, 40, 42, 43, 44, 46, 49, 51, 52, 53, 54, 55, 57, 59,61, 62, 63, 64, 65, 70, 71, 72, 77, 81, 82, 83, 86, 88,89, 90, 91, 92, 93, 94, 95, 98, 100, 106, 108, 109, 110,120: n = A,T,C or G
  misc_feature 135, 144, 161, 174, 184, 185, 345, 504, 510, 511, 512, 523,542, 556, 584, 593, 595, 610, 620, 638, 661, 672, 673, 677,678, 679, 689, 692, 694, 699, 705, 716, 721, 733, 750, 756,757, 759, 773, 776, 785, 786, 791, 795, 809, 813, 818: n = A,T,C or G
  misc_feature 844, 848, 849, 866, 877, 880, 881, 898, 901, 909, 911, 920,929, 932, 945, 950, 958, 966, 974, 979, 981, 984, 990, 996,1002, 1004, 1007, 1008, 1016, 1017, 1019, 1024, 1032, 1033,1035, 1046, 1047, 1062, 1063, 1065, 1068, 1070, 1073: n = A,T,C or G
  misc_feature 1074, 1075, 1084, 1090, 1092, 1099, 1100, 1104, 1108, 1118,1120, 1121, 1125, 1128, 1133, 1142, 1149, 1152, 1155, 1158,1159, 1166, 1180, 1181, 1184, 1186, 1189, 1190, 1191, 1195,1200, 1203, 1204, 1213, 1215, 1220, 1223, 1226, 1228: n = A,T,C or G
  misc_feature 1232, 1234, 1235, 1236, 1239, 1245, 1248: n = A,T,C or G
ncnccncctnnacganatgntatnannnntanatantnnntnnncngtntnnnnngntnannnnngattnnntcggnaatnnncantnnnnnnnnagngnaagggntnnngcctttgaangcgcaatacgatttntatagggcnaattggagctccaccgnggtggcggccgangtacgcgggnnagtctcgctctgtcacccaggctggagtgcagtggcgccatctcggctcactgcaagctctgcctccggtgttcaagcgattctcctgcctcagccttctaagtagctaggattacaggcgcgcgtcaccacgcttggctaatttttgtatttttagtanagccgaggtttcactaagttggtcaaggatggtctcaaacttctgacctcgtgatcccgtccgccttcggcctcccaaagtgcccgggatttacaggcgttgaagccaccgcgcccggccgctctaggaactagtgggatcccccggggcctgcaaggnaatttnnnaatattcaagncttaatcggattacccggncgaacccttcgtanggggggggggcccccgggtacccccaanccttttttngnattccccttttaagntgaaggggtntaaatttgccgccggctntgggccggtaaaatcaaatgggnttcaataaggnnttgnnnttcccttgtngtngnaaaangttggnttaatccccgnctttnaccaaaatattncccaccaacaaaacaantaactnnangccccgggggaagncanttaaaaagnngttanaaangcccctgggggggntggnccctnaaaatggaggttggaggccttaaccntccnnccatttacaatttggcnggttggccggntannacttgggtccccgattnttncaaaaatnangggaaaaanccttggtcntangcccaaatcttancctantaaagtgnatatttgnatcccaancgccncnggntggaanaagggntcgatntnatnntgataatnngngaccncctcattnnangcctttactannttttacacttgacanncnctnanggnnntggtgatgngaattngnacattgnnttgnaatngcggtgcttnanncatnctnacttncagaaaggngcggggnatntcnccnntctttcntcaatataacaatnncgngngannnaacntcctnatnngatataaantnatatnaanatnanaagngnnngcntatcanggncg

SEQ ID NO: 3842 - DNA, 407 bp, Homo sapiens
  misc_feature 152, 209, 280: n = A,T,C or G
cgcgtaatacgactcactatagggcgaattggagctccaccgcggtggcggccgcccgggcaggtacttttttttttttttttttttttttttgcttggaaaattttcctccatccctttattttgagcctatgtatgtctttgcatgtganatgggtcttgtctttttatctagcttgccattttgtgtcttttaattggggcattcnacccatttacatttaaggtaatatgtttgaattcaaccctgtcatcataatgctggctggttattttgcanacttgtcaatgtagagagtgaaaataagtgaaggcagaatcctgggaggtaagccagcctgaaaatattgatgacactggatggccttaagtttccattttgactggcatgtaatccagccaaagat

SEQ ID NO: 3843 - DNA, 401 bp, Homo sapiens
cgtatacgactcactatagggcgaattggagctccaccgcggtggcgtctgagcttccctacctcttgatttgtttgcagtgctgctagtccaccctaatctctgcctgctcaaaacttctctcaatgcaattcagagagatagagtttagcactacagtgacttagatgtatgttgaatttgatctttaaataaatcatatgcatcttaagggcacagatgaatttgatgattcttttgtgacatcttgcagttgatccttaacaaataattattagtagataacaatcaacaaccaatccagtgtttattcttacctgccatgttaatctctccatttgaatctacttgaattattctctttttgtttcagtgttggagtgtaattgttccagcataaa

SEQ ID NO: 3844 - DNA, 825 bp, Homo sapiens
  misc_feature 588, 618, 645, 670, 682, 698, 708, 710, 723, 735, 736, 753,766, 769, 771, 779, 814, 821, 823: n = A,T,C or G
gactactatagggcgaattggagctccaccgcggtggcggccgatcacccgttggccaaggagtcgcgtgtcagtctcaaggcgttatccgaacatacgctggtcgttaccgatcaggtccacagttggcagcatgtgttggacctgttcagcttttacgatcttgcacccgccgttgtgcaccgtgtgcgcacgttcgagttgcagcgtagcctcgtcgccaatgggtttggcgtggcgctgatttatacccggccgctctagaactagtggatcccccgggctgcaggaattcgatatcaagcttatcgataccgtcgacctcgagggggggcccggtacccagcttttgttccctttagtgagggttaattgcgcgcttggcgtaatcatggtcatagctgtttcctgtgtgaaattgttatccgctcacaattccacacaacatacgagccgggagcataaagtgtaaagcctggggtgcctaatgagtgagctaactcacattaattgcgttgcgcttcactgccccgcttttcagtcggggaaacctgtcgtgccagctgcattaatgaatcggccaacgcncggggagaggcggttgcgtattgggcgctnttccgctttctcgctcactgacttcgntgcgctcggtcgttcggctgcggcnagcggtatcaanttactcaaaggcgggnaatacggttntncccaagaattcangggataaccccnngaaaaaaacattttgangcaaaaagggccngcnanaagggccnggaaccccttaaaaaaggcccctttttttttgggntttttcntnag

SEQ ID NO: 3845 - DNA, 818 bp, Homo sapiens
  misc_feature 685, 691, 726, 730, 742, 768, 772, 776, 790, 793, 814, 816,817: n = A,T,C or G
gactcactatagggcgaattggagctccaccgcggtggcggccgaggtacaaatgttttctggacaatctgtgctgtgattttggaaattgtgtgtgaaagaggagagtagctgggcgtggtggctcgcgcctgtaatcccagcactttgggaggccgaggagggtggatcatgaggtcagttcaaggccagcctggccaagatggtgaaaccctgtctctactaaaaataaaaaaaatagccaggcatggtggtgggtgcctgtaatcccagctactcgggaggctaaggcagagaattgcttgaacccgggaggcagaggttggagtgagttgagatcacgccactgcacttcagcctgggcaacagagtgagactctgtctcaaaaataaaaacaaacaaacaaaaaagaagagagtgaaagaatttgagtccttgcacagacaataactgttttttatgtttaaactttttagtttcttatgttaaactttttatgtttaaactttcaaaaggttgaataaatttcaccttatgcttgcattataatagcaaagttccttgatatgcaaaagccacaaaagtaatttttagcttaagtacctgcccgggcgggcgctctagactagtggatcccccggctgcaggaattccatattcaagccttatcgatacccgtccganctcgangggggggcccggtacccaacttttgttccctttantggngggttaattgcncccttggcgtaattcatgggccatanactntttncctggggggaaaanttnttttcccgttcccaaattccncnnt

SEQ ID NO: 3846 - DNA, 846 bp, Homo sapiens
  misc_feature 5, 13, 14, 17, 26, 35, 38, 57, 60, 61, 62, 67, 72, 73, 75,78, 81, 82, 90, 92, 96, 126, 177, 186, 224, 233, 251, 352,387, 404, 436, 518, 532, 566, 585, 599, 621, 636, 644, 645,646, 656, 693, 719, 729, 730, 747, 761, 776, 785, 786: n = A,T,C or G
  misc_feature 789, 799, 803, 807, 812, 815, 820, 824, 825, 828, 829, 831,835, 840, 844: n = A,T,C or G
actcntatacggnnagncgaatcggngctccccgnggnggcggccgaggtactttcnctnnnttttnttctnncnttnttnnggctggananaganagatgttttatttttgccaaagcatgtganagtaagtagcaaacatcatgacacttcacccctcaaatattttcccacgtntcacttaanaacaagggcattcattctgttacatgaccacaatacantcagcacanatagatattaacattganacaatgctctgatgtattggtatctactatgcagttcataatcaaataagggttttggtaacttgggatccataaatggtctgcaaggtcagcccctgtanacctgcacttagtgggggccatttccctgtctcangggcctgctctactggngatatttttcactggctctgttgctcacttanaattttttctcccagctgttgacattttattttctgcatagttctgaagctgcagcaattgttcttatgccttcttgattgnaaatttcatagaanctgtcaatttctaagggatttcatctcctttgangcaaccaggtcaatagctncaaacctatctganaatgtctgccattggcctcctntttgtctaaaaaggngtctttannnctctcagccncttttgggaggttggagggtgggcccgatcacaaggngaaaaagatcaaaaacattttttggnccaacatggnngaaaaccccccgtcttntactaaaaaatacnaaaaaattttccccnagaattggnnggngttgcccccntggnaatncaaanttnttttngggnnggnngnggcnagggnaaanct

SEQ ID NO: 3847 - DNA, 824 bp, Homo sapiens
  misc_feature 187, 189, 290, 295, 296, 366, 371, 394, 446, 469, 512, 516,556, 568, 602, 618, 651, 654, 671, 696, 709, 710, 714, 715,718, 732, 735, 738, 751, 765, 766, 776, 788, 794, 817, 821: n = A,T,C or G
ggcgaattggagctccaccgcggtggcggccgcccgggcaggtacgcgggtggccgaatcctggctgctggaggcaagtcaaatcatcttcatttgtggtgcttggaagctaggcagctctttagaattatccagatgcccactaaagttcgagccattcgccatctggaatttcttcctgatagtntngatgctggttctaatcaggttcttggagtacctcggccgctctagaactagtggatcccccgggctgcaggaattcgatatcaagcttatcgataccgtcnacctnnagggggggcccggtacccagcttttgttccctttagtgagggttaattgcgcgcttggcgtaatcatggncatanctgtttcctgtgtgaaattgttntccgctcacaattccacacaacataccgagccgggagcataaagtgtaaagnctggggtgcctaatgagtgagcnaactcacattaattgcgttgcgctcactgcccgcttttccagncggnaaactgtcgtgccaactgcattaatgaatcgggcaacgcncggggagaggcngttttgcgtattggggccgctcttccgctttctngcttaattgacttcgntgggctcagtcgttcaggcttgccgccaaaccngtnttcaagctcactcaaangcgggtaattacggttatccacaanaattcaggggaannaccnncangaaaaagaaacatnttnaancaaaagggccaanaaaaaagggcccanngaaacccgtnaaaaaaggcccncggttnctgggcgtttttttccataaggntccnccg

SEQ ID NO: 3848 - DNA, 802 bp, Homo sapiens
  misc_feature 564, 647, 649, 659, 698, 715, 733, 744, 758, 777, 789, 792,799, 802: n = A,T,C or G
atagggcgaattggagctccaccgcggtggcggccgcccgggcaggtacgcggggaagctcttgagctcctctacctcttagaaagcacaattgaatcagatatcatatgaaagacatacacacttcatgtaatgctacctgcaagtctccctagaaaagcagtttttgtaggtgaaaacaatgaagccaggtaatattgcaaggaggctgtaattttagcagacctaccaacaacactgatgtaggaagctcattattttaatttctggagccttttaattttttctttagaaagtgtataaataattgcagtgttgctttgcttccaaaactgggcagtgagttcaacaacaacgacaacaacagccgcagctcatcctggccgtcatggagtttcttgaaagaacgtatcttgtgaatgataaagctgccaagatgtatgctttcacactagaaagaaggagctgcaaatgaacacttcatagcaatgtggaactccaacagaaaccggtgaataaagatcagtgtcccagagagagaccagaggagctggagtcaaggangcatgtacctcgggccgctctagaactagtgggatcccccggggctgcagggaattcgaatatcaaagcttaatcgatcccgncnaccctccgangggggggcccggggacccagcttttggttccctttagtnggggggttaaattgcgncccttggcggtaattcantgggcaaaagnctggtttccctggnggggaaattgttattcccnttcacaaatttnccncacaaancan

SEQ ID NO: 3849 - DNA, 846 bp, Homo sapiens
  misc_feature 473, 479, 536, 557, 562, 575, 591, 601, 604, 609, 612, 625,635, 640, 663, 665, 668, 669, 677, 693, 704, 725, 728, 739,740, 747, 753, 756, 758, 766, 768, 772, 793, 794, 796, 811,819, 827, 829, 832, 833, 835, 837, 842, 844, 846: n = A,T,C or G
ggcgaattggagctccaccgcggtggcggccgaggtacaagctgttctcccgcagcagcctgtgagtctttctcttgaccgtcttgttcaggagctcttccgctctgagaaaaccagcaaggcctctccaagcgcaccgagcaggaggcatcccgtggttgcactggtcaggatcgcatcaaacagcaatattgataagccagctgtgattatcttctttaccttggcaccgagctgaagatctgttagaaaccctctccaaccaggactttcaggagaaacggtggccaccgcccagaataacaaggccccagcagcaaggtgtccttttcccagcaagtgaaacctgccccccgccaccacctgtccccgcgtacctgcccgggcggccgctctagaactagtggatcccccgggctgcaggaattcgatatcaagcttattgatccgtcgacctcgagggggggcccggntcccanctttttgttccctttagtgagggttaattgcggccgctttgggcgtaatcaatgggncataggcttggtttcccttgnggtgnaaattggttattnccggttcacaaatttncacaacaaancantaccnaancccggggagccantaaaagtggnaaaanccctggggggggcccttaatggngnggnngcctaacntcacatttaaattggnggttggggctnaacttggccccgctttttcangtngggaaaaaccnngtccgtngccaanctngnctttaaantnaaancgggcccaacccccccggggnnanaggcggtttggggtnatttgggngctttttncnttnntngnttaantnan

SEQ ID NO: 3850 - DNA, 672 bp, Homo sapiens
  misc_feature 637, 648, 659, 661, 671: n = A,T,C or G
actactatagggcgaattggagctccccgcggtggcggccgaggtactccagaagagtgtccctggtctgagaactactgctctaggatgacccttcttgctgctgctcaccagccagccttctggccccatgagtattcttggtcttatttaacctatatcccccaaaggcaaggatttagaggctatttggtcagtcttagaaaacactactcatgcctaagagtacctgcccgggcggccgctctagaactagtggatcccccgggctgcaggaattcgatatcaagcttatcgataccgtcgacctcgagggggggcccggtacccagcttttgttccctttagtgagggttaattgcgcgcttggcgtaatcatggtcatagctgtttcctgtgtgaaattgttatccgctcacaattccacacaacatacgagccgggagcataaagtgtaaagcctggggtgcctaatgagtgagctaactcacattaattgcgttgcgctcactgcccgctttccagtcgggaaacctgtcgtgccagctgcattaatgaatcggccaacgcgcggggagaggcgggtttgcgtattggggcgctcttccgctttcctcgcttcactgaactcgctggngcttcggtcgntcggctgcggncnagccggtatnt

SEQ ID NO: 3851 - DNA, 660 bp, Homo sapiens
  misc_feature 33, 211, 319, 415, 420, 423, 483, 516, 568, 571, 605, 614,632, 637, 645, 651, 656, 657, 658, 659: n = A,T,C or G
ggagctccaccgcggtggcggccgcccgggcanggtacgcggggtgactgctaagactgccggggctgctgcctgctgcttctcgcgcctgtcctctccaagatgcagttttttgatgctgaggagctcctggtcgatgaagaggatgatgtttttggtgaaggtaaatgcatctttctggcaggaggctctccggtctgctttgctttgntttgacaccactggacacttttgcccagcttgggcaaggacttgagtattttgaaatgataaaaacaaagcatcctgagtgaggtagtggctgcaaatatcaacttangcactgaaggaatacacaaggcaaggggtggaacaaggggttgagtcattcccgcaaatacattttttaaagtcatgactaaaataaaggtttaantttangcnggaaaatagtacctcggccgctctagaactagtggatcccccgggcttgcagggaattcnatatcaagcttatcgatacccgtcgacctctgngggggggcccggtacccagcttttgttccctttaatgagggttaattgcccnctnggcttaatcatgggcataagctggtttcctgtgngaaaattgnttaaacgctcacaaattncacancaacatancaaccngggannnnt

SEQ ID NO: 3852 - DNA, 840 bp, Homo sapiens
  misc_feature 2, 3, 248, 264, 435, 508, 535, 620, 714, 715, 716, 717, 719,720, 721, 723, 761, 780, 782, 791, 793, 808, 809, 815, 830: n = A,T,C or G
tnnggctaattggagctccaccgcggtggcggccgaggtacgcggggcacgtcagaaggagaggcctctgcagacacggagcacacgtgtgttatcaagcggggctgaggagtcttcagctgaaccgtgcacctgaagatgcccatgactccatgatcagatagaaactattgagcttggcacctggggctctggaaatccagacactaagttgtgatcctggcaccacttccctggaaacccgtatntggacatgcccacatncttccggctttgtgcctcttgtctggatttcttgggacagacacagcaaagcctcacgtgttctgagaagtgacctggccttccactgacattcttggctgaagttttcaactcaagatggtcaccctgcttatcacacagaaccagatgcttcagcaccttggagagctncacaagacccacagacccgggccccccaaccacaagaaatataataaaatactgctttgagactcaatttcangcacttagctacataaataaaagtttncaggaagactaaatcttagaaccaacagggagatgagcacttccagagttttcatcagctttccaaatgatattttaaatatgangaacgtgaggcctggcttgggcctgtgggggaaaatttcattacagcatccttggtaataaatgcttgaaaattcatgccaaaaaaaaaaaaannnnannntnttccttgcccggggcgggccgtttttaaaaactaatgngggatccccccgggcttgnangaattttgnanatcaaaggcttattnnataccngttttacccttttanggggggggcg

SEQ ID NO: 3853 - DNA, 883 bp, Homo sapiens
  misc_feature 2, 3, 4, 7, 21, 167, 251, 253, 256, 323, 346, 356, 376, 402,459, 466, 523, 551, 570, 576, 582, 585, 594, 603, 604, 609,622, 630, 642, 653, 664, 673, 674, 679, 682, 689, 709, 718,720, 724, 729, 745, 747, 759, 763, 764, 766, 782: n = A,T,C or G
  misc_feature 794, 799, 808, 809, 810, 813, 815, 816, 818, 821, 827, 837,850, 854, 858, 865, 883: n = A,T,C or G
gnnnttncgacattactactntagggcgatttggagctccccgcggtggcggccgcccgggcaggtactttctttttttttttttttttttttttttttatttctggagctcttgctctgtaataagagctagagtggatgggcctgaccctagatgttttatgtanatgaggtcttggtttgagagaaacaaggattgggaaaaaagcctgtattttccagtcctagtgaaacgggagagaaagaaggtntnatnaagtggagcaaaagtcagacaccagggtccccacttaatttttagcccttggtcaccacagcccaanaggttggtggggagttgctttanaaacacccanatggccacggggaagcccancaacactggggctggtggagtgcctnggcagaccctgggagaaggtcagcccttggcttgaagcttatcctggctgtttacanaggtttntgatgggacaccggtaggccaatgagcctgtcatagggctgctgtctcctttagctnctttacggaatgtgagggacctggaagntccatttccttcagctgangtttanaaggtnctnaaattcagngggccaacnnaactnaagggttaaaaanagcatagntgggagattttnaagggcccggngggccaatttntaagggtcnntgganctncaacaanttgggattcccctaagggcnttggacttncnaacnagttngatgccccttaaccananttggaacctttnatcnngnttaccttttggtccgntttttaaaactntttgnggattcccnnnggntnnanggnaatttngaattttaanccttttttcgatncccnttcnacctttnaaggggggggccctgttn

SEQ ID NO: 3854 - DNA, 876 bp, Homo sapiens
  misc_feature 391, 466, 499, 508, 515, 522, 561, 564, 570, 592, 600, 607,615, 616, 627, 633, 636, 647, 660, 672, 678, 681, 683, 684,686, 696, 710, 718, 756, 773, 780, 781, 787, 788, 790, 793,794, 817, 821, 824, 838, 839, 850, 857, 869, 872, 875: n = A,T,C or G
  misc_feature 876: n = A,T,C or G
gactcactatagggcgaattggagctccaccgcggtggcggccgaggtacttatcaaaaatactttttacagtagctatttcaatagatgacaatccctctatacccttcagactattagatctcctaaggtgtctctaagcatgtaatcttcaggggaagtatttgctctgccatacgcatggggtgcaatcacaggctctatccagactgattctatctggtgaccaggcagtgagatatcacatcaaagttgactcaatctggcttattaatggggaaagcagaaatacagtgaaagctgtcagagactttgcatcttttggaaaaactatcttacagttaaacatctggagcgtctccaaaagtgaagaaggtctctccctccttgntgtgcagctaaatcatcagagctctttcattggagaccagtttctttttcaaaaattaaattaaaaattaaattngtttttttggaaaccaagggtctttggctctgnttgcccaangctggantggccantggtgccaataaccgggttactgggagccttcccccttncangggttnaagcaatccctcccatctcaancctccggngtactantggggccnncaggcatgccncccacntancctggccaaantttaataattaanttccggccaaanacccanggncnncncttttgttgnccaaggcctgggcntcgaaccnccctggggctcaaatgggatccctccccatctttgggncctcccaaaaggggctngggaatnnttaggnngngannaaacctggggccccaacttgganaaanaantttcttttaaaaanngggcaaggggntggaacntgaaaatttttnggnggnn

SEQ ID NO: 3855 - DNA, 830 bp, Homo sapiens
  misc_feature 473, 581, 589, 604, 626, 634, 647, 674, 680, 700, 701, 703,715, 724, 727, 728, 729, 730, 731, 733, 737, 739, 750, 751,763, 765, 766, 783, 786, 798, 806, 816, 825: n = A,T,C or G
ggcgaattggagctccaccgcggtggcggccgcccgggcaggtactttcactcttgctctttttttttttctttttttaatcgatatcctgctggcctgtgtcagtaattttcttgtgctttatgacttctcagtaagaaacagtggatggtctgatgtgttaagaaatgcatatgtaaggccgggcgtggtgggtcacccctgtaatcccagcactttgggaggccgaggtgggtggatcacgaggtcaggagatcgagaccatcctggctaacatggcgaaaccgtgtctctactaaaaatacaaaaaatgagccaggcgtggtggcaggtgcccgtagtcccagctacttgggaggctgaggcaggagaatggcgtgaacctgggaggcagagcttgcagtgagccgagatcaccccattacactccagcctgggccacagagcgagacttaaaaaagaaaaaaaaagangaagaagttcgagaccagcctggccaatatggcgaaaccccatctctactacaaatacaaaaattagccaggcatggtggcagatgcctgtattcccgcttacttcangaggcttnaggcaggagaatcgnttgaacccccagtttggcgganggttgcantgacccaagatcncacccacttggcacttccatcctgggntgacangagccgagaattttttcccnntnaaaaaaaatccntattctaantannnnntnaggntncctttgggccnnctttaaaaaccnannggggatccccccgggcntgngaggaaattcgnttttcaancctttttcgnttcccgccnacctc

SEQ ID NO: 3856 - DNA, 902 bp, Homo sapiens
  misc_feature 282, 394, 427, 434, 447, 454, 464, 472, 488, 536, 545, 555,557, 558, 560, 561, 563, 566, 568, 572, 603, 619, 629, 639,645, 649, 651, 657, 662, 675, 677, 679, 684, 686, 690, 696,697, 699, 706, 708, 720, 725, 726, 730, 736, 743, 744: n = A,T,C or G
  misc_feature 747, 748, 763, 767, 772, 777, 779, 780, 782, 783, 785, 791,792, 799, 801, 803, 806, 807, 811, 812, 817, 819, 823, 824,839, 842, 856, 858, 860, 863, 868, 873, 875, 885, 886, 890,894, 899: n = A,T,C or G
gaattggagctccccgcggtggcggccgcccgggcaggtaccctgcagaatctaccaaggcactctgtagcaaagcaggccttccacctgtctcggggaacccagctggccaccttgcactcagcctctgccagtcacctcagggctggcatttgggagtcctgactgcacgccaaaggttgttaagtggctttctctgaactcatttgaacagctgagtaaactgttcttgctttcacaaggaaaagaactcctgaagtcattagaactcaccaaaccagnttccttgtttttgaagaaagcaggtaatgtggctttgccagcaagaagcaggccttgggcgtccatctccttctcaggtgtgtttactcaggaaaaggtgacatttggatangggcaggtgtgttttgctgaactgagcttcagnctaatcnttcccggaaaacntcctganactttctctncccctgtnattctccccacctggnggatgggaagtatatttgcagtcttcattgcccgggacttgcttaaangggaatggngcacactccncnngnntnaantncttnttccaaaatttttgggggaacttttgggtgncctattaatacctttnaaatctcttntcccattaantgaaanactnantggganaaagngtttcccctgggnantnaaaangngggncttttnngntaaatgnancaatacccaacnggtgnnatcnctttanaattaannccnnctctcccaagggggncccnaaaantgctnanncnngnaaaaanngggcggncncnccnntccnntaaancntttnntcgtgcccccttttncgncttgaaataaattncnanctnaaaantaagngnttaaaaaacnncatnagtntcccngct

SEQ ID NO: 3857 - DNA, 1196 bp, Homo sapiens
  misc_feature 1, 3, 5, 9, 12, 15, 19, 24, 25, 26, 28, 29, 31, 32, 33, 34,35, 37, 39, 40, 43, 44, 45, 48, 50, 53, 54, 55, 62, 67,68, 69, 71, 72, 75, 76, 85, 89, 91, 92, 94, 95, 96, 97,98, 99, 100, 101, 103, 105, 109, 110, 114, 115, 116, 119,121: n = A,T,C or G
  misc_feature 122, 135, 140, 213, 236, 237, 242, 246, 254, 257, 289, 316,338, 350, 377, 402, 408, 430, 438, 445, 450, 458, 464, 473,508, 509, 510, 530, 537, 548, 549, 555, 561, 565, 571, 575,577, 578, 579, 586, 589, 592, 596, 599, 603, 608, 612: n = A,T,C or G
  misc_feature 614, 625, 630, 632, 634, 637, 639, 641, 649, 650, 655, 671,674, 678, 684, 687, 695, 696, 712, 717, 718, 719, 732, 749,774, 776, 783, 784, 794, 799, 804, 814, 816, 818, 819, 826,837, 842, 843, 844, 848, 859, 861, 862, 867, 868, 871: n = A,T,C or G
  misc_feature 880, 881, 887, 888, 890, 899, 902, 913, 914, 917, 920, 922,925, 928, 930, 932, 934, 936, 941, 950, 951, 956, 959, 962,963, 965, 966, 969, 970, 972, 992, 994, 1001, 1004, 1005,1007, 1019, 1023, 1026, 1029, 1030, 1035, 1037, 1042: n = A,T,C or G
  misc_feature 1044, 1055, 1057, 1058, 1063, 1067, 1069, 1072, 1073, 1074,1075, 1083, 1086, 1101, 1102, 1119, 1121, 1123, 1127, 1128,1131, 1133, 1136, 1140, 1153, 1154, 1155, 1156, 1158, 1159,1172, 1174, 1178, 1180, 1185, 1189, 1190, 1191, 1193: n = A,T,C or G
  misc_feature 1196: n = A,T,C or G
ncncntccntcnttncttntttannntnnannnnntntnntannnatntnatnnngtgtaanttttnnntnntannctacccttntttnannannnnnnnntnangagnngagnnncgnannccactcactatanggcgnattggagctccaccgcggtggcgtcctgggtgcttctgggtgagatcagacctgccttgcttggagggggggngggagaaagcaagaaaaaaaaannttttntttntatgcccnggncttcccaccattgagaagctcccatcttcctntgctttcttgcagggcaaatgtgccancaaaaccatgtacctcggccgnttctagaactantggatcccccgggcttgcaggaattcnatatcaagccttatcgataccgtcnacctcnagggggggccccggtacccaanctttttgntcccttnagttnaggggttnaattgnagccgcttnggcgtaatcattggtcataagctgttttccttgtnnngaaaattcgtttaatccaanttcacanatttcccaacnncaaacnaattancatnaccccnggancnnnccattanagnggnggtnacncccnccttncccncntaggcccttanattgnangntgnancnttaacccnncaacnatttaaattttgcccngtntgtnggcctnaanatttcacnngcctttttcacaaatntcggnnngaaaaacccttgntctgttgtcccaaaccnttccctttttaattggaaatattcngncccaaannccccccgggnggaanagggnccgtttttcncntnntatttgngggggcccttnttttnnncccngttatccacangnntaaanntanatactttcnnttttgnncnttgggggtntanttttcccattnntcngtngnaanatncnantntnttccnatttctcanncccanaanggnncnnatnnanatacacgggtgttatatccncnacaaaanttnntngaggggcatttntccnccnatnnataanantaaancntgttgtgtacntnntaaanggcncnccnnnntaaatatncgnctcgtgctacatacnnttaaaaaaatgcccctncntnttgnnttngncantttntttttccatatannnntnntccccgccccccntntatncntatanattnnntnaan

SEQ ID NO: 3858 - DNA, 1283 bp, Homo sapiens
  misc_feature 13, 14, 15, 20, 21, 25, 26, 27, 29, 33, 36, 37, 44, 47, 50,51, 52, 53, 54, 55, 57, 60, 61, 63, 66, 67, 70, 71, 78,80, 84, 89, 91, 92, 94, 100, 103, 105, 106, 107, 109, 110,113, 114, 115, 116, 118, 121, 123, 124, 183, 194, 198, 204: n = A,T,C or G
  misc_feature 209, 210, 211, 213, 214, 218, 236, 254, 293, 300, 303, 341,356, 361, 372, 380, 391, 396, 407, 419, 421, 423, 444, 445,458, 465, 469, 471, 496, 497, 502, 507, 510, 511, 514, 519,533, 543, 547, 550, 552, 555, 559, 560, 574, 577, 579: n = A,T,C or G
  misc_feature 581, 589, 614, 621, 630, 635, 638, 643, 660, 667, 679, 682,692, 701, 702, 706, 708, 713, 721, 722, 730, 750, 766, 770,774, 784, 785, 787, 790, 799, 801, 803, 804, 815, 822, 827,836, 837, 844, 849, 859, 860, 864, 883, 884, 889, 895: n = A,T,C or G
  misc_feature 896, 897, 902, 903, 904, 907, 913, 919, 931, 933, 939, 944,954, 962, 967, 970, 975, 976, 977, 979, 981, 982, 992, 996,997, 998, 1006, 1013, 1017, 1022, 1023, 1031, 1035, 1040,1046, 1049, 1054, 1056, 1059, 1060, 1062, 1063, 1074: n = A,T,C or G
  misc_feature 1075, 1078, 1082, 1084, 1088, 1091, 1099, 1102, 1108, 1111,1112, 1113, 1115, 1128, 1134, 1135, 1136, 1137, 1149, 1154,1165, 1168, 1170, 1175, 1187, 1188, 1189, 1191, 1192, 1193,1200, 1201, 1202, 1207, 1209, 1210, 1212, 1215, 1216: n = A,T,C or G
  misc_feature 1219, 1226, 1227, 1236, 1242, 1244, 1246, 1247, 1254, 1255,1257, 1259, 1261, 1262, 1263, 1276, 1280: n = A,T,C or G
cccccccccactnnntcatnntttnnnantgtntannttatatntcngtnnnnnntnaannanatnnttnnctctacncnttanatatnanncncccagncangnnnanngcnnnnanatnanncatcctatgtggcataattggagctccaccgcggtggctgccgcccgggcaggtacgcngggtggcggcngacnacccanggggnnngnngggncctatcaaaaaaaaaaanttttttttttttttcctnccatggtggaccaccgggttgacggggaatcagggttcngattccnganagggagcctgagaaacggcttaccacatccaagggaangcacgcaggcgcgcnaaatnacccactcccngacccggnggaagggtagntgacngatacacaaanaacaaattaaanancnaataataaaaggtttcctccnngcccgctttctanaaaaacntaantnggaatccccccacgagcctggccanngtaantatcngannaancaaanggctttaatacagngtgacccggntctnacncnttntaannggggggggtgcccncgngntnccccccancttttttagatttccccctttttangtggaanggggggttnaaatnttngcccnccgcctttagggcccgnttaaatncaatggggtccnatnaagcttgggnttccccttnngggngnaaaantttgtttnnttcccccnctttaaccaaatttgcccgncaaccaaaactcattnaccngaancccccggggnnanccnattaaaaangntnntaaataagccncttgggnggggntagcccctnnaattggnaggtngaagccctanncccntccacccaattttaaattnngccgnttatgnnngcctnnnaanttttgnccccgnctttttccccangncccggngaaanaaccccttgnttcctcgngcacncanccttnnncncnntaaactgaanaatnnntggaccanacctccnccgngatgnnaagaaggnccantattnatgccntanattangnggnncnnctctttaccgnngtntccntncaanttnaaattggnacnttcagnatnnngnccttcagagatcnacatannnntattccgcgaancacancgagtgtattnaancnttccncttcaaacgggnnngnnnaaattcnnngggtntnncnccnncanaattaannggggaaacnccaccncntnnaaaacanntnantnnntgtatctaagagntggnccg

SEQ ID NO: 3859 - DNA, 1250 bp, Homo sapiens
  misc_feature 2, 7, 10, 15, 16, 17, 21, 23, 26, 27, 29, 32, 34, 38, 40,42, 43, 46, 47, 53, 56, 57, 58, 60, 63, 67, 69, 71, 72,74, 75, 81, 83, 86, 92, 93, 95, 97, 98, 99, 100, 103, 104,105, 106, 110, 111, 113, 121, 123, 127, 132, 138, 367, 394: n = A,T,C or G
  misc_feature 395, 400, 417, 430, 471, 478, 504, 509, 513, 516, 522, 528,536, 543, 557, 591, 598, 607, 610, 620, 628, 642, 646, 649,664, 679, 681, 682, 687, 721, 730, 741, 756, 764, 779, 783,801, 834, 848, 849, 859, 864, 865, 866, 871, 875, 887: n = A,T,C or G
  misc_feature 898, 917, 953, 955, 957, 976, 987, 997, 1000, 1003, 1011,1014, 1028, 1031, 1035, 1037, 1043, 1049, 1050, 1053, 1068,1071, 1078, 1082, 1083, 1084, 1121, 1125, 1126, 1127, 1128,1135, 1136, 1140, 1143, 1149, 1180, 1188, 1202, 1218: n = A,T,C or G
  misc_feature 1226, 1233, 1234, 1238, 1239, 1240, 1241, 1244, 1249, 1250: n = A,T,C or G
cnccacnctnatttnnngatntnttnntnaantntcgntnannttnntgtttntannnantantganantnnanntttctnanacngaactnntntnnnnagnnnngggnntnggagacgnantacncactnattatngggcgaattggagctccaccgctggtggcggcccgaggtacattttttgatgaattagtgattttagtgcagaatgaaaccaacccaaaaaaccaaaaccaagagtatgtagttgtattttcttggggttctcagatgagttgaaggtaaagcaattgtttgttgaggaaaccaggcttagaaggcctgggcctctgcttgtcttttgcctgggcactggccacatgangaagaaaaaggcctaagccttcccgannaagtnccctgttgctccacctncgggtgcccccanaaagagggcttgggggcctagggggtcccccttcttccctngagggcntgacccccatatcttcaatcccaacntggcncaangcnccaatngggggncttgggcntttaaanatgggttcttgganaatggattccccttaaaaaattattttcttttcnacctttngggaatttnatnttttgccaanggtttcangtcccttccttctncgtngtngggaaaccttaaaanccaattaaaaaattntnnttggncctttttcttggaaaccttggaccttaggggaangaattttanaagggggaagnaaccaaaatttgggnaaggaagnccttggctttttttnggcnggttccttgaaaaccctngaaccttttttccccttttggccttttccaacncaaggccccctttnngtttttggcnttttnnntgggnaatncaaggaagggcntttgggggccnccaaggcttgttttataancccgccccctacttggcctggggggtggaaaaaaancnanaccctttaaaccgggggtntttctacaatntaattgcccntcnaanatttatgntancccttgtgctcccnggngcgngncccgcntttttnnganaaccttaggtggggnatnccccccngggnnnttggcagagaaaattccgagatattttaaaagccttnattnnnnttacccnngccnaancctttnaaaggggggggggtccccgtttccccaagtnttttttgnttccctttttaatngaggggattaatttgncttccccnttgggcnnatannnnatngggcnn

SEQ ID NO: 3860 - DNA, 820 bp, Homo sapiens
  misc_feature 98, 104, 105, 112, 444, 545, 568, 632, 636, 655, 661, 663,669, 671, 682, 688, 691, 721, 739, 742, 747, 748, 749, 754,757, 758, 761, 762, 770, 771, 772, 775, 779, 781, 783, 785,794, 814: n = A,T,C or G
gggcgaattggagctccaccgcggtggcggccaggcacagtgggctcacgcctgtggtcccagcagtttgggaggccgaggagggcgaataactagangtcatnnttttganaccagcctggccaacatcctgaaaccccatctctactaaaaatacacacacacacacacacacacacacacacaagttaacctggcgtggtggcaggcaccagtaattcccaccacctgggaggctgaggcatgagaattgcttgagccggggaggcagaggttgcagtgaccagagattgtgccactgcactctggcctgggcaacagagcgagaccccgtctcaaaaaaaaaaaaaattcttatttcattcctcatgctactcaagaagccatgggtggtatgttttgatttactccacctttggtctgatgtaaaagccactgatgtcnatggataagcagtggtaggatggtttgagtttggggatcttggaaacacttgaaaattcttatctatgccccatttcctaatagcgatggggaaatgtctnctgtacctcgggcccgcttctanaactaagtggatcccccggggcctgcagggaatttcgatatcaagcttatcgaataccgtcgancctngaaggggggggccccggtnccccancnttttgntncctttagtgangggttnaanttgcccccttgggccgtaaacatggggcanagcctgttttcccggggnggnaaaannnttttnccnntcnnaaattccnnncanaaantnangngcccggggnagccttaaaaaggttaaaanccttgg

SEQ ID NO: 3861 - DNA, 879 bp, Homo sapiens
  misc_feature 467, 468, 514, 523, 530, 558, 571, 603, 613, 645, 676, 687,698, 701, 704, 709, 711, 761, 781, 782, 784, 785, 789, 790,792, 795, 800, 815, 818, 819, 859, 861, 866, 867, 873, 877: n = A,T,C or G
tcctatagggcgaattggagctccaccgcggtggcggccgaggtacaaattatttccaggtgctgataattatcacttgtggtgtttgatattccggactttgcatctaaatttatacttgacaagttaaacttttcatcgtgtgcattttcccgtaatctctcaacagccaaagacaaggatagacggattagtgatgggtgaaaccaattcaacccaaaatggcaacacttaattacaagtcttgttgtttataattaactgtgtaaatcactaacttgaaagtttcttttcaaagtatttaaaaccaactcttttcccagggggatttaatactgtatattattgcatagttaagtattattttgtttgctctatgaacaagatgtgaaaatggcacattttaccgactatcttgctagccaaatttgggaaaaatggttcatggaattggcatttacctagcnnccatttgggtgctttctcaagtaatttttttgggaccatttttttngcctttaanattatgnaaaagcccaatggggaaagaaccaaatnccaacctaccccnaatggactttttgaagtaattttcttgaaaantggggaaaantggaagggggtcaaaaatttttcaaattttcnggaaaaattaaaaaaaaaaaaaaatgggggnccccccaaagngttttttttcnggnaangcccntncttttttttttggggcccaattttttaaaaataaaaaaaattacctgganaaacatacctctggggctannannccanntnggntttcnaaaaatttcaaaatnaannaattttcctttttgggaaattttaaaaaaatccctggggnanaaaannaaaaanaacnct

SEQ ID NO: 3862 - DNA, 838 bp, Homo sapiens
  misc_feature 628, 630, 633, 638, 654, 667, 685, 690, 700, 706, 707, 722,744, 757, 758, 760, 767, 768, 775, 783, 790, 793, 803, 808,809, 810, 811, 817, 824, 832: n = A,T,C or G
gactcactatagggcgaattggagctccccgcggtggcggccggcttttactatatttttaaaatgtatatatggtggtatacagaacaaatgaaacacgagacttttcaaataattcaaggaagatgactaccatgccagactgaagatgatgttactgaatcagcttattcagttttttttttttttaaagaaaattacttgtatttcaatttgccacacgtggtggcatacacttgtaatcccagctacttgggactacaggcacgcgccaccgcgcccggccccgcgtacctcggccgctctagaactagtggatcccccgggctgcaggaattcgatatcaagcttatcgataccgtcgacctcgagggggggcccggtacccagcttttgttccctttagtgagggttaattgcgcgcttggcgtaatcatggtcatagctgtttcctgtgtgaaattgttatccgctcacaatttccacacaacatacgagccgggagcataaagtgtaaagcctggggtgcctaatgagtgagctaactcacattaattgcgttgcgctcactgcccgctttccaagtccgggaaacctgtccctgcccagctgcatttaatgaaattcngnccnacgcncgggggaagaaggccnggtttgcgtattnggggcggccttttttccnctttnccttggttcnactggnnttcgcttggggcctngggtccgttccggctttgcggncgaagcggggttnnangcctcannttcaaanggccggtnaattacnggnttattccacnaaaannnngggggnaataccnccggaaanaaacct

SEQ ID NO: 3863 - DNA, 1162 bp, Homo sapiens
  misc_feature 2, 3, 4, 6, 7, 9, 11, 15, 18, 19, 20, 22, 26, 28, 29, 30,32, 33, 34, 35, 36, 37, 40, 43, 44, 45, 48, 51, 52, 53,54, 58, 64, 65, 67, 68, 71, 75, 76, 77, 78, 80, 83, 85,86, 87, 88, 89, 90, 91, 92, 93, 95, 96, 99, 100, 101, 106,110: n = A,T,C or G
  misc_feature 111, 118, 123, 140, 148, 213, 232, 454, 519, 525, 590, 616,620, 622, 639, 671, 674, 676, 686, 693, 695, 705, 725, 733,734, 752, 754, 770, 781, 800, 839, 840, 862, 877, 888, 889,896, 904, 906, 911, 914, 917, 922, 924, 927, 934, 939: n = A,T,C or G
  misc_feature 941, 948, 961, 962, 963, 985, 988, 996, 1001, 1002, 1004,1012, 1022, 1027, 1030, 1038, 1046, 1048, 1054, 1056, 1058,1059, 1063, 1064, 1065, 1068, 1069, 1080, 1081, 1089, 1109,1113, 1114, 1115, 1123, 1135, 1139, 1143, 1150, 1151: n = A,T,C or G
  misc_feature 1154, 1162: n = A,T,C or G
gnnncnntnantttntgnnnantttntnnntnnnnnnttntannnatnttnnnnattnttattnntnnttnaatnnnntnatntnnnnnnnnntnnagnnnagggnggtnntgcgcgngttancctctttctatagggcnaattgganctccaccgcggtgggctctagtaactagtggatcccccgggctgcaggaattcgatatcaagctnatcgataccgtcgacctcnagggggggcccggtacccagcttttgttccctttagtgagggttaattgcgcgcttggcgtaatcatggtcatagctgtttcctgtgtgaaattgttatccgctcacaattccacacaacatacgagccgggagcataaagtgtaaagcctggggtgccctaatgagtggagctaactcacattaattgcgttgcgctcactgccccgcttttccaggtcgngggaaaacctgtcgttgccaagctgccattaatggaaattcgggcccaaccgccgccgggggaanagggcngttttgccggtatttgggggcgcttctttccgctttccctccgcttcacttgaccttcgcctgcngcctccgggttcgtttccgggcttgngagnanaaggcgggttattcaanccttcaactttcaaaaagggccggggttaaantancngggtttattnccaccanantaaattcaanggggggaataaaaccgccanggaaaaannaaaaccattgttggaaancnaaaaaaagggccccangccaaaaaaangggggccaagggaaacccnggaaaaaaaaagggcccccccttttgctttggggccgtnnttttttcccaaataagggtttnccggccccccccttngaaacaaggcnnttcaacnaaaaaaantnggacnccnttnaaagntncanaaagggnggggngnaaaaaanccccgcccggggnnnttttttaaaagaattccccggncgntgtttttnccccnngnggaaaggnttctcttggnggggnctnttctcttntttttctnancccttncncnntttnnnccnnggaaaaccccnntccccccnttttttttcctttgtggaanaaannnggggggcngtttttttatantatnctanccccccnnggngttatttn

SEQ ID NO: 3864 - DNA, 888 bp, Homo sapiens
  misc_feature 410, 521, 545, 575, 594, 615, 625, 631, 638, 647, 662, 666,667, 672, 674, 684, 701, 716, 717, 723, 724, 729, 731, 740,748, 751, 754, 759, 782, 783, 792, 797, 802, 817, 821, 825,829, 833, 835, 841, 843, 848, 852, 857, 866, 869, 873: n = A,T,C or G
  misc_feature 883, 887: n = A,T,C or G
gactactatagggcgaattggagctccaccgcggtggcggccgaggtacgcgggaagtctaaacctttttgacaatactcaccctaccctggccaaataccatcagaaaaaccccaccccaccccaccccaaagaagcaaataacagtgctctcactccccaacccagtggtgtgggctggggagatcagagacctaagcacccatttctttgcccagcaaaagcagacagcactttggttccccctgctgggtggttttggcagaccaggcaggaagcgttttccctcattccacttcaagctgaaggaagttatgctcttgccagggtggtgtctagcagcagtggggtctagtagcagattgagcctccaccccaacccagaagcaatgacacttaacaaggtgacngtgagccagggctaatccatactctaccctcaccttacatcaacgaggcagaacaagatggttggaggtaggattctcaacacatcttacctccattaatgtcagtggggncccagtgggagaacttgagccttnactcccattctggcaaagtggatgggtggncaagggggcttagtttggnaatttcttgctttcctttttnttacccttcncccttngttgttngcctggggntcccttttggggggnagcnntgaancnttttttgggntttttattaagtggcanccaaccaaaaaaaannttttgnnttcangnccctctgcntttccttnttnccntgtgnaattaaggtggggggccccagcnnggggagggnggagntttancacccccttttttantagngcangggngggngnatacangnttggnggcnctacntttttattnggnactnaaaagtgggnactna

SEQ ID NO: 3865 - DNA, 824 bp, Homo sapiens
  misc_feature 219, 668, 709, 716, 740, 741, 772, 782, 786, 799, 809, 810,822, 824: n = A,T,C or G
ggagctccaccgcggtggcggccgaggtacacagcgtggtaaggaaaagtccaaaactttggaaagaaagaaaaatcctccatcatttactaattgggtgagttacttgcggttagcagttgagctgaacacaattcccccatctctggcaactactcccaatacacacgatacccggtgggccccgatgccaaggccaaagggggattcttaacccanactgagccagccagatcttcttgtgcgcccaagtatgcatatgcccgtgttcgtgtccccgcgtacctgcccgggcggccgctctagaactagtggatcccccgggctgcaggaattcgatatcaagcttatcgataccgtcgacctcgagggggggcccggtacccagcttttgttccctttagtgagggttaattgcgcgcttggcgtaatcatggtcatagctgtttcctgtgtgaaattgttatccgctcacaattccacacaacatacgagccgggagcataaagtgtaaagcctggggtgcctaatgagtgagctaactcacattaattgcgttgcgctcacttgcccgctttccagtcgggaaaacctgtcgtgccagctgcattaaatgaaattcggccaacgcgcggggaagaggcgggtttcgtattgggcgctctttncgcttttctcggttaacttgactcgcttgcgcttcgggcgnttcgggnttgccggcggaggcgggtaatcannttaacttcaaaaggggggttaataccggttnttccaacaanaatnaaggggaataacngcagggaaannaacattttgaancn

SEQ ID NO: 3866 - DNA, 830 bp, Homo sapiens
  misc_feature 717, 750, 757, 783, 784, 811, 823, 829: n = A,T,C or G
tatagggcgaattggagctccaccgcggtggcggccgcccgggcaggtaccctgcagaatctaccaaggcactctgtagcaaagcaggccttccacctgtctcggggaacccagctggccaccttgcactcagcctctgccagtcacctcagggctggcatttgggagtcctgactgcacgccaaaggttgttaagtggctttctctgaactcatttgaacagctgagtaaactgttcttgctttcacaaggaaaagaactcctgaagtcattagaactcaccaaaccagtttccttgtttttgaagaaagcaggtaatgtggctttgccagcaagaagcaggccttgggcgtccatctccttctcaggtgtgtttactcaggagaaggtgacatttggataggggcaggtgtgtttgctgaactgagcttcagtctaatcattccggaaaacttcctgagactttctctgccctgtaatttccccactgttgatggaagtatattgcagtctcatgcaggactgcgaagggaaggtcacactcactagatcacttatataccaaattctggggaacttttggtgcatattatactttagatctcttttcctttaatgataatcattgaaaatattaccatggaataaaatctggactttagttaatggtaacataccaacgttggtttctttagtttttgccgactctcctatggnggacataaagatgtttaaccgggaaaaaggatngggtgcngaaccattccagaaaacactttttgnnctttggcaactttttttttgggaattnttttccaaaatnaaaaang

SEQ ID NO: 3867 - DNA, 838 bp, Homo sapiens
  misc_feature 3, 398, 424, 454, 507, 544, 597, 634, 642, 643, 647, 665,674, 690, 706, 734, 744, 746, 751, 756, 757, 767, 771, 794,806, 807, 812, 815, 818, 819, 821, 822: n = A,T,C or G
tanggcgaattggagctccaccgcggtggcggccgaggtacactggctgtgctgtttctagcaccataaggcagtcatcattattgagccaggggctgtgcaaaattggggtgattgcagagccaaaaagcgggctggagggtggtttctggaatgcctgttttactattcttcctgttcctttgctctttctgccaacttcagaatccttcctttccttaaaacatttagtgatatccctgaatttatttaattgctacgtgagtgatttttgccccacagcactggaagataattggaatgcattctagcttatgtgctctggataatatgcaattaccagccagctggagagtagtatgcctttgtctcacaatgtcttgtaattttaaaaagtnttctcctatttgctggtgtctcttgntacctttcttacggcatcatatatctactntgggggtccttatgtctgaatgtgtagacacttcttttggtatactgaataanctcctggcgatgagggaagacaccgctttgttttagngatgtcctgtgcagttgggccccaataaaacgctacggaaatgatgggtgatnagacttatttctttagatctttaaaattgggccgatngaataacnnccangtttttagaaacccatanaaattttcnagaaggaaccttttcngaaaaagaccggaaancaccccttccttttcctttgaaccaggnctgtcccccnangtggncaaannttggagcttncccntgggggaaccgggccctaaaatnggggttcccatnnttcantgnttnncnnacttaccaaaaaaaaa

SEQ ID NO: 3868 - DNA, 967 bp, Homo sapiens
  misc_feature 194, 215, 232, 258, 260, 264, 272, 278, 283, 311, 316, 318,322, 327, 329, 331, 334, 342, 346, 348, 353, 356, 366, 367,371, 372, 374, 381, 387, 388, 391, 392, 394, 397, 405, 409,414, 417, 418, 419, 449, 452, 460, 462, 464, 466, 469: n = A,T,C or G
  misc_feature 471, 473, 483, 485, 487, 489, 492, 493, 496, 497, 499, 503,505, 506, 507, 509, 513, 514, 515, 516, 520, 525, 527, 533,537, 538, 540, 543, 545, 548, 549, 550, 555, 556, 557, 566,569, 572, 576, 577, 582, 586, 591, 597, 598, 601, 603: n = A,T,C or G
  misc_feature 610, 612, 613, 615, 620, 622, 625, 628, 631, 639, 640, 641,644, 646, 647, 648, 649, 650, 652, 653, 655, 658, 664, 669,673, 677, 679, 680, 687, 688, 693, 696, 697, 698, 699, 706,708, 711, 712, 713, 728, 729, 733, 734, 735, 736, 737: n = A,T,C or G
  misc_feature 738, 742, 748, 751, 754, 756, 757, 759, 760, 761, 762, 763,764, 782, 786, 787, 789, 790, 791, 792, 794, 798, 799, 806,807, 808, 810, 814, 815, 817, 819, 820, 821, 828, 833, 834,835, 836, 837, 841, 843, 846, 848, 849, 852, 853, 855: n = A,T,C or G
  misc_feature 861, 868, 871, 872, 877, 881, 885, 886, 888, 895, 900, 901,905, 907, 908, 914, 917, 920, 924, 925, 930, 931, 934, 937,939, 940, 942, 944, 946, 948, 952, 955, 956, 961, 962, 965: n = A,T,C or G
ggagctccaccgcggtggcggccgcccgggcaggtactaagttgaagtaaagctcaccctttacttccctacttgaaagttctactctgagccttgactcttagccacagtgaggcatgttgaaggttcctgctggtttattctttttttttttttttttagacagagtctcactctgttgcccaggctggagngcagtgacacgatctcggttnactgcaagctccgcctnccgggttcacgccattcttccgtctnancctnccaaggtngctggngactncaggcacctgccaccacgcctggctaanttttngnattntaagnananacngggtttcnctcntngttanctnagatggttcnngganntnccttgantcttgnnggnntncanccccacanttanttctnacnnnatagtgcgcttgggggatttatctggggcnttnaatcctancncncnttncngnagtatttcantngnanctnntcnntntaanannngncctnnnnacgnatggnanttaatnaatnntncancntannntaatnnncttcttaantgntgnccannaaatngggntgctnctttgnngantnatttttntnngnggggngngtngtnatngtttttannnatngnnnnncnntnttnagcttntttcncatnttangnntattatnnataangtnnnnaaggaanantannnagtttgaataagcanntatnnnnnntgtngttgtngtnatngnnannnnnntcttcattaaacatacgnattnncnnnntncgannctcattnnntngttnnantnnnttcttanttatnnnnncgtntncgntnnaanngnatgttnaataatnttnntgtangtanattnncnccattanttccnnttcnannatatgntancgnctanngatgnnatngtntnntnantncngganacnnatgtnnatntc

SEQ ID NO: 3869 - DNA, 892 bp, Homo sapiens
  misc_feature 332, 492, 500, 503, 514, 524, 539, 561, 564, 613, 624, 642,653, 663, 670, 696, 698, 700, 704, 719, 729, 731, 736, 738,740, 743, 754, 763, 768, 776, 779, 793, 803, 809, 818, 822,826, 833, 834, 845, 850, 851, 860, 862, 864, 865, 869: n = A,T,C or G
  misc_feature 871, 877, 883, 888, 889, 892: n = A,T,C or G
ggagctccaccgcggtggcggccgcccgggcaggtactggggattgattagcccagtctttgccacagactcttttggactgagtcgataggtcaaaggttagcttatgcagtagcatgggctgtaggttttttgcactgatcaacaccggaacttttagaagacttttagaagatttgttgctgctgtgagtgacatcagttcacacagcctgagagagaactctcagtccatgctgtccctccgtgggctcactcaagcgaaatgggtcgagctgcaacactgtgcggtgccaaccgggagaaatctgcctatcggggctgagagacatnctgtaagtggctgcccgtctcctttgccccaaatgtcaagttggaagaggtgcttcacatatttatttcttcctacatgggctcatttatttgtaagcccatttgtgaccctttggaaagccaaagcttttatcttgattttttggagtgtggaacaaanggtgaacnagnttgttcttccnggattgacangggaattcttggacntttttggtttttggcttttttnccnatagaagggaccaggattggccctcaaaattttgggggcccaatttttntatttcttggnagggagaaccctcccaanggacaagaatngcctttggtncctccanttaagctaaattttgttcaaggccangncntttnccttgtggtggggancaagaaaccntntttanangnatntttttccttcnaaccctcgnttttngggttggnccnaatggccttgcccnggtccttttntttttnggaaaatgngccngggntattttnntggggggacgnggacnncaatggggngntnntttntnttcccnaatacnatttnnttn

SEQ ID NO: 3870 - DNA, 773 bp, Homo sapiens
  misc_feature 49, 222, 452, 470, 477, 497, 528, 562, 564, 566, 567, 580,596, 605, 630, 637, 651, 652, 655, 662, 663, 680, 688, 704,705, 708, 714, 722, 725, 732, 736, 737, 739, 746, 747, 751,752, 753, 759, 761, 762, 766, 772, 773: n = A,T,C or G
gactactatagggcgaattggagctccaccgcggtggcggccgcccggncaggtacttttttttttttcttttttgtatttttagtagagacggggtttcaccatgttagccaggatggtctgtatctcctgacctcatgatccgtctgcctcggcctcccacagtgctgggattacaggcatgagccatcgcgcccggccctctggttttactgttattgngcctcagcttttgttctgatccagggcatggccagtcagaagaatggacattcatcctcctgtgtctctataggacagtgtctagtcttcagcaagagaggaagtgacgagggactcacagatgttatgcaagtccactgtttccatatgatttctagtcatgtaactcctccctacagcccaggggaacatgcaatgccttaattaaaatgttctgagttagcttaaanaagcttttttattatttngaacaanatatgcttttgggaacaacngaacctgggattttaaaaaaacttacctttnctatatttggggaattctttggtttccaaggttntngnnggaagattcaaangggcatctttgaaacngttgggtgntacttttgtgggaccacgtggaccnggaaagnaagggggttgaaannggnctagttnnccttgaattcccttttnttgggagnttccccctcccccttnnccnttgggnaaaagggnaanataaagntganncnttccacnngtannngaaaancnncctnctatann

SEQ ID NO: 3871 - DNA, 738 bp, Homo sapiens
  misc_feature 49, 61, 73, 82, 173, 184, 194, 398, 424, 425, 447, 451, 510,542, 579, 584, 599, 605, 627, 645, 646, 654, 656, 661, 662,675, 694, 712, 720, 725, 726, 734: n = A,T,C or G
gactcctatagggcgaattggagctccccgcggtggcggccgcccggcnggtacaattttncttgtagttctnttccttcanagatgagtagggaaatggagatcagcacataccatttgtaattatacatgttataaaacattatttccaaagccatatgttacaataactnatgtcagattncttacatttntattcacttttgatgagcccatctttatccaaatccttatattttctaaagagaataaataagtggttactgaaaattaatatcacaataagtctttaataacattttattaataagtgcttaattacatttcagagtattcttaggttattggcaagtatccctcttcttgcatatatgtcttcaaaataattgcaaaccatnattcatatatatctgtgttatgcttnncgggggctttctccctaaattntatntggtgcctatttattgaactacttattatacagattggagccatccctaattaggaaanatcccaaaatgctccaaaatcccaaacttttntgaacacttgacatgctcacattgaccattggcaggnatttnaaaattttggatttnttggcnccccccccccccccctgctttntaataaagaatttaaaannattgtggngnaacannctggaaaattctngaatgctttttgggtcccnaagcctggtctaaaatcnagggcatncctcnnccccgggnttgt

SEQ ID NO: 3872 - DNA, 772 bp, Homo sapiens
  misc_feature 253, 281, 297, 301, 311, 317, 370, 380, 422, 424, 430, 443,447, 452, 455, 461, 466, 467, 474, 478, 488, 493, 494, 499,507, 509, 523, 524, 526, 534, 544, 545, 553, 558, 559, 560,563, 569, 573, 574, 576, 578, 590, 592, 596, 597, 598: n = A,T,C or G
  misc_feature 602, 603, 611, 614, 620, 621, 625, 626, 627, 642, 646, 647,652, 658, 673, 674, 675, 677, 680, 689, 690, 694, 696, 701,705, 712, 714, 717, 727, 728, 731, 738, 740, 741, 751: n = A,T,C or G
ggcgaattggagctccaccgcggtggcggccgaggtacctttggtagaattcggctgtgaatccatctgttcctggggtttttttggtctgctggagtttgctggaggtccactccagaccctgtttcgctgggtatcaccagcagaggctgcagaacagcaaagattgctgcctgttccttcctctggaaggttcgtcccagagtggcacccgctagatgccagctggagctctcctgtatggggtgtctgncgacccttgctgggagatgtctccctgncaaagaggcacagggntcanggaaccattngagganacagtctgtcccttagcagagctcaagcactgtgctggggagaattctccttntcaggatcancttgctctcttcagaagccagcaaagcaggaaagttttaaancncgctanagcttgcaccaancagntttcnccnttcccncaggnngcttctntctnaaggaaaaangggtnnttttntattctgnanagcactttggaaanntnggcatgcntgaccttttnnttttcaanaaaannnccnctgtgnaatnngnangacgggaaatcntntaannnggcnnatttctgnganccacannaccnnnttttttttaaaatgngtgnntttgntttttnattccccccccccannngnaanccccccccnntganantctcntaanaggggtncntcncccaaccccnnccncccgggncnntttttttttncccccccccccccccccccct

SEQ ID NO: 3873 - DNA, 679 bp, Homo sapiens
  misc_feature 607, 614, 615, 616, 617, 629, 635, 636, 642, 663, 665, 674,675: n = A,T,C or G
ctatagggcgaattggagctccccgcggtggcggccgaggtactttcctgaggactttttatctgaatgtgcaaaggttgcatccttttgtgaatatccagagtttggctgaccaggactggctgctgagcagaatggcttttagtcaatgaaccctgggcttcgtatttacttaggctggggagtggaatttctctctggtgactttcagttagatgatcttctgacctcctctctaacgggcttccattgacttgctcctcattgctgcccctctgctgtttgttgagctgctcagcctgaagtgcctctgggttaaggcgctttcttgttctcctcctaataatctgctcaccgttgttttgtttaatgatgtttaaaggcctgggagtcgagtgaagcttctggtagaggccacacgcgttgcatacatatccgccatttgcattctttcgccagagagaggtctttgtggtcaggcaattggcacaaaaaacaccggagcctctacgcctccgtaacagggactgggattcatccttggacttgtttttctcccgatgcaagatactgctggggggagggccccagacttttctcccgcagntgggggnnnntggcaggaatcngggggnntgcccnagcccaaccataaaataaggncncgcccaganngggc

SEQ ID NO: 3874 - DNA, 679 bp, Homo sapiens
  misc_feature 612, 636, 665, 679: n = A,T,C or G
gaattggagctccaccgcggtggcggccgaggtacttatactgaaattctagtctaagagatggattaaagaggacaatgtgtaagctgatacagtgtggaaagatgggatggaatggcccccagggtgtgctgatagagaagaaggaccaggctggggagattgagtggaggaatgagtgatcataaatgagcaaatactttgtccaaaaagcccctcagagaagtgcaagggacgtagttgggtgggtggttcagggagtagctcaagtaatgatttgaagctgaagtcagaaggaactagccacatttcttctagaaagaactataatggagagctcacgcttagcatagagagggggtagaagaggaagagtgtgaccagaggaggttcagtggctggggagagaaccacgggtccaaaatgttgtgatgcaggggactcagagggttacatcatgctttaatgattgctacattgcctgagtctgatacaacaatgaaggtcagttatacacttgaactgattgcttatcttaggacagtgggtctcaactggggggtgattttacccccaaagatgacatttgacaattattctagagaccttttngtttgtccacctattttggggganccagggtttctttttactggtctttctantgggagagaaggcn

SEQ ID NO: 3875 - DNA, 775 bp, Homo sapiens
  misc_feature 43, 475, 601, 616, 627, 657, 685, 688, 697, 702, 715, 716,717, 729, 755, 758, 763, 770: n = A,T,C or G
ggagctccaccgcggtggcggccgaggtacagatatgaagtcnggaaatacatgaggcggtgggtttgaaagtcttttcttaatttgtagtcagagcttcataactgggtgaggcaagagaacatgtgatcaagagtcaatgtgatgacaaagagaaatagaaatcactattaaattacggtgttcgagaatggtgatgtgattccagtagagcttgagggggaagatgttactagagattgaaagacaaaggagaggtggggagttggggacaggttgaagagttagtctgtatgatgctgtggtttatgaatggagaaaaaattgtggcacactagagaatatcagcttacaggcttttttttattccaactcattaatatagtgtggagaaagatgagcaagaaataattgattgtttttgagtaagagctagttaaagaaatttggcttgtagagagtgagagaagactanatacagagagtggccccacgatattgcttagtattccaaattaagtttttagttgaccaaaaagaaatggtgccagggtttttagaattttaaatcttggttttattttgggttttcatcacctgnttttcttaacctaanttttatgtccntatttattatttgcagcttttgttgggggnttttccttttttaaataagccattttcnaancccattccngaatnaaaaagccccttnnntttcagtttcanggaaaaaatttcttgggccttggggngangaccnaaaaggngggct

SEQ ID NO: 3876 - DNA, 739 bp, Homo sapiens
  misc_feature 437, 442, 443, 448, 487, 489, 499, 500, 501, 505, 510, 515,517, 527, 541, 548, 549, 550, 554, 559, 573, 575, 576, 577,578, 586, 588, 606, 609, 610, 612, 622, 623, 630, 634, 636,652, 656, 661, 670, 675, 676, 679, 680, 681, 682, 683: n = A,T,C or G
  misc_feature 684, 685, 686, 687, 688, 689, 690, 691, 695, 697, 700, 701,704, 705, 706, 707, 708, 709, 710, 713, 714, 717, 718, 719,720, 721, 722, 723, 728: n = A,T,C or G
ctcactatagggcgaattggagctccccgcggtggcggccgaggtactgcaaaaggcagatgtgaggcaggggtggaaagcaggaacagggtttgaaagaagttcttagaccctcccggttccttgccctgagcccacgccgtcacagaaccacctcttctccatttctgcaggagatggtttaaattctctggagattaaatcagaaacattcaggagttggggaacctgggcagggcatgatgaaaacagagggatcaagtagaagtcctcaggctgacacccccagctccgccccagtcatgcctccagggccttggcatctcatcttatcatccttgggtaggtgattaaggtctcattaaatcagggggatccccttataaagttaaacttggtaccaatatcctatgagtgaaagcatttcattttgaccngccannatgtnccctccccggggcgggcccgtttttaaaaactggggggntncccccggggnnntggnggggnaattncnaaatttaaanggctttttgggaanccccggnnncccnttttnggggggggggggcnannnnccccccangntttttttttttccttttnaannanagggggcccnnccccccngggngnggggggggggtttttngggnttttnggggggccnttttnncgnnnnnnnnnnnnnaaananaannccnnnnnnnccnnggnnnnnnnttgtnggggggggggg

SEQ ID NO: 3877 - DNA, 665 bp, Homo sapiens
  misc_feature 379, 594: n = A,T,C or G
ctcactatagggcgaattggagctccaccgcggtggcggccgaggtacgcgggactgctcttttgtttatctaaatttgggaattgtctgctttatttcttcttattttagaacaaacattccaacatttgaagttgcataatcataaatttcaacatagggggacaaatatttacctgttcattttgtatttttagtagagacaggatttcaccatgttggccaggctggttttgaactcctgatctcaagtgatccacccgccccggcctcctaaggtgctggcattacaggcatgagccgccacggccgctctagaactagtggatcccccgggctgcaggaattcgatatcaagcttatcgataccgtcgacctngagggggggcccggtacccagcttttgttccctttagtgagggttaattgcgcgcttggcgtaatcatggtcatagctgtttcctgtgtgaaattgttatccgctcacaattccacacaacatacgagccgggagcataaagtgtaaagcctggggtgcctaatgagtgagctaactcacattaattgcgttgcgctcactggccgctttccagncggggaaacctgtcgtgccagctgcatttaatgaatccggcccaacgccccgggggaagaaggcgggtttg

SEQ ID NO: 3878 - DNA, 686 bp, Homo sapiens
  misc_feature 235, 426, 453, 470, 477, 486, 489, 508, 524, 545, 548, 559,560, 561, 563, 586, 594, 604, 615, 619, 650, 658, 666, 667,681, 686: n = A,T,C or G
ctatagggcgaattggagctccccgcggtggcggccgcccgggcaggtactaaagaatgtgcatttatttgtggggaggagaggaggtctaaatagacaataaacatataaatattaatattgtgaaagtggtatgaagaaaaataaagcatgataaggagagagaggtgttccctggctctccagagggctgaggtggaagaaaaggactcctgttttaggtaagatatcaganaagacctctctgattgactgaaatgtatgcaaaggcctgcatgaagccagggaccatgccgtgctgacatctgggggaggattatcctcacagaggggaaaggaagtgcaaatgccgtgaggtgggaggaccatgtttggtatgttcagggaggaacggggaggcccgtgggtcttgagcacagttcagcncctgggaaggccgccatctccatcaanggagaatatccgcttantatcacnccaccattnctntggccaaacttgatgcatngtggctacctttgatnttgccggattcatctttttanaanagccctttcannntnttccaaggtttcctttctttggngactgagnaaacccaggnccgaaacgccntggnccccgggcttttaaccgtggctcttgccaancgccggantgcccgtnnccactcttgcttgnccggn

SEQ ID NO: 3879 - DNA, 641 bp, Homo sapiens
  misc_feature 637, 640, 641: n = A,T,C or G
gaattggagctccaccgcggtggcggccgcccgggcaggtacttcaaagcccacttctttcccttaaaccaacacttattccaaatgacaaactccctcaattacccgtaacattaatgtttatactcggcatttgtaatacaataaaacataaaatgtttatactcggcatttgtaatacaatttatattttaaagttttctgatatttgatgtatcagatgttggtgcttatcagataaggaaacaagggtccgaaaggtttcttaacttccaagagctgagcaggctgctaacctggtctgctcatctcctagtgggattttttttttctcttacatggcatacttctctgccatcatttttaaaactctgagggggaaaaggaggctaaatgttaacatgctgtgaccagtaaaccaaagatgcagtgattgctagtaggctccatcgtcggccccttgcaggtggtggggacatattcaggggtggtggatatcagtgagcacagcccctgactggtggctgcccatgcagagtgtgggggtggggagtagatggggggcttttcctaatgcatctagccccagtggctctttggcttcctagctttttccatgcccataccataaaggagnagnn

SEQ ID NO: 3880 - DNA, 1535 bp, Homo sapiens
  misc_feature 18, 25, 40, 54, 62, 69, 77, 108, 134, 141, 170, 209, 220,221, 222, 223, 227, 232, 235, 242, 244, 258, 297, 303, 305,364, 384, 437, 495, 497, 498, 506, 517, 532, 540, 542, 582,591, 595, 601, 608, 614, 620, 622, 637, 646, 658, 660: n = A,T,C or G
  misc_feature 674, 679, 687, 704, 711, 744, 748, 749, 768, 788, 795, 811,851, 873, 887, 897, 904, 914, 917, 934, 942, 960, 984, 994,1004, 1014, 1031, 1052, 1071, 1088, 1089, 1125, 1150, 1164,1175, 1176, 1188, 1203, 1217, 1221, 1223, 1232, 1240: n = A,T,C or G
  misc_feature 1256, 1262, 1267, 1290, 1295, 1301, 1305, 1307, 1320, 1346,1370, 1381, 1395, 1403, 1409, 1419, 1433, 1443, 1461, 1467,1469, 1478, 1499, 1522, 1527: n = A,T,C or G
ccggaaaaatttgggggnaagaccnttcccccaacccggncgggggtttggggncccggggncccccgnaaagattnttttccccccccccaaccaaccccaaaaagnttccgcctccggaaaggcccccggcntaaaggnaacttttcaacccaaaggacgccggtccncaatttcctttttaaccccaccgccccaaaaacccccanccccccaccgnnnngggngggtnaanccccttncngggggcccccgccnttcctttaaggtaaaaaccttaagggttggggggaattncccccncnccgggggggcctttgggctaagggggaaaatttttccggaatttaatttccaaaaaggnccttttaaattcccgggaanttaacccccggttccgggaacccccttccgggaagggggggggggggggggcncccccgggggttaacccccccaaggccttttttttttggttttccccccctttttttnannattgggangggggggggtntttaaaaaatttttngggcccgncncggcctttttgggggcccgggttaaaaaattcccaatttnggggggttnccantttaanaggcccnttgggnggttantncccccctttgggtcngggttgggnaaaaaaaaattntnggggtttttaaaantttcncccgggcnttttccaaacccaaaanttttttncccaaactaaacccaaaacccaatttaaccttnaaanngccccccgggggggggaangccaatttaaaaaagggttngggttanaaaaaaggcccctttngggggggggtttggccccctttaaaatttgggaaggtttnggaaagcccttaaaaacctttncaaccaaatttttnaaaaattttngggccgnttttgggccnggnccttttaaccttggggnccccgggnctttttttttccccaaangttcccggggggggaaaaaaaacncctttggttncggtttgggnccccaagggncctttggcccaattttnaaaaattgggaaaaaatttcngggggcccccaaaaccaancccccccgggggggggnnaaaaaaagaggcccacgggtttttttggccgggttnatttttgggggggcccggcctttcnttttttcccggccntttttcccctnnatggccttttcnaacgttgggaaacanttccggccttgggngggncnttccggggntacctgtnttttccgggggccttngaaaangggcnccaaggcccggggttaaattttnaagancctttntaancnttccaaaaaaagngggccgggggggggaaaattaacccnggggtttaattttccccacccaangaaaaattcangggggggggaaatnaaaaccgncccccngggaaaaaangaaaaacaatttgntttggaaagncccaaaaaaaaaggggcnccccgncnaaaaaaaangggccccaaggggaaaccccnggttaaaaaaaaaaggggccccncgggntttttttt

SEQ ID NO: 3881 - DNA, 651 bp, Homo sapiens
  misc_feature 496, 501, 536, 547, 580, 641, 651: n = A,T,C or G
atagggcgaattggagctccaccgcggtggcggccgcccgggcaggtaccttctctgcatgacttagaagaaaattaattttggtttttggacagtcctgttgacacttctgttttgtattaagtgatgaattccatgttaaaattatactggccagttgatagttaccaaggaaatgctaggctcctgattccagtcagtgggtttggatatcctaatctgtgctctcctctcttctagaatatgagtgttctgcctgtattgggagcacattgctcagtctttgagttatgctcagtttcttaatccagagaataaaatgtgtttgggtgctgagattttagagcttttctgtaaggtcaatacactgagagaaggcttaatatttcttatccattggtattttccagaaaactgtatttgcttttactttttttttttttttgagacggagtttcgcttttgttggcccaggctggagtgcaatggtgccatntcggntcaccgccaccttttgcctcccaggttcaagcgantctcctgcctnagcctcccgagtagctgggattacaggcatgcnccaccacgcctggctaattttgggtttttagtagagatgggggtttctccatgttggtccncacctgggcn

SEQ ID NO: 3882 - DNA, 941 bp, Homo sapiens
  misc_feature 2, 9, 18, 23, 370, 372, 374, 384, 466, 510, 515, 539, 583,593, 607, 614, 616, 622, 626, 633, 636, 643, 649, 652, 653,661, 664, 668, 669, 670, 671, 684, 691, 701, 705, 719, 729,735, 740, 743, 745, 746, 751, 753, 756, 761, 766, 775: n = A,T,C or G
  misc_feature 778, 784, 786, 788, 802, 804, 811, 815, 818, 826, 842, 845,847, 851, 852, 855, 860, 866, 867, 871, 873, 874, 880, 882,883, 884, 886, 890, 891, 893, 899, 903, 904, 920, 926, 938,939: n = A,T,C or G
gnagtttangccttgaancgtcntacgacttactatagggcgaattggagctccaccgcggtggcggccgaggtacgcgggagggcaaagggagagaaaagaactggacaataggcattacatggttttttgggttgtgatggtgagcacagtgatgtgattatgaggtatcagtcagttttgctataaaggaatacctgaggttgagtaatttataaaaagaagaggtttacggctgggcacagtggctcatgcctgtaatctcagcactttgggagtcggaggtgggcagatcacctgaggtcaggagttcgagacccagcctggccaacatggtgaagccccaccactactaaaaattcaaaaaatnananaaaaaaaaangttcctgcccgggccggccgctctagaactagtggatcccccgggctgcaggaattcgatatcaagcttatcgataccgtcnaccttgagggggggcccggtacccaacttttgttccctttaatnagggnttaattgcgcgctttggcgtaatnattggtcatagctgtttcctgggtgaaaattgttattccctcanaaatttcccnacaaacatttccgnacccggntngccatnaagntttaaanccntggggtngccctnaannaagtgaanttnactnnnnatttaaatttcgnttgcggnttcaacttgncccnctttttttcagttnggggtaaaancctttnggtgnccnanncttgnanttnaattnaaatnaggccaaanccncccggngnangaaggcggtttttncnttatttnggtngcnttttttcnctttcctttgattaancanantttnnttngcccnttgganntttnanngatttnannntnttcnngntttaantttnnttaaaaaggcggattnttctgnttttttccccannat

SEQ ID NO: 3883 - DNA, 835 bp, Homo sapiens
  misc_feature 39, 46, 54, 489, 498, 499, 502, 504, 505, 506, 507, 509,510, 511, 512, 538, 547, 595, 604, 610, 631, 635, 646, 657,658, 666, 670, 677, 679, 694, 699, 711, 713, 718, 727, 729,733, 736, 737, 738, 744, 746, 748, 751, 753, 760, 764: n = A,T,C or G
  misc_feature 780, 782, 783, 790, 797, 798, 801, 813, 817, 825, 829, 832,834: n = A,T,C or G
ggagctccaccgcggtggcggccgaggtactttaggacnccccagnacactcangatgcctaggtattaaaagctctaattccgaagggggctttaatgtaaaagaggtaagaaggttagccagaagctgaaatgattaggtaagaaagttagttgttgctttgtagctacaaataaaatttggtgagttcattaaaaagatgtttccagccaggcgcagtggctcaagcctgtaatcccagcacttcgggaggccgaggcaggaggatcacgaggtcaggagttgaagaccagcctagccgggtatggtgaaaccctgactctactaaaaatacaaaaattatctgtgtgtggtggtgctcgcctgtagtcccagctactcgggaggctgaggcagaagaatcgcttgaacccaggaagcagaggttgcagtaagctgagatccactactgcctccagcctgggtgacagagtgagactccatcaaanaaaaaaatnnaanannnnannnnggtccttgcccgggcgggcggtttanaaactaggnggatccccccgggcttggagggaattcgatttcaaagcctttttcgantcccggccnaccttngagggggggggcccccgggancccnaacctttttgntccccttttannggaggggntaantttggcncnctttggggggtaaanccatngggcaaaaagcntngtttnccttggggngnaaanttnnnattccncntnacnantttcccncaanattccaaacccggggngnnttaaaangttaaannccnggggggcctaangggngggccctncccnccntnt

SEQ ID NO: 3884 - DNA, 812 bp, Homo sapiens
  misc_feature 322, 326, 352, 363, 385, 387, 401, 407, 450, 478, 504, 507,544, 551, 552, 554, 558, 563, 569, 591, 596, 601, 603, 609,615, 621, 623, 629, 637, 640, 642, 650, 669, 684, 699, 708,709, 711, 721, 722, 723, 724, 727, 728, 734, 746, 747: n = A,T,C or G
  misc_feature 750, 753, 756, 762, 764, 765, 767, 769, 778, 779, 781, 782,788, 791, 807, 808, 810, 811: n = A,T,C or G
gggcgaattggagctccaccgcggtggcggccgaggtactgacttttggagttacttaagaaccacagttcctaaaacattttatttgggagctcaacttctggcttcctacttaccaagaggcagtaagttataacctctggcctttgtctttacattttcaactttctggatccctaacctctggtcccaagttactacgcttgcctatatccactaaccactcactaggtcacaaagttgatggctctggcttgacccagtgaatgagaagtgtcctagatgtttttttttttttttttttcgcaaatcttcataggcncagnagcctgtttaattggttgatctcaanccttcccttanaggagggagccttaagttaccntncaaggctgggggtnaggaanctatcataactagtctagagatttctcaccaagggaaattttncttatctaaaagaggaacttcaggtctnaaccctgccagtcacacccaattaangtncttccaaaaataaacagcatatgttccctttcaattnaagttcnnangtcnttganctcaanagaaaatttaaccttttaattntcttnagccngnaccaantattcnatattngntgaggntggagatntangnttttaggnttttcccgtttttcccgtnatgccaacccggttnattttttaaaaatanacaaaaaanngncccgggggtnnnnctnntttccnggtttcctagcnnccnagnccncaattntnncntnttaaacctnnanntaaacnagngagggcttttgtgcanntnnt

SEQ ID NO: 3885 - DNA, 822 bp, Homo sapiens
  misc_feature 6, 379, 381, 487, 500, 512, 513, 534, 536, 551, 572, 574,620, 651, 667, 669, 671, 686, 689, 691, 699, 701, 709, 720,735, 764, 778, 785, 787, 795, 803, 804, 808, 812, 822: n = A,T,C or G
actatngggcgaattggagctccccgcggtggcggccgaggtacgcgggagggcaaagggagagaaaagaactggacaataggcattacatggttttttgggttgtgatggtgagcacagtgatgtgattatgaggtatcagtcagttttgctataaaggaatacctgaggttgagtaatttataaaaagaagaggtttacggctgggcacagtggctcatgcctgtaatctcagcactttgggagtcggaggtgggcagatcacctgaggtcaggagttcgagacccagcctggccaacatggtgaagccccaccactactaaaaattcaaaaaaaaaaaaaaaaaaaaaaaaaaaaggtccctgcccgggcggccgntntagaactagtggatcccccgggctgcaggaattcgatatcaagcttatcgataccgtcgacctcgagggggggcccggtacccaagctttttgttcccttttagtnagggttaattgcnccttggcataannatggtcatagctgtttcctgngngaaattgttatccgntccaattccacacaacatacnanccgggagcataaagtggtaaagcctgggggtgcctaatggagtgangctaaccttcacattaaattggggttgggcntcacttgcccgctttncnanttccgggaaaacctntancngccaaccngnaatttaantgaaattcggnccacccccccggggngaaggcgggttttggcgttttggggcccntttttcccctttcntcgcttnantgacttgnttggcctnngggnccgntccggttggn

SEQ ID NO: 3886 - DNA, 918 bp, Homo sapiens
  misc_feature 1, 4, 16, 51, 54, 55, 59, 60, 69, 70, 74, 103, 174, 181,210, 298, 358, 368, 371, 389, 424, 430, 433, 434, 447, 464,492, 495, 498, 499, 512, 519, 521, 533, 536, 545, 552, 561,569, 572, 594, 603, 608, 609, 614, 616, 618, 645, 652: n = A,T,C or G
  misc_feature 653, 656, 688, 728, 732, 745, 755, 761, 765, 769, 777, 790,800, 821, 830, 839, 849, 850, 856, 861, 880, 882, 885, 898,901, 903, 906, 908: n = A,T,C or G
ntgngaatacgacttnctatatgggcgaattgtagctccacacgcgggggnggnngcgnnccgccaggnncgcngggcccggtggaaggaggggccctagtcngcaacagctaatccgttcagctttaccttctttgcagactttggttggtggaggctgtggcaatggaacangcttganaaacaggaatggtagtgctattggccttncagtcccacctatcacagccttaatcaccccaggtcctgttcgtcattgccaaattcctgacttgcctgtggatgggagcctactctntgaattcctttttttcatctacctgttggttgctattttcattcagtacctgcggccgcnctagaactantgngatcccccgggcttgcangtaatttgatattaagcttatcggatacccgttcnaccttngannggggggcccgggnacccaggcttttgtttncctttaattgagggttaaattgctcccnttnggnngtaaatcaatggngcatagncnttgttttcctgnggntgaaaatangttattnccgccttcncaaatttnccnccaccaaacaataacggaagcncgggtgaanccatnnaaaantngnaaaaagcccttggggggtgcccttaanttgaggnngangctaaacttcaacaattaaattggccgttggngcttcaactggccccgctttttccaaattcggggaaaacnctgngccgtgccccaancttgcatttnaattgnaatncggnccaaaccncccccgggggaanaaggcctgtntttggccgtaatttgggcgcnttttttccncttttcctnggttaaaatnnaacttnaaatnccccttcgttcttttctgntnaancccaagccggtantcncnttnantttaaaagcc

SEQ ID NO: 3887 - DNA, 808 bp, Homo sapiens
  misc_feature 618, 703, 705, 706, 707, 709, 711, 712, 713, 714, 715, 716,717, 718, 719, 720, 721, 722, 723, 724, 727, 736, 747, 759,778: n = A,T,C or G
atagggcgaattggagctccaccgcggtggcggccgcccgggcaggtactcatgtctgtggagcagagatgctgactgggaatagagacgctgtcgctcgaccacgggcatggcctgcgagggccctgataaatggcatcggtagtttgatgtggaaacgtgtgctggatttatgctctgtattcatcccacttctcaggttcaactgctttcatcaattgccttcatttgaactacaccataagttacaaactcacgtcaatgtaaggtgttgtgatttgcaatctgagcaatgatgtttgactgtgccttgaacctcaggatgaaacaagacatcattgatgcaggcagtcaactttcactgtaattgaccagcatattatttaggctttgaattaatggtgtcattagaatttgatgactattttagaccacggataccgtgctacctatgagatatgtttgggcattcttctaaggcaagcagtggagatatttatggcacaatacagggacaacaaggatgtatcccccaatttttcctaattacactttaaattttttttatttcatgtgaaaacgtttggggggaaaacatctgtattacatcaaaagtangtttatcttgtgcctcagttgattcttggaaaatctgctcttggggtttggcctggctggcctaatctggtatttggaggaaaanannnanannnnnnnnnnnnnnaangggtccctngggcccgcttntaaaaactaggnggatccccccgggctgcanggaatttcgatattcaagcttatcgaaacc

SEQ ID NO: 3888 - DNA, 940 bp, Homo sapiens
  misc_feature 2, 3, 4, 5, 9, 10, 12, 13, 16, 17, 18, 19, 20, 21, 22, 23,24, 25, 26, 27, 28, 30, 31, 34, 35, 37, 38, 39, 40, 42,44, 45, 46, 48, 49, 52, 53, 55, 56, 57, 58, 59, 60, 61,62, 63, 64, 66, 67, 69, 71, 72, 75, 80, 84, 93, 96, 99,100: n = A,T,C or G
  misc_feature 106, 145, 148, 151, 582, 609, 644, 653, 654, 661, 682, 718,748, 762, 763, 764, 765, 776, 777, 808, 814, 840, 857, 874,879, 883, 897, 905, 916, 921, 924, 935, 937, 939: n = A,T,C or G
tnnnnatanncnnggnnnnnnnnnnnnntnnttnntnnnnanannntnnttnntnnnnnnnnnntnntntnnttntgttnttanggggggganatntcnnctcctntcgggcgaattggagctccaccgcggtggcggccggggnacngangaaaaacctgtcatccaatatgggagctactagtcacatgcgctatataaatgcaaattgaagctgaatgaaattgaaaatctagtctctcaatcatattaatcatatttcacctattgtataatgcaaatgtggaacatttctatcatcccaagcattctacctaactttggacaatagtcaccccttctggggaagaaagtgagattatccttaggggagggaaagaaggggttattttagggcaaaaataactttaagaatttaccctctgtatgtcacttatgttttttattcttttaccgacaaaaaatgtttttcaagtgcccattttgaaaaaactggaaaaaaaaaaatcaaagccctacaggttggcatttatcatgggggatgaaaaagggaggggaaatatgggtcaaagaaagtagatnaaaaccttcttcttcaagtggttgttnccccatgttttaaatgcctcttctatttttgaccnttggacctnnttaaaanttccaggaaattttaaaaggntatttaaaacctcttggaaatttttggttggaaaanaactttacttaagccacctttacctgggtnagaaaaaaaggttnnnnttttttaaatnntggaaaaaaccccattttattggtccaatantggaanaattttaaaaacccctttctttttantttatttaacccggggnaattttgggaggggaangaaangttnaaacccctccaagngggggaantgggaaatttnccctngancccattaaaantntnt

SEQ ID NO: 3889 - DNA, 727 bp, Homo sapiens
  misc_feature 179, 260, 274, 286, 316, 338, 344, 351, 363, 414, 459, 461,465, 475, 480, 502, 507, 517, 519, 521, 522, 528, 529, 532,536, 539, 545, 547, 553, 554, 562, 569, 571, 577, 578, 579,582, 592, 617, 624, 631, 635, 641, 647, 663, 678, 679: n = A,T,C or G
  misc_feature 689, 692, 694, 718, 721, 722, 723, 726, 727: n = A,T,C or G
gaattggagctccaccgcggtggcggccgaggtacctttttttttgttgttggtgaagtagaatgtgtgtatggggagggcaggtggataggatattttggaatttgaagagaatgggaatgtctggatagtgcatgtatagaatgggaagtaaacactggaggacctgggagtgtggngcttattgatggatcgttgggtttatccaggattggggttttgccagatggctgtgatgaaaatcttaagagttaagggtntaggcaagagtgtngctgaaatgatncacaatgaaatctaacctgcggattacacngcgagagccactgtgcctggcnaagcancagtctntttttaaggttncaaggtagcttgcgttataaataaaggcagagagccctccatacctatagncctagctctggggaggctaaaaccagaggatctcttgagcccagnantcantgctgccagngagcnctaataacacactcgcctacancgttnggcaacatanananngacctnntcnggtnccnattctngncttttnntccctccngccgatntnaaactnnnggntccccccggncctttcagggaaattcccatctcanagctttntcccatncccntcaaanctttgnggggggcgccccccgntcccccaactttttnngccccttttncgncngggttaagtggccccccttggccntcnnnatnn

SEQ ID NO: 3890 - DNA, 719 bp, Homo sapiens
  misc_feature 584, 606, 621, 624, 627, 637, 645, 648, 686, 698, 706: n = A,T,C or G
ggagctccaccgcggtggcggccgaggtactcggcctacttccctattttcaatgcctaatgatttttgctgcgcctgaacacatctggagggagccaggcccactggctgcctctcgtcccactccaggccctcctacaaaggtgcactcagcaaaccctccaagtacctgcccgggcggccgctctagaactagtggatcccccgggctgcaggaattcgatatcaagcttatcgataccgtcgacctcgagggggggcccggtacccagcttttgttccctttagtgagggttaattgcgcgcttggcgtaatcatggtcatagctgtttcctgtgtgaaattgttatccgctcacaattccacacaacatacgagccgggagcataaagtgtaaagcctggggtgcctaatgagtgagctaactcacattaattgcgttgcgctcactgcccgctttccagtcgggaaacctgtcgtgccagctgcattaatgaatcggccaacgcgcggggagaggcggtttgcgtattgggcgctcttccgctttctcgctcacttgactcgctgcgctcggtcgttngggtgccgcgaaccggtatcancttaatcaaaagggnggnaantaccgggttntccacaangantcagggggattaaccgccaaggaaaaagaacatgtggngcaaaaaggccngcaaaaanggccgggaaccct

SEQ ID NO: 3891 - DNA, 714 bp, Homo sapiens
  misc_feature 75, 435, 461, 599, 619, 626, 629, 639, 645, 646, 649, 665,678, 684, 698, 699, 703, 704, 709: n = A,T,C or G
atagggcgaattggagctccaccgcggtggcggccgcccgggcaggtacttttttttttttttttttttttttgnagagaccgggtctcactatgttgcccaggctggtctcgatctcctgaccttgtgatccgcccacctcggcctcccaaagtgctgggattacaggcgtgagccaccgcgcctggcctcctttgtttttaattaaggaaaaggacatcaatatcttccatattgaagggagtggaaggcgggactaattatatatatattatcttttacttccatgatttttttctccttttgggagttcgcaaatagttttttgatgacggcaaatactcctcattgctaatttttggtgacagagaatattaactctttcttctttagaaaataggaggaggggaagccctctcttctactttgaattanagtacctcggccgctctagaactagnggatcccccgggctgcaggaattcgatatcaagcttatcgataccgcgacctcgagggggggcccggtacccagctttgttccctttagtgagggttaattgcgcccttggcgtaatcatggtcatagctgttcctgngtgaaattggtatccgctcnaattccncanaccatacganccgggnngcntaaaagtggtaaaagncctgggggggccntattgnggggggctaacccnntttnnttgcnccccc

SEQ ID NO: 3892 - DNA, 712 bp, Homo sapiens
  misc_feature 615, 642, 649, 672, 712: n = A,T,C or G
ggcgaattggagctccaccgcggtggcggccgcccgggcaggtgcggcagtggggtgtgcaagctggcagcgttctgcacgggaggccccgtggaggggtcatactgctgctgactctgcctctgtccagcgagctgcgcggcctgcggcgtggggggcattcctcccgcaaaataagaaaagtgccaaaagcactgattcccaagtgtggcagcttctaccaatgagtcacaaggagacaccgtctaacaccccagtgcttgtccaagacccaccacactcacacgagaagttggccacaaccgagcacacacaaaaggaaagagaggcgcttgacctttgcaagtcagcatcaagcaaaacaagcaccagatcaccacagggcacccctacaacagcagcaattaggaaaaacataggagtaaaaattgttgaaagacactatgacaatgcgacgtcccgcgtaccttggccgctctagaactagtggatcccccgggctgcaggaattcgatatcaagcttatcgataccgtcgacctcgagggggggcccggtacccagctttttgttccctttagtgagggttaattgcgcgcttggcgtaatcatgggncatagctggtttcctgtgtgaaaatgntttccgntacaatttcccacaacataccancccgggaggcataagtgttaagcctgggggtgcctaatgn

SEQ ID NO: 3893 - DNA, 1154 bp, Homo sapiens
  misc_feature 3, 6, 10, 12, 15, 16, 20, 22, 23, 25, 26, 27, 28, 32, 38,40, 45, 50, 51, 53, 56, 64, 65, 70, 71, 72, 74, 80, 82,84, 87, 88, 89, 92, 96, 100, 102, 103, 105, 106, 107, 108,109, 111, 112, 117, 122, 124, 129, 142, 179, 187, 188, 190: n = A,T,C or G
  misc_feature 194, 203, 237, 267, 331, 334, 342, 361, 365, 368, 379, 398,409, 434, 437, 454, 456, 461, 482, 496, 499, 505, 508, 538,546, 550, 562, 569, 571, 587, 609, 611, 613, 614, 631, 642,646, 647, 654, 658, 663, 667, 677, 680, 683, 685, 689: n = A,T,C or G
  misc_feature 696, 698, 699, 703, 705, 706, 715, 719, 720, 723, 724, 726,730, 739, 748, 749, 755, 756, 757, 759, 761, 765, 769, 770,774, 776, 783, 784, 786, 787, 791, 795, 799, 802, 805, 811,813, 817, 818, 821, 823, 824, 826, 829, 836, 838, 842: n = A,T,C or G
  misc_feature 847, 850, 852, 854, 857, 869, 870, 872, 873, 889, 890, 891,893, 898, 899, 909, 913, 917, 918, 919, 923, 924, 928, 930,936, 938, 944, 948, 949, 950, 957, 959, 965, 971, 976, 978,985, 990, 992, 1003, 1004, 1006, 1007, 1009, 1012: n = A,T,C or G
  misc_feature 1017, 1018, 1019, 1024, 1026, 1028, 1036, 1038, 1039, 1041,1042, 1044, 1045, 1051, 1057, 1059, 1060, 1062, 1068, 1071,1073, 1075, 1078, 1079, 1080, 1081, 1082, 1089, 1090, 1094,1105, 1106, 1107, 1110, 1111, 1112, 1116, 1119, 1121: n = A,T,C or G
  misc_feature 1124, 1129, 1138, 1142, 1148: n = A,T,C or G
ccnccntttntntanntttncnnannnntctnatttcntngtacnttccnntnctntctgacgnncgagnnngngcacgntncnccnnnagnaagngtgngnntnnnnntnncttgnattcncncttcnttattaggccgantttgggagctccaccgcggtggcggccgcccgggctngtacctcnngnactnaattgcagnggtaaaaaaattgttttatacctgctggtaagcnattcgaaaaattgtctatttaaaaatgcangtgcattttaaagagttactatttgaggatctaaaatatacagagaaggctgcatattctactntgnatcttatnacccatcacaaaaaggaanagcnctncctacgaaatngattttggtcacctttccntggctttttcntggaaaggaaaagatactttttggnagntccttttttagtcccangnggtcncttgggggcttttttttttangtttcaggttttgnagnaaaaantanctttttccatttttaaaaaaaaccccttantttggggncaanaaaaaatttttngccccangntttttattttgggggncaacttttggccttccaaagantnanntttggcttttttccccnggaagcagggnctannatgtgtntganagaantccnagggaatggnttnccncngtcnccctcananntagngnncccccctgntatnngcnncnattncttttcagnccctggggnncagtgnnngngngggncttnncttnanaaagggnngnncccncctnagtnccnatngggtcncnaggnnaangnngngtntttaagngncccnctggnagntncnccnaccttggccccnntnngcccttcttttgcccnnncnctctnnttttttttgnagtncgannntcanncttntnggcganantccccnctannngtttttntnttttangggganaggcntnggacagncgtgnanaacccacagtnngnncnctnggtgnnngtagngncnagagatananngnntnngaggcncgcttngnncnctttgnttncngnttnnnnnagattgnnaccngtgacagacannnggnnnttangcnanacntgcgngctcgctanactnttgatncgatac

SEQ ID NO: 3894 - DNA, 830 bp, Homo sapiens
  misc_feature 8, 10, 23, 25, 30, 610, 611, 626, 635, 641, 650, 664, 683,719, 745, 775, 776, 779, 785, 815, 820: n = A,T,C or G
tcctctcntntagggcgaattgnanctccnccgcggtggcggccgaggtaccttgctccaccaatcccagctgtcacatcagccctatatgccagtctctgggattttgcttttgtgttttctgtgtaaaaacactgctttttgtttgggctctgctttcctgtgttactgtttagacagtgtccccagacagaaaaatggagaatggcaagattaccttatgtgtttccccttctttgaaggatcacagcctttttatgtcttctgtctaatgcatgaatagggttgcttcatgtagtttatccaatttacaattgtttatggcaaaagggtaactttgataccttttactctgtgatggctgtaactagaagtcctattaatgcctttttaaattaaaaatagcactgccaataaaaccttaatttccatacatcaaaagtcaaccaaaggaaactaataagtagtaaaataaaaatgtggggcaagggtgtgagcagactcggtaatttcccattattttaatttcttagaataaaaaaaattcccaagagcccgcgtacttctattcccagcagcacagttcacaagttctgtggctgacatgccnnaacatgcctgctggntgggccacncccctntttgacacnaaccctttttttangcgcttggttcctttttgnttcagcgggattttggggaacccctccctttaaacntggaagcccccaccttggccttaatngccattgctggccattggccccaagtctgnnggntttttnaggagggccttcccttttccacttgttgcnagganaacctgtgct

SEQ ID NO: 3895 - DNA, 716 bp, Homo sapiens
  misc_feature 607, 624, 630, 645, 657, 665, 675, 689: n = A,T,C or G
atagggcgaattggagctccaccgcggtggcggccgaggtacgcctggctgatttttgtgttttaagtagacacagggtttcaccatgttggccaggctagtctcaaactcctgacctcagatgatctacctacctccacctcccaaagtgctgggattacaggcatgagccaccactcccagcctatcctgtttcttataaagtttctatcttagaaaagtggcatagagtgaagacttgataactttgtatctagggaaaaaatgacatttccatgttgtccagtataaaacacatattattattgttatattctgatgggccaaaaagacatatatgtttaagttcagattcataggcacaaggtatttattatgtttcaaactcccaaaggatttcatgcaatttgagaaatactaccatgaataaaggacaagaggaattctggagaaagggtggtgcaaatgcatacccttatctccctccaatatgaattttgatctgtccaccagcacagctatcaatgctagcaggcaggtggggaatggcagatatgtgggaacaattggctttttggttttgataagggataggactagagctcangactcaagttctttttntagggnctggactaaaatctngggaatggaagntttgaggnaaactttcanaactcttgtgggtntttgggggcctgggtaaattcactgcc

SEQ ID NO: 3896 - DNA, 703 bp, Homo sapiens
  misc_feature 614, 655, 668, 681, 683, 685, 695, 699: n = A,T,C or G
tcactatagggcgaattggagctccccgcggtggcggccgcccgggcaggtacgcgggaacttaattcagattaagaaaattgtttcatactgaggtaagcgattgaaaaattgtctatttaaaaatgcagtgcattttaaagagttactatttgaggatctaaaatatacagagaaggctgcatattttactttgatcttattaccatccaaaagaaagcttacatagaaatgatttgtcactttctgctttctgaagaagatatatgagtcttttagccaggtcctggctatttagtcagttgagaaatactttcattaaaaacctattggtagaaatttgccagtttattgggcacttgctcaagtagttgcttttctgagaggcagtggtgagaccaggatgttccagccccaaggagggccctgtagcccatctcagcctggccatgtcgtgctatgagaggttcctctatccattggtcaaggaagggatcaggccctgcagtcacactgcctttgcctcttgccgactttattcttgagcgagtcacttggcagagcctctggtttctcttaaggttgctggaagcatagagcacggggtcctggtngggagcagatacagtagggccctgaaccattgttaaaagcnttgaggaccggcnaccaggggtctgnanangttttaaggngggngaaa

SEQ ID NO: 3897 - DNA, 796 bp, Homo sapiens
  misc_feature 269, 413, 579, 621, 625, 630, 647, 668, 673, 675, 690, 699,716, 734: n = A,T,C or G
agggcgaattggagctccaccgcggtggcggccgcccgggcaggtacgcgggctccccaccccaacattttataaagagcaagtgacttttacagcctctgggtattgcccaatagcgatctggaaacaggctgctcttcgtttaaatgactgaacacacggttggggatctgttctgaaaggtggagggtgcccgcttgggaatagggacattataaatactggacaattgaagacaatatttctgaagtgtaaaatgtttgcattgntataaaataaacccaaacaggcccatggaagaaatctcttctcccaagtcctttactgaaaaaaatgatcccacagactgagaaagccactttgacttaggtcagcttggaaacccactaaattctccaggtctctaacagganaaaaaaaactggttataattgttaccagaaaggaaaaatttttttctttaccagaaatgggcagtgtctgtcagagaaaccaactgattcctgatattatcacaaagccagatacttgaagagctctattaaaatatgactgaggccctttgatgaccagcccagnctgtggcagatacccgcactgaggaaacttgttactgggtgngcangtgcnattgcagtcccgagctnccccacaggtgcttgggctgngctgncnccagcttggattttntttggttgnaaattgccctttaaatnctttaaaataaaaatctnccttggcttttttcaccttttgtaaaaaaaaaaaagaaaaaaaaacccgtttgggatgccct

SEQ ID NO: 3898 - DNA, 697 bp, Homo sapiens
  misc_feature 623, 650, 670, 678: n = A,T,C or G
ggagctccaccgcggtggcggccgcccgggcaggtacaccgattttattgctagaatactcaagtcaggacctgaccacaggctgagcacagatgttagtggcaggaatggctatcttgttaacatagtaataacactgagaagaggaagaaaaaaccatgaggattttaaaacatcttttcatcttcctgcataaaaaattaaattaaaaagaagaacaatggaatttcaacgcctcactgagctctgatagagcgaatgaaacagtatcgtgaatggctggacagggaatacagtttcttgcattaaacaggatcgcctagttcagaggtcatccgcacccacattccagccccttcctggtatccctctggggaatcaagaccagggaaggccagaaaagaagaagcatagctcctatgatcccctggaatccctccactgataaaggcaacttccaatgactcctcttccttccacgcatcccactctttccctttcctccacccaaacccacaaagggaaagaaaaccatgaccaatacttgcgaatcgccattgacttttgaccttttaaatgttgaacccagagatctattaaagggccagattaaaaaaagccanggggaattaggtttttcaacattgagntccccaattttcccctggcnggggaaanaaatttcaaattaaaaaat

SEQ ID NO: 3899 - DNA, 952 bp, Homo sapiens
  misc_feature 51, 171, 201, 202, 205, 209, 217, 224, 226, 228, 253, 259,265, 272, 274, 283, 288, 303, 304, 305, 306, 308, 320, 324,329, 330, 332, 336, 348, 349, 353, 358, 360, 369, 371, 372,374, 376, 377, 383, 386, 387, 388, 395, 404, 405, 408: n = A,T,C or G
  misc_feature 417, 419, 427, 428, 432, 437, 441, 442, 444, 454, 464, 471,473, 475, 484, 487, 495, 497, 498, 499, 500, 505, 514, 518,522, 523, 531, 537, 543, 544, 551, 553, 557, 563, 566, 569,584, 587, 600, 606, 613, 614, 616, 618, 629, 630, 631: n = A,T,C or G
  misc_feature 632, 635, 638, 639, 646, 653, 654, 655, 656, 661, 664, 670,673, 674, 676, 686, 687, 689, 690, 704, 705, 710, 711, 712,713, 715, 720, 727, 729, 735, 736, 744, 750, 763, 769, 774,780, 781, 782, 783, 790, 793, 795, 797, 798, 802, 805: n = A,T,C or G
  misc_feature 807, 811, 812, 820, 823, 827, 835, 839, 840, 846, 849, 858,859, 863, 864, 873, 877, 886, 887, 891, 892, 893, 897, 900,907, 912, 914, 915, 923, 924, 925, 926, 927, 928, 929, 932,934, 943, 944, 945, 946, 947, 949, 950, 952: n = A,T,C or G
tcactatagggcgaattggagctccaccgcggtggcggccgaggtacattntatcaagttacctatgaaccgatgtatttcgttcacttaataccattcactaaattcagttattgacctagtcaataactgcccaacttcacatttcacatacagtgaagaaactcttgnttcagcattcttttttgggttggttgggtnnggnaggnatgctacnttaacantntncggaacccctaacctgccggggggngccccntgcccncctggtngngccccttcngatgnggggataacttggcnnnncnttgtgccgtttncttnagccnncncgcntttacatggtgnngaanagacntntttttggcnannanannttttgnacnnnaatcttnccgaccccnntgnggcgataananccggtttnnggcncaggngggnncncttttttgangggtccctanacttggncntntacatttgnctngttgcttntnnnncttgnacgggtttnttcncagnncggggaanaccctnttccgnngcccaangntggnttttanatnggnattttgggcccaaanacntcggggggggtangcccgnattgggnntnantttaggggggnnnnatnaannggtttgnttagttnnnntttgngtncctctnganntnggggttctgnntnnggttggggggatannttggnnnntnaagtnccccctncnaatggnngggggttnttcggntatattccgcggnttcaangggtnaaaggnnnngggaacncancnannggtnagntnaatnnggcccccntgngggntcctggangggnngaaaanggntgcgggttnnttgnntgtttctancctnggggttctnnccgnnntacntgnggcttgntttantnntatggggnnnnnnnagngngtgttaaannnnncnnan

SEQ ID NO: 3900 - DNA, 800 bp, Homo sapiens
  misc_feature 548, 578, 580, 616, 647, 679, 691, 693, 695, 713, 722, 744,749, 751, 759, 763, 765, 766, 782: n = A,T,C or G
atagggcgaattggagctccaccgcggtggcggccgaggtacatggcaactgaggcaaagagctcttaagttacttatcgaagaatatccaataagtaggtggtagagctaggatttacacccagcagtcagctttattttcaaccatgcaatgcctccttaacaaaggagataggttaggaaaggcagatctgggcaagtgttgtattatacaacaataaaaaggctgtggggtcaaaagctatggctgttaaaaggttagggtaacagccagaagaatcacccttaggaaggttaaaatttaggacaacatctatgatccttcccaaaccttaaatcttcatgcttttaaaaagaatttcctgcccaggcgtggtggctcacgcctgtaatcccagcactttgggagggggaggcgggcggatcacctgaggtcaggaattccagaccaacctggccaacatggtgaaaacctatctctactaaaactacaaaaaaaaaattagccagatgtggtggcacttgcctgtatcccagctactcagcangcttgaggcacatttgaaccccggagggananggtgctgtgggcttaacagcacccacttgacttcangctgggtaaccaaagcgaggattcttttttnaaaaaaaaaaaaaaaaaaaagtaccttggccnggcgggccgttntnanaactagtgggatcccccngggctgganggaatttcaatattaaactttntcggntncccgccancctncnngggggggccccggttncccagcttttttttccct

SEQ ID NO: 3901 - DNA, 1395 bp, Homo sapiens
  misc_feature 2, 5, 7, 8, 9, 10, 11, 14, 15, 16, 18, 20, 22, 24, 25, 28,29, 30, 31, 32, 38, 42, 44, 45, 46, 47, 48, 50, 54, 57,61, 66, 67, 70, 75, 76, 78, 80, 82, 87, 89, 90, 97, 98,102, 103, 107, 108, 110, 112, 116, 117, 131, 132, 133, 134: n = A,T,C or G
  misc_feature 139, 145, 166, 173, 195, 197, 212, 231, 257, 260, 264, 276,314, 351, 359, 375, 392, 400, 410, 412, 442, 462, 466, 490,492, 494, 508, 513, 515, 526, 538, 540, 550, 558, 562, 564,595, 609, 633, 636, 642, 648, 652, 662, 666, 677, 679: n = A,T,C or G
  misc_feature 704, 713, 714, 722, 725, 744, 749, 756, 759, 772, 789, 802,848, 854, 868, 886, 895, 900, 910, 922, 929, 942, 943, 948,974, 992, 997, 1004, 1028, 1030, 1032, 1050, 1054, 1059,1074, 1075, 1077, 1084, 1091, 1130, 1137, 1146, 1157: n = A,T,C or G
  misc_feature 1165, 1168, 1171, 1187, 1200, 1201, 1220, 1224, 1235, 1245,1246, 1247, 1248, 1252, 1256, 1257, 1258, 1266, 1269, 1271,1276, 1281, 1282, 1290, 1293, 1297, 1298, 1299, 1302, 1303,1314, 1316, 1325, 1333, 1342, 1355, 1362, 1363, 1365: n = A,T,C or G
  misc_feature 1375, 1384, 1394: n = A,T,C or G
tntcnannnnnctnnngnantntnnttnnnnncaatcnatanannnnntnactnacntttntccannatntaccnnantnanttttncnntatcatnnatcnntagnngngnatgnnaattttctttttannnntactncattantaatacggacatagttaggcncctcccnccgtgggcggccggccggctgntntcccacactcatacnctgtagccccaggacgggncagttcagttgccattccatccttgnacngacncttgtccaaggnaaagtggaagggaaggcaagtctctcctccccccgctntaaccctcagggcccgccttcttaagcaaacttatgntggggatnctcccccgcgcgtctngctaagggaaatttcgnattattcnagaggccttnanttccggaataccccgttccgcactcttccngagggcggggggggggcccnccgngataaacaccccaaagcctttttntngntcttcccccttttnttaangntggaagggggnttttaaaaattntngccggcccgnccttttgngacngnttaaaataccaattggggtaccaattaaggnccttggttattttnccctttggtcggttgggaaaaaantcncgggangttaanttcnccgggcgttnccanccaaaattttncnccaaccaaaccaaaacccaatttancccggaagnnccccgggnggnaaggccaattaaaaaaagnttggnttaaaanaangcccccttggggngggggttgggccccctnaaaattgggaagnttgggaaagcccttaaaacctttccaaccaattttaaaaattttgnccgttnttgggccgaccttncaaccttgggccccccgnctttttttnccaantttccggggngaaaaaaacccnttggttnccgggggcccaannccttngccaatttttaaaattgggaaaattncgggggttccaaaacctntcccncccgggnggggaaaggaagggggccggggtntntnggccggttaaattttggngggnccggnccttctttttccccnncnttttccntttcggnctttcaacctttggaaccttcccgcctttggcggccttncgggggncccgtttancggggccttgncggggctnaangcnggggttttttcatagnctttcaaacttcnnaaaagggccgggttaaaantaancccgggttttntttccccccnnnnaaantttnnngggggggngananaaacncccannggaaaaanaanaaannnttnnttgtgaacccnanaaaagggcncctttctnaaaaaaagngttcccacggtgnacccccnntntaaaaaaaangggcccccncaccccccant

SEQ ID NO: 3902 - DNA, 819 bp, Homo sapiens
  misc_feature 613, 655, 698, 701, 707, 729, 734, 743, 746, 768, 815: n = A,T,C or G
tagggcgaattggagctccaccgcggtggcggccgcccgggcaggtaccaagatttatctagaagatctgcaatttgacagatcagatttccaatctaattatctacttttaggtgacagtgctgccaccaatttctcagcatgccaaatggtaaactatgacaaactatttttattttacaatcctgtgtttcggtcctgattaatttacttgcctctttgagcttttggtttcttcctctgtaaatgaaaattatacttacctgaaggattgaaagacacagaatatataaagtatttgtctcgcgatatgctcattggaaatattagttcctgtttttaacaatgagcaaggtatctaaataatatccacagccgtgggagtgaggccaatgcagagagtcaccatcagggcaattcctagtggagttgcccaggcagggccatcccaagaccccagaccagtagggccaccagggtgcaactccaggctgggagacccaaaggcatgcaactccaacacacaagaaatgcagccagcaatgtgatgaagtagggttgcctggagccttgggggtccaacttccaccccagtgtgtccagaaaatggagnaaatggggagttaaaagactcccccccaactttaaggggttnaatggttggccctactggagtttttttggtgggttaatctganggnggtttnggaatttggttagaaaccctgnttagncccttttgntcnttttcctggtggctccattttnggggggggggaatattcttattccctggtttgggcccccctattggncttt

SEQ ID NO: 3903 - DNA, 717 bp, Homo sapiens
  misc_feature 427, 455, 487, 496, 497, 517, 518, 522, 523, 537, 544, 548,550, 555, 566, 570, 575, 577, 578, 580, 590, 591, 593, 599,601, 608, 617, 623, 627, 633, 634, 636, 653, 654, 659, 660,665, 675, 686, 689, 695, 696, 702, 704, 708, 711, 712: n = A,T,C or G
  misc_feature 717: n = A,T,C or G
ggagctccaccgcggtggcggccgaggtactttttttttttttgtttttgtttttgttttgtcctttagtaaagttttacagtttttttcctgtaggtcttacacttttcttgttaggtgtattcctggattttttttgtttttgttgttgtgaattacatttttttcttccattttacattttattttctcatgggttattgctggtatgtaggaaggctattgatttttatgttgatcttaccatttacttagttttcagttgcttctcttgaagtttctagaaggatggctgtattttctgcaaatgatagcattttgtcatttccttttcctttttctgtatgtgtttacacccttacaggttttttttggttttttttgttttcgttttttttttggaggacatttgttttgtttgtctggncttactacattggttaggtttccagaanaggttcattactaagttttgatttgggtatcntggcccccnntttaaaatggggaatgcttnntaanntttttaaaccttcnaccaacnaaananaatantctttaaaatnttcnagcgnannanttttaatttnnantttaantnggggggnggaaccggnaatctnaatnccccanncncccccaagcctgggggnncaaannggccnccaaaatttnggcttctactnggnagcccnntttgcncncctnggnnacaan

SEQ ID NO: 3904 - DNA, 985 bp, Homo sapiens
  misc_feature 4, 7, 8, 13, 17, 22, 26, 27, 28, 31, 33, 34, 35, 40, 42,43, 45, 46, 47, 48, 50, 51, 61, 62, 64, 66, 67, 68, 70,73, 75, 78, 79, 80, 81, 82, 87, 93, 94, 98, 99, 103, 109,114, 119, 165, 349, 355, 395, 419, 420, 421, 440, 446, 460: n = A,T,C or G
  misc_feature 473, 481, 512, 515, 519, 618, 625, 632, 679, 689, 712, 716,720, 758, 759, 771, 772, 776, 786, 787, 811, 819, 825, 830,832, 833, 850, 855, 864, 876, 877, 902, 910, 919, 925, 940,949, 956, 960, 967, 970, 971, 977, 984, 985: n = A,T,C or G
ctcnccnnctctntttnttttntctnnnctntnnncttcntnntnnnntnnattttttttnntnannntntantnctnnnnntcagnaagggnnattnnctancatttncgtcngactntagggcgaattggagctccaccgcggtggcggccgaggtactttangagacccaggcgggcagattgcctgaggtcaggagtttgagaccagcctggctaacatggtgaaaccctgtctctactaaaaatacaaaaattagccgggcatggtggctcacgcctgtagtcccaactgcttgggaggttgaggcaagagaatcgcttgaacccaggaggtggaggttgcagngagccngagatcgcgccacttgcactccagtaatgggcgacagganccaaggctccatctcaaaaataannnaaagaaagtaaacatgagnaaaagnaaaagcttatattngaacttctctaanaaaaaagnaaaaaaaaaggaaagcctgatgccacacaanatntaanattttgggcaaaggtcgatcaattaaaagggatatttatttggcatccacaaaaataaaatttcttttacttcccccccccaaaaaaaattcaaattanaaaaagntttcaanataagccaactttttttcctttaaatgtggtttttaaaaaatggtanattcacccanaaattaccattgttgttcccccnaacngttnttttttcccaagtttttattaaatttccttattttggnnggtaaaaaaggnngganggggttattnncccttggaaaagttggaaggggcncaatttanggaagnaagtntnnaaagccttttaaaaaanccttnccctttggnaaaaggaaaccnntgtttttttttttttttaagaaganggttcttnaggggaaanattggntttggggggggcccnccaaaattncttctcnaaanccttttnttnntttttnccccttnn

SEQ ID NO: 3905 - DNA, 1049 bp, Homo sapiens
  misc_feature 4, 7, 13, 15, 16, 18, 19, 21, 23, 25, 27, 37, 48, 52, 53,54, 65, 66, 68, 72, 74, 76, 81, 83, 84, 85, 87, 88, 93,99, 101, 102, 103, 104, 106, 108, 111, 112, 114, 116, 117,120, 121, 124, 125, 127, 138, 145, 156, 177, 283, 344, 394: n = A,T,C or G
  misc_feature 409, 435, 481, 483, 495, 496, 526, 566, 571, 602, 634, 652,659, 664, 680, 683, 685, 687, 707, 724, 730, 751, 753, 757,777, 780, 784, 789, 793, 805, 809, 818, 821, 830, 835, 841,845, 849, 852, 858, 866, 867, 880, 889, 903, 905, 913: n = A,T,C or G
  misc_feature 918, 924, 926, 930, 935, 949, 953, 955, 962, 970, 990, 1005,1008, 1015, 1019, 1024, 1033, 1041: n = A,T,C or G
cccnctnctcttncnntnntntncntncttttatttnatctaattgtnctcnnnttaacattgtnntnaccntngnctttntnnntnncagcngggggntnnnntnanttnncntnncgnntcnntntatgttcgacnttggtanctccacccgcngtggcggccgaggtactttangagacccaggcgggcagattgcctgaggtcaggagtttgagaccagcctggctaacatggtgaaaccctgtctctactaaaaatacaaaaattagccgggcatggnggctcacgcctgtagtcccaactgcttgggaggttgaggcaagagaatcgcttgaacccangaggtggaggttgcagtgagccgagaatccgcgccacctgcactccagtnttggggccgaacagnagcaagggctccattctctaaaatanagtaacaggaaagtaaaccaaagtaaaaagtaaaagctttataatntngaaacttctctnnaagaaaagggaaagaaatagtaaaaggccntggattgccacaccaaaatcttaaatttgggcaagctcgnatcanattaaaagggataatttttattttgcattcnacaaaaaataaattttcctttttacttccccnccccaaaaaaaaatcaanattaaanaaaanggttttccaaaaattnagncnanacttttttatcccttaaatngtgggtgtttaaaaaantggtanaattccaaccccaaaaattancnattnttgttccccccccaaacggntcntttntcccnaagntttaattaaatntccntattttggnggntaaaaaggntggangggttntaancctntgnaaagtngtagggcnnaattaaaggtaanaaggtttgnaggcctttctaagnancccttgcnccttngggaananggangcccntggttttctttttntttnangaaaganggtccttnaaggggaaaaatgggttttnggggggggccaccanaantttcctnttcnaaaanctttttttncttttttnccccctcc

SEQ ID NO: 3906 - DNA, 700 bp, Homo sapiens
  misc_feature 639, 647, 693, 696: n = A,T,C or G
tagggcgaattggagctccaccgcggtggcggccgcccgggcaggtacgcgggaaggagatctgcttggccactggtggctcggggtctggagttcctgtgtaaggattccaggaggatcccagggctccctcccaccctgttccagttgattacagcaagggaaagaggacaccgcccgcatcagcccatccagcattcgttcaactaagcatagagtgccggggtcacaaggacaaatgagccccccacccctgctctcatggagttcccagtctatcagggaccagccattaagtagttcctgtggagtaagtcacttaacaggtgttctcggctcagggcccagccctcaaccccagcctaagcccaagtacctcggccgctctagaactagtggatcccccgggctgcaggaattcgatatcaagcttatcgataccgtcgacctcgagggggggcccggtacccagcttttgttccctttagtgagggttaattgcgcgcttggcgtaatcatggtcatagctgtttcctgtgtgaaattggtatccgctcacaatttcacacaacatacgaagcccgggagcataaagtggtaaagccttggggtgccttatggagtggagcctacttacantttatttngcgttgcggcttaattggccccctttttcaaattcgggaaaacctnttnctgg

SEQ ID NO: 3907 - DNA, 688 bp, Homo sapiens
  misc_feature 539, 559, 582, 591, 592, 605, 611, 612, 615, 616, 634, 656,658, 661, 686, 687: n = A,T,C or G
gactcactatagggcgaattggagctccccgcggtggcggccgcccggcaggtacacggagggtgccatcagaacaaagaggggagaggcctgccaaggaagtttccctggaaatactcttggactgagtgttaaaggatatgctattaatgctattattggttgttctggagagactaaactgaatttattatcctttgcctaaaatctacatctaatttcacttccacttccttatatgtcaaatcaattctctactttttttttttttttaatgaggcagggcctcgctctttcacccaggctggaatgcagtggcatgattatagctcactgtagcctcgaactcttagttgcaagcaatcctcctgcctcagcctcccaagtagctgggactacaggcatgcccccaccacacccggctaatttttgtatttttagtagagacggggtttcaccatgttggccaggatggtctcaatctcctgacctcgtaatccacccacgttgttctcccaaagtgctgggattacaagggngtgagccaccgggccccggnccaacattttttaatcaattctnttcttaaanntagggttgcaaanatttanntcnnatgggaattattttttanttttttgaaaagcttcttttgncncanggaaatttgtgggaattttaaaaannc

SEQ ID NO: 3908 - DNA, 834 bp, Homo sapiens
  misc_feature 477, 610, 628, 630, 654, 656, 663, 677, 682, 693, 703, 714,725, 728, 749, 752, 779, 780, 789, 796, 801, 803, 804, 814,815, 830, 832, 834: n = A,T,C or G
tactatagggcgaattggagctccccgcggtggcggccgcccgggcaggtacgcgggcacaggggtctggaattacacagaagacgggtgacagccaaggtggatcatgaacggtgagaagtccagcaggtgacaaggggaagggtctaaagggtggggggcacagcgcaagcaaagtcttggcaacaaaagagctaatgcatcccagaaatggggcaggtggagtacctcggccgctctagaactagtggatcccccgggctgcaggaattcgatatcaagcttatcgataccgtcgacctcgagggggggcccggtacccagcttttgttccctttagtgagggttaattgcgcgcttggcgtaatcatggtcatagctgtttcctgtgtgaaattgttatccgctcacaattccacacaacatacgagccgggagcataaagtgtaaagcctggggtgcctaatgagtgagctnactcacattaattgcgttgcgctcactgcccgctttccagtcgggaaacctgtcgtgccagcttgcattaatgaatcggccaacgcgcgggggagaggccggtttgcgtattgggcgctctttcgctttcttngcttcaatgacttgcttncncttcggttcgtttcggcttgcggngnagccggnattcaagcttactncaaangcgggtaattnccggttattnccccagaattnaggggggattnacnccagggaaaaagaaacatttngangcaaaaaaggccagccaaaaagggccnnggaaccccnaaaaaanggccncnntttgtttggnntttttttccataagntncn

SEQ ID NO: 3909 - DNA, 822 bp, Homo sapiens
  misc_feature 610, 614, 682, 684, 695, 704, 711, 735, 737, 758, 778, 785,788, 790, 812, 816: n = A,T,C or G
actactatagggcgaattggagctccaccgcggtggcggccgcccgggcaggtacctttaatcctccactgactttggaaaaacaacaaaatgccagcttccaccagatcatttcttcttaattaaaagttagccagattcttttggagcactcaattttctggtcaggtcaacaaaaaagtaatgaacaccacacacacctccctcccctgtcttcctagccccattcctggagttatgcaacccttgggggcggcatacacttcagctatttgctctgtgttcataattagattgtctagacaggagatgttgctggagcaataggaaaatattttacaagatgttccgcagaaccacacttataacagtgattaggacacactaccagacgcgaagccagcagaattggcccgggccacgagccggtttcacccagagcagaagccctttcaagctctcatttcaggaagaggtgccaaattagagctctgagggcatggagcagcaacttcttggcctttggatccgagaaagcaagggtgagataatagaatgatgtctgcgatgcccttctttcttccttcacctgctgacacttagtcaacangganggcaaatggtagtttgctgcttttaccagcattttttccaaaaggatcccgcgtaccctttgggcggntntagaactaagnggatccccngggctgnaaggaattcgattattcaagcttntngattaccggccaaccttcaanggggggggccccgggccccnacttttnttncntttttagggggggggttaattncccnccttgg

SEQ ID NO: 3910 - DNA, 853 bp, Homo sapiens
  misc_feature 454, 462, 463, 472, 473, 475, 490, 524, 556, 558, 581, 586,590, 593, 598, 603, 609, 613, 617, 620, 623, 629, 630, 647,658, 661, 665, 667, 674, 682, 699, 703, 706, 713, 716, 726,729, 731, 745, 760, 766, 768, 769, 778, 784, 785, 786: n = A,T,C or G
  misc_feature 791, 792, 806, 810, 811, 813, 822, 823, 824, 827, 829, 830,849, 853: n = A,T,C or G
aattggagctccaccgcggtggcggcccgaggtacaagaaggatttgtgaggaagggatgttggggaataaatgaatgcaggtgagattgcttaggtaattgtaggctttaatctgtatgtgaggtgataagggcttagatggtttttcctaaagaagaaattatgccaattacaagatacaggttaggaagaatggaccagaggaattaggcagtcagtgaagatgtggacttgattgtggatgtgattgaaaaaaaaatggtgttgcttctgtagcacctgaagggcttagttgggaaatgttcatgtgggattatcagcatggttggctaaagctgcctactgaagtattaaacagaggaagaacaggaagcagatgaggggatgtcttgggttatattcagatagagaatggaaggaaaaagaggatgtaggttaagagagagggtgaangaaaattnnaagagtgcnntnatgggagcagaaaanggatgagtgtttcccggaacctataaatattacntgaaaccaaaaagttgggtggaaccgagactncnattttttttttgagacagggtcntttgntctntcncccangcttnagtgcnattnggtngtnatnttcttnnctcacttgcaaactttnccctttttctnggncttnanaataatnccttcctnccctcaacccttcttgnggtnaanttggggnacntacccggccnatngntcccatgaaccccnttggcaaaattttcntttggntnntttggctanaaaacnnnttttnnccccaagctttttncttnncnctccttgannntcnannggaattccccccacctttnggcn

SEQ ID NO: 3911 - DNA, 849 bp, Homo sapiens
  misc_feature 700, 707, 714, 734, 747, 785, 814, 825, 827, 829, 834, 849: n = A,T,C or G
actcactatagggcgaattggagctccaccgcggtggcggccgcccgggcaggtacaggttacttgtcaattgaatctgtggcttttcctctggtaaacagtagctttctcggcagctctgcttacttgacttctggttatatcccatgagccaggcacagatctggttttacgggacaatgccaaaacaaacattgtcagggttctgttagggtcacaagaagatttactctatttcttgttctgtctgcctgcttgaaacaatagcagccattaaaagttgttatgtggaagtcttgtattatatactagaaatgggccttgtaagaatgacttgtatcatattgtccacatcctcattgagaatattaagaagacaatgttgagaagactgacgcccagagaaatgtcatttgcccaaggcaaaatcaaatattttggtggcagagactgcttaggaaacaaccggtccttatctcaagtctaactcccttaacatttgggggcatttcataatttgatcttgagggtaatagatattagatgtattaacttctttttccagccttacataacaaagtcttcagaaacagaaaccgtattttgcgtggtttggttgtaagtaaatgcctagtatggaggtcatgtaatggatttctttttaaaattttaaaatttaaaattaattggattttttggngggatancattagnaaggtattatttattggggntcctcgggcccgnttcttagaaacctaggggggatccccccgggcctgcanggaatttcgaatattcaagccttattcgnattcccggtcnancntctanggggggggccccggn

SEQ ID NO: 3912 - DNA, 837 bp, Homo sapiens
  misc_feature 129, 406, 609, 614, 649, 659, 669, 671, 675, 686, 687, 703,706, 719, 732, 742, 748, 754, 761, 772, 777, 778, 779, 787,808, 816, 822, 833, 836: n = A,T,C or G
ggcgaattggagctccaccgcggtggcggccgaggtacttttttttttttttttttttttttgagatggagtctcactctgtcgcccaggctggagtgcaatggcgcaatcttggctcactgcaacctntacctcccagttcaagtgattctcccacctcagcctctcaagtagctgggattacaggtgcctaccaccatgcttggctaatttttgtatttttagtagagacggggtttctccatgttggtcaggctggtctcgaactcccgacctcaggtcatccgcctgcctcggcctcccaaagtgctgggattacaggtgcgagccacctttcccagccctctccctggcatcttaatgcgcataatagtgaacacttgcaaaggggctttactgttatcgngctactatcttggaaaggaagtggaaaaagatgctgcctagttccacgattggtgtgtggatcctcctagaagtcactgcagacctgttaaagtgtaaagagatgcctaaaattgaaaaaaaaaaaagttgggggaagggggctggaatatgggatgagtcctcattcccaggaaaaggcctcatcctttcttgtggactgancccanatgttcccaggggggcccttgcctccttccctttnctgggggggntttttttttnantgangggggtacctnnccccgggcgggcccgnttntaaaaacttaagngggaaaccccccngggcttgganggaaanttggantttaaanctttttcggtnacccnnncgaccctntagggggggggggcccgggtnccccaaantttttntttcccctttnaang

SEQ ID NO: 3913 - DNA, 852 bp, Homo sapiens
  misc_feature 30, 49, 215, 248, 262, 274, 315, 334, 336, 409, 465, 483,530, 532, 555, 573, 641, 657, 670, 671, 690, 704, 709, 728,741, 750, 755, 764, 769, 777, 788, 793, 798, 807, 815, 818,836, 840, 842, 844, 850: n = A,T,C or G
tactatagggcgaattggagctccaccgcngtggcggcccgaggtactntgctttttttttttttttttttttggtctgccagggaccatcaggcatggactctgatggaagcctggtggtgataaggtcatccacagatctcattatgctgtgagctacagccgacgtgattataaaattctgaggtggaatcctgagagacaggagggctganccaaaacccttcatggggttgtgctgcaaggantgcctgccgtccancagggccttggngagcataagcaggacacctgagctgtgataaatgtcctggngatgaccagaatctgcctntncttgggtaagggagaggctaccccgaggagctggaaacaaagacatggaagctaggtaacctgacgctaggcnctctcacatcctggaatgagggagtcttcactgagcctatttctttaagggaaaanttttcattctgctttgcntaaaacatactccccagctgaagagaggagtatgaaaatccctcatntnggctaccatgtttcacctttttnagaggcattaacatttgncccccttcaagagactgtttgggataactaaaagaaccatgctttaaaaaagaaagggccccttgggntaggaagaaccaaaanggcattgggtttnncctgcctttggcacctggncctcatttttaganccaanggggcttgtaagggattcnacttgaagaaaantcccaagtnaaatnctttaaaanggttntgaaagtnccataaaaaangcttntcaanatcttggtnaaacctgntanttttttacccacccgggnaaangngnactagntt

SEQ ID NO: 3914 - DNA, 780 bp, Homo sapiens
  misc_feature 516, 518, 522, 523, 557, 571, 576, 594, 596, 622, 626, 629,632, 634, 638, 641, 642, 649, 652, 653, 655, 670, 674, 677,688, 697, 708, 715, 716, 717, 719, 720, 724, 736, 737, 740,743, 748, 749, 753, 754, 756, 757, 758, 759, 760, 762: n = A,T,C or G
  misc_feature 763, 765, 767, 768, 774, 776, 777, 779, 780: n = A,T,C or G
gtaatacgactcactatagggcgaattggagctccaccgcggtggcggccgggggccattgagactgccatggaagacttgaaaggtcacgtagctgagacttctggagagaccattcaaggcttctggctcttgacaaagatagaccactggaacaatgagaaggagagaattctactggtcacagacaagactctcttgatctgcaaatacgacttcatcatgctgagttgtgtgcagctgcagcggattcctctgagcgctgtctatcgcatctgcctgggcaagttcaccttccctgggatgtccctggacaagagacaaggagaaggccttaggatctactgggggagtccggaggagcagtctcttctgtcccgctggaacccatggtccactgaagttccttatgctactttcctgagcatcctatgaaatacaccagtgagaaattccttgaaatttgcaaagtttgtcctggggttcaatgttcttaaagctttggtttccaagctntnccannaaatgcccaccaagaaatttcaaaccttgggatnttgggaaagaaggnaaaanaaaaccttgattggtggntnaaccttgaacccccattttttggatngganganccntnaccncannggggctnganngncctttccaattgggnaaanccngaaacaaaacnttgggcttntttcccttttncccgtgnnnannaaanaggtttttttannaanatnttttnngtanncnnnnncnngntnnaaaagnanntnn

SEQ ID NO: 3915 - DNA, 723 bp, Homo sapiens
  misc_feature 622, 647, 653, 673, 679, 680, 703, 704, 707, 711, 715: n = A,T,C or G
gcgtaatacgactcactatagggcgaattggagctccaccgcggtggcggccggggtgctggtcgagaagctcacgcccgaagccctgctgggcgcgatcgccgagcaccgcgccaccgtgtgcttcacggcgccgaccttctaccgccagatggcggcgcaggctggccgcttcgacttgtcgagcctgcgcgccagcgtgtcggccgctctagaactagtggatcccccgggctgcaggaattcgatatcaagcttatcgataccgtcgacctcgagggggggcccggtacccagcttttgttccctttagtgagggttaattgcgcgcttggcgtaatcatggtcatagctgtttcctgtgtgaaattgttatccgctcacaattccacacaacatacgagccgggagcataaagtgtaaagcctggggtgcctaatgagtgagctaactcacattaattgcgttgcgctcactgcccgctttccagtcgggaaacctgtcgtgccagcttgcatttaatgaatcggccaacgcgcggggagaggcggtttgcgtattgggcgctcttccgctttctcgcttaatgaactcgcttgcgcttggcgttcggctgcggcgnagcgggattaagcttaacttaaaangcgggnaaaaaccggttattccacanaaattnnagggggataaaccccaaggaaannaanattntggngccaaaat

SEQ ID NO: 3916 - DNA, 723 bp, Homo sapiens
  misc_feature 10, 492, 572, 655, 656, 658, 666, 673, 676, 692, 696, 698,700, 706, 707, 717, 722, 723: n = A,T,C or G
gcgtaatacnactcactatagggcgaattggagctccaccgcggtggcggccgaggtacgcgggcctgccttggggaagaaggaagtgtgtctctgtgaacctcccacctgggccgaagggaggccactctctctgctgcctctccccaaccttggccttctgtgctcctggtgaacctctcaccccctgcctacaggcctcgaatctcaagaccatgatgacctctggtcacccctgaatccagagctttccttttacaaaggggaaactgagacctggagcagggctgatgttcagccagcgcacaacggaatggccgaattggtggtaaaatactgaaatagttccagtgtggatggaaaggggctgctgccctaagcatctctactgcccgcctcatcccttcctccaggaccctgggtcagcaccaggagcatcaaagtggccaggattggccggagcccatgctaatggctctgccagcccttctncccaccagagagggcagggggattcaaggccatctagaggtagcattgtgaccgtatctgcagtagtcaatccttgtgtnccacggtccctggactttgttaataaagggcaccagcctacattcctttggtacctgcccgggccggccgtttggacttattnnanacccgtcnacctttnaangggggggcccccggtncccnancntttttnntccctttttnaggann

SEQ ID NO: 3917 - DNA, 385 bp, Homo sapiens
  misc_feature 3, 8: n = A,T,C or G
ttngggcnaattggagctccaccgcggtggcggccgcccgggcaggtactgtgctaaccaggcaaccattggttagggagcttccaaaactccgtgtccactccaggccccgctccagccatctggccaagcacactcagcttcaggacacaatgagcatagccagtccctctttgatgtccttggtacctcggccgctctagaactagtggatcccccgggctgcaggaattcgatatcaagcttatcgataccgtcgacctcgagggggggcccggtacccagcttttgttccctttagtgagggttaattgcgcgcttggcgtaatcatggtcatagctgtttcctgtgtgaaattgttatccgctcacaattccacacaat

SEQ ID NO: 3918 - DNA, 394 bp, Homo sapiens
  misc_feature 6, 148, 155, 156, 157, 159, 161, 169, 187, 190, 191, 194,197, 198, 203, 215, 223, 224, 225, 226, 232, 233, 243, 245,250, 251, 254, 255, 256, 257, 265, 266, 267, 273, 276, 277,278, 279, 283, 284, 286, 293, 308, 321, 326, 327, 337: n = A,T,C or G
  misc_feature 342, 355, 358, 363, 365, 366, 367, 368, 369, 370, 371, 374,383, 388, 392, 393: n = A,T,C or G
gaaacnactcactatagggcgaattggagctccccgcggtggcggccgaggtactttttttttttttttttttttttttttttttttttttttttttttttttttttttttttttttttttttttttatttttttttttttttttttnccccccnnncngncccccttnaaaaaaaaaaccccgggnttnnggnaannaaaanccccttgggaantttttttnnnnaggggnnccccccgggncntaaannaannnnccccgggnnncccccnaannnntttnntnccccttnaaaaaaaaaaaaaangttttttcccccnaaaannaaaaatttgnccccnggaaaaaaaaaanggnccccnannnnnnnccnggggccccnaaaancccnng

SEQ ID NO: 3919 - DNA, 679 bp, Homo sapiens
  misc_feature 652, 659, 660: n = A,T,C or G
ggcgaattggagctccaccgcggtggcggccgaggtacaagtgcacatcaccacacccagctgagcagcatttttaaaattttcttttcctccaaagctttcttatatcctgattttccctcactatcctcatgtaatatttgcatatattcatacacacacacacatgcaactgcattttatacacatgtgtcttggggtcccggagagctcagcgtgctggtggggttggtggggctggtgtctccagagtggtgatgtgaagagcagcacctcgcttagaggtagagcaggtgtgtgccatgagctcaggtgatggcagtggagcttacaggagatggcttgtggcttttccctccgttggtctgtcactctcagctgccactgtctgccactgtagggattccactgtgggttcaacttgttcttatgtcaggcaatgttgtttgtgtatactcataataagcactggttaaagagggaacattaatgctgaaatactagtgaggggtcgggtgtggtaacgcttgccctgaaatcccagcactttggaggccaaggcggacggatcaacttaaggccaagcatggtgaaaagccatccctactaaaaatataaaaaattagcagggcgtggaggtgcatgcctgtangtcccanntaccttgggtggctgaagc

SEQ ID NO: 3920 - DNA, 678 bp, Homo sapiens
  misc_feature 637, 648, 656: n = A,T,C or G
ggcgaattggagctccaccgcggtggcggccgcccgggcaggtactcatcattaagaaattaaagataatccgtaaataaaacaatgacaatataatagtttagagagttaagatttaggaagtagtagataaaataattatctgtgttatgcaaatataatccttagaatgcaatatttgattaataggagttgtcctatatgtcattcataaacttgtagcagagagaaacctctgcataagctcaggtgttcaagtatgcaagaaacacagttttctgtattttgctcttgctaaacttaatttgtattctgggccctggtttcatcaagtggcagaaactcaatctcagtcagccctaactgactatcctccaggactctgtctacaaaatgccaggtggggggccatctggccctcagtgtcatcagccacccctgctggcacccactgagacttcctgctctgtggtcactggtccttgtaggttgccactgcagcctccttgtctcattccaaggacacattaggccttctggctctatgagtatttttcactggagaaattttgcttctggctggtacctcgggccgctctagaactagtggatcccccgggctggcaggaattcgatntcaagcttatngattccgncgcctcgagggggggggcccgg

SEQ ID NO: 3921 - DNA, 698 bp, Homo sapiens
  misc_feature 476, 516, 528, 539, 560, 578, 587, 593, 597, 600, 607, 613,624, 634, 655, 656, 657, 680, 681, 682, 692: n = A,T,C or G
ggagctccaccgcggtggcggccgcccgggcaggtacgcgggcagttcgcagagacctgctaattcataacttacagtctcttgccactaatgtcactgccagcaaagtcacagtcccctcagcatcctccatcttgaaagggtgacgtgccgccctgccagcggaaagcttacctggcactgttggtttgtgtatcatccacattctccccagtttttctaaattaacaataggaagcatagctggtttaggaattcttttagttagattaggtaattcacaaaactggtaggaaatcgttcaacctaagttaaaaccaaaacagccatatcttcaggagacattttctataaaattttatcacttttatttattttatttttcctggcaataatgaaaggaaatgtcagaaatggaaagtttgtcccttttgtaactggcgagaaactgggtttgtgttttgcctaactttttntcctggaagatttaaatcagtatttgctgtcaaagaagangaaatgctctancatctgcgaanacactttgtctgtcttcgatnaaacaataagtttaaggnggaccgggntgcccnttantgntgaaaanggtggnggggggaatanctttttttanggatttcggaataccaaaaannnacaggatttacttagggggcctnnnactggggttntttttc

SEQ ID NO: 3922 - DNA, 681 bp, Homo sapiens
  misc_feature 73, 212, 246, 310, 312, 361, 373, 380, 488, 495, 570, 588,622, 638, 662: n = A,T,C or G
tatagggcgaattggagctccaccgcggtggcggccgaggtactttttttttttttttttttttttttttttnggtagagacaggggtctcactatgttgcgcaggctgacctcaagctcctagcctcaagcaatccgatcccccaacctcagcctcccaacatgctgggattcctggcgtgagacaccatgccgaggctcaatgtctcctntgaaaggaaagaagtggacaaagccattctgcanattcccaacactgtcaccgaggctgcccgcacagctctattatctgtcctgaagcattgttaananactgcgctatcgttccattgacagtttgaagttcagtgacagaattatntggagagggcanaccctgngggatgaaggccacacagcttcagtcacaaaagaagggctatgtgcacccatcaccaagacacccagtgtctgtgagtctttggtacctgcccgggcggccgctctanaactagnggatcccccgggctgcaggaattcgatatcaagcttatcgataccgtcgacctcgagggggggcccggtacccancttttgttcccttttagngagggttaattgcgcgcttggcgtaatcatgggncatagctgtttcctgngtgaaattggtatcccgtcacaantccacacaacatacgagcc

SEQ ID NO: 3923 - DNA, 699 bp, Homo sapiens
  misc_feature 503, 580, 598, 608, 623, 625, 644, 652, 662, 689, 698: n = A,T,C or G
gggcgaattggagctccaccgcggtggcggccgaggtactaattttgctattagtttatatcattatttgggaatatgactttttttaaattgcaacaacaaacaatgaaaattataactaagagtcacattcagtagtatcttctctttacaaaatctgaatatagacaatcttcaagggcttcggaaatacaaagaaagatttcattgcaatggattttctcaacccatttgaagttcctccttgtctcttctgtcattatttgtctggtctatccttaagatcactgaataaacaaacctatccaccgatcttggcactttttttttttttgagatggagtctccctcagttgcccaggctggagtgcagtgacccaatctccgctcactgctagctctgcctcccaggttcacaccattctcctgcctcagcctcccgagtagctgggactacaggcgcacgccgccacaaccggctaatttttttttttttttttggnatttttagtagaaacaggtttcacccgtgttagcccaggatggctcgatctcctgaccttggtatccgcccaccctngggcctttaaaagggctngggattacangcggggacacactgnanccgggcctgatctttggcncctttttnaaaactttcncaatttatattcaaattttccattttngggggggant

SEQ ID NO: 3924 - DNA, 704 bp, Homo sapiens
  misc_feature 676: n = A,T,C or G
ctcctatagggcgaattggagctccaccgcggtggcggccgaggtacagatatgaagtcaggaaatacatgaggcggtgggtttgaaagtcttttcttaatttgtagtcagagcttcataactgggtgaggcaagagaacatgtgatcaagagtcaatgtgatgacaaagagaaatagaaatcactattaaattacggtgttcgagaatggtgatgtgattccagtagagcttgagggggaagatgttactagagattgaaagacaaaggagaggtggggagttggggacaggttgaagagttagtctgtatgatgctgtggtttatgaatggagaaaaaattgtggcacactagagaatatcagcttacaggctttttttttattccaactcattaatatagtgtggagaaagatgagcaagaaataattgattgtttttgagtaagagctagttaaagaaatttggcttgtagagagtgagagaagactagatacagagagtggcacacgatattgcttagtattcaaattaagttgctctagaactagtggatcccccgggctgcaggaattcgatatcaagcttatcgatacccgtcgacctcgagggggggcccggtacccacttttgtccctttagtgagggttaattgcgcgcttggcgtaatcatggncatagctgtttcctggggtgaaaattgg

SEQ ID NO: 3925 - DNA, 711 bp, Homo sapiens
  misc_feature 186, 328, 357, 360, 394, 420, 500, 508, 515, 529, 534, 565,586, 597, 606, 643, 657, 661: n = A,T,C or G
tcactatagggcgaattggagctccaccgcggtggcggccgggggccattgagactgccatggaagacttgaaaggtcacgtagctgagacttctggagagaccattcaaggcttctggctcttgacaaagatagaccactggaacaatgagaaggagagaattctactggtcacagacaagactntcttgatctgcaaatacgacttcatcatgctgagttgtgtgcagctgcagcggattcctctgagcgctgtctatcgcatctgcctgggcaagttcaccttccctgggatgtccctggacaagagacaaggagaaggccttangatctactgggggagtccggaggagcagnctnttctgtcccgctggaacccatggtccactgaagntccttatgctactttcactgagcatnctatgaaatacaccagtgagaaattccttgaaatttgcaagttgtctgggttcatgtctaagcttgttccagctatccanaatgcccncaagaanttaactggatctgnaagangaaagaaactgatggtgttaactgaacccantttggattgagacctacacanggctgatgtcnttcattggnaaccgcacaaaacttggttttcctttgcccctggganaattgttttttganaaanttttttgggaacttgcccggcgggcggttctagaactagtgggatccccc

SEQ ID NO: 3926 - DNA, 716 bp, Homo sapiens
  misc_feature 535, 686, 692, 696, 716: n = A,T,C or G
tatagggcgaattggagctccaccgcggtggcggccgcccgggcaggtaccctgcagaatctaccaaggcactctgtagcaaagcaggccttccacctgtctcggggaacccagctggccaccttgcactcagcctctgccagtcacctcagggctggcatttgggagtcctgactgcacgccaaaggttgttaagtggctttctctgaactcatttgaacagctgagtaaactgttcttgctttcacaaggaaaagaactcctgaagttattagaactcaccaaaccagtttccttgtttttgaagaaagcaggtaatgtggctttgccagcaagaagcaggccttgggcgtccatctccttctcaggtgtgtttactcaggagaaggtgacatttggataggggcaggtgtgtttgctgaactgagcttcagcctaatcattccggaaaacttcctgagactttctctgccctgtaatttccccactgttgatggaagtatattgcagtctcatgcaggactgcgaagggaangtcacactcactagatcacttatataccaaaattctggggaacttttgctgcatattatactttagaactctttccattaatgataatcattgaaaatattaccatgggaataaaaatctggactttagttaatggacataccaaccgttntttttnttantttttggccgactcttcctn

SEQ ID NO: 3927 - DNA, 705 bp, Homo sapiens
  misc_feature 679, 699, 705: n = A,T,C or G
ggcgaattggagctccaccgcggtggcggccgcccgggcaggtactttgggaacagggtctgccttaccatagaagtgtaaggactgtgatgaaagtgagacttctctcctccccatctttttttaaccctttctccccctccccaaaaaactgctgtgaaaaggactcaaagaaagggcatagcttgagttgaccatttattcttgttttgttttttccttcccatgatctaaattaaggggggggaaaaagcataggtttaatggccaataccataagcatggacacgaacatacacacatccccccatacacacaccacacaccccactactcacccagcaattcaaattgaggtgccaaccgcccaactgctggaacagagagaccccggaggccactgcgcctcccttaccactcaaatcttccattcccactaaaattgtgtccctagggtacctcggccgctctagaactagtggatcccccgggctgcaggaattcgatatcaagcttatcgataccgtcgacctcgagggggggcccggtacccagcttttgtccctttagtgagggttaattgcgcgcttggcgtaatcatggtcatagctgttcctgtgtgaaattgtatccgctcacaattccacacaacatacgaacccggggagccataaagtgntaagcctggggtgcctaatnagtgan

SEQ ID NO: 3928 - DNA, 1103 bp, Homo sapiens
  misc_feature 1, 6, 7, 9, 11, 12, 14, 15, 19, 20, 21, 22, 23, 24, 27, 28,29, 30, 31, 32, 33, 34, 36, 37, 39, 40, 41, 42, 45, 49,51, 52, 56, 57, 62, 63, 64, 65, 68, 70, 71, 73, 74, 75,76, 77, 80, 81, 82, 83, 89, 91, 92, 94, 96, 98, 107, 110,112: n = A,T,C or G
  misc_feature 115, 118, 122, 126, 127, 130, 176, 185, 188, 197, 208, 218,221, 223, 259, 261, 263, 264, 265, 267, 270, 272, 275, 279,280, 289, 294, 324, 442, 443, 444, 446, 449, 450, 453, 454,458, 465, 466, 469, 471, 485, 491, 511, 514, 521, 528: n = A,T,C or G
  misc_feature 545, 554, 567, 571, 576, 584, 586, 587, 597, 602, 611, 612,617, 630, 633, 639, 645, 647, 648, 658, 660, 674, 693, 694,695, 702, 703, 705, 712, 714, 717, 732, 734, 741, 742, 744,747, 752, 761, 762, 767, 774, 776, 779, 781, 784, 788: n = A,T,C or G
  misc_feature 800, 802, 808, 811, 814, 818, 823, 828, 833, 836, 837, 839,841, 845, 850, 854, 855, 861, 882, 903, 908, 915, 917, 920,925, 928, 931, 938, 940, 941, 943, 947, 951, 952, 954, 961,968, 970, 976, 977, 983, 985, 995, 997, 1004, 1010: n = A,T,C or G
  misc_feature 1018, 1019, 1022, 1026, 1029, 1032, 1034, 1040, 1055, 1057,1059, 1061, 1065, 1066, 1067, 1070, 1071, 1074, 1075, 1078,1082, 1085, 1087, 1090, 1091, 1100, 1101, 1102, 1103: n = A,T,C or G
ngtcgnngngnngnnaacnnnnnnctnnnnnnnntnngnnnnacncggncnngtgnncggtnnnnctncnncnnnnnagnnnngggggngnntnantnatggcaccnacncntanttntttntttnngcnacccggcaccaccgtagtttttacgcccggtgagcgctccacccgnggggggggnagnggggtgtanaaaaaaaaatntttttttttnttntnttcctcgccttgagcaaggccaacgagccgcctcgnantnnntnttntntantcgnngggcgggcntaagngaccattgtgtggccgtttgccgctggacngagggcaacccaacacctagcctaaagcccgtggacactgcagcaggtgcttgcccacgcttgccccgtccggaagaaaaggcgccggcctaaaagccgcggagtctggtgactaggnnncnccnnccnngccngcgtggnngantncccacagctgccancgactngggaaaggatgttctttggncanaaaaaangggaccngtgggaagcccttgggngcctggcgnagccccccggagngttncccgnattcttgngnnagccacttanaaaancccagagcnnggcancccggagagaccntgnggtgcnagttgncnnagaaccccgntngggagcggttttcnaggaattaacccccacccnnncccaggnngngccaccntnagnttatttttgggcgcncnggtgccnnanacncgganggggccctnnggggncgcaccncnacnanccncttnccccctggtttngnccttcngcncgngggnggccngaatnccccnganngntngccngggcngggnncccctntggaacttaggttctaacaanaaaaaaaaaaccttgcccacnaaccntcccccntntgnaaggngtntgnatagtcngnnantgtntganntnccgcatntagaggntncgggtnngacacngnggttgatttngncacgccnttttangagggggnnccncaanttnacngnccactnaccccctcccccganantntngccnnnatnnaannggntttnttntntanngacctcgcnnnn

SEQ ID NO: 3929 - DNA, 701 bp, Homo sapiens
  misc_feature 511, 655, 661, 699, 701: n = A,T,C or G
gggcgaattggagctccaccgcggtggcggccgaggtacaaaggttcagtggtgagaagagggagcaaggcctttggaataatgaactccagttgttcctcataggtgcagcagaaatagcgagaggtcaggattatggagattggtaaggcgagatcatccaagggccttttgcttggtaagccattttactttaatcttgagtgccatagggattcattgacggattgatacagggaaatgaaatgatttttttttttttttggttgggggagacaagagtcttgctctgttgcccaggctggagtgcagtggcacaacgtcggttcactgcagtgtctgcctcccaggttcaagcaattctcatgcctcagcctaccttgtagctgggattacaggtgcacaccaccacacccagctattttttatatttttggtagagacggggttttgccatttgtccagcctggtctcgaactcctggcctcaagtgatctgcccacctcacctnccaaaatgctgggatcacaggcatgagcccccgtcccaagccaattcattcattttagaatgaatgccctgtcctgggggtgaatggactagaggagggcaatactgggaggctgaggcgggtttacctgtggaagtgaccaantgaganttgaacctgaggggtatggccaaaaggggataaaaaanan

SEQ ID NO: 3930 - DNA, 949 bp, Homo sapiens
  misc_feature 1, 2, 3, 4, 5, 6, 7, 8, 9, 10, 11, 12, 13, 14, 15, 16, 17,18, 19, 21, 22, 23, 24, 25, 26, 27, 28, 29, 30, 31, 32,33, 34, 35, 36, 37, 38, 39, 40, 41, 42, 43, 44, 45, 46,47, 48, 49, 50, 51, 58, 59, 60, 61, 62, 63, 64, 65, 66,67: n = A,T,C or G
  misc_feature 68, 69, 70, 71, 72, 73, 76, 83, 84, 87, 88, 89, 90, 91, 93,94, 95, 96, 97, 98, 99, 100, 101, 102, 103, 104, 173, 175,176, 191, 192, 585, 589, 639, 656, 668, 689, 710, 711, 716,719, 739, 747, 749, 752, 786, 787, 791, 794, 818, 821: n = A,T,C or G
  misc_feature 824, 848, 858, 878, 881, 886, 888, 899, 903, 910, 915, 924,928, 930, 938, 940, 942, 948, 949: n = A,T,C or G
nnnnnnnnnnnnnnnnnnngnnnnnnnnnnnnnnnnnnnnnnnnnnnnnnnggggggnnnnnnnnnnnnnnnnagnaaggggnnaannnnntnnnnnnnnnnnnatcactataggcgaattggagctccaccgcggtggcggccgcccgggcaggtacccagctgagactggntnngtctaattcctcccnnacactaacctgcctctgccaggccagctgtgctcactggacagaaaccaccccatgcttttcaccctcctgcatgatggggacatggattccagggcccagctgtcctgggacatcaccacctctgactgactttccctcatcagcagagaggcctgcccaaggaggagtctctccagtcagtggatcaaacgtgcctagggtagggagcgaagtgcccgctgcctcattcatcacctgctgccagggcccggtgctccttagggtcaaattttcattttctcaagcatccttggttttctttctttgggtgctggagggggtttgggcccttttgtcagtgtccagtggttttgtgggagtgggaaaaggaaaaccaagaacttggtgagtngatncgaattttggacccttttgggaccaagacaccccccggcggttacccttngggcccggctttcttanaaaacttaagtnggggattccccccccgggggncttggcaaagggaaattttcnnatttnttncaaaggcctttattccgaantacccggntncgnaacccttcgaaagggggggggggccccccgggtnncccnaanctttttttggtttcccccttttanagngangggggtttaaaatttggccgcccncttgggccgntaaatccattgggggccaantanacttngntttcccctggngggnggaaaantaggntattccccngttnanaaaatttncncnaccaann

SEQ ID NO: 3931 - DNA, 957 bp, Homo sapiens
  misc_feature 1, 3, 5, 6, 7, 8, 9, 10, 11, 12, 13, 14, 15, 16, 17, 18,19, 20, 21, 22, 23, 24, 25, 27, 28, 29, 30, 31, 32, 33,34, 35, 36, 37, 39, 40, 41, 42, 43, 45, 46, 48, 49, 50,51, 52, 53, 54, 55, 56, 57, 58, 59, 60, 62, 63, 64, 65,66, 69: n = A,T,C or G
  misc_feature 70, 71, 72, 74, 75, 76, 77, 78, 79, 80, 81, 82, 85, 86, 92,93, 188, 241, 360, 403, 451, 512, 539, 552, 585, 617, 676,681, 684, 686, 730, 735, 741, 756, 758, 761, 762, 764, 772,773, 776, 779, 781, 784, 810, 815, 818, 833, 848, 852: n = A,T,C or G
  misc_feature 855, 864, 870, 877, 889, 914, 947, 956, 957: n = A,T,C or G
ntnannnnnnnnnnnnnnnnnnnnntnnnnnnnnnnntnnnnnanntnnnnnnnnnnnnntnnnnnttnnnntnnnnnnnnnagnnaggggnnataattatcccatgcgcctcactatagggcgaattggagctccaccgcggtggcggcccgaggtaccagacacaggcatatacttgtttcctacngaaacagaaactatattattacaactcttgcagagtctacagaggaaattcanaagttcctgaatcaggggactgactaccaaattttcaactcacaaatagaatcccccacgaactgccctacctggagttatccattaacaattaaagaactgaagaaaagctttatggnctggaatctcaaggctgctgtccatgagtctaatccagccagnaacatatgctttgtgtgtcccaggcatgataatttttggttaagaaanatttggtttgtggaatgcctttaaaatggaggcattgctcttgcctaaatttttacggcantcttccactggaaaacagcattatctntaaagttttggtngaattttggagattgcaaactccctgatataanaataacttttttcttttaattggagggaaagnaaaaactaagaaggttaggagacctttttaccaggaaattttcttattaaaaaattacnaaaanatngngccatggcaaaaaaaggtaaagttgggtggacccctaaaaaaangttcnaaccancaccccggaaaaacntnatnnangggggggnntgnccnanagnaaaacggttaccccttcgggccccgnttctnaanaaacctaaggggggnatcccccccgggggncctngcnaggggaaantttccnatttttnaaaagcctttantcggattacccggtccgaacccttnggagggggggggggccccccgggtacccccaancttttttgnn

SEQ ID NO: 3932 - DNA, 971 bp, Homo sapiens
  misc_feature 1, 2, 3, 4, 5, 6, 8, 9, 10, 11, 12, 14, 15, 16, 17, 25, 27,29, 33, 35, 36, 40, 42, 45, 49, 50, 51, 53, 55, 57, 58,60, 61, 62, 63, 65, 68, 69, 70, 71, 72, 73, 74, 75, 86,87, 88, 89, 92, 94, 96, 97, 98, 99, 101, 102, 103, 105,106: n = A,T,C or G
  misc_feature 108, 110, 115, 121, 122, 123, 125, 133, 176, 181, 182, 185,188, 194, 196, 198, 199, 202, 213, 218, 235, 253, 262, 292,335, 418, 420, 450, 454, 465, 477, 482, 485, 521, 526, 529,538, 551, 558, 561, 583, 585, 589, 600, 606, 610, 612: n = A,T,C or G
  misc_feature 623, 640, 645, 647, 688, 689, 694, 697, 703, 707, 725, 727,731, 741, 745, 746, 754, 766, 774, 783, 799, 801, 804, 807,811, 824, 827, 830, 831, 835, 836, 849, 871, 880, 881, 882,883, 889, 891, 892, 897, 898, 904, 915, 920, 923, 926: n = A,T,C or G
  misc_feature 934, 943, 954: n = A,T,C or G
nnnnnnannnnntnnnnacatacancntnactntnncctntnctnattnnntntnanntnnnnanttnnnnnnnntttagcaaggnnnnaananannnncnnngnnantnaactnatatcnnncnaattgganctccaccgcggtggcggccgcccgggcaggtactttttttttntgggnnganggntttttngnannaanttttttttttnttacngggatgctgttatgganatttcaccacaggcccanccaggcctnacgttctcatatttaaatatcatttggaanctgatgaaactctggaagtgctcatctccctgttggttctaanatttagtcttcctgggaacttttatttatgtaactaagtgctgaaaattgagtctcaaagcaagtattttattatatttcttngnggttggggggggccccgggtctggtgggtncttngtgggagcttntccaaggtgttngaaanccntctggttagaaatgtcaagttggaaggcccagggtnacttntcnaaaaacacngtggagggctttngcttgtngtncttgtccccaagaaaaattccnangacnaaagaggcccncaaaanccgngnaagggatgttngggccattgttccccanaatancnggggttttcccaaggggaaaagtgggtgccccagggaaatnnaccanacntttaanttgntccttgggaattttcccnangaancccccccaanggcnncccaaagncttcaaattaanttttttcntaattcctnggattccaatggggangntcnatngggngccaatttttttnaanggnncccnnccgggtttccaanccttttaaaagaccttccctcnaaccccccnnnnttttgnannaaacnncacccnttgttggcctncccgntgnttnttggcaanaagggcccnttttccttttnttgaaacttggcccccg

SEQ ID NO: 3933 - DNA, 817 bp, Homo sapiens
  misc_feature 647, 649, 656, 663, 664, 668, 676, 693, 697, 699, 705, 706,708, 710, 715, 716, 729, 730, 740, 757, 762, 764, 766, 769,773, 783, 795, 799, 804, 806, 807, 808, 811, 812, 816, 817: n = A,T,C or G
gactcactatagggcgaattggagctccaccgcggtggcggccgcccgggcaggtacccgggatccacggttgtgccgggcttgctggctccacatgacacagcttgatagcccggtgctctgccaactttcagggtggggcctgtgctctacgagggctgagagcttgtggcggggtctcggtgtggtggagggaacaccatcagtgtgctggggtgtggggtagcaggtcaccagggaaaggaaaacaaagggggaagaaaatagggatgtattgatacatttgggggaaaacacagccctgagagagaatcaagtgtctatgttggccctgagcaaaagcgataaatacgtttggctcttctgacccagaggtgggcatatgtggctgggaattctggtggaagtggctcattgtccatctctggcccaacttgagcctggtttttcatctcttagcccaacctggtacctcggccgctctagaactagtggatcccccgggctgcaggaattcgatatcaagcttatcgatacccgtcgacctcgaaggggggcccggtacccaacttttgttccctttagtgagggttaattgcgcgcttggcgtaatcatggtcatagcttgttcctgtgtgaaattgttntnccgttanaaaattnncaanaaacatancaaacccggggagcatnaaantnttaaanncntnggggnnggcctaaatgaannggggcctaanctccaatttatttgggnttggncncnctngccnctttttcaanttggggaaaacntttngtggncnnnttnnttann

SEQ ID NO: 3934 - DNA, 834 bp, Homo sapiens
  misc_feature 476, 539, 556, 562, 588, 589, 591, 596, 603, 643, 650, 656,659, 664, 686, 692, 698, 701, 705, 715, 716, 717, 720, 721,722, 725, 759, 760, 763, 764, 768, 770, 777, 778, 788, 796,800, 808, 811, 814, 826, 827: n = A,T,C or G
taatacgactcactatagggcgaattggagctccaccgcggtggcggccgcccgggcaggtacgcgggggtggaggaggggtggctttggtcgctggacacacatctctgccacggtgactgacggaggctgtgaaaggacaatctgagtgaagaagtgaatgaggtgctgattccacagggacttcctgagatgggcggagtggctcccagcggacgggaattagagaccgcctgagaacaggaaacctacctcctctatttctgggttcccagtgtcctgcccagagcccatcatgtggcagaagctcaggacgcaaatgtcaggggcagaagactaagtccttgctctgggcaggggtcaggacgtgtgcagctccttggccccagaattgtttccctcctgcctcactccctggtgtagaatttggcccagacgctccctgccatgtgacttggcaggagctccctctagangaggggtagtgatatagctgtaaatctcacgttgaggctgggcgcgtttggctcaagcctgtnatcccagcactttgggnaggctnatgcaggcgggatcacctgaagccannanttttnagaccancctgccccaacatggtgaaaaccctgtctgtacctcggcncttctanaaactnatnggatnccccggggctgcaggaatttcnatattnaaagcnttntttnttaccgtccnnnccnnnaangggggggccccgttccccaactttttttttcccnnttnntggnangggttanntttcgccccntttggcgnaatnaaaagggnacnaanagtttttccttnngggaaag

SEQ ID NO: 3935 - DNA, 870 bp, Homo sapiens
  misc_feature 414, 452, 476, 484, 500, 502, 503, 523, 549, 563, 566, 587,609, 611, 615, 621, 649, 655, 667, 672, 674, 684, 688, 694,698, 702, 715, 721, 724, 732, 733, 737, 741, 742, 745, 746,749, 752, 753, 757, 762, 764, 771, 773, 774, 775, 776: n = A,T,C or G
  misc_feature 777, 778, 782, 789, 793, 794, 798, 802, 803, 811, 814, 820,821, 822, 824, 834, 836, 841, 848, 852, 853, 858, 859, 860,865, 869: n = A,T,C or G
gtaatacgactcactatagggcgaattggagctccaccgcggtggcggccgcccgggcaggtacccgggatccacggttgtgccgggcttgctggctccacatgacacagcttgatagcccggtgctctgccaactttcagggtggggcctgtgctctacgagggctgagagcttgtggcggggtctcggtgtggtggagggaacaccatcagtgtgctggggtgtggggtagcaggtcaccagggaaaggaaaacaaagggggaagaaaatagggatgtattgatacatttgggggaaaacacagccctgagagagaatcaagtgtctatgttggccctgagcaaaagcgataaatacgtttggctcttctgacccagaggtgggcatatgtggctgggaattctggtggaantgggctcattgtccatctttggcccaacttgagcctgntttttcatctcttaacccaacctngtacctcngcccgctctagaactngnnggatcccccgggcttgcaangaattcgaatatcaagcttatcgatncccgtctaccctcnaanggggggggcccggtaccccancctttttgtttcccctttttantngagnggtttnatttgccgcgctttggccgtaattcatnggtcantagcttgttttncttgngnggaaaaattngttntttcgnttancaantttccccacaaanaattancanagccgggnngcantttnnatnntantanncccnggggngngcccaantnnnnnngganctaaacntcannttanattnngttttggngtnaactgnnncnctttttcaantntgggnaaaaaanttcnngccannnttttntttna

SEQ ID NO: 3936 - DNA, 844 bp, Homo sapiens
  misc_feature 537, 604, 676, 694, 707, 729, 732, 741, 753, 754, 789, 791,798, 799, 803, 806, 809, 818, 822, 826, 830: n = A,T,C or G
gtaatacgactcactatagggcgaattggagctccaccgcggtggcggcccgaggtaccaacaactactggtttgatgcaaccatttcccttttacgcaaaaaggtgcactaaaagtagaccacgcattgttgtgtatcattaggcaagcaatttctcttctctaggcctcacttttcccatctggaaagtaaaagggtccagtcacatgatttctgaagttccttacagggtcagcgtcctggtgagaaaactatactgcagtgccaagaggaattgatgtaggatttttcttcttggtcctcgggccagcaatgccccacctgtgcccgctcggccatgcaggtgtgtcccagctcactgtcccgcgtacctgcccgggcggccgctctagaactagtggatcccccgggctgcaggaattcgatatcaagcttatcgataccgtcgacctcgagggggggcccggtacccagcttttgttccctttagtgagggttaattgcgcgcttggcgtaatcatggtcatagctgtttnctgtgtgaaattgttatcccgctcacaattccacacaacatacgaagcccgggagcataaaagtgtnaaagcctggggtgcctaatgagtgagctaactcacattaattgcgttggcgcttcactggcccgcttttcantcggggaaaacctgtccntgcccagctggcnttaatgaaattcgggcccaacnccncgggggaanaggccggttttnnggttttgggggcgccttttccggtttctttggttnanttgaatnngttnggnctnggtccgttncggnttgngggngaagcggggtttat

SEQ ID NO: 3937 - DNA, 958 bp, Homo sapiens
  misc_feature 2, 7, 8, 9, 10, 13, 53, 201, 366, 487, 519, 531, 534, 553,566, 572, 574, 580, 592, 599, 610, 614, 616, 617, 618, 619,621, 623, 624, 625, 626, 627, 628, 629, 630, 631, 632, 633,634, 635, 636, 637, 638, 640, 648, 662, 674, 681, 684: n = A,T,C or G
  misc_feature 685, 686, 692, 704, 710, 720, 721, 722, 741, 743, 750, 754,761, 762, 763, 781, 786, 788, 808, 810, 811, 817, 818, 822,824, 828, 838, 840, 846, 847, 848, 854, 858, 859, 862, 863,866, 868, 871, 878, 886, 892, 902, 903, 911, 926, 929: n = A,T,C or G
  misc_feature 930, 936, 938, 945, 957, 958: n = A,T,C or G
gnatagnnnncgncgtaatacgactcactatagggcgaattggagctccaccngggtggcggccgaggtacagttgttccgggtgaagatttttacagaattcagtaaggatggattataatatgctgaacatttggttgcttttgtaataatagaggtggacagctgagacaaatctagacaaaatcttacactgactantttgtaacgacatacggatgaccctgaactttttaagtaacttaagaaataggccgggcacggtgcctcacacctgtaatcccagcactttgggaggccaaggcgggtagatcacaaggtcaggagttcgagaccagcctggtcaacgtggtgaaaccccatctntactgaagttacaaggattggccgggccgtggtgctgcatgcctataatcccagctacttgggaggctgaggcaggaggattgcttaaacctgggaaggcaaagggttccagtgagttganatcatgccacttgcacaacagcctgggtgatngaagcgagatcngcntttttggaaaaaaggaaangaaaaaggaaaangttttngntgaccnacttctttcaanaaaatantttcctttggnaaanannnnantnnnnnnnnnnnnnnnnanggggttcncttggccccggggnggggcccttttnaaaaaanttnnngggtanccccccgggggnctggangggaaatttnnntttttaaaaccttttttgnanacccccngtanacccttnnnggggggggcccccccggnccccnantttttttttccccctttaangnngggggnnaaantnggcnccctgggggngntaaaannnggggtnaaannttnnttncntgnggaaaantttttttnccgttnaaaatttccnnaaaaattnttataacccgggggnatnntaaaangngaaaacnctggggggcccnn

SEQ ID NO: 3938 - DNA, 772 bp, Homo sapiens
  misc_feature 330, 344, 377, 399, 400, 414, 422, 427, 428, 434, 435, 442,443, 456, 458, 459, 460, 461, 464, 478, 479, 480, 483, 497,498, 500, 503, 511, 513, 514, 530, 535, 539, 544, 556, 559,564, 571, 577, 579, 581, 586, 589, 615, 620, 632, 637: n = A,T,C or G
  misc_feature 639, 665, 667, 668, 669, 672, 675, 676, 678, 684, 685, 686,688, 696, 697, 701, 703, 719, 722, 725, 734, 738, 760, 764,772: n = A,T,C or G
ggagctccaccgcggtggcggccgcccgggcaggtacagaaacatggaaaaagagcgatgctattaaggaggaaaatggagccaggagcaaaacctaaggctatttctgaactaaagaggtctgaataaggtagtgaaaggaccagggaaagccttcccacggggatggagagccacctcctccccggctttctggttcagatgtcttgtctcaacagacggcagattcgcagggaagcaggccgagcctgatcttttctccgctagaactgctcaacaggtgaagaatctttttccagcactccttgagcccttcgggtcgcggaacantgcgaagattattncaatgcctcattcggagaggtgataaatctggncttgggggtttcttttttcggnngggccatgggggtnggggggtnaaaannacaaanncctttcnntaaagggccccangnnnntgncttaaaaagggtgnnnccnttttttttaaagtnngnttnaaaaaacncnngggggtttttttaaancctcngggnccttntttaccccctgnaanccccngggtttntttaanangntttcnttntttaaagaatgcaacccttcgggccnctttnttagaaacttantgggnantcccccctggcctgcaaggaatttcnannnttnaanncntttttnnnanacccgctnnaccntnggggggggggccccgnggnccncatcgtttntttntccctttttagtggggggggtnattngccccccn

SEQ ID NO: 3939 - DNA, 711 bp, Homo sapiens
  misc_feature 3, 11, 18, 35, 63, 415, 523, 534, 550, 597, 603, 607, 609,645, 684, 700, 703, 709: n = A,T,C or G
cgncttactantcggtanaattggagctcgcccgnggtggcggccgcccgggcaggtacgcgntgagactttccctgccggcacatggacctggcccaaccctcacagccagtagacgagctggagctctcggtgctcgagcggcagccagaagagaacacgcctctcaatggtgccgacaaggtcttcccttctctggacgaggaggtccccccggccgctctagaactagtggatcccccgggctgcaggaattcgatatcaagcttatcgataccgtcgacctcgagggggggcccggtacccagcttttgttccctttagtgagggttaattgcgcgctttggccgtaatcatggtcatagctggttcctgtgtgaaattgttatccgctcacaatttcacacaacatacnaacccggagcataaagtgtaaaacctggggtgcctaatgagtgagcctaactcacattaattgcgttgcgctcactggccgcttttcaatccggaaaacctgtcgtgncagctgcattnatgaatcggccacgcnccggggaaaaagccgtttgcgtttttggggcttttttccgtttcttngttaantgantngttggccttgggtcgttccgcttgcggcaagcggtntaacttaacttaaaaggcggtaataccgggtattcacanaattaaggggataacncanggaaanac

SEQ ID NO: 3940 - DNA, 733 bp, Homo sapiens
  misc_feature 7, 543, 585, 604, 608, 614, 619, 632, 634, 635, 639, 642,645, 648, 655, 662, 665, 666, 670, 680, 687, 702, 703, 707,725, 727, 728: n = A,T,C or G
tcctatngggcgagttggagctccccgcggtggcggccgcccgggcaggtactaaagaatgtgcatttatttgtggggaggagaggaggtctaaatagacaataaacatataaatattaatattgtgaaagtggtatgaagaaaaataaagcatgataaggagagagaggtgttccctggctctccagagggctgaggtggaagaaaaggactcctgttttaggtaagatatcagagaagacctctctgattgactgaaatgtatgcaaaggcctgcatgaagccagggaccatgccgtgctgacatctgggggaggattatcctcacagaggggaaaggaagtgcaaatgccgtgaggtgggaggaccatgtttggtatgctcagggaggaacagggaggcccgtggggctggagcaggttcagccatgggaaggccaaagatgagatcaaagagaatagtgggagatcacgtagagatttatgggccatttgtgaggattgtggcagcatttgagaagactgggttgatgcttaaaacaancagccatttttatttaatatcttcatggatttttggggttcnaggaaatttgggaccagangctnaaactnggganaatttgttccccntnntttnttnccnttnaaaaaanaccaggnccnntttnggggaatttnccccctngggaaaaaaattttnntttnccccaaggtttccaaaantnnggttc

SEQ ID NO: 3941 - DNA, 756 bp, Homo sapiens
  misc_feature 508, 530, 541, 560, 569, 580, 581, 587, 597, 598, 599, 600,607, 610, 613, 616, 631, 649, 659, 662, 663, 664, 670, 678,680, 698, 703, 709, 711, 718, 726, 729, 734, 738, 755: n = A,T,C or G
gtaatacgactcactatagggcgaattggagctccaccgcggtggcggccgcccgggcaggtacgcgggctgctcttgtggcacagaagaggtgcctgcacccctccctagagtgttgttccagctgcctgagaactgcccctacagccctaccaaggtcacgtctgcctcagagagcctgatcacgggctcaccagacccagtcccacccagctttgccccctctagccagccttgggagcagagcatgggatgggaccactgagagctccacaccccccacccatcaccaagaacactcttgtattccttatcaacaaaggccaagtaaaaatcccactgtcatcactgcagctgcctctcacctgccagcatcacctactggccaggaggtcaaaactgcatgtcctgtcgcagcaactgttgatatcattgcacagcactcagacagctcttacctgcaggcattacctgctggcctgtagggggaactgcccaacccaatatnattcctgctgacaaggtccttnggcccgtttanaacttagtggattcccccnggcttgcanggaattccgannttcaangctttttggnnnnccgcccnccnttnaanggggggggccccggncccccaccttttttgttnccctttaaanggnnnggggtnaatttgcncnctttgggcgaaaacaatnggggnaataananggttttncttgtggnggnaaaantggntttccccctcacaaaant

SEQ ID NO: 3942 - DNA, 713 bp, Homo sapiens
  misc_feature 589, 644, 654, 665, 678, 680: n = A,T,C or G
gcgcgtaatacgactcactatagggcgaattggagctccaccgcggtggcggccgaggtacttttttttttttcttttttttttaagagatggagtcttgctctatcacccaggctagagtgcagtggtgcaatctcggctcactgcagtctccatctcctgggttcaagggattcttctacctcagcctcctgagtagctaggattacaggcacatgccaccgtgcctggctaactttttgtatttttagtagagacggggttccaccatgctagccaggctggtcttgaactcctgacctcaggtgatccgcctgccttggcctccaaaaatgctggaattacaggcatgtaattccaaccttagacactcagtttaaaccctcttatcctatcttcactggaagagcaaagtaatctcctaccttgttttgtcaataagaagggaatattattaagccccagtaatcctgttgattaccatagtgggcatgtttctctagaagtaagtagaatctttggggttccgatggcaagaatacagagtcatcaaagcttaaatgaaatctgtttgggggggtaaagcccntaagttctttggtgcagttcttaattgggagactcagtcttgggatttggaaaanggctcgagtntcctgactctntaggctggagccnanatggggcagcctgagccagactggtctttgtct

SEQ ID NO: 3943 - DNA, 712 bp, Homo sapiens
  misc_feature 28, 562, 651, 664, 665, 667, 671, 678, 679, 696, 703, 705,706, 707, 710: n = A,T,C or G
cgcgtaatacgactcactatagggcganttggagctccaccgcggtggcggccgaggtattttggaggacaaaaacactcagtctatagcaaatgggcagtagtttttgggaggaatggagaaggtcagggcattctaggtggaaggaaccttctaggtgtgaaggcacagagggtgagtggtgtaacatcacttccttagagctttgcccacagtgggtccaggttgccatttatcacagtgctgatggtgaaggtgatttctttaaaaattggagccttggagggtttttctcagttccttggggcctcatccatgatgagctctgtctgttcatccatgatgatctttactgtgggttctttcattaactgcgggacgggaggaaggattttccttcgcatggttgtcatgcagagtggtcctggatgacagagcatgtgtgcccacctctgcgtggcttgatccaccatggagggctggtgctatcttttggcctctgagcttcggtcggccactccctgcatgaggctggggctctttaaccctcgtgtcttttctncatgcttgacaatttaatttgtggactgcaaggaactgttaagtattgatcactttactgcaaataagtccctgggttttgaataattntcataaaaccccnntntggnccttcanntttaaaatttagaagtngctttgnannnaancc

SEQ ID NO: 3944 - DNA, 679 bp, Homo sapiens
  misc_feature 513: n = A,T,C or G
gactactatagggcgaattggagctccaccgcggtggcggccgaggtacccattttcagagtcttacttttcctaggggcagctcgaacctttcactggacccccgcttcccaagagagcattcatgtggcccttgtgttcctgaactctgtcaaagatgaccactccctgaggttgcacacgaaggccagaaaggctactgacctcaagctctgctgtgtcatgtttctgtcacacacagctattccttatcaccccacggtcacatccgcaaaaggacgccccagtccctcctcacctcaagcatcatccagcgaggctgtgtatggtgcttctgatggaagctgagcctgagtccctgatccctcacttccttggcatgagactgaagcctgagatacctttactttctctgtgccaggcctgtgctaggcatggaggatatggaggagaacattagatgtgagaaagtttttaaaaataaagtccttctgctttgggtataaatctcangagtaagctagttttgcaaggcctcccccttaccttagcatgtatattaacatattcatgatataaaaacattaagagcccaggttctgggataggtcaggcaacagctgtacctgcccgggcgggcgttcttagaactagtgggatcccccccgggcttgcaagt

SEQ ID NO: 3945 - DNA, 946 bp, Homo sapiens
  misc_feature 6, 7, 8, 9, 10, 13, 14, 16, 17, 19, 20, 21, 23, 25, 27, 28,29, 30, 34, 40, 44, 46, 48, 49, 53, 54, 57, 58, 59, 60,69, 70, 71, 72, 73, 74, 78, 81, 84, 85, 88, 90, 92, 97,98, 100, 364, 399, 447, 462, 470, 476, 484, 506, 535, 550: n = A,T,C or G
  misc_feature 571, 590, 591, 607, 668, 688, 689, 692, 712, 715, 718, 726,742, 792, 797, 823, 835, 843, 849, 857, 866, 868, 870, 874,875, 876, 879, 889, 890, 894, 896, 903, 916, 917, 920, 936,937: n = A,T,C or G
cttcgnnnnnttnntnnannnantntnnnnaccnctcttntttnantnnttannttnnnnttttttacnnnnnnattnagnttnntgntncncttanncnactcactatagggcgaattggagctccaccgcggtggcggccgcccgggcaggtacgcgggcatctgatcgagctcctgccctgctccctaccccctcccacagcctggtttaagggtttcaggccaaggcggatcaagaggcatttgccagcagctgttgaatgtcaagaggcctcgccgctctgtggttcttgtcacctaagagagaggtgtctgcctgagcagctcacaacaggcaggggtcgaggagaggggaggaaagnaaggcaggagagagtcagggccctcccatttaggnaaaacctggcttgttttgcttgaagtgaccagacccagaggccaggcnaagtttagaaaaaanggaaaagnattaanaaaataanaaagtaccttcggggccgcttntagaaacttaggtgggattccccccgggnctgcagggaaattcnatattcaaagctttatccggnttaccccgtccggaccttnngagggggggggccccnggtgaccccagctttttgtttcccttttagttggagggggttaaaatttgcccccgccttnggccgttaaattcaatgggnncantagccttgttttccccttgntgntgnaaaatttngtttattccccgcttntcaacaaatttccccccaacaaaaccaattaccctaagcccccgggggangccantaaaaatgatggttaaaaagcccctnggggggtcgccncttaaatnggggtnggaagccnaacactttncnantttnnnttnggcgtttgcnncttnanttttccncttttttaacccnnttnttgggaaaaacccttnncacccccct

SEQ ID NO: 3946 - DNA, 678 bp, Homo sapiens
  misc_feature 487, 489, 541, 578, 579, 582, 587, 606, 609, 628, 631, 636,637, 654, 664, 676, 677: n = A,T,C or G
ggcgaattggagctccaccgcggtggcggccgaggtacatcttcctccatgagtggatcaagaaatattgagatggctaagctggaaattacaaaaatgttggcatactattatagcatatggttatgaaaatcaatgaatatttatatttagtattatgctttaagtatatatccaagctgatcaattaattacactttcactgatgagatgtcaattctacatttagctgaactctcatctgaactgtgtggcttctcaatgacaggacatattaaagaacatgatgaatgtttgtaatgtaatgatataaattattataatgtgttgcattaaagacacatggtgtagcattctacgttcagcttttgcatttattttctcagtgtcatgatttgctcctgtgattccagatcagttttctccttatcagtcagcatatacatattggtattaacactttttgcaaaaatcatatataaatggntntagaatggttgttgtcattctacagcaactggttagtttttgttccagcgantagctttgggtttcatttattttaagattcagggccnngcnggggnggcttaaccgccctggganttncccagccccttttgggganggncgacnnccggggcgggatccacnaaggggtttngggaggatcccnnt

SEQ ID NO: 3947 - DNA, 675 bp, Homo sapiens
  misc_feature 405, 601, 612, 642, 665, 672: n = A,T,C or G
ctatagggcgaattggagctccccgcggtggcggccgaggtacgcgggagatgctaagaatctagccatgtaaaaactcccaaaacatccaaattcaaaaaaactggaatctaacgtggtaatgcagttgtcaagaacacgcaatagtctttgggcttttacaaagcactgaaaactaaatgttgcatttgtgcccttatcttccacaacttctttcttggcagcttttcttggctcacttcagacacacagagtttcaagtaatcagggaaagttgggacagaaacttcctctgtctttccatggccttttctttttcctttacggatctgtgatcctatgctttctctcacgttcacattatatgtgtcagttggagaaatcttgatgcccagtttcatttgnttcttctgtcccacctgtaactaatttaggttgagttctccggctcatgtatcagagtgtgtatgacaaattatctcaaagcccagagggcctcggtggtccaagtcccagcaacaagggacacctgctgtcatgacatgggcttgacctgggtctgtgggacattaaggaaccactgtccctgagaaggggggtntggagcctaancttagggggagggagcagggatgagcttanaagcttgcccgagggaaacgggnaagagtntat

SEQ ID NO: 3948 - DNA, 1192 bp, Homo sapiens
  misc_feature 3, 5, 6, 11, 12, 22, 26, 33, 42, 52, 53, 62, 64, 71, 75,78, 79, 80, 83, 86, 89, 91, 92, 93, 96, 97, 98, 99, 109,317, 416, 420, 436, 468, 476, 511, 518, 519, 524, 525, 543,550, 552, 600, 612, 651, 652, 658, 724, 726, 742, 779, 805: n = A,T,C or G
  misc_feature 811, 830, 847, 853, 854, 868, 871, 875, 893, 896, 905, 911,927, 930, 934, 942, 951, 970, 977, 980, 1002, 1008, 1021,1042, 1049, 1066, 1068, 1069, 1075, 1076, 1088, 1094, 1099,1102, 1104, 1115, 1116, 1122, 1123, 1128, 1129, 1135: n = A,T,C or G
  misc_feature 1139, 1151, 1156, 1157, 1159, 1161, 1167, 1180, 1181, 1185,1186, 1187, 1188: n = A,T,C or G
ttncnnttttnnttacattatngttntttattntgtcatttncctccttatnnattattggntntttaatntttnatnnnatntangtnannnttnnnnctaaaacgantcactatagggcgaattggagctccaccgcggtggcggccgaggtactttaggagacccaggcgggcagattgcctgaggtcaggagtttgagaccagcctggctaacatggtgaaaccctgtctctactaaaaatacaaaaattagccgggcatggtggctcacgcctgtagtcccaactgcttgggaggttgaggcaagagaatcncttgaacccaggaggtggaggttgcagtgagccgagatccgcgccactgcactccagcatgggccgacagtatcaaagactccatcttaaaattaatanaaangaaaggaaaacaaaangaaaagtaaaaagcttattatttgaactttcntcttaaanaaaaaaaggaaaaaaagaaatggaaaaggccctgnattgccnncaccnnaaattcttaaaattttgngccaagntncgaattcaaatttaaaaaggggattatttttattttttgccatttcancaaaaaaaatanaatttcctttttaccttccccccccccaaaaaaaattcnnaattanaaaaaagttttcaaaaattaagccaaaccttttttttcccttaaaattggttgttttttaaaaaantngttaaaattccacccnaaaatttaccatttggttgttccccccaaaacctttntttttcccaaggtttattaaatttcntatttngtggttaaaaaggatgganggggttttaccccttgnaaagtnngaagggccaaattnaangaanaaggtttggaggcttttnaanaaacccttncccctnggaaaaaagaagccgnttntttnctttttcnttttagaangttcttggagggaaaaatngggtttnggnggggcaccaaaaattctttttnaaatcntttttttcttttnccccttcatcccttgagcctnctttaantttttctttggggctcnanncatggnnttttcttgggtnaaaacnttttnttntnaccctttggtnncccttnntcccnngggcgngggncgggtttttatnaaaanntntngggganttcccccccgggnntttnnnnggag

SEQ ID NO: 3949 - DNA, 874 bp, Homo sapiens
  misc_feature 356, 401, 409, 480, 488, 528, 541, 602, 615, 624, 632, 654,703, 706, 713, 722, 728, 753, 769, 770, 771, 773, 775, 779,781, 795, 800, 803, 807, 808, 809, 810, 815, 817, 823, 826,829, 831, 835, 836, 840, 841, 844, 846, 848, 851, 857: n = A,T,C or G
  misc_feature 868: n = A,T,C or G
tccccgcggtggcggccgcccgggcaggtaccaataagatagttgtttaagactatagctctctaaagagtagtcttttaaatttagagaatttctttatctcataagtgactcaagccaaaaaggctttttttcatggaaagtccctgaggtaactttctgggtttagaatacgacaggcaaaattggcatcttttttttaaatgggtgcgaaagatgcagccttcatgatcctccccaaaatttactcccagaaataagctaagatagcatatctctgttgccacaggcggttaaggatggtgcagctggtctccctatgagcacatggacacgtggccacatgggggtgcctntagtcacagacctgccaacctgtgaccgcctgtgacacagggcangcactttnagggattaagactttcccagcactaaccaggcaacaaaagatggaagcaaccagaagccctttcatggatngaactccntttaaggacagactttcacttgaccagcttggcacatttngggagaaaaaganagtgctgcttaaaatttgacatggctcaagattccccaattgcttttagactagcttactngacgtgacccttnaaaaattancacccccnggaggccagagaccaaaggganaaatgcttcccttctttggtttacaaagttaaacttctggaaggggccntanaggccangactaaaangggggnccccttatccggggtttttaatttnaaggggaccccccaannnangnttgntnttaaaataaaatgncgggnttngttnnnnaaccntntaaaantcnccntntttnngggnnggntnantcnaaaaanaggggcttttntagggc

SEQ ID NO: 3950 - DNA, 1191 bp, Homo sapiens
  misc_feature 6, 7, 13, 15, 18, 20, 24, 32, 37, 38, 39, 47, 48, 51, 52,53, 57, 60, 64, 65, 72, 82, 88, 91, 93, 94, 95, 99, 102,105, 114, 156, 254, 401, 404, 444, 484, 538, 540, 594, 596,599, 621, 622, 642, 651, 653, 678, 679, 680, 684, 690, 705: n = A,T,C or G
  misc_feature 713, 734, 738, 741, 764, 777, 780, 793, 798, 799, 800, 801,805, 813, 827, 831, 836, 853, 855, 859, 866, 871, 874, 878,882, 898, 905, 906, 915, 916, 917, 933, 960, 975, 976, 982,985, 986, 989, 993, 994, 1002, 1019, 1021, 1026, 1028: n = A,T,C or G
  misc_feature 1032, 1033, 1034, 1038, 1039, 1040, 1048, 1050, 1058, 1060,1069, 1075, 1080, 1084, 1086, 1093, 1094, 1098, 1104, 1110,1111, 1114, 1116, 1118, 1123, 1127, 1135, 1138, 1141, 1147,1154, 1157, 1164, 1165, 1168, 1176, 1177, 1188, 1190: n = A,T,C or G
  misc_feature 1191: n = A,T,C or G
cgcctnnactacntnatnantatnatataatnttaannnattatatnntannntgtnatntacnnctcattnttaattacantatttnatntnnngttnacntgntatactacntactatatggcgaattggagctccaccgcggtggcggcccgnccgggcaggtacatggcaactgaggcaaagagctcttaagttacttatcgaagaatatccaataagtaggtggtagagctaggatttacacccagcantcagctttattttcaaccatgcaattgcctccttaacaaaggagataggttaggaaaggcagatctgggcaagtgttgtattatacaacaataaaaaggctgtggggtcaaaaagctatggctgttaaaaggttagggttaacagcncangaagtaatcaccctttagggaaggtttaaaatttttaggnacaaacatctatggattcctttcccaaacccttaaaatcntttcatgcctttttaaaaaaaggaatttccttgccccaaggccgttgggtggcntnacgccctgttatatccccaggcaccttttggggcaggggggggggggggccggngnccnggaatcacctggagggttcatnnaaatttccaatgaccccaancccttggcncnaaacaattgggttgtaaaaaaaccnnnattnttcttnctttaaaaaccttancataaaanaaaaaaaaaattttaagcccncggnttnggggggtcgggcccacttttggnccattgttaaaantcncccaagccttacntttannnnaaanggccttgnaggggcacccaatntttntaatnccccccgggggaagggntnaatnaagggtnttggnttngttngggngccttggaaaccaatncaaaccnntcttggatnnnttccaatcacttgggngttaaaccaataaggctgggtgatttnttttattcttccaannataaanagnntanaaannatggtggnttaccctctgtgccccncnttctnantaannntagnnngggtgatnanccccccgngnccttggaangggaanattcntgantnctaaganntttnttgatnttaccnnctntnancctantatngggggggngcnccntggatnatccccnaanatttttnnttncctttatnnattaaggaggngnn

SEQ ID NO: 3951 - DNA, 858 bp, Homo sapiens
  misc_feature 70, 74, 75, 100, 446, 473, 500, 504, 515, 524, 544, 550,564, 570, 573, 639, 657, 664, 665, 671, 674, 683, 690, 696,698, 704, 712, 721, 730, 745, 749, 751, 768, 784, 793, 803,810, 812, 813, 816, 823, 825, 829, 840, 847, 849, 855: n = A,T,C or G
  misc_feature 856: n = A,T,C or G
ggcgaattggagctccaccgcggtggcggccgcccgggcaggtacgatggcttgacgcctgctccacctnaggnngctccatcttgcgcctaaccaagangtgggggataagaccagcgagggtctctagtttgctaatatagactgtagaggaagaagggagaagaaggtgactgagctgagaaaggcttgggcagagggtgcagggagacagctgagcggacctcagtggtgggtctcatgactgggatgcaatgagactgattttcctccttctctaagggagacttgacttgtttctaaggggaaacagaaattccagaatttgagctgaagtagcaaattctgatggcccgcaatgtcaaaatttcccccaaagaagcctgcttgtattctatgactccttcgaaggtgtccaagtcccttctagaaattgtgaaataggnttggcgtggtggtgtgagccacttgtncagccaggatcttcctttttaaatctntcanggcaccttttntgaaagctnctctcagtgtggggttaggngaattnaggtggggccactnttttcncantttcaaagagaggagccaaaggggctcccttcttttatttctttcccctttgccttgaaggagggncccttgcccacaccctgnatctttnnaagccnaanaagcccctnttggttntttttncncaatgnacctggcnggtttccanaattacaangggaaagggtttggnggcnanaaaaaagagaaaagganttttctggggcaattnccacccctncccctttggntttttcnannccnccccccncngccnttggggtgganacccccntnttttannga

SEQ ID NO: 3952 - DNA, 887 bp, Homo sapiens
  misc_feature 448, 544, 549, 588, 600, 612, 618, 644, 659, 671, 675, 680,688, 712, 716, 721, 728, 730, 732, 736, 762, 775, 778, 793,799, 801, 806, 820, 821, 824, 827, 833, 842, 843, 848, 856,862, 869, 871, 874, 875, 878, 887: n = A,T,C or G
gaattggagctccaccgcggtggcggccgcccgggcaggtactatcctagacagctctgggagtgttacataacgtatggtaagtgtgctacatggcctttctgaagcccaaaccattttgcattatgaaaatacctggccccaggaatttcagataagggattgtggacttatattttaaatctgtaactcctatagacagtaatttcatagagccagcttcatggagttgtaaatattactgggctagggtcagtttcctcattttaggcttcctttaatccagtccagacaccaaattaaatgtctttgtgtagtccccttcaaagcctcttgcaatcccagtcatgcttcagggtagggatgatcccattaatccaaggacctgtccctagtgatagaaggaaatgggtgggagccacgggatctgggattgcagtgagaagtngacaagaaaacaaccataaccaagtgcctctttctcaagtgttttcggattgcaaatatgaaccactggccaccctcaggcaccgatgtccccatnctgtncctggtgggaggggctggcccaagccgctggctggtttncctggcttgganggttggggcctngatccntcaatttcatggacccgaaagagacnattttttgggccaantgaagggggatnaatnttggngaaaagangtattttgttaattttaagggggntttnttttntttcatngngnccanttgggggaccaagggggaagggtttnttttccttttccnttntcccctggggaaaanaaaacnanattgngtttgtggggaaannctnggntttacnaaacccagnnggggnttgttctnaaaaantgccctntnaannccnttttttttn

SEQ ID NO: 3953 - DNA, 806 bp, Homo sapiens
  misc_feature 2, 574, 588, 592, 605, 610, 641, 648, 649, 654, 665, 695,700, 705, 707, 720, 728, 729, 730, 731, 741, 742, 757, 764,781, 783, 795, 799: n = A,T,C or G
cnactactatagggcgaattggagctccccgcggtggcggccgcccgggcaggtaccgtcaccagggagtccggcgcattcataaccagcaatgtttgtaagcatctagattactggggagagaaatattatcccagatggtgaatggaattaatggccacccccaagtgtgtctccccgtccaagcaggtattgccacctgtaggattcgcatacctagagggccccccagggaacaggaagagttctcctataattgtatcgctgtaatgtgtaattgaagtaacaaaggtgctgtgttttgtttgggcaagggcaaaaatagactgtttggttaaaagaagtccaggttggatttcaagtgttatcccgggccaggcgcggtggctcacacccgcaatcccagcactttgggaggccgaggaggggcagatcacctgaactcaggagtttgacatcagcctgggcaatacggtgaaaccccgtctctactaaaaatacaaaaattagccaggcgtggcaacatgcacctataatcccagctacttgggaaggctgaggcaggaaaatcggntttgaacccaggangcanaggttgccttganccaanatcgtcccacttgcctttcaaccctggggcnacaagannaaaanactttttggcntcaaaaaaattaaaaacaaaaaccccagtnggttntcccncntcccatttggggntttgggcnnnntccctttcannaaatggtttagccanggggacnaatttttttcaaagggnanggcccttttccnaggnggccttt

SEQ ID NO: 3954 - DNA, 817 bp, Homo sapiens
  misc_feature 546, 589, 636, 639, 643, 664, 674, 705, 722, 726, 734, 740,745, 746, 748, 762, 768, 770, 779, 783, 789, 799, 806, 807,811, 815, 816: n = A,T,C or G
gactcactatagggcgaattggagctccaccgcggtggcggccgcccgggcaggtacttggagggtttgctgagtgcacctttgtaggagggcctggagtgggacgagaggcagccagtgggcctggctccctccagatgtgttcaggcgcagcaaaaatcattaggcattgaaaatagggaagtaggccgagtacctcggccgctctagaactagtggatcccccgggctgcaggaattcgatatcaagcttatcgataccgtcgacctcgagggggggcccggtacccagcttttgttccctttagtgagggttaattgcgcgcttggcgtaatcatggtcatagctgtttcctgtgtgaaattgttatccgctcacaattccacacaacatacgagccgggagcataaagtgtaaagcctggggtgcctaatgagtgagctaactcacattaattgcgttgcgctcactgcccgctttccagtcgggaaacctgtcgtgccagctgcattaatgaatcggccaaccgccacggggagaggccngtttgcgtatttggggcgctcttccgcttactcgctcacttgnctcgctgccgcttcgggtcaattcggcttgctgcgaagccggtattnaancttnacttcaaaaaggcggggtaantaccgggttnttccaacaagaaattaaggggggaataaccnccagggaaaaaaaaacnatgntgaagtcnaaaaanggtcnncnaaaaaggccccggnaaaccncntaaaaaagnaccncctttngttgggccgnttttccnnatanggcnnc

SEQ ID NO: 3955 - DNA, 829 bp, Homo sapiens
  misc_feature 79, 100, 145, 234, 249, 348, 362, 366, 371, 393, 445, 454,465, 475, 507, 510, 534, 542, 552, 557, 587, 588, 593, 595,605, 638, 652, 659, 674, 676, 678, 682, 683, 684, 697, 717,727, 758, 759, 760, 768, 775, 776, 777, 786, 788, 792: n = A,T,C or G
  misc_feature 797, 800, 801, 805, 807, 808, 814, 817, 824, 828, 829: n = A,T,C or G
ggcgaattggagctccaccgcggtggcggccgaggtaccttttttttttttttttttttttaaactccctttccttggnatctgaacttccaaacatcanctttgatgtctattgtcgggacttcaagaggactcttagcacatnggcaggtgttggttttagtgagcaggcgagagtcccacattcttccaaggagagagatgggtcccaccacattcctacccctagagcanaagttcccgcgctgngcctcttctctggctgcttgctgaggacgtctcccagtggggtacctgcccgggccggccgctctagaactagtggatcccccgggctgcaggaattcnatatcaagcttatngatnccgtngacctccgagggggggcccggnacccagcttttgttccctttagtgagggttaattgcgcgcttggcgtaatcntggccatanctgtttcctgngtgaaattgnaatcccgctcacaagttccccacaacattacnaancccgggagcttaaaggcgtaaaancctggggngcccttaatngagtngagctaaactcacaatttaaattgcgtttnngcttnanctgcccccgnttttacaggtccggggaaaaaccctgtgccctngcccaagatggcanttaattnaaattttggcccaancncnccgnnnaagaaggcgggtnttgccaaaaatttggggccncatcttttcngcttttctcccttcacttaaatccctttgannnttcggttnggtttcnnnctggggggngnaagngggtnaannatgntnnatccanaanggggggnaatnn

SEQ ID NO: 3956 - DNA, 1409 bp, Homo sapiens
  misc_feature 8, 19, 25, 29, 33, 55, 60, 64, 84, 107, 123, 135, 136, 141,147, 149, 159, 195, 257, 343, 363, 365, 368, 382, 385, 439,473, 487, 509, 530, 553, 554, 555, 563, 571, 582, 590, 603,604, 626, 639, 640, 644, 658, 664, 665, 684, 701, 717: n = A,T,C or G
  misc_feature 720, 721, 730, 733, 734, 743, 749, 751, 753, 756, 765, 766,780, 787, 789, 793, 813, 815, 823, 835, 836, 840, 865, 872,890, 891, 893, 894, 905, 911, 918, 922, 931, 933, 936, 940,944, 947, 948, 949, 951, 952, 968, 969, 980, 1001: n = A,T,C or G
  misc_feature 1006, 1008, 1013, 1018, 1019, 1024, 1037, 1040, 1044, 1050,1064, 1088, 1091, 1098, 1099, 1110, 1112, 1125, 1126, 1128,1129, 1148, 1149, 1153, 1159, 1176, 1178, 1184, 1186, 1192,1209, 1229, 1236, 1239, 1247, 1250, 1260, 1276, 1278: n = A,T,C or G
  misc_feature 1288, 1289, 1290, 1300, 1311, 1327, 1339, 1344, 1346, 1349,1357, 1359, 1361, 1380, 1386, 1394, 1399, 1408: n = A,T,C or G
ccgtaacnttcaactttanttaagngggnccgnagagtttggggtaagtccttcncaacnccgncggggggtgggggccggggntccgcccccgggggaccaagggnttaccggccggggggnattcaaccaagnnccttnaccgtngnttggccccanggggccaagttccaattccaatttcccccccccaangaagggttggaacaaggggccttaccaaaaggggcccgggggggggttttttccctttcacnaaagccccttggttcaaagccccttttggcttggaaatccgaacttttaattttgggggggggttggaaccaaaccaaggaattantttgaaactttccttggggnanttngggaaaaattgcgnccnttttcccccccaaggctttggaaaaccttttttttccccaaccccttggggaanggtccctttttggggggaaaaattaacccccggngacccggggggaanacctttccttttttttaaattnaaggggttccccaaaatttgnaattggttgggaaaccccccaannnttcccctnggccaaangttttttttgngggggganaaaaattccaaannccccccccccaatttccccgcnggtttaaaagggnngtgngccaaggttccccnaacaannaaaaaaaaaccttgggttncccctttggggaaaaanttttttttgggctttntgnnttggccccnaanngaaaaaacncgtttngncnttnaaaaaaaanngggggaaaaccccntttttgnanaatngggcgttttgggaaaaaaantnttttccanaaatttttcccnntttngtgggggaaaaaaaaaacccccccncgggggnttttttttttttggcccnncnnttttttttttntttttnaaaaaangggnggttttttnanacnatantaanccnnntnngcgcttatattttctnncaaaaaaaaanaaaaactttttgtctttgggnggctntnggggngaaanntcccncaaaaaaaaaaanttntttnttttanactttttggggggnctcaaaaaaaaaaaaaccccccanaanccttatnnggctcttctgngnggggggggggggnnannttttttttttttgggcccnngggngacccnaaaaaaaaaaatttttnanaccctntntttttntgggcaaaaaaaccccnttttagaaattttttctctnggggctntanaaaaaaanagnggggggcatnatttttttttttgggngnggggaacccnnnttttttacanctttttgggcncccttttttttataanaaaaaatttaanggggngnatntccccccncntngggtgtcttttttaaagangaaaantttttttnttttntctcacaang

SEQ ID NO: 3957 - DNA, 1399 bp, Homo sapiens
  misc_feature 9, 37, 39, 76, 77, 81, 96, 101, 113, 115, 123, 125, 144,155, 164, 170, 172, 200, 205, 248, 249, 271, 284, 287, 289,313, 324, 326, 335, 358, 430, 485, 509, 510, 536, 537, 546,551, 558, 569, 577, 580, 613, 626, 638, 656, 668, 671: n = A,T,C or G
  misc_feature 723, 724, 725, 727, 742, 762, 765, 780, 814, 828, 831, 847,887, 900, 905, 907, 915, 963, 965, 977, 1002, 1033, 1034,1035, 1042, 1045, 1050, 1071, 1082, 1084, 1095, 1105, 1123,1126, 1135, 1138, 1147, 1148, 1149, 1168, 1172, 1187: n = A,T,C or G
  misc_feature 1191, 1196, 1220, 1226, 1241, 1245, 1248, 1252, 1260, 1261,1268, 1274, 1279, 1307, 1311, 1316, 1321, 1350, 1363, 1369,1381, 1396: n = A,T,C or G
ggggaaagnccttccccaactccgtccggggtggggncnggggcctccgggtccgggggtaaggggctttgtaccnnaagntaagtccccgggggntaagnggccggttttangnccgtaaangngtaaaagtaagacaaaaanataccccgtanagtaaccgnaaaagncncacctttaccaaggccggttccgccaanaccgnccggggcgccggggccgtttcttgccttttttattaagggaannaaggggggccgccaagggcccncccccggccggtnacncnttccgggccccggctttcttaggnaaaccttaagntnggggaatcncccccccgggggccttggccaangggaaaatttttccggaattattcaaaagccttttatttccggaattaaccccggttccggaccccttcggnaagggggggggggggggccccccgggggttaaccccccaaagacctttttttttnggtttttcccccctttttttaagnnttgggaaggggggggtttttaaaatnnttgggccgncccgnccttttngggggcccggntcaaaaanttncaaattggggggttccaaattaaagcccttggnttttttccccttnggttgggttggnaaaaaaaaattttgggtnttaattcccccngcntttccaaaccaaaaatttttcccccaacccaacccaaaaaccaatttaaccnnnanggcccccgggggggnaaaggcccaattaaaaaaanggnttggttttaaaaaangccccttggggggggggttggcccccttaaaaanttgggaaggttggnaanacccttaaaaaccttnccaacaatttttaaaatttttggcccgggtttttggggcnggctttcaaaacnttggncncccgggcntttttttccccaagatttcccggggggaaaaaaacccctttggtttcngngtgggcccccangccttgggcaaattttaaaaatggnaaaaatttcggggggcccaaaaaaccgtccnnncccgggntgngaaanaaaagggcccggggttttttngggcgggttananttttggggggnccgcctttcntttttccccccctttttnccntttcgggcnttncaaactttnnnaacttttcgggccttttgnccgnccttttccggggttnccgnttttnccggggtctttggcctggggcccnaaaagncccgggggttttttncaangcntttnaaaatttnnaaaaaangggccnggggnttaaaaataaaccgggggtttttttttncccnccaanaaaanttccacaggggggggaattaaaccccccnagggggaaaaaanaaaaancatttgttgggnagccccaaaaaaaanggg

SEQ ID NO: 3958 - DNA, 994 bp, Homo sapiens
  misc_feature 1, 3, 4, 5, 9, 12, 15, 24, 26, 27, 32, 33, 40, 42, 43, 45,51, 54, 58, 60, 62, 67, 68, 69, 70, 73, 75, 77, 80, 84,85, 86, 92, 96, 97, 99, 100, 103, 106, 110, 367, 397, 429,476, 500, 505, 509, 554, 589, 599, 648, 663, 710, 732, 741: n = A,T,C or G
  misc_feature 749, 788, 811, 834, 841, 846, 865, 872, 876, 881, 887, 891,904, 918, 923, 924, 926, 938, 939, 945, 948, 957, 961, 968,970, 975, 980, 987, 993, 994: n = A,T,C or G
nannntttnatnctntgttctttncnntttcnnctatttntnnantttttnatngttnangnttttnnnnatntntntanctcnnntagtcnaggnngnngtncgncgtntacgactcactatagggcgaattggagctccaccgcggtggcggccgaggtacaaaaatgttctgcaataatgtctcaatgtagcaataaaagaacttgaaaaaaaactgccattattttttcttttctgccaaaatagcaattgtcaggcctgccatttcatttgaccattctctaaatagctcctcccctggactggtctcagatattggctgaaggtcataattgggaggtcacatagcatttgagggaagttngatgggcaaaatcagtttcacattggaagnatgtttaaaggaatggcacagggacgaaaagnacaagtaatagctacagtccattgatggttcatttcactggattagncaacttcattcattttaactccantttgnccgnagccttcaagttaaaccctaccgtttcaaaagtccattttaatgnccatgtttacaatgaactttccttaatttaacttncagtaagatnatttttttccaagttttttcttatggtaggaagttaggaagttaacctnctattatatttttgntaattaactttttttaattgaaaaatggttcttttaatttttttaantttttaccttttcccttaaatnggccttttncctttaantttttttttttttttgaaaatggggcctttttgcctttnggaatttaattggtgggggtaangccttttttttggaaacctttcnaaaaaangtttngggtccttttgggcctttnggggttngttngggtntggccnttcnaattgccccccgnttaaatcccccaanttggnntnttttggggaaannttcccnaanggttggggngaanggggaantngggcnttttngagggcnccacgnn

SEQ ID NO: 3959 - DNA, 1388 bp, Homo sapiens
  misc_feature 21, 23, 39, 42, 57, 59, 69, 73, 84, 92, 95, 139, 149, 171,176, 177, 181, 196, 208, 214, 217, 232, 271, 290, 313, 319,341, 359, 361, 371, 379, 390, 400, 410, 460, 461, 465, 469,491, 492, 499, 511, 519, 522, 530, 531, 536, 546, 569: n = A,T,C or G
  misc_feature 581, 600, 609, 635, 670, 675, 680, 681, 695, 697, 726, 734,737, 759, 765, 768, 789, 793, 806, 813, 819, 823, 841, 847,855, 857, 866, 868, 878, 880, 901, 903, 906, 907, 913, 923,945, 957, 964, 965, 968, 970, 981, 982, 986, 993, 999: n = A,T,C or G
  misc_feature 1002, 1007, 1010, 1017, 1025, 1029, 1037, 1038, 1047, 1048,1049, 1055, 1056, 1073, 1074, 1075, 1077, 1080, 1084, 1086,1092, 1095, 1108, 1117, 1126, 1135, 1160, 1162, 1190, 1194,1210, 1211, 1212, 1217, 1218, 1221, 1228, 1232, 1233: n = A,T,C or G
  misc_feature 1234, 1244, 1249, 1250, 1259, 1260, 1271, 1272, 1282, 1288,1289, 1312, 1315, 1319, 1325, 1332, 1333, 1335, 1342, 1352,1353, 1362, 1375, 1376, 1379, 1380, 1381: n = A,T,C or G
cgtactttcactttattaagngngtccgaaaattggggnagncttccacaccgtcgngntgggccggcnccgnaggggttacgnccgggggnagnaagtaccatttggggtaagggggtaaaaggggggaaaagggggnctttttttcnttcccaaccacaaaaagggggncaagnnaagnaggttcccgttcctnaggaatttttcntttggnctngtccctggcccaagncttcttggccccaatggcccttgggaaggggtggggttnccctaaccccccttcaacngggggccaccccccttaaagccnttggcnttggaccaagcccccttttttngttggggccccgccccgntncccccaattncccccttnggcccccttcnaaggccaacnaccaaccaantttttggcaaaccaaccaaccgccaaaggcttttttttggtttttctttnnaaancccnttttttaaaccctttgggttcnnaattttncccaaaagccanttcccccnttngccccttnnttttnggccccaacnaaaaaaacctttgggcccccccnaaagccaaaaanggaaaaatttttttggaanggggttttntttggaaccaaaaaccaaaggttaanccctttggcccccgggggggcccgggggcccggtnttttnttaannaaaaccttaaaggntngggggaattccccccccccgggggggccnttgggcanaangggaaaatttttcggaaattanttcaanagngccttttaattttcgggaaantaanccccgggttctgnaaaaccncttttnaaangggggggggggggggggncccccngggggttnanccccaaaantntttttttggngntttccccctttttaaaagggngnganngggggntttaaaaaantttgggccggcccccccttttngggggcgggttnaaaattnnaantngggggtccaanntaangcccttngggttntcnccctnggnggggggnaaaaaaantttngttttaannttccccggnnntttcannaaaaattttttcccccnnncnaantccntntttccnganaccccccgggggnaaggcccantttaaaaanagtggggtnaaaaaaagccccctggggggggggngnggccccctttaaaaaatggagagggtgngganggcccttaaaactttnnnaacannttnttaaaanttgnnncgttttgggnggggnnttttaaaanntgggcccccgnntttttttttncaaaanntcgggggggaaaaaaaaaccttngtnttgnttgggnccccaanncntgggggntttttaaaanngggaaaaanttgggggggccannaannngggcgcg

SEQ ID NO: 3960 - DNA, 702 bp, Homo sapiens
  misc_feature 86, 563, 574, 576, 579, 590, 597, 634, 637, 681, 688: n = A,T,C or G
gcgtaatacgactcactatagggcgaattggagctccaccgcggtggcggccgcccgggcaggtactaactcacattaagttattnaaaaaaaaaaatcaagctattagcaaggacggggaaaactgtagtgagtttgtgtatcagccacaagccgtgttgcactgaagtaacaactttttaaaatctcagaggctgaaaatgccaacagcttatttcttattcacaatacatgcctattgagggctggtgggtctctgcttgtcattgtcacgtggggatgcaggctgacggagcagctaccattgtgaatgctgctggccggcatccaggaggcctagcaggtctcttacaggtaactgaatgctccagcccagaagtgacaggtcacttccactcgcagctcattggtcaggaccagtcacaggaatctgcctaacctcatgggcatttttgaaatctcttcaactttttgaaactgcttcaaagatgcctcgtattgtgaaggcactgacaccacgtcctgggtgctttgtgccttaggggaatggctgatgtctctangccctttctgngnctncttcatcaaancccccgngaaccatcaaaaggactaactgaagtccctttcccgnggnttttttttttgccagggcacggggacacccacaattttccccancccttgnttggggggcctttt

SEQ ID NO: 3961 - DNA, 704 bp, Homo sapiens
  misc_feature 8, 11, 518, 549, 635, 647, 677, 704: n = A,T,C or G
gccttaangcnttcgcgtaatacgactcactatagggcgaattggagctccaccgcggtggcggccgggtgtggtggcttatggagtccctaacgtttgcacaaaatggttgctacattccacactcccatgtgccctgagcaacctccagggaaacttcagataccgtggggcttggcctgccagctgagctgacccagcgatcctttctatcacagctttgatcttcactgggttgggagcctgtctgaatctaaacatctgcctctctactgcccaccccttcggcatttcctagctctccctgaaaggtgcaaacatgcatgcagttactcaaacagaatatttatccttaactccctgtccctcacaatttcttttaaaacaatccactattgtctacccccgcccccgcatcaccctttcatccaggtgcccattcccttctctctagtcctgcaatacctaagcatcgatctgcctttagcacatccatccccgccttattctccacgcangagctgagtgacctgcacaaaatccctgctnaaaacgggaccttggccgctctaagaactagtggatccccgggctgcaggaattcgatatcaagcttatcgatacccgcgacctcnagggggggcccngtacccaactttttggttcctttaagggangggtaattgggccccttgggggtaatn

SEQ ID NO: 3962 - DNA, 1433 bp, Homo sapiens
  misc_feature 3, 4, 6, 17, 22, 50, 64, 76, 101, 132, 133, 143, 150, 152,165, 179, 181, 187, 189, 193, 204, 216, 235, 263, 266, 283,294, 325, 327, 331, 364, 374, 386, 388, 393, 400, 411, 423,433, 439, 446, 461, 465, 470, 474, 479, 497, 500, 502: n = A,T,C or G
  misc_feature 519, 526, 527, 536, 552, 554, 571, 577, 581, 584, 587, 606,618, 622, 623, 659, 684, 685, 706, 710, 716, 730, 732, 738,741, 766, 769, 792, 799, 813, 819, 842, 879, 905, 926, 928,954, 974, 975, 982, 993, 996, 1004, 1021, 1027, 1063: n = A,T,C or G
  misc_feature 1070, 1074, 1085, 1086, 1091, 1107, 1111, 1133, 1136, 1139,1143, 1167, 1177, 1183, 1188, 1194, 1201, 1239, 1249, 1262,1274, 1280, 1300, 1308, 1318, 1319, 1321, 1326, 1362, 1363,1372, 1374, 1392, 1393, 1399, 1402, 1406, 1409, 1418: n = A,T,C or G
  misc_feature 1423, 1424, 1425, 1426: n = A,T,C or G
tanngngtgactgaaanttgtngggaaagtctttcccaacccccgcccgngtcggggcccgggngccgccgccccncgggcccaaggggttacccaaaagnaatggtccttggcttttggcacccattaacnnaagggagcgngccgggncnttgggggaaggcnaagcggggaagtantnccggcntnaccntttcacaccgnctaagtcacttnggcatacagaaagcggacncaagagcaattggctccaaggtaattgngcntttggggcaatttgggnccattccaagnggggaaaggcccttctttttcaaggggaagngnttgngtttggggttaagtcaagactaggcctaaaatnttttcccacnaattcaatattngnttaantaaaagnaagttccaagnttgggggtaatnggggcaccanggggtnggggttnttttcctttttcccncganccaancggnaaggnagggaaaaaattcctaanagntntgggttccttaaatttnggcctannggggaaggnaaaaaaaccggttccncncctttttggcccccaanctttcncccnccnaantttctttccaaatttcaangggggcccccanaagnnttggggggaagtgggaaccttgggggcccccaagcnaagaggggggcccccttggccaacnnaattggcccaaaaaacccttncccnaaggtncccccccttggccncnttttcnaangaaaaaaaggcttttggaaaaaaanagnggggggtgccccccttcgggggnccctttnttttaaattttttncaaaangggggccctttttttggcccaanttggcccggccctttccttaattttttcccccccccnttccttggccccctttctttcccccnccacccccttttttttttttngngggaaggcccaaaagggggaaggaantgggccaaagccctttgggnnaattttngggtggggtanaanccaaaaanggccttttaaatttttngggttnacccctttccgggggcccccggcctttcctttaagnaaaaacnttanggtttgggggnnatatncccccccccggggggncctnggccaaaggggaaaatttttcncgnaantaanttccaaaaagggccttttaatttnggaaattaanccccgnttccnaaaacnccctccnggaaagggggggggggggggggccccccgggggttatncccccccaangcctttttttttngtttttcccccntttttnaaagggggggaagggggggnttttaaanttttgggggnngnccggncttttgggggccctttaaaaatttcaaaattggggnntctattttnancctttgggtttctccccnngggggnggncaanaantttgggggngtgannnnccccccg

SEQ ID NO: 3963 - DNA, 1015 bp, Homo sapiens
  misc_feature 1, 4, 5, 7, 8, 9, 10, 14, 15, 17, 18, 22, 25, 29, 30, 31,33, 34, 41, 44, 48, 50, 58, 60, 61, 64, 68, 70, 71, 72,76, 79, 80, 81, 82, 90, 91, 93, 95, 100, 101, 103, 111,139, 148, 185, 221, 225, 243, 272, 273, 287, 308, 372, 396,414: n = A,T,C or G
  misc_feature 420, 421, 429, 442, 451, 458, 463, 469, 492, 494, 538, 541,551, 585, 625, 626, 640, 643, 664, 674, 679, 681, 704, 713,714, 726, 750, 759, 765, 771, 772, 786, 823, 828, 863, 865,868, 883, 903, 907, 914, 919, 935, 939, 940, 941, 946: n = A,T,C or G
  misc_feature 949, 953, 954, 956, 959, 964, 965, 984, 1001, 1013: n = A,T,C or G
ntcnntnnnnaatnntnntttntgntgannnanngtatttntcnttantngtttttcntnnttntttncnnntacnaannnncagtaagnntnangattnnantctcatcntacccactcactatggggcgaattgganctccaccgnggtggcggccgcccgggcaggtacctccgatggtccnggggtgactgctaaagagaacctatgaaaaagaggntgtntaaaattccatccttttnaggggtggtgagaggtgccaggtgctatnntgcagagaagtgtnaaccaaaaacctgtaaaaaanagccaagtaggccacaagtggtggctcatgcctgtaaccccaaccactttgggatgccaaggcnaggcaataccacttaagaccaggnagtttgaagaccagggcnggggtnnacacaggngcagtatcccatnctctaaaanaacaatnaaacntagaanaaatttagcaaggggtgttggtngngcacacggtccttgctggcacctccaaaaggacccgagggtggngangggatttggntttgacccctggggaaggttcaaaaggcttgcantttggagccaattgaccagtggtccaacttgtttaattcnnaacccccttggggncanaccaggaaagccaatggaacncgttggttcntttgnanaaaaaaaaaaaaaggggccaaanaaatttggnnccttaagagggnaattgaaaaccccgttgggaaagncttggatangccacnttcttnntagcaaaaaaaccnattggccattgggttcccccttggccccgggggttgncaaanttgggcttttaaccgccctttggttaaattccccnangcnccttttttggggganggccccgaaggggcaaaggncccngataacnacccnttaaaaggggtctagnggannntttcnaangaanncnggnccctnnggcccaaaccattgtatgnaaaaaaccccccttttnttttttactttnag

SEQ ID NO: 3964 - DNA, 684 bp, Homo sapiens
  misc_feature 3, 226, 234, 414, 432, 452, 542, 552, 560, 571, 616, 624,627, 629, 631, 640, 642, 646, 647, 668, 674, 683: n = A,T,C or G
gtngtccgcgtaatcgactcactatagggcgaattggagctccaccgcggtggcggccgaggtacgtgttggctgctttcttaaattgtggaaattaaaggaagggctgaactgttactcagatttgaatagaaatgaggaagaagaagaacagtgagataaggagatagtgacagtgatacatgttgacaattccattgaaaaagaacttggccgggtgtggtcnttcacggntgtaatcccagcacttaggacacgaaggccgaagcatcgcttgagcccaggaatttgagaccagcctgggcaacatagtgagacccccatctatataaaaattttaaaaaacttgctgggtatggtggtgtttgcctgtagtcccagctactggagaagccgaggtgggaggatcacctnagctcgggaggttgattntgcggtgagccgtgagcacnccactggactccagcctgagcaacagagtcagaccctgtctctaaaaagaaaaaggagccagatgccgtggctcactgctgtaatcccangggaagccantgcagaangatcacttttnggccaatagttcaagaccagccttgttaacattttaaaacacccntcttttcnggnantnaattttttntntatnnaaatggttccttccccgggcnggcccntttattaant

SEQ ID NO: 3965 - DNA, 680 bp, Homo sapiens
  misc_feature 201, 202, 347, 350, 443, 457, 516, 555, 564, 611, 626, 650,675: n = A,T,C or G
gactcctatagggcggaattggagctccaccgcggtggcggccgaggtacacgagattaaattacatagttatcctagcaaagatgttctgcaacatgtttcattataattgtttcagaagtgctgaaaatcatttatatttaccatatacccatgtttgcctaagaaaactggaagtggtatctaaatatagatagaagnntatatcatccagcacattacagcttttttcttatttattatgtgaaaagaaaataaatattaccacatgactattttttagttttaaaaaggaaagataaaatattaataactcaaaagtaaatacacttcctgtgatataagtnatncaatccaagccacctgaccttttgtttgagattaaaactcttaaatatgaaggaaatataaaaagtatcccttaaaagtaaagtgaaagattngatgatattctcgntattctaacactataatcagtagagtaacttccctctattggttctaagcgaagacctntgctggcttttctgaacagtgtgctggtcccattttcanactctgganggcaactgggaggtttcttgctcctccaacaggcccatctttcattnttcccgaaccccctngctatcaaaagaccccacaccctnaaggcccaaactggtattataaggngggtt

SEQ ID NO: 3966 - DNA, 695 bp, Homo sapiens
  misc_feature 372, 417, 460, 473, 495, 624, 629, 673, 690, 692: n = A,T,C or G
gtagaccgcgaatacgactcactatagggcgaattggagctccccgcggtggcggccgcccgggcaggtaccattcattacctgtcttcagcaactaccagcaaatggccaatttgatgtcatttttgtgtcaacctactaccttctaagccaattggattatcttccaaaacatcccagaccttatatcctgtcacacataagtatttcagaatctaaggtagtcttatctaaggtagtcttttatgccatcttatgcctttatgtgtccaattattttctgttaaagttcctcatttctcctccatattttccattttaacaaaagccaactcttctgtgggcttttttttctttgtatacacatggttncagccaccctgaggtcaagctgctgcaatgctttatttaccttgnagatattgggtatatttagtattcctcttatctgcaagctaangagacaaaaaatnacaaaacttcttaatctgcttncttttcctttttttctccttgtttggacttcctactctttgcctcttgggaagctgggcaaactgacaagctcataaaatcgtcatttctctgaaaccaggaagaagccctttttttctttttcttcancttgnaaatcaagtgggcttgcatgtctcaaaagtaaaagaatgggttnaaaggccaacttttttntnttt

SEQ ID NO: 3967 - DNA, 627 bp, Homo sapiens
  misc_feature 619: n = A,T,C or G
ggagctccccgcggtggcggcccgaggtacggtatattaaaaacaatcactgcagcccttaaatgatccaatagtttagctttgaatgcattcaagctaatgggggctttaatggcttctgacagatcattccattgatcaaggggcatgtatgaaatacgctgcctactaaactctgttttgattttgagaaaagaaaactaaacgtccatggtaaacatggcttgattgttcacatgttcaccgagatccctctcagcgtgaccctggttgggagcagaggagggaaggataatggaatcctatatacctggtttgcttctctcctgactctaatcaaggcataatcaacgggaaacctctgtctgcagagttgggggcagggggaaggaaggtgaccagcggtccagttttctgggttggatgaagttataagccacggctttggctgtctgagaaactgattcatctcttgcaagccttgggggtttgaaggttaactgttctggttccaacgtggaaagcccgaattccctatttgaaaggataatcaggtttttcagttggggacagcagtttttgcaaaagaaacaaatgaaaatcatgctcctccatccgngtgtctgg

SEQ ID NO: 3968 - DNA, 852 bp, Homo sapiens
  misc_feature 40, 41, 42, 43, 44, 46, 48, 49, 53, 54, 55, 64, 71, 83, 86,90, 102, 109, 116, 164, 166, 177, 226, 248, 283, 347, 350,430, 459, 490, 509, 514, 525, 665, 724, 757, 784, 825, 835,849: n = A,T,C or G
gggagctccaccgcgggtgggcgggcccgagggtactttnnnnnananntttnnnttttttttnccgccantaaccttccccnggnttcnggggaggtgggntaaattnggcgccnccctggctggcctttcctttgggaatggtgggtaaaccggtttttttnanggctccccttntcccggaaatccgaaaccccttgattcccccggtcaaccccggtgggtnaaccatgggtagggcaacgggngaacttaccatcgaaaaggtttgaataggggcaanacgtttccgaaatgggggttcggttcgcccgcccccgcggttaccttgcccggggcgggcccgnttntaagaaactaagtggggaatcccccggggccttgcagggaaattccggatatcaaagctttaatccgattaccccgtccnaaccttcgaagggggggggggccccgggntacccaaagcttttttggttcccctttaagnggaaggggttaaatttgcnccgcntttgggccgtnaaatcaattgggtcaataagcttgtttttccctgtgttggaaaatttgtttattcccgtttcaacaaaatttcccacacaaacaattaccgaagccccgggggagccattaaaaaagtggtaaaaagccttgggggggtngccctaaattggaaggtggaagcctaacctcaccatttaaatttggccgttttgccgcntcaacttgccccgctttttccaaaaccgggggnaaaaccttgtcggtggcccagcttgcnattaaatagaaaattcgggcccaaaccccccccgggggaanaaaggccggntttgccgttatttnggg

SEQ ID NO: 3969 - DNA, 817 bp, Homo sapiens
  misc_feature 4, 5, 6, 9, 16, 18, 19, 23, 27, 30, 31, 32, 35, 48, 49, 57,59, 63, 65, 68, 69, 71, 72, 73, 74, 75, 76, 78, 83, 86,87, 91, 99, 107, 270, 456, 460, 463, 468, 517, 525, 526,548, 549, 550, 563, 566, 567, 579, 586, 594, 614, 626, 627: n = A,T,C or G
  misc_feature 630, 641, 661, 670, 674, 676, 683, 707, 713, 717, 740, 744,748, 749, 751, 762, 764, 776, 782, 787, 793, 804, 813, 814,817: n = A,T,C or G
cccnnnttnctttaancnnccancctncannnttnttttcctatcttnntttatttntntatntngcnnannnnnncnaaatnatnntgcnttcgcacntctcctangggcgaattggagctccaccgcggtggcggccgcccgggcaggtaccagcttttgcactttcctcactgtaaagatgttgtatgggttacttaaccagttggggtttaatttccttggctgtatagtggacttagtgtcacatgcctacctcaggatttctgngacaattaaatatgatattttaaggcttctaacttactggatctaaataaattattcctggaaaaaaaaagtttgctgtgtaataaagcacctaaacaggaatgaaaaagcaggtatagaacttcaggtgttttgtcaccctccctcccccagtggtgtgtgtaggaaaactttgctaatttctgnaaanccngatgnctaatcttttctgactttacgttcaatcaggctgattattttcattcancagatgtnnatcggttttgcagggttctcannncaagtttgggatngannaaaaacatgganggattcnccaacttnacatcaaaatgcttattatnataaaaaatganngtntttattgccanattaaatctaataagcctcntggctaatntttnantttcaanccaaatttaattggcttgcttttngggggnaaantggaagaaaaggctttttggagnggangganncncccttgacttnancaatcaccaatnaaagtnttacngacttnaaagtcttgtngggttggcnnaan

SEQ ID NO: 3970 - DNA, 1189 bp, Homo sapiens
  misc_feature 1, 4, 5, 6, 9, 10, 12, 14, 15, 17, 19, 20, 22, 23, 24, 25,26, 27, 28, 29, 30, 31, 32, 33, 34, 35, 36, 37, 38, 39,40, 41, 42, 44, 45, 47, 48, 49, 51, 52, 54, 55, 57, 58,59, 63, 67, 68, 71, 75, 77, 79, 83, 85, 86, 97, 99, 100,101: n = A,T,C or G
  misc_feature 102, 106, 108, 109, 111, 184, 255, 387, 394, 397, 404, 409,415, 416, 417, 418, 441, 442, 444, 474, 496, 508, 521, 529,607, 612, 617, 621, 623, 624, 628, 640, 673, 691, 708, 728,736, 739, 753, 778, 780, 784, 785, 787, 789, 806, 811: n = A,T,C or G
  misc_feature 818, 820, 826, 833, 837, 854, 864, 872, 873, 880, 881, 882,895, 913, 921, 922, 953, 954, 958, 964, 969, 989, 991, 992,1023, 1035, 1036, 1038, 1043, 1080, 1089, 1095, 1098, 1099,1122, 1123, 1125, 1132, 1138, 1140, 1171, 1174, 1177: n = A,T,C or G
  misc_feature 1178, 1180, 1188: n = A,T,C or G
nttnnngtnnantnnananntnnnnnnnnnnnnnnnnnnnnngnntnnntnntnnannnagtntatnnggngggntntntttntnnaagggaggcgncnnnncccntnncntctcactattggcgaattggagctccaccgcggtggcggcccgaggtacctgccaggaaaaatagcagcccanccaccaggtggcaacctgcactattgaccagacacttggccagtttgatgttgggcaccgaggacctgaangcagtgttgcacattccaatcaggcagagcagcagggcacccatggcgatcagcatgctgaggggtagggcaaactggaggacacgcaggtccagctggtcaactgatgagtacctgcccgggcggccgctntaagaantanatggatnccccnggctgnnnngaattccgaatatcaagcttatnnantaccgtcggaccttcctagggtgggggccncgggaaccccaactttttgttnccctttaaggtngaggggtttaatntggccccnctttggccggctaaattcaattggttcaatagaccttgtttttccctggttgtggaaaaaattttgtttaattcccgnttcancaaantttncnnccancaaacaattccnaaagcccgggggaagccatttaaaagttgttanaaaggcccttgggggggnggcccttaattggaagntggaagccttaaactttcancattttanatnttggcggttttgcngcctcaaacttggccccggtttttntncaanntnanaggggaaaaaccctttntgccntggcccnanccttgnccatttnaagnggaaattccgggcccanactgcccccnggggtaannaagggannnatttttggccgcnttttaaggggccgcaaangttgggcnnaaaaacccccgccccgggacctttttaaaanntatncccccngggcntttttccccccccttggganannccttccctttattggcccctttttccttttntccccgaccctnntnccggnttaccccggaaaaaaccttggttcccggccctttttnttccccttntagggnaannccggggggggccttttttttttnnanttttaanagcctntnggggcaccttttaaatttttgggcccccccnctnttnncnttcaaaant

SEQ ID NO: 3971 - DNA, 878 bp, Homo sapiens
  misc_feature 443, 520, 523, 566, 576, 577, 579, 583, 589, 595, 602, 611,616, 631, 633, 634, 640, 644, 652, 654, 658, 663, 664, 670,686, 697, 700, 701, 702, 703, 705, 710, 717, 727, 730, 733,742, 746, 747, 749, 752, 754, 755, 759, 766, 772, 775: n = A,T,C or G
  misc_feature 777, 780, 784, 785, 789, 793, 810, 812, 819, 820, 821, 824,825, 827, 830, 832, 834, 835, 836, 841, 845, 846, 851, 853,855, 857, 858, 865, 867, 868, 869, 870, 876, 877: n = A,T,C or G
ggcgaattggagctccaccgcggtggcggccgcccgggcaggtacgcggggttgatggggacagaataatcactcaacaccagatgcaatgcaacaaagtaattaatgctcagaactcagagctgggtatgaatcaaggatcctttacttagtagttaactagaagactgggactagttaatttctccagtgctcagcttcttatctacaggtatctgctgaatcctccaaggggaacagaataaggggaagatccctggagatcagattctcagatccagtatcccgtgtgctgacctgccatgacaaacactggcagggagcctgccatagaggaaaagagtaagaattggctgagttcacatatgggctccatcaataactagcggccaggtggaggttagaagttctaggagctaatctttgaaacaagaccaagcctngagacccaggttgcacagttccagagatggcttcaaggggggccgaatttaaccacccggccattgttgaaaatgangtnagcctgatgtccaagtggactgggacccaaggtgggccaccanaaccaagacnncngggncctttntcctanggcccgnttttttaanggggnggggaaaccccctcngnnccaagnaaanttcgaaantncaanccttnnttgggnagcccaaaaaatcttnggggggggggnccnnnnanccccnggcttgnttttcctttnaanggnggggggggnttannanacncnngganttttttnaaaagntantnggntttnntttntttnttccaaaaagggggggncnaactctnnnttnncnccntngnnnttttnaatnntgggnantntnnaaaaggnannnncccccnng

SEQ ID NO: 3972 - DNA, 1156 bp, Homo sapiens
  misc_feature 3, 5, 8, 10, 11, 17, 20, 21, 22, 24, 26, 28, 30, 31, 32,33, 35, 36, 37, 38, 39, 41, 42, 44, 47, 48, 51, 52, 53,55, 56, 57, 58, 62, 63, 69, 75, 82, 87, 88, 89, 96, 98,108, 472, 623, 647, 726, 762, 763, 772, 782, 794, 806, 810,816: n = A,T,C or G
  misc_feature 819, 823, 828, 832, 835, 836, 896, 917, 921, 928, 929, 932,937, 938, 944, 947, 953, 960, 968, 970, 978, 979, 980, 983,990, 996, 1000, 1006, 1007, 1009, 1013, 1015, 1016, 1020,1025, 1031, 1032, 1033, 1041, 1043, 1046, 1050, 1054: n = A,T,C or G
  misc_feature 1056, 1059, 1068, 1083, 1084, 1085, 1092, 1101, 1102, 1108,1111, 1119, 1132, 1137, 1139, 1140: n = A,T,C or G
cancnctntnnattttnaannntntnantnnnnannnnnannanttnntannnannnnttgnntttttntttttntaagggnggttnnnacttttnanccctcctatngggcgaattggagctccaccgcggtggcggccgaggtactttaggagacccaggcgggcagattgcctgaggtcaggagtttgagaccagcctggctaacatggtgaaaccctgtctctactaaaaatacaaaaattagccgggcatggtggcgcacgcctgtagtcccaactgcttgggaggttgaggcaagagaatcgcttgaacccaggaggtgggggttgcagtgagccgagatcgcgccacttgcactccagcatgggcgacaggagcaagactccatctcaaaataaagaaagaaaggaaacaaagtaaaagaaaagcttaatattggaaccttctctaaaaaaaaagaaaaaaaaanggaaagccttgatgccaccaccaaatcttaaatttggccaaagttcgattcaatttaaaagggaatattttattttgccatcaccaaaaataaatttctttttacctcccccccaaaaaattcaaattaaaaaaaaggttttcaaaattangccaaacttttttccttaaattgntggttttaaaaaaatggtaaatccacccaaaaataccattggttgtcccccccaacctttcttttttccaagtttaatnaaatttccttatttggtggtaaaaagggggaggggnnttacccttngaagttgganggcaattaaagnaaagaaagtttngagncctttnaanaaancttgncctntgnnaaaaagaaccctttgttttctttttctttaaacaagtccccgaaaggaaaaaatgggttntggggggcccccaaaaatttnttcntcaaaannggnaaaanncttttngcncccttnattcctngaaggccncnttaatttnnnggntgggccncaaacnttgncgtttnntngggnannaaanctttnttttcnnncccttggnanccnttgngccncnggnaccgccccncttttaaaaaaaccnnnaggggantcccccccnnattttntgnggaaaatntttgttttttganggccntnnccccccccccgccccg

SEQ ID NO: 3973 - DNA, 879 bp, Homo sapiens
  misc_feature 494, 624, 631, 638, 640, 666, 682, 688, 694, 706, 716, 718,722, 728, 730, 731, 735, 743, 751, 764, 765, 768, 769, 770,772, 774, 776, 777, 778, 780, 781, 786, 788, 795, 797, 800,804, 810, 818, 825, 826, 827, 830, 834, 838, 842, 847: n = A,T,C or G
  misc_feature 849, 856, 857, 858, 862, 866, 868, 871, 872, 876, 877: n = A,T,C or G
gggcgaattggagctccaccgcggtggcggccgaggtacgcgggcagactttaatcatcaacataagctttattaaaatactggttcatcctgaagttcgactcaatggccattttctcctttctcttaattctgcacactcgtgtccactgtgcgatgcaagacccttcagaacagcccacccctcttactgtctaatgtttccagtggcacagggacagattcatttgggaatccctgggcccagtgtcccaggaagaaacccacagttgagcctggagtgactgtcctctgattctcacacttaccgtttcctggggctcctcatcttcaacacggtgaccagcgtgaagaaacagagcctgccccctacagactatcatttagagggagtttatttctagtgtccttcagacccgcccagtacctgcccgggcggccgctctagaactagtggatcccccgggctgcaggaattcgatatcaagcttatngataccgtcgacctcgagggggggcccggtacccagcttttgttccctttagtgagggttaattgcgcgcttggcgtaatcatgggcatagctggtttcctgtgtgaaattgttatcccgttacaaattnccacaanatacccnanccgggagccataaaaagtggtaaaanaccctgggggtggccnttaatngggggnggccttaacctnaccattttantngggntttggngnntacntggccccntttttcanatgggggaaaaannttnnntngncnnntnnttttnantaaaatngnccncccnccgcgngggggggnggggatnnnggntttntggncccnttttntntttttannntganaaanangannttgnngg

SEQ ID NO: 3974 - DNA, 1283 bp, Homo sapiens
  misc_feature 5, 8, 14, 16, 20, 25, 28, 29, 31, 34, 37, 40, 44, 47, 48,49, 54, 57, 58, 63, 64, 65, 68, 71, 74, 76, 79, 88, 93,94, 101, 112, 115, 125, 129, 132, 133, 146, 150, 176, 207,214, 219, 237, 396, 412, 440, 452, 462, 505, 514, 516, 525: n = A,T,C or G
  misc_feature 531, 552, 566, 572, 578, 583, 585, 589, 590, 606, 618, 631,638, 640, 642, 643, 649, 650, 678, 679, 686, 692, 697, 702,703, 708, 709, 720, 721, 723, 727, 732, 739, 744, 745, 746,750, 776, 781, 787, 788, 810, 811, 816, 817, 819, 826: n = A,T,C or G
  misc_feature 827, 830, 831, 837, 848, 853, 862, 863, 869, 880, 887, 894,896, 898, 902, 903, 914, 915, 917, 921, 926, 932, 937, 940,947, 950, 951, 959, 962, 965, 969, 988, 990, 993, 995, 1001,1003, 1009, 1010, 1025, 1033, 1034, 1042, 1044, 1045: n = A,T,C or G
  misc_feature 1047, 1050, 1055, 1057, 1059, 1060, 1069, 1070, 1071, 1072,1073, 1075, 1076, 1088, 1089, 1092, 1099, 1106, 1114, 1115,1120, 1124, 1125, 1132, 1135, 1136, 1137, 1143, 1145, 1147,1148, 1151, 1152, 1158, 1160, 1163, 1166, 1168, 1169: n = A,T,C or G
  misc_feature 1170, 1171, 1178, 1183, 1184, 1186, 1188, 1190, 1192, 1201,1204, 1205, 1207, 1210, 1212, 1213, 1214, 1217, 1219, 1220,1228, 1236, 1238, 1240, 1242, 1251, 1257, 1262, 1263, 1264,1266, 1267, 1271, 1275, 1279, 1280: n = A,T,C or G
caccntcnatagtnantgantgatnatnnantanctntantatngannnttatnctnnatgannncgntgncgntnaanatgactttntatannactattnctaagataggnaanataactaacnttangtnnttactatcatggngagntggtgctccaccgcggtggcggccgnggtacgcgggaggataatgatgttgggaagngatttcntgtanctatgctgagcagacagncttcaagagttagcaaagtttatatgtgcgggtgacaaaaaagaggcttatgagttttgatgactgaaaggagacaaataatagctaatctttgataaagactaactatgggcaaggctttactctttgtttgtagtaacttacttaatcctcattagnaaccccctttatatangatgctgtattttctccatttttacagnagaagggaagtngagcctcaanagatgtttatgtcaaatttgttcaaaaaggtcaccccagcttngtgggaaangngcttgggantcaaanacatgggaatcaatggttcanaaagttaaggctcntgggcntttacnaaaangntttnnaacaaccggccttttnaccttattaatnatgaataccattntcggtcntntnngtgttnncacctttctatggaggaaatgggaaagnntttccgncttccntttgngtggnnccagnnggcctgggaanncnaacnaaatngggcaantggannncttnaagacctttaccccacaaaaaccttnccacncctttnnttggggggtttcaaaggcggannttttnncntgccctnnaanncccttncccaaggtttntcatnggggaattnncccccnaaccacccccntggggtnaaaatcntntngtanntcatgtaggannangaangaccngggggnattantanccaattngannggggaagnagnctngggnactatgaaaactctcctgngnacntnaacggngnatatcnnccccccctcctttgngctctttnncaaatagngnngngtnggganantnncacgggcgnnnnnannccccacgggggnnttnttggggnggtgatntattatannattgntcgnnggggganttnnnttttgntntnnaannattttntnaangtncnnnnattgttntttgnnangngnanaaaaaaaanatnntnatnannngtntnnttgttacncatatccntncngngtgggcgtncatttnttaannnanntgcnactntccnnccg

SEQ ID NO: 3975 - DNA, 919 bp, Homo sapiens
  misc_feature 532, 595, 597, 615, 616, 622, 627, 665, 677, 681, 692, 694,698, 699, 701, 705, 709, 711, 715, 722, 736, 740, 748, 749,751, 758, 761, 767, 769, 777, 787, 788, 792, 793, 795, 805,811, 825, 836, 837, 843, 848, 855, 858, 870, 872, 887: n = A,T,C or G
  misc_feature 888, 889, 890, 891, 895, 899, 900, 904, 907, 911, 914, 915,916, 918, 919: n = A,T,C or G
gaattggagctccaccgcggtggcggccgcccgggcaggtacctgtgaacccaacctacaggctggcccctgtagacacagagaacaggtccatcccagcacctggatgacccttgcagatcaaaagccttccttagcaccatgtcagcccctatggaaataggcttcaggccagcccctgtggatacaggctgcaggctcatacttgcaaacccaggcttcaggcccacccctgcaaacctaaaaaacaggtctaccccagtgggcacctgcaaaaggccagcttgcatgaggactctagctgcaagcacgctcatggaccacattagccagcctactcaaaatctctgtgaagggctttcccaaacaagccagtctgcaaagactagaataaatctctacttcttcagatgcatggacaccaacagctagtcacaaaagattaaaaacaatcagagtaacatgaaatcattgaaagaaataaaataaaacatcaggtaacccagtaaccaatcataaagacatgggggangtataaaacttttcctgaccaacaatgtaaaaatcaatttggtttaaagggaaacctcaagcnangctttttagagggtaagnngagggnttctntattcctttacaccttgaaaaatcttggggacaagggnattgtttaaaangggnggggtaagggntncaanntnttgnggtncnaaanaaagggnatttggtggagaanaaanccttaacnntngaacttnaanaaagcntnggaggggnaaaaaagggnnaaanngnttttttggcnggggtnttttttggaaaagncttgcctcttnnaaaaanttttnctaaaanttnaagcttcccttngnttttaaaaaaaccannnnngggnaaanngtgnganttanccnnntnn

SEQ ID NO: 3976 - DNA, 898 bp, Homo sapiens
  misc_feature 472, 513, 515, 516, 517, 526, 533, 548, 594, 617, 624, 625,630, 638, 639, 649, 656, 672, 673, 696, 697, 720, 732, 746,754, 755, 757, 758, 759, 766, 767, 773, 776, 779, 791, 793,794, 796, 798, 808, 809, 816, 823, 824, 825, 827, 849: n = A,T,C or G
  misc_feature 850, 851, 852, 857, 861, 870, 889: n = A,T,C or G
ggagctccaccgcggtggcggccgaggtacctgctcctgggccatcctgtgctaaggttgcattgctgaacggatgacagggtgggtggtgtatgtccctaaggccaccagagatggtttactcaattcacatgcttcctccacctgggatgaaagcggttaattaatgtttgattctaagaagtcaggtgatgtgattcagattagttatggggttgtgctgaagcgcgggtggaccctaggaggtgattttaacggaagtctcaaaatagcagccttggaactagttggactagttatttttaaaaataatgagaaatgttataaagtcggctgaaggtattgatttacctttcaggttgttcagaaacagaatcttgagaaatagcctgctacacagttgtaagggggataataaagagatcccccttctctaaaaaacgtttacaacccaatcttttgggcagccganattttttaagcagcccgaggaaggggttcccaggggccaanannnttgtcttanaaccatntccatcagttcctanaaatcgtgccaaagggtttcctttcagggggtttcttgaggcctgnaaccattggtattaaaaaacctnactctannaattnttttgacnnttttttttgncatttgngggggggagaaccaanntttctcttgcccttggaaatttnnggggggctttttgttttggggantggtgttgatcncaaataagggggcnaacccccnngnnntacctcnngggttnacnttncccacgggtttntnnananaaaaagtttnncccaatnttccccnnntnttttgttgttgaacaccttttnnnntgggncccntacgttatngggggggaaaaaaaatatntgtttcccc

SEQ ID NO: 3977 - DNA, 913 bp, Homo sapiens
  misc_feature 497, 546, 548, 574, 583, 628, 635, 644, 676, 677, 679, 696,732, 746, 748, 761, 765, 768, 769, 778, 788, 794, 803, 805,806, 821, 825, 826, 837, 838, 839, 853, 854, 866, 867, 879,880, 881, 883, 894, 898, 902, 913: n = A,T,C or G
tccaccgcggtggcggccgcccgggcaggtacatttaatcctcacagcaaccctacgggataatatcgatgtgcaccatttctatagaaatgggctctatctttaaaagaattcagacagcttgttaatctacctccccttccccttgctaaaaagggtgtgaaaagttgcggtcattgagatcagagaaagaagtgcactgggggggtcaaccaatgacgttttttgtcaaactgaagctttgcttagttcctagtcaagagctctgcttagtgatctatctgcccagggcttagggaagtccctgagcttatttgtttctcagcccgaactgcctcaactccagtggggaactgtggcaagctccagagcagttgacttaagtgtttgtaagtggctcagcccaaaaaacagtcccaagccatttctttccaaggaggtttcaagggaaagggagcactgctgggtctctcttttgtgaaaagatctttattttntgaaagggcatttcacttgtaatgcccactggtccctttgttcccactngncaaagcttgggtgccagtgggtttcncccctgttnattcccaaggactttttgggggaaggcctggagaattcgggaaanaatcacntttgaaccnccagaaatttgggaaaatcaagcccttgggcnncncataaatggagaccctnttttttttacttaaaaaatttaaaaaaccccaaaanttccttggtttttngnggtgatgccttgntttnggnnccccaaaanttttttgggnggcttntgggggggngnnaaacccccctccccnaagnngattacgggtnnnaatggggcttttgnnttggtttttttnnacaaaaaaaaannngnacccttttttnaaanaaanaaaaaaaaaan

SEQ ID NO: 3978 - DNA, 911 bp, Homo sapiens
  misc_feature 144, 171, 423, 467, 476, 477, 481, 482, 484, 491, 495, 501,526, 531, 548, 550, 563, 564, 578, 581, 591, 595, 610, 625,645, 659, 660, 665, 674, 682, 686, 696, 709, 713, 719, 723,724, 748, 761, 768, 769, 770, 779, 782, 785, 786, 788: n = A,T,C or G
  misc_feature 790, 791, 792, 794, 797, 800, 803, 812, 814, 820, 827, 831,834, 844, 845, 846, 848, 849, 854, 855, 866, 868, 879, 887,888, 889, 890, 891, 892, 894, 898, 904, 911: n = A,T,C or G
ggcggccgaggtaccagggcactccaaatatgtaatttaacacattcattaataactatgataaatagatattttattccaagaacaatatcattagagagttagattggagggcaaggggattaagtatcttaagtttattgnttcccgagtgaccatttttaaagcctncttccaggaactgtggaatgcctgccaggctccctgactgctgtctggtgagggtccctactggtgctgtggacagcacaatacacaatggggcacaagaaagccacgcagcctccccctcctagacacatgctgtgcacccccttggctctgcttggaaggttcagctctgcaaatggaaggttgcaaacatcagacacccttcttttcttgtttctgtctctctccccttcttctccccacagtgtccanccttggcccctgacttttttctggggttggggggaggccctgtnatggttcannaaanntnaagcatnttgngtgaanaccttccctttagcttcaaatggtngcttnttggcccataaggggancnagacaaagcaaanncttgaagttttggngtnaagcccctanaacncaatgggaaaaaaangaaaacaaggttttncttaaccttcaacccccctncaataagatgaacnntcaanttaaaaatngtcccctnggtntaataggggnaaaaggtgagccncctncctttntttnnggcccaaaaccccctaaaaaaggnatttttttttttnaaaaaannnaagaatatnatnttnnanannntntcnttnccnggggggggngntttttnaaaaaangggnacnccccgggggnnntnngggannttgttttatananatttttataanatcccctnnnnnncnaggngggggnccccccn

SEQ ID NO: 3979 - DNA, 1222 bp, Homo sapiens
  misc_feature 5, 7, 9, 26, 28, 37, 48, 49, 52, 53, 54, 57, 58, 60, 65,69, 71, 72, 73, 74, 80, 82, 83, 91, 92, 93, 94, 96, 101,103, 105, 106, 110, 111, 117, 118, 119, 121, 150, 221, 269,289, 300, 441, 471, 511, 518, 549, 558, 571, 574, 625, 666: n = A,T,C or G
  misc_feature 682, 686, 696, 711, 725, 728, 738, 741, 742, 751, 760, 763,764, 770, 773, 779, 781, 805, 811, 820, 824, 833, 841, 844,872, 880, 902, 919, 921, 926, 929, 938, 943, 949, 960, 966,971, 986, 989, 990, 997, 999, 1005, 1010, 1013, 1021: n = A,T,C or G
  misc_feature 1024, 1036, 1050, 1068, 1074, 1086, 1087, 1089, 1096, 1097,1115, 1116, 1126, 1127, 1132, 1134, 1135, 1137, 1141, 1142,1143, 1159, 1162, 1166, 1175, 1176, 1183, 1188, 1197, 1199,1207, 1219: n = A,T,C or G
cgctncntntttatatatatattttntnacaaaatgngttatacttannaannnatnntntatanaatntnnnntttctncnntgttgagnnnncngtgtnananncgannactatnnncnaattgtagctccaccgcggtggcggccgnccgggcaggtacgcggggagactttccctgccggcacatggacctggcccaaccctcacagccagtatacnagctggagctctcggtgctcgagcggcagccagaagagaacacgcctntcaatggtgcctgacaaggncttcccttatntggacgaggaggtccccccggccgctctagaactaggtggatcccccgggctgcaggaattcgatatcaagcttatcggataccgtctacctcgagggggggcccggtacccagcttttgttcccttaaagttgaggggtntaaattgccgcgcctttggcggttaatcangggttcataagcctgttttccctgttggtgaaaatttgtntattccngcttcaacaaatttcccacaccaaccatacngaagcccgngggagccattaanagntggtaaaagacctggggggtggcccttaaattggaggtggaggcttaaacnttcacaattttaaatttggctggtttggcggccttcaactnggcccccgcctttttncaanattcgggggnaaaaaaccccttgtnccgatggccccagnctnggccatttanaanngaaaatttnggccccaanccnncccccnggngggaangnaggccgggtttttgccgttaattngggggncggccttcnttanccgcttttncttctggnttnaccttggacttagccttgcggccttccnggttacgntttccgggctttgccgggcgangccggggttaatcaaanantcaanttnaaaagggcngggtnaaatancggtttaatcncaccanaaatnagggggggataaccncanngaaaaananccatgnttggngcnaaaaaggnccntgcaaaaaaggnccaggtaaaccccntaaaaaaagggccccgtntgcttngccttttttttnnantaagggnnttcgggccccccttgagnnaggccatttnncatananntntacnnntaaaatttcaagatgnggngtgnaaaccccanncaggggntatanaaagaaatntnaggtggtnttcccccccccnccc

SEQ ID NO: 3980 - DNA, 914 bp, Homo sapiens
  misc_feature 558, 563, 579, 602, 649, 663, 671, 688, 689, 695, 699, 702,705, 706, 718, 726, 742, 752, 768, 778, 790, 792, 796, 801,822, 825, 826, 827, 838, 841, 847, 858, 867, 872, 873, 875,876, 877, 881, 886, 889, 895, 896, 900, 901, 902, 905: n = A,T,C or G
  misc_feature 913: n = A,T,C or G
tccccgcggtggcggccgaggtacgcatctttgaagaaagtagctgtggatatgggtggaagcataaaggatcctagtaactgaataacatcagtaacacattcatgattttatcttcattagcaataggactcaagcaattgaaaaaccattgactttgtaaaaacacatgtgcgtgggccaggcacagtggctcacgcctgtaatcccagcactttgggaggctgaggcgggcagattacttgaggtcaagagtttgagaccagcctgctcaacatggtgaaacccagtctctactaaaaatacaaaaattagctgagtgtgatggcacatgcctgtaatcccagctactggggaggctgaggcaggagaatctcttaaaccgggaggcaggaggtttgcaagtgagacaacatcactgcattgctctccagcctgggcaacgaagtggatctccgtctcaaaacaaacaaacaaacaacaaaccaaaaacaaacaaaagcacatctgcttgctcttgtgtagagagattcccttttttgaatttcttttgtggcnctagntttaaaaaaataaggnaaaattaaaattaattaggcttnaagtttccttgagttattaaaaaggtaagttagcgtttaatatattncattaaataaaaanggggatantttggttattattgaanntcaaangttnagntgnnaaagaaatttgnaaccaccntttggaatttttttcnaaactttttngaaaaataaatcttcntatttaccanttatataccttntncaangaaanttaaaagcaaatttaattttnaannnttgaatgggtnaantaaatntaaattcaatntttttttcnggggnntnnngggncaccntcnttattnncgcnnnttnatgggggng

SEQ ID NO: 3981 - DNA, 1167 bp, Homo sapiens
  misc_feature 2, 4, 5, 7, 8, 10, 12, 19, 20, 24, 26, 28, 29, 36, 37, 39,42, 43, 44, 45, 46, 47, 53, 54, 56, 59, 63, 68, 69, 70,76, 77, 78, 80, 81, 91, 92, 93, 94, 97, 100, 108, 114, 115,122, 123, 125, 135, 137, 143, 188, 189, 191, 343, 418, 445: n = A,T,C or G
  misc_feature 456, 478, 524, 553, 574, 662, 675, 709, 745, 758, 790, 801,810, 817, 839, 842, 861, 874, 880, 899, 904, 909, 910, 913,922, 938, 955, 956, 958, 960, 963, 972, 979, 983, 987, 989,993, 996, 1007, 1011, 1019, 1020, 1024, 1039, 1056: n = A,T,C or G
  misc_feature 1062, 1077, 1093, 1094, 1096, 1099, 1111, 1112, 1114, 1127,1137, 1138, 1144, 1149, 1150, 1153, 1158, 1166: n = A,T,C or G
cntnncnngnantcgtttnnactntntnnttttctnncnttnnnnnnttcttnnanttngctntaatnnncttctnnntnnttcttttttnnnnccnagnaagtgggngtggtnnttttttnntnctctttggcnanttgtanctccaccgcggtggcggctcgatgtactttatgagacccatgcgnncngtattgcctgaggtcaggagtttgagaccagcctggctaacatggtgaaaccctgtctctactaaaaatacaaaaattagccgggcatggtggctcacgcctgtagtcccaactgcttgggaggttgaggcaagagaatcgcttgaacccangaggtggaggttgcagtgagccgagatcgcgccactgcactccaacatgggcgacaagagcaaggactccatctnaaaataaagaaagaaaggaaacaaagnaaaaggaaaangctttatatttggaacttctcntaaaaaaaagaaaaaaaaaggaaaagccctgatgcacaccaaattnttaaattttggccaaagtcgattcaaatntaaaagggattatttattttnccattcacaaaaataatttcttttaccttcccccccaaaaaaatcaaattaaaaaaaaggttttcaaaaatacgcaaaccttttttcnctaaaatgggggntttaaaaaaaatggttaaattcacccaaaaatancattggtggttccccccaacctttctttttcccaanttttataaaattnccttaattggtggttacaaagttggaagggtnattaccccttnaaaaggtgnaagggcnaatatttaaggaagaagtttgnaanccctttcaaaaacccttgnccttgggaggaanaagccnttgtttctttttctttaanaaagnttctnnaanggaaaaatngggtttgggggggccnccaaaattttcttcctnnanantcntttttttcnttttttncccntcantncccngangcctccttaantttntcctttgnncttnaaacttgcttttttntgggtaaaaaccttttngttccnccttgggtacccttngccccggggccggggnncnggnttttataaactnntngggatctcccccnggccttggcnnggaaantttcnnttntcaancctttatnc

SEQ ID NO: 3982 - DNA, 1001 bp, Homo sapiens
  misc_feature 2, 4, 17, 386, 501, 503, 517, 589, 590, 605, 653, 664, 673,675, 678, 709, 711, 738, 742, 755, 762, 764, 777, 779, 781,788, 800, 813, 823, 829, 830, 842, 843, 846, 847, 850, 854,856, 862, 889, 895, 900, 906, 917, 918, 923, 925, 928: n = A,T,C or G
  misc_feature 939, 949, 957, 959, 961, 964, 965, 968, 980, 985, 991, 993: n = A,T,C or G
tngncattgaaaccctnctatttggcgaattgcagctccccgcggtggcggccgaggtactttttttttttttttttttttttaagagatggagtcttgctctatcacccaggctagagtgcagtggtgcaatctcggctcactgcagtctccatctcctgggttcaagggattcttctacctcagcctcctgagtagctaggattacaggcacatgccaccgtgcctggctaactttttgtatttttagtagagacggggttccaccatgctagccaggctggtcttgaactcctgacctcaggtgatccgcctgccttggcctccaaaaatgctggaattacaggcatgtaattccaaccttagacactcagtttaaaaccctnttatcctatcttcactggaagagcaaagcaatctcctaccttggttttgtcaataagaagggaatattattaagccccagtaatcctgttgattaccataggtggggcatgtttntntagaagtaaagttngaaatcttttggggtttcccgaatggcaaagaaatacagaagtccattcaagctttttagaaggaaaatctnnttttgggggagggtnaaagccccagttaaaggttcttttggcttgcagtttctttaaaattgnggagacttcanttcctttgngnganttttggaaaaaagggggcttcgaaggtattncntggactttttttagggcttgaagttcnaaanaatgggggccaanccctggnanacccaaaacctgntntnttgtttntccttggggctncctgccaggggcnaacaaaggantggggnngttgggaaaacnnatnngantgcncntttttnggaggggggaccccaaaaaaaccccanccctgngtggngggagnccctttttggnnaaccnangcnttggggccccntcccccttantgggaaangntnccnnggngacccaaaaatntgtanccaggncnatgggtag

SEQ ID NO: 3983 - DNA, 810 bp, Homo sapiens
  misc_feature 625, 655, 677, 680, 692, 701, 719, 725, 748, 753, 754, 756,793, 809: n = A,T,C or G
ggcgaattggagctccccgcggtggcggccgcccgggcaggtacgttagcataattttgaattatttcagctaagtagatgttaaagacttgactcaagagtggctgaaaaagaaaggattctctattcccctgattctctatcactatattgactatatagtttctttttgtaagatgcgttcattctgactattcttaccagcatttattcttactagcatttgtgacccagaattttcagagcaaacaagcaagcaaaaagcaaaattaatttaaatttcatttataattacttaattttcattcattgaaaagtcatcattctaaaatgagatttctattttaattataattacagatgctccttgacttacgatggggttacatttcttgtttttttgttttttgtttttttgtttttttgttttttgagacagggtcttgctctgttgtccaggctggagtgtagtggcacaatcatggctcactgcagccttgacctctcaggctcaagtgatccgtgcccctcagcctcctgagtagatgggaccacaggtgcatgtcaccatgcctggctaatttttgatttttttgtatatatggggttttgccatgttaccaangcttgtctcgacctccaggctcaagtcatnctcccggcttaacctccaaagnctnggtttatagggngtgagcccnctggcgccaggcctgggngttacnatttttgataaaacccctttacncggtnngnaaaattttattaaaggggaaaaatgccttggaacccncccaccttactggaant

SEQ ID NO: 3984 - DNA, 825 bp, Homo sapiens
  misc_feature 528, 538, 541, 545, 552, 553, 555, 597, 615, 642, 656, 657,658, 664, 683, 687, 699, 701, 703, 707, 718, 726, 730, 731,741, 743, 744, 783, 784, 792, 800, 803, 807, 822: n = A,T,C or G
ggagctccaccgcggtggcggccgcccgggcaggtacttttcactctcctacatgtctcagtttgaacaataaattatacagtcaccagtcccaggaaaagatgaaatatgaaaaagatgccagcagatttagcaattgctatttacacatccctggcattgtctaactctgctctgtatagccaggtctctaaccatcatctggactggaaccatatcttctaccaaaagcatgaggaaggctgggcatggtggctcacaccagtaatcccagcactttgggaggccaaggcagcaggactgcttgaagtcaggagtttgagaccagcctgggcaacgtagaaagaccacatctctacagaaaattttttaaaaattagccacacatggtagtgtgtgcctgtagtcccagctagtcaggaggctgaggtgggaggatcgcttgagcagaggaggttgaggctacggtgaaccatgattgtgccactgcactccagcctggatgacagagtaaaacctgtctcaaangaaatgaaanacnagtngtaaganngngtacctcggccgcttctaaaactaagtgggatcccccccggncctgcaggaattcgatantcaagcttatcgataccgtcgacctcnagggggggcccggnnnccccancttttggttccccttttantgangggttaatttgngncncttnggcgtaaatcnatgggacnatannctgttttccntnngggaaaatttggtaattcccttcacaattttcccacaannttaccaancccggggnccnattnaagggttaaaacccntgg

SEQ ID NO: 3985 - DNA, 832 bp, Homo sapiens
  misc_feature 515, 540, 622, 624, 630, 656, 690, 702, 716, 720, 725, 734,743, 754, 756, 764, 765, 780, 796, 807, 822, 823, 831, 832: n = A,T,C or G
tagggcgaattggagctccaccgcggtggcggccgaggtacatttttttttttttttttttttatttttatttttagtagagacggggtttcaccgtgttagccaggatggtctcgatctcctggcctcatgatccgcccgcctcggcctcccaaagtcctgggattacaggcatgagtcaccaagcccggccagcagcaataatgttttaccaatatgagcatcaagcaaccgtggttccctagagcaccttccaattgtgagctctcagtttatgtgtgtttttactcaccatctgtaacatcacaccttcaaaacagacccttggcccatagatagaagataaaagaagctataatctctccttttcccaaaaacaaattttcttaggaaatttgatttatttttgagaaacctaatattcttgtttaaaatacaactcttccaaattctgtggtcaacagtgagatcctatggacacctttgatgataaaaataaaaatattctttaactnaagggacacagaacctaggcacggnttccccaggcactcagtccaggtgcttctcagatgaacctgtgtatgctcaacttcatttccagtaagggacacagccccantntgagangagactgggaaaaaagaaagcccccncaaaattgaagaggcttatttgggggattggccnagcctctttttnttcaaaataaaaanttangttcntggggtttntttgggttncttttttgggnantttttttnnaccttggcccggggnggggcggtttttaaantaaaggggatncccccggggccgggnnggaatttnn

SEQ ID NO: 3986 - DNA, 850 bp, Homo sapiens
  misc_feature 698, 703, 731, 750, 762, 767, 785, 796, 798, 799, 810, 811,813, 815, 819, 823, 829, 831, 833, 842, 845: n = A,T,C or G
gaattggagctccaccgcggtggcggccgaggtacctccgatggtcccttggtaactgctagagagaacctaggaaaaagaggtgtataaaattccatccttttcagtggtggtgagaggtgccaggtgctattctgcagagaagtgtcaaccaaaaacctgtaaaaaagagccaagtaggccacaagtggtggctcatgcctgtaaccccaacactttgggatgccaaggcaggaataccacttaagaccaggagtttgagaccagcccgggcaacacagggagatcccatctctaaaaaaataaaataaaaaattagcagggtgtggtggcacacgtcctgctggcactccagaggccgaggtgggaggattgcttgaccctgggaagtcaaggctgcagtgagccatgacagtgccactgtcatccagcctgggcaacagagcaagaccgtgtcttgaaaaaaaaggcaaaattgtctagggatgaaccgtggaagctgaagccactctgtagaaaaccatacatgtccctggccgggtgcagtggctcacgcctgtaatcccagcactttgggaggccgagggcgggcggatcacgaggtcagggagatttgagaccattccttggcttacacagtggaaactcccgtcttttccttaaaaattaaaatgaaaaaaaaaaattttcccgggccntggtngggcgggccccttgtagtccccagcttnctccgggagactggaaccncggaaaaatganttttnaaccctggggaagccggnactttgccatnanncccaaaaatcnncncntttngccntccaancntnggggggggnagnggaag

SEQ ID NO: 3987 - DNA, 1148 bp, Homo sapiens
  misc_feature 1, 2, 4, 6, 7, 8, 10, 11, 12, 15, 18, 19, 21, 25, 27, 29,30, 31, 38, 39, 46, 52, 53, 57, 61, 62, 63, 69, 72, 78,79, 80, 82, 83, 84, 87, 101, 109, 117, 118, 120, 155, 191,198, 213, 214, 216, 483, 489, 494, 499, 518, 531, 536, 544: n = A,T,C or G
  misc_feature 563, 591, 602, 605, 606, 620, 624, 633, 634, 635, 637, 648,656, 668, 673, 677, 716, 722, 739, 740, 757, 759, 784, 795,813, 819, 836, 857, 859, 874, 883, 888, 889, 920, 927, 946,947, 949, 951, 954, 965, 977, 983, 984, 993, 1009: n = A,T,C or G
  misc_feature 1035, 1044, 1045, 1046, 1051, 1052, 1056, 1073, 1079, 1083,1094, 1096, 1098, 1102, 1104, 1107, 1112, 1118, 1123, 1132,1135, 1138, 1142, 1143, 1144, 1145: n = A,T,C or G
nngnannnannnaancanntnaatnantnnntcgatannactgacnagatanncaanaagnnnaattcntangacccnnncnnnagnaattgaatcttgancttccaancgctttgnnantgggccaataggagctccaccgcggtggcggccgnccgggcaggttccccactgggagacgtcctcagcangcagccngagaagaggcacagnncngaaacttctgctctaggggtaggaatgtggtgggacccatctctctccttggaagaatgtgggactctcgcctgctcactaaaaccaacacctgccgatgtgctaagagtcctcttgaagtcccaacaatagacatcaaagctgatgtttggaagttcagataacaagggaaagggtagtttaaaaaaaaaaataaaaaaaaacggttaccctcggcccgctctaagaactagtgggatcccccgggcctgccagggaattccgaanattcanagctnattcngatacccggacgaccctcnaagggggggggcnccggnaaccccanccttttggttccctttaantggagggtttaaatttggcgccgccttnggccgataaancanngggcccataagccntggntttccttgnnntngaaaattggtnaatcccgncttcaaccaatnttccnccancaaacaataccgaatcccggggtaggccaataaaaaggntggtcnaaaggccctgggggggnngccccttaaaatggaantngaagcctaaaacttccaacaatttnaattttggccnggtgtggcggccttcaanttggcncccgcttttttcccagntccggggggaaaaaccctggngncgagggccccaaccntggcaattnaaaannggaaaattcgggcccccaacccccccccggnggggaanaaagggcgagtatttgccnntnanttngggccgccttntttcccggcctnaccctnngctcaactnaactccccttgcgccnccgggaacattcccgggcttgccggncaagccggnnntcaanncttnactttaaaagggcgggntaaatnccgnggtaattcccncnangaantnaanggggnaaaaanccccnggggaaaanaancantgtnnnngcc

SEQ ID NO: 3988 - DNA, 829 bp, Homo sapiens
  misc_feature 679, 683, 729, 733, 736, 738, 747, 750, 756, 766, 770, 785,799, 800, 817, 827, 828, 829: n = A,T,C or G
actactatagggcgaattggagctccccgcggtggcggccgcccgggcaggtactcccaaaacaccttttcctgttatttcatgtatttattcttattctcttttccgatggctttttaaagacagtttaaccagccaggcacagtggctcacgcctgtaatcccaacactttgggaggctgaggtgggtggatcacctgatgtcaggagtttgagaccagcctgaccaacatggtgaaaccctgcctctactaaaaatacaaaaattagctgggtgtggtggcgtgcacctgtaatcccagctacctgggagtctgaggcaggagaatcacttgaacccaggaggcggaggttgcagtgagccattgtactccagcctgggcagcaagagtgcaactctgtctcaaataaataaataaataaataaagacaatttaaccaacatgacttactaaaacattgtgttttcttcttccttttcttaggttgatgctatgaaactgggagtaaaggaaatgaagaaggcatacaagcaagtgaagatcgaccagattgaggatttacaagaccagctagaggatatgatggaaagatgcaaatgaaatccaagaagccctgagtcgcagttatggcaccccagaactgggtgaagatgatttaaaaaacagagttggatgcnctanggggatgaagcttttggcttgatgaaaaacaagtttttttttgggntganggnancattttgcnccngcaatntccaaaaagngggngcccccctgggttanaaaaaaaaaaaggnngggggttttgggggganaaaaattggnnn

SEQ ID NO: 3989 - DNA, 880 bp, Homo sapiens
  misc_feature 2, 3, 8, 13, 24, 35, 41, 80, 82, 113, 574, 624, 655, 664,672, 686, 691, 704, 715, 721, 729, 739, 744, 749, 751, 758,761, 763, 767, 768, 769, 789, 790, 802, 804, 812, 814, 815,818, 823, 833, 835, 839, 844, 845, 846, 848, 850, 851: n = A,T,C or G
  misc_feature 852, 853, 858, 859, 860, 868, 871, 874, 877, 879: n = A,T,C or G
gnnaagtnattcnttgaatcgccncacttttggcnaattgncgctccccgcggtggctgccgaggtacattttatcccantnctcactccaaggaaggaagttaattaaagtntcatctagcagacattcctcccccagctgtgtctagtcacgaggagaatgacgattgtgtgcatctgggcaaaacattaaagaggaaagttctgcaaaaattaggtatggtttggaaataagaaataaacatagtctacatattttgcagaaacaacattaaagaagccccaggccagccctgtcgcttgggggcctcccaggtggaggcagcaaatagttcaaagaggagctgttggagtatcaagtctagctcctaaaatgagactgtaagatccttgagcacaagggcccacattttctccatctctgggatgtgttccccacccagacctccaggtgaacgtgcttacccagacctccagatgaacgtgcttacaggtacctgcccgggcggcccgctctagaactagtggatcccccgggctgcaggaattcgatatcaagcttatcgataccgtncgacctcgagggggggcccggtacccagcttttgttcccctttaagtgangggttaattgcgccttggcgtaaacatgggncatagctgnttcctgtngtgaaaattggttnttccncttacaatttccncacaaacattnccgaancccggggngcctttaaantgggnaaagncnggggggnggncntaannngaaggggaaccttaacttcnncattaatttggngntggggccncnntgnccccntttttccaanangggnaaaannntngnnnngcccnnntttttttnttnaanatncnc

SEQ ID NO: 3990 - DNA, 832 bp, Homo sapiens
  misc_feature 581, 620, 655, 664, 676, 679, 711, 721, 727, 728, 731, 736,745, 751, 754, 760, 763, 778, 780, 785, 789, 794, 814, 818,829, 830: n = A,T,C or G
ggagctccaccgcggtggcggccgcccgggcaggtgcttttagtagagacggggtttctctatgttggtcaggctggtcttgaggtcgggagctcaggtgatctacctgcctcagcctcccaaagtgctgggattacaggcgtgagcactgcgcccggctttaacagatatttttataagcaaatcatttataagtatgggtgactattctttacaaatccatttgtgatgcagtggtaatttggtggcactgcaattatggccagcaatgaagattataaaataattgcctgaggaaccaagctcatgtgcactaaaaagaagcagggattcttagaagattcttagaagtatagagtagtgatttttttggggatggagtcttgctctgtcgcccaggttagagtgcagtggtgcgatatccgctcactacaacctccgtctccccctctcaggttcaagcgattctcctgcctcagtctcccaagtatctgggactacagctgcacaccaccacacccagctattttttgtattttttagtagagatgggggttcaccatgttgggcaggatggggcntcgaatcctttgacctcgtgatccttctggccttcaggnctttccaaaagtgcttggggatttaacaaggcggntgagcccantgtgccccgggncgntttttagaaattagtggggtccccccgcggcntgcagggaanttccannttnaaacntttttcggnttcccngcncccccntgnggggggggggcccgngncgccnaaanttttntttcccctttgagagggggnttanttgcgcccccnngc

SEQ ID NO: 3991 - DNA, 822 bp, Homo sapiens
  misc_feature 597, 602, 615, 645, 647, 648, 649, 650, 653, 655, 656, 669,686, 688, 691, 700, 706, 708, 711, 726, 727, 728, 732, 736,742, 754, 755, 760, 765, 767, 780, 784, 785, 786, 788, 791,796, 797, 798, 800, 803, 805, 806, 812, 814, 815: n = A,T,C or G
gaattggagctccacccgcggtggcggccgaggtacttactaatgggcaaaaaatgaggtttaattacatttgctgattatattaaaatgggaaagtggtgagaaatgacagaaggtattgtgctgggttttagcaaaaatgaaattctaggtgtgggagacaggtaatttaaactaatattgattgggattctgtctcagtgagttgatattcaggagcttgttttatgtagtttgttctaaaggagtcatttttcttgcctgagaaaagcaacaatgataaaaaagtaggcagatttggaggctgtttataattctatattttgtgaattcataaaacttattttaatgtagaagttgcttgacagactttaggtggtcaaaaagggtcaaaatggaagtaaaaatataatttggtcatttatttattctacgcatatttatcttgcctaatctgtgccaagcactgttctaacagtttagaatattggtgaacaaaacagactaattcctgacactccatgaaacttaaattctagcaaaattatttcctcttgggttttttttcctttcctgttgaccccataaaatggtttnattanggaagggcttggnttccccctccccccctcctttgaaaaattngnnnnggnannccgggatttaaantttttttgccccccctntnccnggggggttntggggntnggnttcttgggggggggnnncccnaaanaaaaanaccccccccccnnttggnggggnangttttttgggggncccnnnangtnggccnnnanaantnnctttgnanntttgaaa

SEQ ID NO: 3992 - DNA, 824 bp, Homo sapiens
  misc_feature 26, 44, 54, 55, 56, 65, 97, 101, 105, 106, 108, 114, 116,117, 123, 145, 165, 186, 193, 201, 205, 210, 225, 227, 230,232, 284, 326, 340, 341, 347, 348, 353, 354, 408, 409, 430,499, 547, 559, 564, 569, 584, 610, 625, 656, 670, 685: n = A,T,C or G
  misc_feature 688, 703, 707, 714, 719, 728, 740, 747, 751, 757, 765, 773,784, 787, 791, 795, 801, 804, 807, 808, 809, 810, 811, 813,815, 824: n = A,T,C or G
ggagctccaccgcggtggcggccgangtacttactactgggcanaaaatgaggnnncattacatntgctgattatattaaaatgggaaagtggtganaaangacnnanggtatngnnctgggntttagcaaaaatgaaattctangtgtgggagacaggtaattnaaactaatattgattgggatnctgtctnagcgagtngatnttcangagcttgttttatgnanttngntctaaaggagtcatttttcttgcctgagaaaagcaacaatgataaaaaagtnggcccatttggaggctgattataattctatattttgtgaatncataaaacttattnnaatgtnnaagtnncttgacagactttaggtggtcaaaaagggtcaaaatggaagtaaaaatataatnntggtcatttatttattctacncatatttatcttgcctaatctgtgccaagcactgttctaacacttttagaatattggtgaacaaaacanactaattcctgacactccatgaaacttaaattctagcaaaaacatttnctcttgggtttnttttnctttnctgttgaccccatanaatgtttcataggaaaggcatgatanccatcccccatgctntgagactagagtcggaggacagggaatttanccattttttgccgnattcttactggttgnttnctgaagttgggatcntttnagggggntgccnccgttttanaaacccccctcnccccctncttnggggantttttttnggggcaanaaaaattttgntanacanaaanagttcntcnggnnnnngncnaaaaaaaan

SEQ ID NO: 3993 - DNA, 506 bp, Homo sapiens
  misc_feature 4: n = A,T,C or G
actnctatagggcgaattggagctccaccgcggtggcggccgcccgggcaggtacgcgggcttctcctcatatctacatgactccatcctccatttctcttggtctctctcaaacataccttacacatgagaccctccctgaccactctatatactctatataaaataacctcacccccaccctgagacgttctttcctccatactactcattctactttactttttttctcaataatattaccacactctgacatactacatatttactcgcttattatttgtctctcacacctgtaatcctagcactttgggaggccgaggcaggcggatcacgaggtcaggagattgagaccatcctggccaacgtggtgaaaccctgtgtctactaagggttcaaaaattagctgggcgtggtggcgcatgcctgtggtcccagctcctcaggaggctgaggcagaagggtcccttgaacccaggaggcagaggttgcaatgagccgaaatt

SEQ ID NO: 3994 - DNA, 510 bp, Homo sapiens
taatacgactcactatagggcgaattggagctccccgcggtggcggccgcccgggcaggtaccaaatgtgattttattacccaagtggaagaagagatttcccgacactacaggagagcacacagctgctacaaatgccgtcagtgcagttttacagctgccgatactcagtcactactggagcacttcaacactgttcactgccaggaacaggacatcactacagccaacggcgaagaggacggtcatgccatatccaccatcaaagaggagcccaaaattgacttcagggtctacaatctgctaactccagactctaaaatgggagagccagtttctgagagtgtggtgaagagagagaagctggaagagaaggacgggctcaaagagaaagtttggaccgagagttccagtgatgaccttcgcaatgtgacttggagaggggcagacatcctgcgggggagtccgtcatacacccaagcaagcctggggctgctgacgcctgtgtct

SEQ ID NO: 3995 - DNA, 495 bp, Homo sapiens
  misc_feature 138, 240, 366, 451: n = A,T,C or G
atagggcgaattggagctccaccgcggtggcggccgaggtacaatagggagtacccaggttccctacgatgccccccaaatcagacccaggggctgccttccaaacagtgacaggcacctaaagaagggacagggcanacgctgcttcaagccagtcaaagccaagacaggcaggctgtgtggcacggttgtgctcccctgaatctcttcctgcctcgggcaactcttgtggatcacttnctgcctctgcctttccattcccttcctttgcctggttttctttcctcctaccaaatttttgacctgcaattaccaggagttacctgggtcctccctggaccttttctcaatgcaatctcctccttncagcacccccaagaagcgtcgctcctgtgttcaagaccaaccagggatgtgtccaagaccaacaggatggttgttcacctatgangctcatgtaggcaaggagcgattgtggccacagagctgccctca

SEQ ID NO: 3996 - DNA, 509 bp, Homo sapiens
  misc_feature 4, 53, 397, 420, 421, 471: n = A,T,C or G
gtantacgactcactatagggcgaattggagctccaccgcggtggcggccgangtacaggcccagttgggtcctacttaaagttttcctgtttgacaatttatcaggaattattattgcttaagatagctttgaagtaaattgtctgcgtcaaagaccttcctccacttctctcacttacctagctcttggcaactgtttccaaaatgtttgcactaactccatagattcatgtctgaaggattagatactccaggaacatctattgggagaaagtttaactacaactgttgtccatttttcaattaatgtgccagtcactaatcaaaaaaacagatgctgtcgttttcctcatccactacttgggacacctaaggatagatggacagatacttaanaggctgcctccttcttctgaganngggcttttcatcagggctgtgccacagggtgtgatgctgtgtgatagcanatggctctgcttcatgcccattactttttgttttatcc

SEQ ID NO: 3997 - DNA, 505 bp, Homo sapiens
gactcactatagggcgaattggagctccaccgcggtggcggccgcccgggcaggtactaaagcatgttaagctttcttccatgatggaatttataactcaagagaaataaaatcagattatgaattctaaattctaaggaatgagaaaagaatgtgggatagaagagacattgcggtcaagaggtggtgtgtgaagtttgaaagttctgttgccaaacatatgcaactctcattcaagagaaaaacaatctgcaaagactttgaagaatgagagaaacatgattcttaggagcaggctttcagattctcgatgatggatcatgtagacggcagatattatccagcaaaatcaggataattcctgagtcggaggctgcattccagcctctatgtcccaggctggagcagtggcaggatctcagctcattgcaacctctgcctcccgggctcaagcaatcctactatctcggcctcccgagtagctgagactcaggtgtgtgccacc

SEQ ID NO: 3998 - DNA, 496 bp, Homo sapiens
actatagggcgaattggagctccccgcggtggcggccgcccgggcaggtactgggcgggtctgaaggacactagaaataaactccctctaaatgatagtctgtagggggcaggctctgtttcttcacgctggtcaccgtgttgaagatgaggagccccaggaaacggtaagtgtgagaatcagaggacagtcactccaggctcaactgtgggtttcttcctgggacactgggcccagggattcccaaatgaatctgtccctgtgccactggaaacattagacagtaagaggggtgggctgttctgaagggtcttgcatcgcacagtggacacgagtgtgcagaattaagagaaaggagaaaatggccattgagtcgaacttcaggatgaaccagtattttaataaagcttatgttgatgattaaagtctgcccgcgtacctcggccgctctagaactagtggatcccccgggctgcaggaattcgatatcaagctt

SEQ ID NO: 3999 - DNA, 511 bp, Homo sapiens
gcgtaatacgactcctatagggcgaattggagctccaccgcggtggcggccgaggtactgccatttctttctttttttaaagaagatatgtttacaaaataggtgaccaactaaggtaggtgtgtgtgaagagaggcagtgagagagaggggatcctgaaattcttttcagtaaaggaaaaagataattttagggatgtttttaaaaatatataacttgatgaattttttatagcatgagtattatttaggtgctgtcctagaccagtgtggcgtataggctatagaagattggtcctgaatgctaacggcagggatgagtgtaagatcatcaaaacttatttgtgggaaggagagctactgacagagccatgtattacatgactccagtctgggctgataggcctgccttaaagcatagctagagggcaggcacggtggctcatgcctgtaatctcagcactttgggaggctgaggcgggcaggtcacttgaagccaggagtttgagacc

SEQ ID NO: 4000 - DNA, 515 bp, Homo sapiens
  misc_feature 3: n = A,T,C or G
gcncgtaatacgactcactatagggcgaattggagctccaccgcggtggcggccgaggtaccaagcagattctttatgttccttagtgataagtaatagggataaaaaattattctttcttcttccactgagccagtgtaagagttcctttttttttccaaaacaaataagatagtaaagccataagaacagcacttgtatgctttttgtattctaagaatatgagaaaaatgatttcagtgaacctttatctgaaaggatataaccatgtcctgatggaatactgcgatgggcaggtagaagggaatgagatgggccaggcgcagtggcttacgcctgtaatcccagcactttaggaggccgaggctggcagatcagaaggccaggagttcaagaccagcctggcccgcatggtgaaaccccgtctctactaaaaaaaatacaaaaaattagctgggcacgggggcatgcgcctgtaatcccagctactcggggaggctgaggcaggagaatcg

SEQ ID NO: 4001 - DNA, 513 bp, Homo sapiens
gcgtaatacgactcactatagggcgaattggagctccccgcggtggcggccgcccgggcaggtccggacaggtacaaatgtgtaaacagaaagccatggaacaccgactgtaatgaagctagtaaaaagcctgaaagggaagattacaaacaacggtatgcatactgtatataatgcagttcagatattttaggcttgaaaatggatttattccttcctatttatgtatttattttataataggtaatagtatagaatgcaaaaggcttttatttaatgaaaatcagctttcctacctttgcctccaactgctcagctcctctatagaactgtttccagttttttctctgccttttcaaagatgatatatttccaaacatacacttactatacagacaataactttttaaccaaaaagcaccatattatacacattggttagcatcttccttctccccttaatattgtattgaaacattattctccaacatttttgttaatttgcatttttaa

SEQ ID NO: 4002 - DNA, 515 bp, Homo sapiens
  misc_feature 250, 266, 272, 279, 302, 308, 310, 323, 327, 333, 336, 345,346, 351, 362, 374, 383, 386, 396, 399, 407, 418, 422, 425,429, 439, 441, 468, 471, 472, 479, 480, 483, 491, 492, 496,510, 511: n = A,T,C or G
tcactatagggcgaattggagctccaccgcggtggcggccgggggccattgagactgccatggaagacttgaaaggtcacgtagctgagacttctggagagaccattcaaggcttctggctcttggcaaagatagaccactggaacaatgagaaggagagaattctactggtcacagacaagactctcttgatctgcaaataccacttcatcatgctgagttgtgtgcagctgcagcggattcctttgancgctgtctatcgcatntgcctnggcaagntcaccttccctgggatgtccctngacaananacaaggggaaagncttnagatcnacntggggaggnnccggnagaacaatctnttttttcccgcntgaacccanggncccctggaangtncctttgcnacttttaccgngccntcncttnaaaacccccngngaaaaattccttttaaaatttcaaatntcnnggggtcnnatnctaaaacnngggncccctttcccaaanntccc

SEQ ID NO: 4003 - DNA, 500 bp, Homo sapiens
  misc_feature 359, 442, 495: n = A,T,C or G
atagggcgaattggagctccaccgcggtggcggccgaggtacaaggagacatttcccatcgctattaggaaatgggcatagataagaattttcaagtgtttccaagatccccaaactcaaaccatcctaccactgcttatccatcgacatcagtggcttttacatcagacaaaggtggagtaaatcaaacataccacccatggcttcttgagtagcatgaggaatgaaataagaatttttttttttttgagacggggtctcgctctgttgcccaggccagagtgcagtggcacaatctctggtcactgcaacctctgcctccccggctcaagcaattctcatgcctcagcctcccaggnggtgggaattactggtgcctgccaccacgccaggttaacttgtgtgtgtgtgtgtgtgtgtgtgtgtgtgtatttttagtaanagatggggtttcaggatgttggccaggctggtctcaaactcctgacctcaagntattc

SEQ ID NO: 4004 - DNA, 488 bp, Homo sapiens
  misc_feature 400: n = A,T,C or G
ggcgaattggagctccaccgcggtggcggccgcccgggcaggtacgcggggagactttccctgccggtacatggacctggcccaaccctcacagccagtagacgagctggagctctcggtgctcgagcggcagccagaagagaacacgcctctcaatggtgccgacaaggtcttcccttctttggacgaggaggtccccccggccgctctagaactagtggatcccccgggctgcaggaattcgatatcaagcttatcgataccgtcgacctcgagggggggcccggtacccagcttttgttccctttagtgagggttaattgcgcgcttggcgtaatcatggtcatagctgtttcctgtgtgaaattgttatcccgctcacaattccacacaacatacnagccgggagcataaagtgtaaagcctggggtgcctaatgaagtgagctaactcacattaattgcgttgcgctcactgcccgctttcca

SEQ ID NO: 4005 - DNA, 485 bp, Homo sapiens
  misc_feature 432, 462: n = A,T,C or G
gggcgaattggagctccccgcggtggcggccgaggtacctaatccaggaacttggtcttccacctgcaccatctctaatctgtgaagctggaaggtgatgttttgtaagcccagcatccctcccctccttccttgggtaaaaatctccatccctctggctacagaggtgggcacagagcccagaatgagccaatcacagtaactcatctcccaccaggattttctatattgaagccagagaggaaacttcctgcctctctggagtatgtgagccaggaactgccatgtcctcaccaaggagagaaaagctgatgtgcatagagaagcacagatagacagtgctgagcaatggttcaggaagagtatcttcctcctgtacctgcccgggcggccgctctagaactagtggatcccccgggctgcaggaattcnatatcaagcttatcgataccgtcgacctcnagggggggcccggtacccagctt

SEQ ID NO: 4006 - DNA, 494 bp, Homo sapiens
tagggcgaattggagctccccgcggtggcggccgcccgggcaggtactaaagaatgtgcatttatttgtggggaggagaggaggtctaaatagacaataaacatataaatattaatattgtgaaagtggtatgaagaaaaataaagcatgataaggagagagaggtgttccctggctctccagagggctgaggtggaagaaaaggactcctgttttaggtaagatatcagagaagacctctctgattgactgaaatgtatgcaaaggcctgcatgaagccagggaccatgccgtgctgacatctgggggaggattatcctcacagaggggaaaggaagtgcaaatgccgtgaggtgggaggaccatgtttggtatgttcagggaggaacagggaggcccgtggggctggagcaggttcagccatgggaaggccaaagatgagatcaaagagaatagtgggagatcaccttagagatttatgggccattgtgagg

SEQ ID NO: 4007 - DNA, 496 bp, Homo sapiens
  misc_feature 496: n = A,T,C or G
tagggcgaattggagctccccgcggtggcggccgcccgggcaggtacctgtgaacccaacctacaggctggcccctgtagacacagagaacaggtccatcccagcacctggatgacccttgcagatcaaaagccttccttggcaccatgtcagcccctatggaaataggcttcaggccagcccctgtggatacaggctgcaggctcatacttgcaaacccaggcttcaggcccacccctgcaaacctaaaaaacaggtctaccccagtgggcacctgcaaaaggccagcttgcatgaggactctagctgcaagcacgctcatggaccacattagccagcctactcaaaatctctgtgaagggctttcccaaacaagccagtctgcaaagactagaataaatctctacttcttcagatgcatggacaccaacagctagtcacaaagattaaaaacaatcagagtaacatgaaatcattgaagaaataaaataaaacn

SEQ ID NO: 4008 - DNA, 497 bp, Homo sapiens
  misc_feature 497: n = A,T,C or G
tagggcgaattggagctccaccgcggtggcggccgcccgggcaggtacctgtgaacccaacctacaggctggcccctgtagacacagagaacaggtccatcccagcacctggatgacccttgcagatcaaaagccttccttggcaccatgtcagcccctatggaaataggcttcaggccagcccctgtggatacaggctgcaggctcatacttgcaaacccaggcttcaggcccacccctgcaaacctaaaaaacaggtctaccccagtgggcacctgcaaaaggccagcttgcatgaggactctagctgcaagcacgctcatggaccacattagccagcctactcaaaatctctgtgaagggctttcccaaacaagccagtctgcaaagactagaataaatctctacttcttcagatgcatggacaccaacagctagtcacaaagattaaaaacaatcagagtaacatgaaatcattgaagaaataaaataaaacn

SEQ ID NO: 4009 - DNA, 662 bp, Homo sapiens
  misc_feature 3, 4, 5, 6, 10, 13, 17, 20, 22, 23, 25, 27, 30, 34, 35, 39,40, 41, 45, 50, 52, 55, 58, 63, 65, 69, 71, 73, 74, 75,76, 77, 78, 79, 80, 83, 88, 94, 99, 102, 105, 109, 110,113, 117, 135, 143, 173, 217, 227, 346, 398, 424, 462, 464: n = A,T,C or G
  misc_feature 563, 566: n = A,T,C or G
tcnnnntttnttntttnttntnntntncanattnntttnnnatanttttncngtnttnctacntntatntntnnnnnnnnagntagantgattnatacnttngtntccnntanggcnaattggagctccaccgcngtggcggncgaggtactttaggagacccatgcgggcanattgcctgaggtcaggagtttgagaccagcctggctaacatggngaaaccctgnctctactaaaaatacaaaaattagccgggcatggtggctcacgcctgtagtcccaactgcttgggaggttgaggcaagagaatcgcttgaacccaggaggtggaggttgcagtgagccnagatcgcgccactgcactccagcatgggccgacagagcaaggactccatctnaaaataaagaaagaaaggaaacaatngaaaagaaaagcttatattgaaccttctctaaaaaaangnaaaaaaaaaggaaaggcctggatgcacacaaatctaaaattttggcaaggtcgatcaattaaagggatattttattttggcattccacaaaaaataaanttnctttacttccccccaaaaaatcaaattaaaaaagtttcaaaaatagccaacctttttccttaatggtggttttaaaaaatgtaatccacccaaaat

SEQ ID NO: 4010 - DNA, 496 bp, Homo sapiens
gaattggagctccaccgcggtggcggccgcccgggcaggtacttggaccatccacagcccagcaaggcagagcaggatgcttctattcctcctgacacccatgaggccctgcttcagacagcccttttctcctcctcctcctcccaccaggcctgtgtctcctccccaaaaggcaaaagaggcaccaaacacccaagcccaggtcaggagcctcccatccctcagaactcccttcccctaggaagcagatcacagaaatggggtgggcctggtggctgttcagaaagtcccaggcccctgagagaggagggctctattgtgaagccatttagctcttcccaacactcatcactgctgcatttatctaggccatatctaacacataccactggggatcctagggctaggcactgcgtggagccaaagggaacgtggcctcacacccaaggagatccaagtctgatgcagaaggccccgcctcatttcttaggtctga

SEQ ID NO: 4011 - DNA, 497 bp, Homo sapiens
  misc_feature 496: n = A,T,C or G
ggcgaattggagctccaccgcggtggcggccgaggtacgcggggcgttcttgccgtgatggccgccgccgaggcagggagttgagggtttctgcctttcggagggtttgggggattgtcggtcccgttagaaggccaccaacagccccccaggttgccaagggcctgttagttgtgttcctggaaggtgggcaagcagcctgatgggttaacattgggatttgccgtcgttatagcggtcaaggggcctgtagcggctgcagggtcggtgagggttcccagccggccgctctagaactagtggatcccccgggctgcaggaattcgatatcaagcttatcgataccgtcgacctcgagggggggcccggtacccagcttttgttccctttagtgagggttaattgcgcgcttggcgtaatcatggtcatagctgtttcctgtgtgaaattgttatcccgctcacaattccacacaacatacgaagccgggagcatna

SEQ ID NO: 4012 - DNA, 811 bp, Homo sapiens
  misc_feature 624, 665, 674, 681, 687, 704, 728, 730, 742, 743, 745, 755,756, 757, 758, 763, 777, 784, 785, 786, 787, 789, 794, 796,799, 800, 811: n = A,T,C or G
gaattggagctccaccgcggtggcggccgaggtactttctttatgctcttgactgtgtcttctgcaggcaggacagacttacaaatcatgcagggcttgccccttcagtccttctgtcatttctagttagctctcacgttgctaatattccatgacgccgtccagtaacctgggctgccctcgctcctgaccgcctctcccccagcctggtcagggatacccctagagcagaggagaaaactgagctccaagcccagagcttccagcagctgagtggctcctgttgagagcctggctgtcccaactgtggcagcattcgcagattctgggcatctaaggcttaccagatacaaaggatggaagcagaaatatgcacagttcaaaaatgttgcttttagcttctagtgtgaaacttacagtaggagatcacaagactgttttgcccctggaatatgtaggtcttttgtgagacaagggggagggaggaagcgaggaaagagtgagagaagaaggggagagagaaatgttgtgagagtgcaaaaagtagatttcaaaagaaattcattaaaaataaaacataagaattattggaagccattatgcctgcaatgggggaggcatggncctattcacgcttatttgtgtgtgtgtgaaaaaaaaagtgngttttttgngtggtgncatcanctcaagggcagtgggtngggagtagtatatttggataagtncncagagattgggnnanaacaatttannnntctcntaatggggttttgntttggcnnnncntttancncannctattcctggn

SEQ ID NO: 4013 - DNA, 1185 bp, Homo sapiens
  misc_feature 3, 4, 5, 7, 12, 13, 16, 17, 18, 19, 20, 23, 24, 25, 26, 27,28, 31, 32, 33, 36, 37, 39, 40, 41, 42, 44, 45, 46, 48,50, 51, 52, 53, 55, 58, 60, 61, 64, 68, 71, 72, 74, 76,77, 78, 80, 86, 90, 93, 94, 96, 97, 99, 103, 104, 111, 117: n = A,T,C or G
  misc_feature 128, 139, 281, 381, 432, 478, 534, 542, 546, 551, 553, 564,571, 596, 598, 607, 612, 624, 638, 651, 654, 664, 665, 677,706, 713, 727, 736, 745, 754, 773, 774, 803, 804, 817, 846,849, 850, 851, 860, 861, 865, 871, 872, 885, 893, 894: n = A,T,C or G
  misc_feature 901, 929, 930, 931, 936, 950, 952, 964, 965, 969, 978, 981,996, 997, 1000, 1006, 1016, 1020, 1033, 1039, 1044, 1057,1059, 1063, 1065, 1067, 1069, 1070, 1073, 1089, 1091, 1094,1101, 1112, 1113, 1116, 1117, 1118, 1154, 1170, 1171: n = A,T,C or G
  misc_feature 1172, 1173, 1177: n = A,T,C or G
ctnnnanatttnnttnnnnnttnnnnnntcnnnttnncnnnntnnntnannnntncgnannttngggnggnncncnnncnagttangggnggnntnntncccnntcttctnactatngggcgaattgnagctccaccgnggtggcggccgcccggccaggtacctcagaacagtggactcagaattgagggttggggcagagatggcaatctgtttaacaggtttcccaggtgatacttacacacactaaaatttgagaaccactggtttggataaaccanaaagaattaaattataaaactgacattgaggaggtaatctgtgagagaaaagtgagcttgctatccacaccaaactctatccctggtagcaaccttcacntctggttagtgggtatggtattaccaccttctggccaaaaaatctggaaanaaataataaactggaggaaaccaccgaaccaacacttggccgaacnagaagagacaaaacatttcctttcaggggatcctattgggaaactactttaccttncctcccangacnttttncntaaaggggagnttaccanttggcccccttctcacggttggagnantaggttccnggtgntcgttaaagttnttccggttcggaanggggattacctgnaanaagtttcttnngaaaaggggcancccataaacccccggggggggccttggcnaaaaaanggggggcccttttnggcccaaangggcttggncccacggtnagcttcccattgtttaaannaccaagccacctttggccccctttcaatnnttccaattcaatnaggcccaggcccaaggggaggggaggggnttnnncaattgtannattngggggnnccccaacttcccngaaagaannaagttcnaagccccggggttttttcggccctctgnnnaaaantttaaggtttgccntnccccgggggggnngaancaatttcantcnttcccatttttcccnnccntttaantaaaaagggngccnccttttttttttngcaatnattanttctgccaaaacntntgtncncntnnggncgggtttttaaaaacntncanggggatnccccccggggnntgnnnaggggaaattccatatttttaagccttttattgtanaccgggtgcaaccttnnnngggngggggcct

SEQ ID NO: 4014 - DNA, 722 bp, Homo sapiens
  misc_feature 4, 5, 10, 12, 24, 520, 565, 598, 616, 629, 656, 699, 721: n = A,T,C or G
tcgnngtccncncccgagtaaacnggcccatggaaacaacccatgaaaatccatagcttccgggccactactgtaatcagaaaagacaccaagaagaatattccattctcagtagcaacctggaaagaaactgaattgtaactgaggagtaggacttacatgaagaaaactaccacactataccctactattgaaacacaagaaaatgcgaacgaaagtagagagaagccgttttcctcaaagacgtcatctcaaatttatttttacattcccatcatgcttggcatgtagaatgtgatcagtacatatttgttgaatgacaaaatgaggggataaataaactttccctaagatgtgtatgtagacgtttgaaaatagaagtctgtcgctgatgtttctgtccaccaggagtcaggcttcagccaggaaagagtgagccagtgtctgagctggctctcaccaggccttccaccagctccaggtcaccaggttcaggccaagactgagtttcagtatttgncgttacctggtagataaataaacagttttaaagtagagcttatgnatttggctgatgcaaaagtaatcatgatcattncacataggtacaggagcngatgcaaaaaaanaaaaaagggcggccgttagactagctngagaaaaccttccacacctcccctgacctgaacataaatgatnccatgtggtggtacttgttatnc

SEQ ID NO: 4015 - DNA, 1178 bp, Homo sapiens
  misc_feature 2, 6, 7, 8, 9, 10, 11, 12, 13, 15, 16, 17, 19, 20, 21, 22,23, 24, 25, 26, 27, 28, 29, 30, 31, 32, 33, 34, 36, 37,39, 40, 41, 43, 45, 48, 50, 51, 52, 53, 54, 55, 57, 58,59, 60, 61, 62, 63, 64, 65, 68, 69, 70, 71, 72, 74, 75,80: n = A,T,C or G
  misc_feature 81, 82, 87, 88, 89, 90, 91, 92, 94, 97, 99, 100, 112, 113,114, 118, 119, 124, 129, 140, 142, 216, 275, 457, 464, 550,557, 589, 596, 597, 599, 604, 610, 617, 634, 640, 641, 686,699, 710, 717, 732, 740, 755, 785, 790, 803, 820, 839: n = A,T,C or G
  misc_feature 869, 871, 873, 878, 882, 899, 920, 924, 949, 954, 969, 970,1000, 1013, 1020, 1023, 1024, 1033, 1053, 1058, 1065, 1075,1079, 1080, 1101, 1104, 1111, 1114, 1115, 1120, 1123, 1124,1129, 1134, 1139, 1143, 1147, 1159, 1178: n = A,T,C or G
tnttannnnnnnntnnntnnnnnnnnnnnnnnnnannannntncnttntnnnnnntnnnnnnnnnttnnnnntnnttttnnnggggnnnnnntnctntnnaatgggggggcnnnaacnnccacnatacnactcactatanangcagaattggagctccaccgcggtggcggccgcccgggcaggtactactttctcttttttttgtttgttcgttntgttttttgtttttgagacagagcctcactctgtcacctaggctggagtgcagtggctnaatctcggctcgccgcaacctccgcctcccaagttcaagcgattctcctacctcagtctcccaagtagctgggattacaggcatgcgccaccacgcccagctaatttttttgtatttttagtaagaagaccgggtttctccatggttggtcagactgggttctcaaaacttcccaacctcanggtgatnctgttctgcctccggcctcccaaaagtgcccggggcatttacaagacattgaagccaacccgccgccctgggccctaattgtagcntaccctntcttgaatcttaattttgggatattgaatggngggttannanaaaanggttangttttangaaaaggaaatgttttncctggnnattaatctttctttttaacccccatctttaaaccactttttttancccccttcttaanaacctggtttnaaacaantgttttttcccttcntttttggnaaaaaatcttttttntttcaattgtggccccttttaatttcaatntgggnattttttgcttantggtctcctaacttttntttggaaactttaaaaacnaaaaaaacaaaaaaaaaaccccctggcaantntntccantttnttttttaattttccccnaatggggccccctacttttanttanggttctttttggcccaaaaaattantgccntgggcttgggtcctnnattttttttcctttcaaaattttccccttngggtggaaacttngccccancannttttttggnttttgaaacttgtaaccccncgggnccccttnttaaaaaacntaanngggaatcccccccgggccttnccngggaaanttnnaaaanttnnaaggncttanttcgnttancccntcaaacctttcnaagggggggggcccccggn

SEQ ID NO: 4016 - DNA, 857 bp, Homo sapiens
  misc_feature 491, 597, 619, 629, 654, 657, 659, 668, 678, 681, 692, 704,706, 710, 712, 716, 718, 719, 723, 731, 748, 750, 756, 762,763, 764, 777, 781, 782, 783, 784, 785, 791, 792, 793, 801,806, 807, 808, 818, 820, 823, 826, 828, 829, 837, 838: n = A,T,C or G
  misc_feature 841, 846, 847, 851, 852, 856: n = A,T,C or G
gaattggagctccaccgcggtggcggccgaggtacttaaaagctcgtgggcctcagataattggcctcctaaccaaattcagctgctggggcctgatcagaaactgctgggtttctttttccctaagccgatttaattcccaccgccaagccctctgaccttattttctttctttctctggcctaattcctggaaaatggagtctggaaatacctagggactacttgggtgggctccaaagcttcagggagaagagataggactgaaggatgcaaaagggatgaagagagaagccaggcaccaaggccacatcttgtgactccatttacaggaaatataccgtttaggtaaatgcatatcggtggctgccaggggctgggggagacggaactgggagtgactacctcatgggtacctgcccgggcggcccgctctagaactagtggatcccccgggctgcaggaattcgatatcaagcttatcgataccgncgacctcgagggggggcccggtacccagcttttgttccctttagtgagggttaaatgcgcgcttggccgtaaattcatggacatagctgttttctgtgtgaaattngtatccgctcacaattcacaanacatacgagnccgggagccattaaaagtggtaaanccntnggggtgccntaaatgaggngangccaacctccncaattaatttgngnggcncnttantnncccntttttcangccggggaaaaccctgncntgcccnaacctnnnatttaaataaaantttnnnnnaatacnnngggggggnaaggnnngttttggttnantgnggnanntttttttnngtnccctnntcanncaant

SEQ ID NO: 4017 - DNA, 832 bp, Homo sapiens
  misc_feature 507, 596, 608, 610, 626, 643, 650, 659, 662, 688, 700, 706,716, 728, 729, 752, 753, 764, 767, 768, 784, 785, 790, 791,804, 805, 806, 810, 825, 826, 827, 830, 831: n = A,T,C or G
cgtaatacgactcactatagggcgaattggagctccaccgcggtggcggccggggggacctcctcgtccaaagaagggaagaccttgtcggcaccattgagaggcgtgttctcttctggctgccactcgagcaccgagagctccagctcgtctactggctgtgagggttgggccaggtccatgtgccggcagggaaagtctccccgcgtacctgcccgggcggccgctctagaactagtggatcccccgggctgcaggaattcgatatcaagcttatcgataccgtcgacctcgagggggggcccggtacccagcttttgttccctttagtgagggttaattgcgcgcttggcgtaatcatggtcatagctgtttcctgtgtgaaattgttatccgctcacaattccacacaacatacgagccgggagcataaagtgtaaagcctggggtgcctaatgagtgagctaactcacattaattgcgttgcgctcactggccgctttccantcgggaaacctgtcgtgccagctgcattaatgaatcgccaacgccccgggagaggccgtttgcgtattgggcgcttttcgctttcttgnttcactgaattngntgcgctcggtcgttcngcttcggggagccggtnttaactnacttcaaanggnggtataccggttttcccaaaattcanggggttaccccnggaaanaaaaatttgngccaaaaggccnncaaaaaagggcccggaacccttnnaaaaggccccnttnncttgcctttttttttnnaaggnntcccccccccttnnnaganctttaaaaaaaaatnnnccnnt

SEQ ID NO: 4018 - DNA, 880 bp, Homo sapiens
  misc_feature 16, 25, 26, 28, 30, 43, 48, 54, 350, 354, 402, 403, 406,409, 410, 411, 419, 421, 423, 425, 426, 427, 428, 429, 430,433, 441, 450, 451, 457, 460, 461, 462, 465, 466, 468, 469,470, 479, 481, 483, 488, 495, 496, 497, 498, 499, 500: n = A,T,C or G
  misc_feature 502, 504, 505, 506, 509, 515, 517, 519, 520, 521, 522, 524,530, 531, 533, 534, 537, 540, 542, 543, 548, 554, 557, 566,571, 578, 583, 584, 588, 592, 595, 598, 599, 600, 603, 609,612, 614, 616, 617, 620, 621, 625, 630, 634, 635, 636: n = A,T,C or G
  misc_feature 637, 639, 641, 643, 650, 653, 656, 660, 662, 670, 673, 676,677, 680, 681, 682, 690, 692, 694, 697, 702, 707, 711, 712,716, 719, 720, 738, 744, 746, 749, 750, 752, 769, 771, 773,775, 776, 777, 780, 781, 786, 787, 790, 792, 794, 796: n = A,T,C or G
  misc_feature 804, 805, 807, 811, 814, 816, 818, 821, 823, 833, 839, 842,847, 854, 857, 862, 863, 866, 868, 871, 873, 878: n = A,T,C or G
gggaggactcccgacncttaatcanngncntactatttggctnattgnacgctncaccgcggtggcggccggggggacctcctcgtccaaagaagggaagaccttgtcggcaccattgagaggcgtgttctcttctggctgccgctcgagcaccgagagctccagctcgtctactggctgtgagggttgggccaggtccatgtgccggcagggaaagtctccccgcgtacctgcccgggcggccgctctagaactagtggatcccccgggctgcaaggaattcgatatcaagcttatcgataccgtcgacctcgagggggggcccggtacccagcttttgttccctttantganggttaatttgcgcgcttggcgtaatcatggtcatagctgtttcctganntcnccnnnaaaaaaanananannnnnntanataaaaanaaaaaatannttattnaannnaanntnnntcgaaaaanantntaaanttaaaannnnnntntnnnaanatattnantnnnnanaatatnnannttntananntatanaataantanaaaaaaaantaaangtaatanaaaannattnaatntanaannnatnattaanatnanannaannatcnatcanaaannnnantnantaaaaanatncanaatngnaataaaanggntannatnnnttatgtanananatntcaanaaaanattnntatncannttaaaatttatataaaantgatananatnntnaagaataaccagtttananancnnntanntaacnnttntnananttaatttnntnttanaanantntancnaattatcaantaacanaanttatnagctatnacnaatanntananaantnatcanct

SEQ ID NO: 4019 - DNA, 996 bp, Homo sapiens
  misc_feature 2, 12, 13, 15, 17, 19, 21, 24, 180, 309, 345, 354, 355, 372,395, 400, 411, 412, 418, 421, 437, 442, 468, 471, 477, 494,506, 520, 524, 527, 531, 538, 542, 543, 547, 553, 554, 560,565, 567, 571, 572, 593, 594, 595, 598, 599, 603: n = A,T,C or G
  misc_feature 606, 608, 611, 612, 615, 620, 625, 627, 628, 632, 633, 637,642, 644, 647, 653, 661, 663, 669, 671, 673, 674, 686, 687,690, 691, 695, 700, 705, 708, 709, 713, 715, 724, 739, 741,742, 743, 751, 754, 766, 768, 773, 798, 799, 800, 807: n = A,T,C or G
  misc_feature 811, 816, 820, 823, 824, 826, 832, 833, 834, 835, 838, 846,852, 856, 857, 864, 866, 867, 868, 871, 873, 882, 885, 887,889, 890, 900, 901, 902, 903, 904, 905, 908, 913, 926, 927,928, 935, 939, 940, 943, 944, 951, 953, 966, 974, 978: n = A,T,C or G
  misc_feature 979, 985, 991, 993, 996: n = A,T,C or G
gntagaaccgcnntntngncntantttttggctaattggagctccaccgcggtggcggccgtccccgatgttctctgcatactctagggggacaaagatagagtcaggagtggatcccaggcatggcatccaccgtggctgcgtcgcttcatacctttcccagaaccccagctcccacanaggtgcaagtcgccctaatgcccccactgtagccaaattccttggggtcttgcctttgaggcctcagtggaaaggtcccaacttacctttccatgcttggattcccctcctagccacacccttcacttncgccctcatgtatttattcactcaacacacatggcntggatgctnntaaggtctgaatgtttntgtcccctccaaaactcatgctnaaacntcatcctaaanngcatcnaanagcatttaatggggtngattnaggttttttaccaatataatttattnagnattaanaatttaaaggtgataanaatttaatgttnttaaatcatatggngggnaantaanaactctntttnnaaanaaatgnnatttgnattgngnaaanntttttaaaaaaaccaattttnnnccnntttnatncnttnntanaaaantttangnngttnncctnatttntnatntatgancctttttntnattacncntnntaagggtgttgnntgnntcanttttnatttnttnnatcntnttccctttnaattaaattttttanannnagattttnctnttcaatctattnantattnaattttaacttttaatatttatcannnttttttntaanaactnactnatnntntaaaannnnatnttaattanttttanatannatattangnnnaananaaatttttntancncnnatactttcannnnnnttnatgangaatatatatacnnnttttttntatnnttnntatttancnatttttttatttnattattanttannaataangttttntnttn

SEQ ID NO: 4020 - DNA, 898 bp, Homo sapiens
  misc_feature 3, 4, 9, 11, 13, 14, 15, 25, 31, 34, 446, 521, 536, 580,584, 639, 653, 666, 668, 681, 734, 740, 765, 774, 794, 797,808, 810, 812, 827, 829, 835, 851, 852, 853, 860, 863, 866,882, 883, 884, 887, 893, 895, 898: n = A,T,C or G
ggnnagatncnannntcgacatacntttttnctnattggactctccaccgcggtggcggcccgggggccattgagactgccatggaagacttgaaaggtcacgtagctgagacttctggagagaccattcaaggcttctggctcttgacaaagatagaccactggaacaatgagaaggagagaattctactggtcacagacaagactctcttgatctacaaatacgacttcatcatgctgagttgtgtgcagctgcagcggattcctctgagcgctgtctatcgcatctgcctgggcaagttcaccttccctgggatgtccctggacaagagacaaggagaaggccttaggatctactggggggagtcccgaggagcagtctcttctgtcccgctggaacccatggtccacttgaagttccttatgctactttcacttgagccatnctatgaaatacaccagtgagaaattccttgaaatttgcaagttgtctgggttcatgtctaagcttgttccaactntccagaatgcccacnaagaattcaactggatctgggaagaggaaagaaactgattgggngttnactgaaccccatttttggattggagaccttcaccagggcttgattgtcatttcantggaaaaccccaancaaaacttggctntncccttgccccctngggaagtatttggttttttgaagaatttttttggtacccttggcccgctctanaaaccnaggggaattcccccccggcctgccnggaatttcnatattaaggcttttccgatnccngccggaacctntnanggggggggcccccgngnccccanctttttgttccctttnnngaggggntanttnccccccttggcgtaannnatngggcanangcn

SEQ ID NO: 4021 - DNA, 923 bp, Homo sapiens
  misc_feature 3, 6, 13, 16, 17, 18, 19, 21, 23, 27, 30, 37, 440, 466, 569,625, 634, 645, 653, 673, 678, 684, 686, 690, 693, 697, 710,716, 731, 737, 743, 748, 783, 788, 791, 807, 814, 820, 831,834, 835, 836, 840, 849, 869, 873, 876, 887, 890: n = A,T,C or G
  misc_feature 895, 918, 923: n = A,T,C or G
gtngantttaganccnnnntntngacntanttttttnctgattggagctccaccgcggtggcggccgaggtactaaagaatgtgcatttatttgtggggaggagaggaggtctaaatagacaataaacatataaatattaatattgtgaaagtggtatgaagaaaaataaagcatgataaggagagagaggtgttccctggctctccagagggctgaggtggaagaaaaggactcctgttttaggtaagatatcagagaagacctctctgattgactgaaatgtatgcaaaggcctgcatgaagccagggaccatgccgtgctgacatctgggggaggattatcctcacagaggggaaaggaagtgcaaatgccgtgaggtgggaggaccatgtttggtatgttcagggaggaacagggaggccagtggggcctggacangttcagccatgggaaggccaaagatnagatcaaagagaatagtgggagatcacgtagagatttattgggccatttgtgaggattgtggcagcattgaaaaaaactgggtttgatgctttaaaaacaacnagcccattttattttaatatctcattaattttttgttgggttcaaggaaaatgttnggacaagancctcaaccttngggaaganttggttcccaccttcccatntttanccatcnanaaanaanaggnttctcttttgggntgaatntttccaaccttgganaaattnaagttnaatantgcccgaagtttccaagaatggggttttcacttcncattngancacctttggcaagggnattggcnttggangggcttgggcntcnnncccnaaattcaanttaaacttggccgtgccctncatnttncccctcttccncanttggngggccttttaaaaatttgactcnaaaan

SEQ ID NO: 4022 - DNA, 942 bp, Homo sapiens
  misc_feature 6, 12, 18, 21, 33, 319, 338, 419, 438, 475, 555, 578, 606,614, 633, 639, 646, 652, 664, 665, 681, 686, 687, 694, 696,721, 732, 744, 753, 770, 777, 778, 779, 780, 781, 782, 784,790, 793, 795, 796, 797, 798, 799, 800, 801, 810, 811: n = A,T,C or G
  misc_feature 816, 820, 822, 823, 825, 826, 827, 829, 830, 837, 838, 842,847, 849, 850, 851, 852, 859, 860, 862, 863, 864, 865, 871,872, 876, 883, 884, 885, 887, 904, 923, 929, 930, 931, 938,939, 942: n = A,T,C or G
gatggncctganccgcantancgacttactttntggctaattggagctccaccgcggtggcggccgaggtacgcgggattatttctggaattttccgtttactctttgcagactttggttgaccttggggagcaaaccgaggaccgcgaaaccacagatcaagggggagctcgtgtcatagcagctctaacttagtgcttacaacatgcaggcactgttctagtcattttgcgtatattcatgaatcctcccacaaccaccgtgttcacgaggaaaccgaggcagagggaggtttaatgagttgctggaggcagcccanctggtgagctgaggctcancccgcaccgacccgtgctctggccccaaaacactcctcggtaacccccatcctgcccacacaaaatggccccggaacacanccggctgctttggagtcantttctctctcgaatgactttttccaccgttggcttcnatctgggagttccctttttctgtgtattttgcctgtcaattttctattcctttggatgttaattcattttttcccagggngctaaaaagggggctgggggggngtggtttttttcaattcctctacagggngggccctngggatgggtaacaaaaaanccgganaagaatnccatanttttcacccaanntgaaaaacttgcgggnccccnntcaaatntngaaaaacttgaaccccttgggaaanaattcttggcnattttttacttnaaaagccanaaaaccttgtctttaantccaaannnnnnanaaaaanaancnnnnnnnaaaattccnntcccncggngnncnnncnnttttttnnaatnttttngnnnnccccccnncnnnngggganntttnttttttnnnanttttttttttccccccnccccccccggggggggggnccccgnnnccccctnnttn

SEQ ID NO: 4023 - DNA, 991 bp, Homo sapiens
  misc_feature 3, 4, 12, 13, 17, 18, 21, 23, 30, 39, 383, 384, 385, 386,389, 391, 393, 396, 402, 403, 404, 405, 406, 410, 415, 423,424, 429, 433, 436, 440, 441, 447, 451, 452, 454, 456, 460,463, 467, 475, 476, 481, 482, 484, 491, 493, 497, 499: n = A,T,C or G
  misc_feature 500, 502, 506, 507, 523, 529, 535, 537, 542, 543, 545, 548,551, 552, 555, 557, 559, 560, 561, 562, 563, 565, 567, 569,570, 575, 576, 578, 581, 583, 585, 586, 595, 597, 600, 601,603, 607, 608, 609, 612, 613, 616, 619, 622, 625, 629: n = A,T,C or G
  misc_feature 634, 638, 640, 644, 646, 648, 651, 652, 655, 657, 661, 663,664, 666, 667, 669, 673, 674, 675, 679, 681, 682, 684, 687,689, 690, 692, 693, 697, 701, 704, 706, 712, 717, 718, 722,723, 725, 730, 733, 734, 738, 739, 741, 743, 746, 747: n = A,T,C or G
  misc_feature 751, 755, 757, 758, 760, 761, 763, 766, 769, 770, 772, 774,779, 780, 783, 787, 789, 791, 794, 795, 802, 804, 805, 809,812, 814, 820, 822, 830, 834, 840, 844, 849, 851, 854, 855,859, 864, 865, 866, 867, 869, 874, 876, 878, 879, 880: n = A,T,C or G
  misc_feature 889, 890, 892, 893, 895, 898, 901, 902, 903, 904, 908, 910,912, 913, 916, 919, 924, 926, 929, 930, 931, 934, 938, 939,941, 943, 947, 950, 951, 953, 955, 959, 961, 962, 964, 965,968, 972, 973, 976, 977, 978, 981, 983, 987, 991: n = A,T,C or G
gtnngatccganncgcnntcntngacatantttatggcnaattggagctccaccgcggtggcggccgaggtacgcgggaagaattttaagttcgtggattaatatcactacttgaatactgacagttgttgattagacaccgaaaggttactgattgttgaatgtatctgtgttagagctgtgcactggcacgcttgcatcaggggctggggccacacggccgctctagaactagtggatcccccgggctgcaggaattcgatatcaagcttatcgataccgtcgacctcgagggggggcccggtacccagcttttgttccctttagtgagggttaattgcgcgcttggcgtaatcatggtcatagctgtttcctgaaacacnnnngantngnaanaccctnnnnnaatnccatntttaatcnnctttncatnaanattnntccttntctnnantntttntantaanaaaaaaanntatgnntnttaaacntnattngnncntatnnccaaacattttttttnttcaanttcttntnaattnncntanttnnttnantnnnnncnantnnttttnnantgntnannaattaaaancntcnngnaatnnnttnntanatnaanttntctnctatntttntntaanantntanncananattntnntnnantatnnntaananncnctngnntnnattntttnttntntttctntttanntttnntntaatnttnnttanntnantgnntttntatntnntnntnaantanntnantattnnaanatgntntnccnntttttgngnntctnatntnagatananttttacanaatnatttgnaccnctatnanaanntttntttgnnnntnaattngngnnnaatttaacnngnnanaanttnnnnttgntntnntcnttnttttntntgnnntanaagnngnantttnttnntntnattntnnannatnaaannggnnnttntnaacnttan

SEQ ID NO: 4024 - DNA, 986 bp, Homo sapiens
  misc_feature 7, 12, 13, 14, 23, 24, 25, 28, 33, 242, 253, 398, 454, 475,526, 549, 590, 596, 609, 641, 656, 659, 661, 674, 689, 704,727, 729, 734, 739, 743, 750, 758, 759, 769, 783, 796, 797,803, 826, 840, 849, 853, 871, 892, 905, 909, 911, 914: n = A,T,C or G
  misc_feature 919, 921, 925, 926, 932, 938, 944, 946, 953, 955, 966, 967,969, 970, 971, 972, 980, 981, 985: n = A,T,C or G
gttaganccgcnnntcgccatannnacntactntttggctgattggagctccaccgcggtggcggccgcccgggcaggtactttaggagacccaggcgggcagattgcctgaggtcaggagtttgagaccagcctggctaacatggtgaaaccctgtctctactaaaaatacaaaaattagccgggcatggtggctcacgcctgtagtcccaactgcttgggaggttgaggcaagagaatcncttgaacccangaggtggaggttgcagtgagccgagatcgcgccactgcactccatcatgggcgacagagcaagactccatctcaaaataaagaaagaaagaaacaaagaaaagaaaagcttatattgaacttctctaaaaaaaagaaaaaaaagnaaagcctgatgcacacaaaatctaaatttggcaaggtcgattcaattaaagggatntttattttgcatcacaaaaanaatttcttttactcccccccaaaaaatcaaataaaaaaaaggttcaaaatngccaaaccttttttccctaaatngtggtttaaaaaatggtaaattccacccaaaaattacattnttgttncccccaacttttnttttcccaggttaattaaatttcttaatttgngggtaaaaggggganggntnttacccttgaaangtggagggccaaatnaaagaagaaggtttngaggctttccaaaaccctggccntnggaanaaganccgngttttcnttttcttnnaaagttttgnaagggaaaattggntttgggggggcannaaaaanttcttcttaaattctttttttcnttttttccccttcnttccttggngctnttttattttttctttgtncttcaaacctggctttttttnggtaaaacttttngttnanccntgggnancccnnggcccncttctnaaaacntnattggantncccccgggctnncnnnnaaattcannattnt

SEQ ID NO: 4025 - DNA, 865 bp, Homo sapiens
  misc_feature 5, 16, 17, 19, 27, 31, 36, 571, 611, 663, 664, 665, 666,667, 668, 670, 674, 675, 676, 677, 678, 679, 680, 681, 682,683, 684, 685, 686, 689, 690, 691, 693, 694, 695, 697, 698,699, 700, 702, 703, 704, 705, 706, 707, 710, 711, 713: n = A,T,C or G
  misc_feature 714, 715, 716, 718, 720, 722, 724, 725, 726, 727, 728, 729,730, 734, 735, 736, 737, 738, 739, 740, 741, 742, 743, 744,745, 746, 747, 748, 749, 750, 751, 752, 753, 754, 755, 756,757, 758, 759, 760, 763, 764, 766, 767, 768, 769, 770: n = A,T,C or G
  misc_feature 772, 773, 775, 776, 777, 778, 779, 780, 781, 782, 787, 788,789, 790, 791, 792, 793, 794, 795, 797, 798, 799, 800, 801,802, 803, 804, 805, 806, 807, 808, 809, 810, 811, 813, 814,815, 818, 821, 823, 824, 825, 826, 827, 828, 830, 831: n = A,T,C or G
  misc_feature 832, 833, 834, 836, 838, 839, 842, 844, 845, 846, 849, 851,853, 855, 856, 857, 859, 860, 861, 862, 864: n = A,T,C or G
agttngagcgcgcgtnntncgacttantatntggcnaattggagctccaccgcggtggcggccgaggtaccaggttgggctaagagatgaaaaaccaggctcaagttgggccagagatggacaatgagccacttccaccagaattcccagccacatatgcccacctctgggtcagaagagccaaacgtatttatcgcttttgctcagggccaacatagacacttgattctctctcagggctgtgttttcccccaaatgtatcaatacatccctattttcttccccctttgttttcctttccctggtgacctgctaccccacaccccagcacactgatggtgttccctccaccacaccgagaccccgccacaagctctcagccctcgtagagcacaggccccaccctgaaagttggcagagcaccgggctatcaagctgtgtcattgtggagccagcaagcccggcacaaccgtggatcccgggtacctgcccgggcggccgctctagaactagtggatcccccgggctgcaggaattcgatatcaagcttatcgataccgtcgacctcgangggggggcccggtacccagctttttgttccctttagtgangggttaattgcgcgcttggcgtaatcaatggtcattagctgttttctgaagnnnnnntntctnnnnnnnnnnnnnaannntnnnannnntnnnnnnatnntnnnntnantntnnnnnnntttnnnnnnnnnnnnnnnnnnnnnnnnnnnaanntnnnnntnntnnnnnnnnatttnnnnnnnnntnnnnnnnnnnnnnnntnnnttnttntnnnnnnannnnngnannatntnnnaanantntnnngnnnntnt

SEQ ID NO: 4026 - DNA, 932 bp, Homo sapiens
  misc_feature 7, 15, 16, 21, 22, 25, 27, 34, 37, 40, 41, 44, 520, 578,605, 620, 627, 633, 635, 663, 666, 689, 704, 725, 741, 755,758, 759, 767, 785, 786, 792, 796, 802, 815, 818, 856, 878,882, 891, 912, 918, 924, 930: n = A,T,C or G
atagttngatccgannccgcnntantngacatanttnttnnctnattggagctccaccgcggtggcggccgaggtacagctgcatgtgtctttggggggctaagtaaggactggcctatctgagcacaccttccagggacatttatatgccctgtccaccgtcaccagtgataacatcaagggcctgaacagaggaccatcccagctgctggcacctgtatatgttattcatgaacctagagactgacccacttagaactgtgagggccctcacgtgacatccaagggcctgacgatagatgtgcctcgccctcagctaccacctccagacactgttggagtctaggcattggctggccatacctgcagctgctgacacacacacacacacacacacctttcaggggctcaataatggacctaccttgcctgccactggcacctgtgggcacttcccaggggcccagggactggcttcgtccaccctgcctctaccactattgtcccccacatgcattancttaagaccccaagggatagcccactgatactgctgacccatgcataccacctggganaacccaaagactggtattcccaagctnccaataaacaacaantttggtngcccantnaaaccaacccttaccttgggaatttttncantcccccaaatacaagtttttaancaaaaaaccttttanaacccttaaagcccacctggnaggaaacttcaacaanaacacccctttttnacnncttgtttnagaaccccaaaattaaannaattgntggnaaaganatattgccttctngcncccattccaaaaaatcaaaagcccaaaagccccccttnttccagccccaacaacttttangttnccttgcccngggcgggccgtttttaaaaanttgggnggaatncccccngg

SEQ ID NO: 4027 - DNA, 850 bp, Homo sapiens
  misc_feature 6, 9, 10, 14, 15, 17, 18, 20, 27, 30, 37, 563, 571, 572,573, 574, 576, 577, 581, 582, 583, 584, 585, 586, 587, 588,589, 590, 591, 592, 593, 594, 595, 596, 597, 598, 599, 600,601, 602, 603, 604, 605, 606, 607, 608, 609, 610, 611: n = A,T,C or G
  misc_feature 612, 613, 615, 616, 617, 618, 620, 621, 622, 623, 624, 625,626, 627, 628, 630, 631, 632, 633, 634, 635, 636, 637, 638,639, 640, 641, 642, 643, 644, 645, 646, 647, 648, 649, 650,651, 653, 655, 657, 659, 660, 661, 662, 663, 664, 665: n = A,T,C or G
  misc_feature 666, 667, 668, 670, 671, 672, 673, 675, 676, 677, 679, 680,681, 682, 683, 684, 685, 686, 687, 688, 689, 690, 691, 692,693, 694, 696, 697, 698, 699, 700, 701, 702, 703, 704, 705,706, 707, 708, 709, 710, 711, 712, 713, 714, 715, 717: n = A,T,C or G
  misc_feature 718, 719, 720, 721, 722, 723, 724, 725, 727, 729, 730, 731,732, 733, 734, 735, 737, 738, 739, 740, 741, 743, 744, 745,746, 747, 748, 749, 750, 751, 752, 753, 754, 755, 756, 757,758, 759, 760, 761, 762, 763, 764, 765, 766, 767, 768: n = A,T,C or G
  misc_feature 769, 771, 772, 773, 774, 777, 778, 779, 780, 781, 782, 783,784, 785, 786, 787, 788, 789, 791, 792, 793, 794, 795, 796,798, 799, 800, 801, 802, 803, 804, 806, 808, 809, 810, 811,812, 813, 814, 815, 816, 817, 818, 819, 821, 822, 823: n = A,T,C or G
  misc_feature 824, 825, 826, 827, 828, 830, 831, 832, 833, 834, 835, 836,837, 838, 839, 841, 842, 844, 845, 846, 847, 848, 849, 850: n = A,T,C or G
tagttnganncgcnntnntngacatanttnttggctnattggagctccaccgcggtggcggccgaggtacttgggcttaggctggggttgagggctgggccctgagccgagaacacctgttaagtgacttactccacaggaactacttaatggctggtccctgatagactgggaactccatgagagcaggggtggggggctcatttgtccttgtgaccccggcactctatgcttagttgaacgaatgctggatgggctgatgcgggcggtgtcctctttcccttgctgcaatcaactggaacagggtgggagggagccctgggatcctcctggaatccttacacaggaactccagaccccgagccaccagtggccaagcagatctccttcccgcgtacctgcccgggcggccgctctagaactagtggatcccccgggctgcaggaattcgatatcaagcttatcgataccgtcgacctcgagggggggcccggtacccagcttttgttccctttagtgagggttaattgcgcgcttggcgtaatcatggtcatagctgtttncttttgannnntnnaccnnnnnnnnnnnnnnnnnnnnnnnnnnnnnnnnntnnnntnnnnnnnnntnnnnnnnnnnnnnnnnnnnnnntntntntnnnnnnnnnntnnnnannntnnnnnnnnnnnnnnnntnnnnnnnnnnnnnnnnnnnntnnnnnnnnntntnnnnnnntnnnnntnnnnnnnnnnnnnnnnnnnnnnnnnnntnnnntannnnnnnnnnnnntnnnnnntnnnnnnnanannnnnnnnnnnntnnnnnnnntnnnnnnnnnntnntnnnnnnn

SEQ ID NO: 4028 - DNA, 876 bp, Homo sapiens
  misc_feature 2, 3, 9, 17, 18, 22, 23, 24, 26, 32, 35, 39, 44, 45, 510,591, 596, 641, 643, 680, 711, 718, 725, 738, 746, 747, 748,749, 750, 751, 753, 755, 756, 757, 758, 759, 761, 762, 763,764, 765, 766, 767, 769, 770, 771, 772, 773, 774, 776: n = A,T,C or G
  misc_feature 777, 778, 779, 780, 783, 785, 787, 788, 789, 790, 792, 793,794, 797, 801, 802, 804, 805, 807, 813, 815, 816, 821, 824,826, 827, 828, 830, 831, 832, 833, 836, 837, 838, 839, 840,841, 842, 848, 849, 850, 851, 852, 853, 857, 859, 860: n = A,T,C or G
  misc_feature 861, 862, 863, 864, 865, 866, 867, 868, 871, 872, 873, 874,875: n = A,T,C or G
gnnatagtnggccgaanncgcnnncntggacntanttgntggcnnattggagctccaccgcggtggcggccgcccgggcaggtactagaaggattaattatattgcttgcattttttttaaaactttttatttttgtgactgagtctcactctgttgcccaggctagagtgcagtgttgtaatctcggctcactgcaacctccacctcccgggttcaagcgattctccttcctcagcctcctgccaccacacctggctaatttttgtatttttagtaaagacagggtttcaccatgttgaccaggctagtctcgaactcctgccctcaggtgatctgcccgtctcggcctcccaaaatgcttggattacgggcgtgagcctccacgcccagccgcttgtattttttaaaataaagattgcaggtttagttttaatttggataatttcttcaatctgttttttcttggttccttttttcccaaatgtttaatactgcttactacatgtggnagtttttaccatgtaaaatattgccgtttctagttttaaatttttatgactgtacctcggccgctctagaactagtggatnccccnggctgcaggaattcgatatcaagcttatcgataccgtcgacctcnangggggggcccggtacccaactttttgttcccttttantgaagggttaaattgcgccccttggcgtaancattggncaataanctttttttccccncggggagnnnnnnangnnnnnannnnnnntnnnnnntnnnnnaanantnnnntnnnatntttnngnnanaatttntnnaaaanttntnnnannnnttnnnnnnnaatttnnnnnntatntnnnnnnnnnnatnnnnng

SEQ ID NO: 4029 - DNA, 859 bp, Homo sapiens
  misc_feature 3, 4, 14, 15, 34, 592, 731, 746, 758, 762, 792, 816, 833,837, 840, 852, 859: n = A,T,C or G
agnngagccgcgtnntacgacttactatagggcnaattggagctccaccgcggtggcggccgaggtacgcgggagggaagagtggccttatggctactcaagccacgtgtttacctaaaatgtgctcctagtcgcatagcttctcagaatagtcaaagaagaaaggaaaagaaagctggatgtcccgggtttattttttctgcatctttgcaaatatgagacacaactctgttccaggagctttcgatgcgcttctacaggtatttcttttttctttgtgtcaaggataaatgtgaagatagctgtggaattgtccgaacatttttgccttgaaattaagcaatgttttatgcctaatttcccaaaggacaagttatttatgccagtattaaaagcagcaacttatatattctacgcaaaacagaaaaccagaaagatctaaattttgacaagtccctagtttgatgaattgaaagacaggaagatgactacatcacagcagataaaagagatattttcataaactaagctctgggaaacagaataccaaaattacccatgtacaaccaactactgctcatgggttccccanaagacttgtgtgcggattatacgagtcattgcccagttgtgatagtctcaattttgaaaaagcaattatctttaccccatggggcaagaaacttataaacgtatttagttctattataattgaaaacacttttattatnagttggaaatctctntcttcccagaangacnaaaacctccaaaaatattggtttccttttnacttaaaaaacccacctttgtcgnctcaaggtttttgaatntttnaanaaaatcctaaangaaatcn

SEQ ID NO: 4030 - DNA, 842 bp, Homo sapiens
  misc_feature 3, 4, 5, 14, 17, 18, 27, 29, 34, 35, 474, 476, 489, 493,494, 495, 503, 505, 506, 515, 516, 520, 532, 543, 544, 555,559, 560, 561, 569, 570, 571, 581, 583, 595, 603, 610, 643,644, 646, 647, 649, 650, 651, 657, 659, 660, 661, 662: n = A,T,C or G
  misc_feature 663, 664, 666, 667, 670, 671, 672, 673, 674, 675, 676, 677,678, 679, 680, 681, 682, 683, 684, 685, 686, 687, 688, 689,690, 691, 692, 693, 694, 695, 696, 697, 698, 699, 700, 701,702, 703, 704, 705, 706, 707, 708, 709, 710, 711, 712: n = A,T,C or G
  misc_feature 713, 714, 715, 716, 717, 718, 719, 720, 721, 722, 723, 724,725, 726, 727, 728, 729, 730, 731, 732, 733, 734, 735, 736,737, 738, 739, 740, 741, 742, 743, 744, 745, 746, 747, 748,749, 750, 751, 752, 753, 754, 755, 756, 757, 758, 759: n = A,T,C or G
  misc_feature 760, 761, 762, 763, 764, 765, 766, 767, 768, 769, 770, 771,772, 773, 774, 775, 776, 777, 778, 779, 780, 781, 782, 783,784, 785, 786, 787, 788, 789, 790, 791, 792, 793, 794, 795,796, 797, 798, 799, 800, 801, 802, 803, 804, 805, 806: n = A,T,C or G
  misc_feature 807, 808, 809, 810, 811, 812, 813, 814, 815, 816, 817, 818,819, 820, 821, 822, 823, 824, 825, 826, 827, 828, 829, 830,831, 832, 833, 834, 835, 836, 837, 838, 839, 840, 841, 842: n = A,T,C or G
agnnngaccgcgtnctnngacttactntntggcnnattggagctccaccgcggtggcggccgaggtacgcggggagtatgagtagaaaatgtgacacagagataggaattagtcacataatgttggaaaaagaagaaacagtaaccaggaacgggaaggagtaaacagagcttttagttaaaacaggatcactgccagacacgatggctcatacctgtaatcccagcaccttgggagaccgaggtaggtggatcacgaggtcaggagttcaagaccagtctggccaacacagtgaaaccccatctctactaaaaatacaaaaattagctgggcgtggtggtgcgtgcctgtagtcccagctactccggaggctgaggcaggagaattgcttgaacccgggaggcggaggttgcagtgaaccgagatcgcgccattgcacttcagcctgggtgacaaagcgagactccatctcananaaaaaaaaaaaanaaannntttttctncnnggggggggnntttnaaaaatgggggnccccccggggnngggaaattttntttnnntttttttnnncccccccccntngggggggggccnggcccccnctttttntcccctttaaggggggttatttcccccctgggnnannannngggaanannnnnntnnggnnnnnnnnnnnnnnnnnnnnnnnnnnnnnnnnnnnnnnnnnnnnnnnnnnnnnnnnnnnnnnnnnnnnnnnnnnnnnnnnnnnnnnnnnnnnnnnnnnnnnnnnnnnnnnnnnnnnnnnnnnnnnnnnnnnnnnnnnnnnnnnnnnnnnnnnnnnnnnnnnnnnnnnnnnnnn

SEQ ID NO: 4031 - DNA, 865 bp, Homo sapiens
  misc_feature 4, 12, 15, 17, 18, 29, 630, 647, 669, 677, 680, 699, 734,760, 762, 770, 798, 822, 849, 857, 865: n = A,T,C or G
agtngaaccgcnttntnngacttactttntggctaattggagctccaccgcggtggcggccggtgattgctttccaaggccaccgagggtatctgagactcccaggccctggttggtcctgcctcttctccttcatagtgtcccagtgttgtcaggagggcgctggtggtagcttggaccttgtgtgccaacgcttcctcaggtctgggcctaacagcctccactgcctgggctcactcagggagcgcctcattatttgggcagccatggattctatcccagccccatcatcagttcagggacacaacctgactgaagatgccagacatcctgagagttggcagaacacaggaggctattctgaaggagatgcagtatcacagccacagatggcactagaggaggtgtcagtgtcagatccactggcaagcaaccaaggacagtcactcccaggatcctcaagggagcacatggcacagtgggaagtgagaagccagacccatgttccaaacagaaaacctgttcaggcactgccttcctctgccagccggaaacgtctggacaagaaacgttcaatgcctgtagccactgtagaactggaaaaaaagaagttcaaaactctgcctttantgccaaccccctacaangcctgaccaatcaggatttacnagaagganaanattgggaccagaagatgangacattggacccccaattaaaacacagtttcttanttcaaaaaaaattctgaattccccantnctgaaaanttaccaaaataccttcttgcaattaaangggccttcccaatggcaaaaaaanaaacatgccctttaaccaggaattttnaaaaaaantttttttn

SEQ ID NO: 4032 - DNA, 831 bp, Homo sapiens
  misc_feature 2, 3, 4, 6, 19, 22, 39, 290, 489, 540, 541, 542, 544, 545,546, 547, 548, 549, 550, 551, 552, 553, 554, 555, 556, 557,558, 559, 560, 561, 562, 563, 564, 565, 566, 567, 568, 569,570, 571, 572, 573, 574, 575, 576, 577, 578, 579, 580: n = A,T,C or G
  misc_feature 581, 582, 583, 584, 585, 586, 587, 588, 589, 590, 591, 592,593, 594, 595, 596, 597, 598, 599, 600, 601, 602, 603, 604,605, 606, 607, 608, 609, 610, 611, 612, 613, 614, 615, 616,617, 618, 619, 620, 621, 622, 623, 624, 625, 626, 627: n = A,T,C or G
  misc_feature 628, 629, 630, 631, 632, 633, 634, 635, 636, 637, 638, 639,640, 641, 642, 643, 644, 645, 646, 647, 648, 649, 650, 651,652, 653, 654, 655, 656, 657, 658, 659, 660, 661, 662, 663,664, 665, 666, 667, 668, 669, 670, 671, 672, 673, 674: n = A,T,C or G
  misc_feature 675, 676, 677, 678, 679, 680, 681, 682, 683, 684, 685, 686,687, 688, 689, 690, 691, 692, 693, 694, 695, 696, 697, 698,699, 700, 701, 702, 703, 704, 705, 706, 707, 708, 709, 710,711, 712, 713, 714, 715, 716, 717, 718, 719, 720, 721: n = A,T,C or G
  misc_feature 722, 723, 724, 725, 726, 727, 728, 729, 730, 731, 732, 733,734, 735, 736, 737, 738, 739, 740, 741, 742, 743, 744, 745,746, 747, 748, 749, 750, 751, 752, 753, 754, 755, 756, 757,758, 759, 760, 761, 762, 763, 764, 765, 766, 767, 768: n = A,T,C or G
  misc_feature 769, 770, 771, 772, 773, 774, 775, 776, 777, 778, 779, 780,781, 782, 783, 784, 785, 786, 787, 788, 789, 790, 791, 792,793, 794, 795, 796, 797, 798, 799, 800, 801, 802, 803, 804,805, 806, 807, 808, 809, 810, 811, 812, 813, 814, 815-831: n = A,T,C or G
gnnnancccgacgcgcgtnatncgacttactatatggcnaattggagctccaccgcggtggccggccgcccgggcaggtacatgggaaaagaggacaaagtggtgagttaaatcagctagtctgtagcaaggcatgtttccccagggactcaggtccccgcttcaagagaacctgttctggagaccccttccttgactgtgtctgctgtgctgggctgggacttagtggacagagacagcagcctgtaagccccttttcccaagtaaggagcaagggcacattgacatanaagcaagctgacatttcccaagggacgtaggaagtgcctgcacttcatgttttcagatgagtctgcaaaggaaaacagcagtggtacctcggccgctctagaactagtggatcccccgggctgcaggaattcgatatcaagcttatcgataccgtcgacctcgagggggggcccggtacccaacttttgttccctttantgagggttaattgcgcgcttggcgtaatcatggtcatagctgtttctgggnnnannnnnnnnnnnnnnnnnnnnnnnnnnnnnnnnnnnnnnnnnnnnnnnnnnnnnnnnnnnnnnnnnnnnnnnnnnnnnnnnnnnnnnnnnnnnnnnnnnnnnnnnnnnnnnnnnnnnnnnnnnnnnnnnnnnnnnnnnnnnnnnnnnnnnnnnnnnnnnnnnnnnnnnnnnnnnnnnnnnnnnnnnnnnnnnnnnnnnnnnnnnnnnnnnnnnnnnnnnnnnnnnnnnnnnnnnnnnnnnnnnnnnnnnnnnnnnnnnnnnnnnnnnnnnnnnnnnnnnnnnnnnnnnn

SEQ ID NO: 4033 - DNA, 858 bp, Homo sapiens
  misc_feature 4, 13, 17, 23, 30, 35, 41, 488, 614, 622, 657, 685, 692,701, 708, 732, 734, 735, 736, 737, 738, 741, 743, 744, 745,746, 747, 748, 749, 750, 751, 752, 753, 754, 755, 756, 758,759, 760, 761, 762, 763, 764, 765, 766, 767, 768, 769: n = A,T,C or G
  misc_feature 770, 771, 772, 773, 774, 775, 776, 777, 778, 779, 780, 781,782, 783, 784, 785, 786, 787, 788, 789, 790, 791, 792, 793,794, 795, 796, 797, 798, 799, 800, 801, 802, 803, 804, 805,806, 807, 808, 809, 810, 811, 812, 813, 814, 815, 816: n = A,T,C or G
  misc_feature 817, 818, 819, 820, 821, 822, 823, 824, 825, 826, 827, 828,829, 830, 831, 832, 833, 834, 835, 836, 837, 838, 839, 840,841, 842, 843, 844, 845, 846, 847, 848, 849, 850, 851, 852,853, 854, 855, 856, 857, 858: n = A,T,C or G
agtngacgcgcgncgcntgatangacttantattnggccgnattggagctccaccgcggtggcggccgaggtaccatgcaattacagagcaacttcagctaatggggactccagcatcttggcatcctcgctgggtggagcagaagcgagcatggagcttccactcataaaccctttggcttgctagccacaactgatcacctagttttacgtaagtgcaaggggtggctggaagtagaggttccaagaaggtgcagaaagctgtctattagtgagcattaataatgtatgttagtgtttaacaagaagttgctggtaaagcgttttgtgcagtggctatcacatggaaaattttccaataaaagaaatatactattacagttataaataatgtccattagaataagcattacataactccttcaaatcaaaagacatatatttgaatatgtgatagccaatcaaatattatctaaaattaggaaggngggtccataggaactgaatatatatttttaaaaatggaaattgaaggagaaagaaagacgtcccagtttttgcttactgatagtaaggaaatgtccccggccgctcttaaaactaatggatccccnggctgcangaattccatatcaagcttatcgatccgccacctcnaaggggggcccggtcccaacttttggtncctttantgaggggtnattgccncctggcgtaatcatgggcataacngnnnnnttngnnnnnnnnnnnnnnannnnnnnnnnnnnnnnnnnnnnnnnnnnnnnnnnnnnnnnnnnnnnnnnnnnnnnnnnnnnnnnnnnnnnnnnnnnnnnnnnnnnnnnnnnnnnnnnnnnn

SEQ ID NO: 4034 - DNA, 856 bp, Homo sapiens
  misc_feature 6, 8, 9, 10, 14, 20, 21, 298, 301, 307, 310, 311, 315, 325,332, 342, 348, 370, 372, 376, 379, 398, 407, 434, 440, 495,519, 523, 560, 563, 587, 594, 604, 613, 637, 694, 696, 743,764, 768, 781, 798, 799, 801, 802, 803, 804, 805, 806: n = A,T,C or G
  misc_feature 807, 808, 809, 810, 811, 812, 813, 814, 815, 816, 826, 828,830, 851: n = A,T,C or G
cccgcntnnngacntacttnntggctaattggagctccccgcggtggcggccgcccgggcaggtactttgtgggttgagggtaggaggctaagactgccagggaggaggccccggcttcctgctcctaccggggagcagcaggtgaaactctgaccacgttactgcaatcctgacatgctccagtggagtggcgacatttttcttctcgaggcagcttttggggatctgtattactttcatgtggaccacttgctagttttgatttcaatgataatttcttccttccttttttttttnaancctgtnttnntagngataacaacncatttancatttgtttngatttnaccctctcctctctccccactntnagtntgnagccaggaaagcagggacntcctgtgcnaactgtcaaaccaccacaaccacactntggagnaggaatgccaatggggaccctgtctgcaatgcctgtgggctctactacaagcttnacaatgtaagtggactgggatcancaanaacagggctcgcttcctgatggggaccacaaaacagngtnccaccaccctttcaagtgaatccncaccatnggggcaaatnacaggtccnaataattgatgccataggacctancttggaaactactttttttaacataaccctccttaagcccaggggcttaaaactggnanccaaaaaaccccttggtttcctttggaacttcccaataccatgcccnaaaattccaattttcttaatngggnccttttgggtttntttggggaaaaaaaaannannnnnnnnnnnnnnnnaaaaaccccncncnccctttaaaaaaaaaagggtnccccc

SEQ ID NO: 4035 - DNA, 857 bp, Homo sapiens
  misc_feature 3, 5, 8, 9, 22, 23, 25, 26, 38, 42, 142, 474, 486, 528, 530,565, 568, 574, 583, 584, 585, 602, 610, 614, 619, 622, 623,628, 629, 630, 632, 638, 639, 651, 663, 688, 699, 700, 708,710, 714, 716, 728, 729, 730, 731, 732, 733, 734: n = A,T,C or G
  misc_feature 738, 741, 742, 743, 744, 745, 746, 747, 748, 749, 750, 751,752, 753, 754, 755, 756, 757, 758, 759, 760, 761, 762, 763,764, 765, 766, 767, 768, 769, 770, 771, 772, 773, 774, 775,776, 777, 778, 779, 780, 781, 782, 783, 784, 785, 786: n = A,T,C or G
  misc_feature 787, 788, 789, 790, 791, 792, 793, 794, 795, 796, 797, 798,799, 800, 801, 802, 803, 804, 805, 806, 807, 808, 809, 810,811, 812, 813, 814, 815, 816, 817, 818, 819, 820, 821, 822,823, 824, 825, 826, 827, 828, 829, 830, 831, 832, 833: n = A,T,C or G
  misc_feature 834, 835, 836, 837, 838, 839, 840, 841, 842, 843, 844, 845,846, 847, 848, 849, 850, 851, 852, 853, 854, 855, 856: n = A,T,C or G
gtngnccnnttgaacgcgcgtnntnngacttactatanggcnaattggagctccaccgcggtggcggccgaggtacgcgggattcagtaacagaaatctcccttcccttctttctctgatgtgcagtagttctgcctgttanaatcatctggagagcttgttaaaaataccaatgtcaggagctcgaccctagagattcaaatttaactgatctggtgtgggacctggaaatcctctattttttaaaagttccccagttgaggccaggtgcggtggctcacgcctgagtcccggcactttgggaggccgaggcgtgtggatcacttgaggtcgggagttcgagaccagcctggccggcgtggtgaaactccatctctactaaaaatacaaaaaaaattagccgggtgtggtggtgcacacctgtagtcctagctactcaaaagctgaggcatgaaaatcctttgaacctgggangcggacatccantgagctgaaatcatgccacttgcacttccacctggacaacanantgagaattcattttccaaaaaaaaaaaaaaaaaanttnttttgncgggggggnnnttttaaaaaatggggancccccggntggnggaanttnnttttnnncnttttanncccccccccccngggggggcccgnccccaattttttttcctttttagangggtaaatttnncccctggngnaaananggggcaaaaaannnnnnntttnggnnnnnnnnnnnnnnnnnnnnnnnnnnnnnnnnnnnnnnnnnnnnnnnnnnnnnnnnnnnnnnnnnnnnnnnnnnnnnnnnnnnnnnnnnnnnnnnnnnnnnnnnnnnnnnnnnnnng

SEQ ID NO: 4036 - DNA, 934 bp, Homo sapiens
  misc_feature 79, 193, 202, 224, 326, 381, 399, 416, 422, 423, 425, 454,493, 501, 520, 522, 541, 550, 554, 555, 563, 564, 569, 577,578, 582, 590, 605, 606, 610, 611, 612, 621, 626, 635, 645,652, 655, 673, 675, 676, 680, 681, 683, 684, 686, 689: n = A,T,C or G
  misc_feature 691, 694, 697, 706, 708, 709, 715, 716, 725, 728, 732, 746,752, 757, 758, 763, 766, 767, 768, 775, 795, 799, 804, 826,827, 830, 842, 843, 844, 845, 856, 875, 878, 881, 884, 893,913, 915, 917, 919, 920: n = A,T,C or G
ttgggcgaattggagctccaccgcggtggcggccgaggtacttttttttttttttttttttttttctgttttgttttgncataaataagggtatcacagggtagaagtaggatagaacataggcctaaaacccctataagcccattgtctgagctgacctccacagactggtgagttttatggttctcatcanacccgcatntatttaagacaaactgggctgngggtccctgaaatgaaaaccggatgagggtctcctttcgtcttgctttatgcccttcagagtttgacttgtaaccaaagagggagcattctcccttggtctntgcctctgggggtgtgattttcaggtcacgttccagtagctagtctaaaaagcantgggaatcctgaaccatngtcaaaattttaaagcngcactnntnttttttttccccaaaatgtgcccaaagcntgtcaagggggagttcttgtccctaaaaaagggagtttnttattccnttgaaaggggcttcttggntngccttccatttttttgttnggcctgggnttanngcctgggnnaaagntctaaaanncccnttgaaaanggccctgccccttgnnggtnnncaaaggcgnttcancaagggttnggccagggtnttttganctnaaaaaggcccccccccantnntggnncnncntgntnccntgntgcctccantnnggggannaccaagttnacncccnttcttttaaacccngcttgntgggnnaacanggnnnatcttgntattttttaaactttatttntttnggggngagaaaaattttgggggggggnntcnttaaaagggttnnnnttttttccccncccttttataaaaaaaagnatnccnaantttttggtnttgttgttgtttttaaaatnanancnnccccccccccccct

SEQ ID NO: 4037 - DNA, 952 bp, Homo sapiens
  misc_feature 9, 20, 24, 25, 27, 36, 38, 42, 72, 74, 83, 162, 228, 282,304, 377, 398, 437, 451, 453, 476, 503, 521, 555, 563, 578,587, 618, 636, 637, 650, 652, 658, 662, 680, 693, 694, 697,707, 711, 723, 724, 756, 765, 777, 794, 804, 818, 821: n = A,T,C or G
  misc_feature 823, 832, 840, 846, 847, 855, 857, 858, 872, 873, 884, 894,896, 907, 912, 914, 917, 920, 922, 927, 930, 934, 940, 941,942, 950, 951, 952: n = A,T,C or G
gaagttaantctttgaaatncccnncnattttgtananggcnaattggagctccaccgtggtggcggccgtncnggcaggttntcggggagactttccctgccggcacatgggcctggtccaaccctcacagccagtagacgagctggagctctcggtgctngagcggcagccagaagagaacacgcctctcaatggtgccgacaaggtcttcccttctttggacgangaggtccccccggccgctctagaactagtggatcccccgggctgcaggaattcnatatcaagcttatcgataccgncgacctcgagggggggcccggtacccaacttttgttccctttagtgagggttaattgcgcgcttggcgtaatnatggtcatagctgtttcctgngtgaaattgttatccgctcacaattccacacaacatacnagccgggagcatanantgtaaagcctggggtgcctaaanaagtgagctaactcacatttaatttgngttgcgctcacttgcccngctttccagttcggggaaaccttgttcgtgccangtttccantttaaatgaaattcngttcaaaanccctccgggggaagaagggccggtttttggntgtattttgggccgcctnntttcccgcttttncntctggnttcnacttgacttttgcttggngccttccggtccnnttncggcttgccngccnaagccggtaatnnaaccttactttcaaaaaggccgggtaaatacngggtttttnccacaaaaaatnaaagggggaataaaccncaatgaaaanaaaacatttttaancananaaggccccnccaaaaanggcccnnggaaaccngnnaaaaaaagggcccnntttgcttgggngtttttttcnantaaggcttccnccccncnttnacnangcctntanaaanaaattnnngcttaaannn

SEQ ID NO: 4038 - DNA, 884 bp, Homo sapiens
  misc_feature 320, 333, 335, 336, 386, 463, 471, 490, 491, 514, 533, 537,545, 559, 560, 568, 571, 580, 589, 597, 607, 622, 644, 657,676, 694, 701, 708, 714, 724, 729, 748, 749, 751, 753, 758,766, 775, 777, 781, 783, 792, 800, 801, 803, 806, 808: n = A,T,C or G
  misc_feature 809, 816, 822, 838, 839, 850, 860, 862, 867, 871, 881: n = A,T,C or G
ggcgaattggagctccccgcggtggcggccgcccgggcaggtacacagtgggcgctggggaccagggccagagagtggccacctgttagagctgcatgtgtgtcttgggcctggtcttctttctctgctcactaatgacagctgtcccagcctcttgcaggctctggcccaccaccttgcttgctgtgatttttttttttttcctcacacatgataagctgaggcaggagaatccgcttgaacccgggaggcggaggttgcagtgagccaagattacgccactgcattccagcctgggcgacagagcaagactccgtctnaaaaaaaaaaaanannaaaaaaaaaggtgacaagcagagcaagcgcatctaggtgacacccggganatggaatcgggacggcaggatgagcatgggtttgtggcgaagaaaacccggggcaataatggacatacaatgcaaantttgccanagtcagcaaaaagcctatnnggtagaaaattgccaaagaacanaaaaaagaggggaagggtnaacncctagtgnaggctactttgctnntgacaagncangcccgggcnattaagggngtggtttncacttgggangtgaaaggaaagggngggaaaccctggaggggggaanaatgcttggggancccttttcaaaatcccccnctttttcccttggaaacncaaaaantaaaaancccccnaggggttctnacttntttttttttcaccctttanngnanaacanggggggcntttttaacncntggngntttttaaancttttatnngnctngnnggccccngaaaanaaaaaattttccgggnncctgggggggnaaaataaaananagaantttnttttttaaanggg

SEQ ID NO: 4039 - DNA, 919 bp, Homo sapiens
  misc_feature 2, 7, 9, 12, 168, 474, 497, 503, 507, 518, 542, 543, 565,567, 599, 625, 642, 646, 647, 649, 655, 659, 660, 670, 671,675, 692, 695, 696, 711, 717, 732, 744, 745, 762, 777, 778,779, 781, 784, 785, 791, 827, 832, 846, 852, 854, 869: n = A,T,C or G
  misc_feature 890, 898, 899, 902, 905, 912, 914, 916, 919: n = A,T,C or G
gntagtntncgngcgcgcgtaatacgactcactatagggcgaattggagctccaccgcggtggcggccgaggtaccagtaggaaattggggaagagccaggaagggacagcagccagtaaagtgggcattatcaaatcagttaagcattgtgggcacctggagcttantcacactgggggactcttatacagcatggaatgcttgtcttgtggttgacccatcctagaggcaagggagtaggtatttattcaccaaaatctgtcaggcatttgttggggactgccttcagaggcaaatgattccctgtcatttcaggactatcacttgggcagccaagagtaatcctccaggcaaaggaatgcaggtgttggcagtcaaaagacaaggtggtgggcgctgaagtggtgccatgggagtatagtcgaggcaccaagcagcatctaccagcagggcagcctgtaaccccgactttncacctgaggatttgttggccctnattttnggantttttgcattngtttctcatggagggggcaaactnngtttaagcttgggaaccacttnancttgaccccacaccaagcatttttgatttttngggattcctaacttaaaagaagggantccccttttgaaccaangganntnaccagnccannattcttccannttgnctttcttaataccccanttnntttttcctcccaatnactgtntttaatttttttttnaaaaaccctttnnttttccaacctgagaanaagccttacttggtnnntnggnngaagtnccattgcttttttttttcctaaataacctttggttnttttnactttttaccattncccccntntttccccctttgaancaaaggtttttttaaaccttnaaaacttnnttnganaattttnananaan

SEQ ID NO: 4040 - DNA, 905 bp, Homo sapiens
  misc_feature 2, 9, 481, 489, 513, 590, 602, 634, 659, 673, 679, 681, 684,688, 699, 702, 703, 716, 742, 745, 751, 767, 774, 782, 789,794, 797, 800, 803, 820, 827, 834, 837, 840, 849, 851, 853,863, 864, 871, 872, 879, 883, 886, 898, 904, 905: n = A,T,C or G
gntggtttntccgcgtaatacgactcactatagggcgaattggagctccccgcggtggcggccgcccgggcaggtactgttttgtagagacagggttttgtcatgttggccaggctggtcttaaactcctgacctcaggtgatccacccgcctcggcctcccaaggtgctgggattacaggcatgagccactgtgcccggcttatttcctcttttaaaacttactattattattgtcattctcaaactattatctcataaacgttatattgtctatatcagatattcagtgtgggctatgttttttaaataacagatggtatttgaatatataaaagatataaatccttttcaaaatgttgctttgtctatttttctgaaaagtttgacaaccatctgtagagcttttgcagaagactttttttcttccctcacttttagtctctttaaaatcaatgactatttttattctgcttggtcangcaagtangccctttgattttacaacagcctntattcccatggaaacacacacaaacacacatacatataatttcattttttgcctttaaaaatttcttttttttttanttatcaaaggtnaagaaagaccatagtttattgggtcctaaaangattttttgggaattcattccaggntctttttaaaaccnaaacantnganttgnagttttccagnaannggggtttttgttnaacaccattttaattgggccattaanttntttggnttaagccttctgggcntttaaanaaattggnaattttnaaccnaantgnctngccctgggggtataaanaattttnccttttnccntgnacacttctncnanttttatttcnnaaaaatnncaaaaanattnttntggagggggaanttcttnn

SEQ ID NO: 4041 - DNA, 855 bp, Homo sapiens
  misc_feature 2, 3, 6, 7, 8, 10, 11, 594, 600, 617, 645, 668, 693, 709,751, 770, 772, 783, 809, 813, 818, 822, 836, 838, 840, 848,855: n = A,T,C or G
gnnagnnntnncgcgtaatacgactcactatagggcgaattggagctccaccgcggtggcggccgaggtacggtaatacatacaccaagaacagagacagttacaaaaacaagtaagtgttgatataggcggacccacaaacaagaatgtaaacataatcagatagaaattatctgctaaaatacatttgtctatgccaataggcattttacttaacaataggttatcaaagagtcaatctttgagaacatatttcatattttctcttcattatctaagaaatgtgagctattgaaacacaatatatcttaggcaacttttttttttctttccagaaaatctggctctgaactgaatacatgtagtgctttggtttataaagattatagaacgtattttttttttcttacaagggttgcccagacttatttgggatggtgaggttctaccatataggaacgaggcagtagtagcatacatactgaagcaactgctgtgcttacagactagtaagcacaatgggaaacccagctcttaagatgatcattcaggaatgttgttaagacagacagggaagtatttcaaatttacggngttctnaaaagaaaaactattgngcttatggaaaaattgcttgcggttacntttcacccccttccaaaaataantgggaataaggaggttctaaaattncctcttctcatgggangaaaataaagttttaacagatggatttccaaaaataatgggnttccgggggacagggctantngtaaattaagncaataaatttattcaatttaagcttnttgntgganaatnaacctccatacctnancncttggctntggccan

SEQ ID NO: 4042 - DNA, 835 bp, Homo sapiens
  misc_feature 5, 6, 8, 9, 615, 682, 691, 712, 730, 753, 757, 759, 795,798, 811, 835: n = A,T,C or G
gaagnntnngacgcgcgtaatacgactcactatagggcgaattggagctccaccgcggtggcggccgcccgggcaggtacgcggagggaaggcagctcttcaaaggaaaggatgcttggagacagaacactggacttctttcttgcgagccttccccaacctccccaggagtcaagcgcttcctcctgggtgcttccggaagtcgtcattaatacctctcttccagcatgagttatggcaccactgtggtttttctgatgatgtgccttctcatccatccaattcaagttcccagcaggcagtgattttgtctgtctgccctccatatccaccctccaccctttccccactgctctcccatgtggatggcaccctggtgtcctgtgccctctggcttctgggggcatttggccaatgcggctcaccatcagcaggagatgagagctgagctcttggtctctctggcagcttccctacagggttcctgtgagctggtggcctcctgactaaaggcgacaagcctctttgtcaagaagtcccccacataacttcaagttctggaagcagcttcctttccttaaccttgcccaccttgttctgttgttcgtggccctngagtctgcactatcttcttaatgggtccctatactctgccaaactgaaataatatgtcctttatttnaaactcttnttctacgaaccaattcggggngtgcccttcaacaacctngttcctggctggactgtgggcanacantngtcccgtttcatttttattggccccaagaatccaanttnaatgcccttccanaaccacaaggtacccttgggccgn

SEQ ID NO: 4043 - DNA, 858 bp, Homo sapiens
  misc_feature 1, 516, 532, 563, 648, 654, 663, 670, 677, 703, 704, 715,716, 721, 726, 729, 732, 734, 744, 763, 773, 776, 787, 798,812, 813, 814, 817, 820, 822, 823, 824, 833, 834, 835, 836,838, 841, 844, 846, 847, 848, 851, 852, 853, 854: n = A,T,C or G
nactcactatagggcgaattggagctccccgcggtggcggccgaggtaccagcaagttcctttcaaaggtctgtggaccttcacagagtttaagctataaatcaatagttgctgggcctcaggggaaaggagaattggtgaatcctggcagcctcacagactttagaaatcagaaggcccagacagattctaattgtaaatgaggctgtaggtttgtttttggatttttgttttctacttttagtaacatccagaatgagttactgcccttccaaggaaggccatccattccccaagcaattcagtgtttgaattgtgatgctgcatgccccagtctcattacaaacaaacagagcagtgctgcggcaacctggcaacgtccttaaatgaccccctccacactctgccaggccctgggtgtctccaccagcatacaggctgtgtagaaagcagctctcctagtgaccagggtcactgctgcagtttcaagtggtttctccacaaaatatggccctngaagaaggctgctcancttacagaaacctggcaggtggcccttcctnggggaatgagtgacctcatggcagcctcttctggggcagtctctctctaaggatagaaaggggccagacaaggcagggaatttgncttcantgccccaangggccangtgaaanggatgccgaccttggacccaagggtnnctttgaaaccnnctgcntcaanggngtntnaaactgggancccaaaaaaaggccccaangatggggggnctnggggggtgggntttgctttagncacccttacttgannnagnaantnnnttttacctnnnnantgnaantnnntannnnttct

SEQ ID NO: 4044 - DNA, 829 bp, Homo sapiens
  misc_feature 1, 186, 377, 446, 469, 519, 576, 602, 626, 642, 647, 651,652, 653, 673, 691, 699, 719, 734, 747, 751, 753, 756, 776,779, 791, 796, 798, 809, 812, 814, 815, 817, 826, 828: n = A,T,C or G
nggcgaattggagctccaccgcggtggcggccgcccgggcagggtactttttcttcttcttcttttttttttttttaaagagaacatctgaatgatgtattcggaaaaaaacatttcccaagaatatggagaaagggaattgaacataattcccagtgtaagagtggaatgagcatgtggccctgngggcctagtcccagtttgttaatcttgtgagcagagctgctggcggctgctctcagtccgctaatcgggctctttctctgtcacgtggacaggagactgctcacagggttgcagttggctgctgccctgcgttgacagctggttctaattgtgcagagctaccgtagtacctcggccgctctagaactagnggatcccccgggctgcaggaattcgatatcaagcttatcgataccgtcgacctcgagggggggcccggnacccagcttttgttccctttagngagggttaattgccgcccttggcgtaatcatggtcatagctgtttcctgngtgaaattgtatccgctcacaattccacacaacatacgagcccgggagcataaaagngtaaagcctgggggtgcctaatgagngagctaactccattaaattggggntgcgctcactggcccnttttncagnnngggaaccctgtcgtgcccancttgcattaaatggaatngcccaccnccccggggaaaaaggccggnttgcctaattgggcnccttttccccttncttngnttnacctgacttcgcttgccctnggnaaatccggcttncggcnanccggattcacnttncnnanaaggcggtnant

SEQ ID NO: 4045 - DNA, 837 bp, Homo sapiens
  misc_feature 388, 467, 595, 618, 624, 646, 666, 697, 698, 727, 737, 746,751, 756, 760, 765, 766, 768, 777, 784, 790, 793, 794, 795,801, 813, 816, 824, 826, 835, 836, 837: n = A,T,C or G
atagggcgaattggagctccaccgcggtggcggccgaggtaccattcattacctgtcttcagcaactaccagcaaatggccaatttgatgtcatttttgtgtcaacctactaccttctaagccaattggattatcttccaaaacatcccagaccttatatcctgtcacacataagtatttcagaatctaaggtagtcttatctaaggtagtcttttatgccatcttatgcctttatgtgtccaattattttctgttaaagttcctcatttctcctccatattttccattttaacaaaagccaactcttctgtgggcttttttttctttgtatacacatggttccagtcaccctgaggtcaagctgctgcaatgctttatttaccttgnagatattgggtatatttagtattcctcttatctgcaagctaagggagacaaaaaataacaaaacttcttaatctgcttnctttcctttttctccttgggttggacttcctactctctgcctctggaagctggcaaactgacagctcataaatcggcattctctgaaaccaggaagaagcctcttttctctttcttcagctgcaaaanaagggggctggcatgtctcaaangaaaanaaggggttaaagcccaactggnttctctacctggggaaaaanccttgggggcctaaaggagacctagcagggnntttcctcccatgacccctttatggcaagnaaaggagctnccctaactnctttnggggncaanggaanncnacacagggnccccaanaacccncannnggtctngaaggttggccncanaacctttnanttcccaaannn

SEQ ID NO: 4046 - DNA, 1105 bp, Homo sapiens
  misc_feature 4, 6, 11, 12, 13, 15, 19, 22, 26, 27, 30, 31, 36, 37, 40,45, 49, 50, 53, 56, 57, 60, 66, 68, 75, 79, 80, 84, 87,88, 89, 90, 91, 93, 94, 95, 103, 456, 505, 527, 567, 584,603, 628, 629, 645, 667, 688, 689, 699, 712, 734, 777, 778: n = A,T,C or G
  misc_feature 790, 795, 809, 818, 827, 835, 844, 861, 863, 864, 894, 897,901, 902, 925, 926, 927, 940, 942, 952, 955, 964, 972, 980,1002, 1005, 1009, 1015, 1028, 1032, 1038, 1040, 1050, 1052,1055, 1057, 1060, 1062, 1070, 1071, 1082, 1083, 1085: n = A,T,C or G
  misc_feature 1095, 1100, 1101, 1104: n = A,T,C or G
cccntncttannntntatntcntaannaanntatanntantttgnaganncgnaannaantaatanangaattanaaannggtnttnnnnnannnatctctcntatagggcgaattggagctccaccgcggtggcggccgcccgggcaggtactttaggagacccaggcgggcagattgcctgaggtcaggagtttgagaccagcctggctaacatggtgaaaccctgtctctactaaaaatacaaaaattagccgggcatggtggctcacgcctgtagtcccaactgcttgggaggttgaggcaagagaatcgcttgaacccaggaggtggaggttgcagtgagccgagatcgcgccactgcactccagcatgggcgacagagtaagactccatctcaaaataaagaaggaaagaaacaaagaaaagaaaagcttattattgaaccttctctaanaaaaaagaaaaaaaaaagaaagccttccgcgttaccttcgggcccgctntagaacctagtggggatccccncggggcttgcagggaaattccgatatcaaggccttatccnatacccgtcggaccttnggagggggggggccccggnaccccaagcttttgttccccttttnnttgaaggggttaaatntgctccgccttgggccgttaantcaatgggacattaggcttgnnttcccttggnggtggaaaattgntttattcccggcttccaccaangttcccaccaccaaaccattaccggaggcccgggggaaggccnntaaaaagttgtnaaaangccctgggggggtngcccttaantgggaggtnggaggctnaacccttcnccatttaaaatttgggngnnttggccgccttcaccttggccccgcctttnttncaanntcgggggggaaaacccttgttcnnngcccccctttgcnanttaaaattgnaanaccgggccncacccccncccggggngagaagggcgggtttttgcccntanttgngggccncctttttttccgntttncctcancntcacattggncntcncntgnancttcgggnncctttctccgnntnccgtgcgganagcgnnttnt

SEQ ID NO: 4047 - DNA, 1181 bp, Homo sapiens
  misc_feature 9, 12, 18, 19, 21, 22, 23, 27, 28, 29, 30, 32, 34, 39, 43,45, 47, 48, 52, 53, 55, 56, 57, 61, 63, 65, 74, 76, 77,79, 80, 81, 92, 94, 97, 98, 101, 105, 112, 117, 118, 123,127, 128, 138, 141, 154, 166, 187, 197, 213, 218, 422, 434: n = A,T,C or G
  misc_feature 502, 505, 522, 532, 551, 560, 571, 575, 580, 617, 620, 641,642, 653, 661, 673, 674, 676, 693, 711, 715, 731, 733, 748,752, 763, 771, 772, 773, 777, 780, 788, 795, 810, 814, 817,830, 836, 844, 846, 851, 859, 868, 869, 872, 874, 875: n = A,T,C or G
  misc_feature 882, 887, 888, 890, 892, 893, 894, 901, 903, 921, 929, 930,935, 941, 942, 943, 947, 949, 950, 954, 957, 958, 959, 976,978, 980, 985, 987, 991, 995, 998, 1005, 1014, 1023, 1025,1032, 1036, 1046, 1048, 1056, 1057, 1058, 1060, 1062: n = A,T,C or G
  misc_feature 1064, 1065, 1074, 1075, 1083, 1086, 1087, 1089, 1090, 1096,1097, 1099, 1100, 1102, 1105, 1110, 1115, 1118, 1119, 1120,1121, 1123, 1128, 1139, 1149, 1152, 1154, 1155, 1157, 1166,1167, 1171, 1172, 1177, 1178, 1179: n = A,T,C or G
ccctccccnacnaccttnntnnnactnnnntnanaaccntacnangnnaagnnannntaanananactataacnanntnnnaacaattcacncngcnncanagcnggttaanccttnncagcngcannccacttcctntanggctgaattgtanctccaccgcggnggcggctcgaggtacagcatnctgttaagtnacctctaaagccctgncagtnaactctgtcagaaaataaaacagaatgtcattattaggaaaacaagaaagcccaaactctctagtttttttgtcttaataaactgaaattttatgtgtggtttctgctgaaatgttaatttccaagcatagttttaatgaatatgctttacagaaaaaaaaatcatgtttgtatttcacaataaaaaattctgaaaatggattntcttcacattantctcgaatgtgcaaaaaataccttggagaattcttttaaaaaaaaatcttggttatttttaaattttnttnttataaggcccgaaagnaaggaaattnaaattttctattttcaccnaaaaacaanaaaaaacaggntccntttgntttattatctgggaaaaaaaaaccattttttaaaaantgntccccctcctggatccaaatnnaaatatttagnaccattantgggtggtttgnntnataattaaaaatggtantttttctttccccccaanaaanttaatttttacctttngnaatttttccaatggntttnggtgttttaantttaaaannntaanaanattttccnaaatggnggaaaaatttggctnttcnaantttaataaaaggncctttnaccatttnanaaaanaaaaaaancccaacccnnggncnntgggganggggnntncnnngccccantnaaataccccaagtaaccncttcgggnnccggnttctcnnnaaancnnaggnggnnntgccccccgggggcctngncnggganantttncganttntcaaagnctttttttnattacccgncnctgcacntttngagggggggngnccccgggnnncncngnncttttttgnncccctttntanngnnggggtnncnntngcnccacntaagnagnnnntntctcntactcattagnccgggttccncancnncnaaaccttgnnttanncggcnnnct

SEQ ID NO: 4048 - DNA, 822 bp, Homo sapiens
  misc_feature 603, 616, 617, 643, 663, 665, 668, 670, 677, 702, 705, 712,713, 719, 721, 722, 725, 738, 741, 748, 771, 773, 781, 782,816, 818: n = A,T,C or G
gaattggagctccccgcggtggcggccgcccgggcaggtacttagcactggttttcaagctgaaaagtaagtataagtcagcaataaatagttgccatttatgaatacacaggacaaagaaaattgagcacctagtggctgatgtttgcaaaatattaaataacttaagttcattgaatacaattagagtcaaattaatgaagcttagagatctagtgttatttaaactactagtagtgggccaagtgttgccattaacatttttttaatgatgaaatagaatagtaaaaatatgtttattttacctaataggttcattctagctttaaaaaaagtgttgtttcatgaagcttttgtgtattttgcatatatagataccccagtgtaaactgtatttgttactttggctcatagtccaaaaactcttgaaagccactaatctagcccagtgccttcatttcataggtggcaaaattaaacctatgggtcatctgatttgccaaaattcactcagggagttagtgataaaaatccttggggcttcaggactccaaggccagagattttttttaaaaaaaccaaacccaggccggggacatgggnggctcatgcctgnnatccccagcactttggggagactggnggcgggccggaccccctgangncanangttcggngacccagcctggcccaccatggcgnaanccgcttnnttaaangnnctnggcccgtcttaanacnaggggancccccgggccgcaggaattccanancaaagctnntcgatccccgccgccccggggggggggccccggncnccct

SEQ ID NO: 4049 - DNA, 878 bp, Homo sapiens
  misc_feature 19, 21, 28, 36, 37, 40, 64, 66, 74, 75, 384, 547, 593, 638,665, 670, 679, 702, 723, 745, 754, 755, 760, 761, 782, 818,828, 842, 843, 844, 848, 859, 875: n = A,T,C or G
gttgggcattgaagggccngnggtttgnatagggcnnatnggagctccccgttgtggcggccgntntactttanntaaagacggatttcgccatgttggccaggctggtctcgaactctgacttcaggtgatccgcccgcctcagtctcccaaagtgctgggattacaggcatgagccaccatgtcccgcctggtttgttttttaaaaaatctctggccttggagtctgaagccccaaggattttatcactaactccctgagtgaattttggcaaatcagatgacccataggtttaattttgccacctatgaaatgaaggcactgggctagattagtggctttcaagagtttttggactatgagccaaagtaacaaatacaggnttacactggggtatctatatatgcaaaatacacaaaagcttcatgaaacaacactttttttaaagctagaatgaacctattaggtaaaataaacatatttttactattctatttcatcattaaaaaaatgttaatggcaacactttggcccactactagtagnttaaataacactagatctctaaagcttcattaatttgactctaatnggtattcaatgaacttaagttatttaatatttttgcaaacatcancccctaggtgcctcaatttttctttgncctgngtatttcanaaaatggccaactattttaattngcttgccttatactttacttntcaagctttggaaaaacccagngcctaagtnnccttnncccgggccggcccgttctaanaactaaggggggatcccccccgggcctgccaggaanttccatattnaagccttattcggnnncccncggaccctcgnagggggggggcccggngct

SEQ ID NO: 4050 - DNA, 859 bp, Homo sapiens
  misc_feature 58, 371, 423, 433, 494, 510, 577, 611, 630, 647, 659, 660,670, 671, 690, 709, 734, 744, 759, 769, 784, 788, 791, 800,803, 812, 829, 830, 832, 838, 840, 847, 857: n = A,T,C or G
tcactatttggcgaattggagctccccgcggtggcggccgaggtaccaataccacctnagccacgctgaaaactcacgagcaagaaggaagtgcttatttctatctgccttatttttgtagttgttacgcagcaatattatggcaagagttaacagatatacaacttaaatttcaaaaaatagggaatttaataaattgcaacacatcacatagtattaaaccgtcattattattaatgacaatgatctatatttatatatacatgggatatgtctaaaacattaacaaaaaaagtggcggggcatggtggcacatgcctgtaatcccagcactttgggaggccaaggtgagtaagatcgcttgagctcangagttccgagaccaaccgtgggcaacataagtaaggactttgtctctacaanaaataacaanaattaagccaggcatccttggcatgtgcctgtggtcccagctacttgggaagccttgggtngggaagatcccttganccatctgctgccttaacctcccaaattgctgggaatgcaggtgtgagccactgggcccttgcacatntttggctttctttattggaccagaattcttgcantaccctggggacctttatnccttggtttaaatgggntggttcattgannaacaaaggtnncaaagttctctcaatgganaccaaaagtcttttcaatnggagaacaaaggttcacaaggtcancctaaaaacntgtaactttttggangggaaggccntccatggccccaaanaaanttntccttgaanggncctttggtncctgcccgggcgggccnntntaaaantngggggancccccccccncc

SEQ ID NO: 4051 - DNA, 883 bp, Homo sapiens
  misc_feature 139, 419, 451, 470, 476, 495, 548, 551, 559, 561, 583, 591,598, 599, 600, 619, 620, 631, 632, 640, 646, 648, 656, 658,663, 671, 673, 674, 679, 687, 688, 694, 699, 701, 718, 721,722, 730, 738, 739, 740, 743, 747, 749, 750, 752, 753: n = A,T,C or G
  misc_feature 758, 760, 782, 784, 785, 786, 796, 801, 802, 811, 815, 816,820, 822, 823, 829, 832, 835, 838, 839, 840, 850, 852, 855,859, 862, 881, 882: n = A,T,C or G
ggcgaattggagctccaccgcggtggcggccgcccgggcaggtacattatccaagagagaacacaagagtttaacagaagtgacaggagactgcaaaaactagaaaggaaaagaaaaacagccagcctgtgtgaccaanaccagctggaaatcaggagtgactctataatacaggagaaagtaagcaatggcttttctgtggtccattttctcactggggaatcatacaatctagatcttgggagagcattttgaccctctcaatccctgaatctagcatagggagcagtcaggggactgagacaaggaactgctcaagggagggaaaatgcttttagttccacacccttcctgaagcctaagcagctatagcaagatgccattgttaatcctagctcttaatagaagtgttcatggtncttgttaccagggttgccaatcccaggcattnaggaaactcaagctgctgnttcacnggaactggggcatgagcanggagagggctaacaccaaccaagactgagaaaccaagcatggcattgggagtngcnttccaatngncatttgaaagtaaggcatttancccccaanaactttnnnccaggggtggacaagttgnncacaaaggggnnttttgggntttttnancctggggngnggggnttctcttngnnccccnggggtggnncctttnagaanancccttttaaattttctnttnnttttggcnaaaaaaannncanaaantnncnnttggnanccgggaaaaaaggggggggggncnnngccccctttnggggnnttggccttntcanngggntnnaaaagnttnccnaannnaaaccaaatnanaantttnggntgggggggggacacccctnnt

SEQ ID NO: 4052 - DNA, 903 bp, Homo sapiens
  misc_feature 552, 561, 606, 623, 627, 639, 648, 672, 673, 674, 676, 680,686, 695, 706, 722, 723, 728, 744, 748, 754, 757, 762, 770,792, 797, 801, 807, 810, 812, 820, 821, 828, 838, 839, 845,854, 858, 859, 867, 876, 879, 880, 889, 892, 893, 894: n = A,T,C or G
  misc_feature 903: n = A,T,C or G
ggcgaattggagctccaccgcggtggcggccgcccgggcaggtacctctgctgcatcaacagggtgcagtggaagctaagcctccactcccacttaatatcaatgaggtggaatgaggtgctctgaagacatactggtgacactcagcttcttcttttccactgtcatggtgtcactggggcccagaagggagctgaacttctatcaccatcgtgcagtaacaaagttgtgggactcagccctcctcctccttctcccaggtggcagtgaagaccatcgggaaagtgaccttctacctcaactcaagacaatcaagacaatgaaagcaagttggtgccctgcttttgctaggaagggtcagcagcaccaagtggggagctgaatgttcaccccactgatttgcaatgaggcactatgagtaaagtgacccattttttattggtgttttattggtggtgcccaacagaaagttaaacatacacaccgatcttagccttcataaaaactgacacttcaaaagataccacactcaagagaaaatcattatgttcngggatttantttgacaattggatgtttaaaggccagtcattgaaaaatgctttnaaacaaagtaatttacnaaanttcttttttggntataggatnaaaaaaaagggaaaaaaattttcnnncnaaangaattngaaaatttntttttaaaaantaaccgaattgggaanngacantaacctggaaaaaatngttnatttanccnaaaangaaaaaanttttctgggatttggctttaantagtngaantggggngantngaccaganngacctgnaaccaaattnnaccttnagggaccancctnncataaaangttttaccnttnnttttgaacnatnnnaaaagaaan

SEQ ID NO: 4053 - DNA, 863 bp, Homo sapiens
  misc_feature 1, 2, 4, 20, 22, 27, 37, 204, 508, 526, 547, 635, 636, 653,654, 677, 694, 708, 713, 714, 717, 723, 726, 729, 734, 749,761, 782, 784, 787, 791, 792, 810, 814, 816, 820, 827, 829,842, 844, 846: n = A,T,C or G
nncngcttcaccccttttgnanactcnctatagtttngaattggagctccaccgcggtggcggccgaggtacacatctaatgacatcttacttaatacagggtttttttctttttgagagggtcttgctctgttgccctggctgcagtgcaatcatggctcactgcagcctcaacctcctgggcttaagcgatcctcccacctnagcctcctcagtagcatgggaccacaggtgtgcagcaccacacccagctaatttttctattttttgtagagatgaggttttgctatgttgcccacactggtaattttggttcttttatggcaattattccttcctttacctccctgaggatcttaaacatacactttaaaattgttctattatttacacctatagactaaggattcacttgagtatcaattattcccactcctgcaaaaaagaaaacatactataaatactgtttcatgattcccattttttcccactaagcaacaaaacttangagatatttctgtatcanaacctgcccgggcggccgctntagaactagtggatcccccgggctgcaggaattcgatatcaagcttatcgataccgtcgaccctcgaggggggggcccggtacccaannttttggttccctttagnngagggggttaattgcgccgcttngggcgtaattcaatggncataggctggtttncctgnnggngaaaantgnttntttcnctcaaaaatttccanaccaacataccnaaccccggggagccattaaananggnaaanncctgggggggggccttantgangngggngcttaantnaaaatttaaattngngnttgcgcccccatggccc

SEQ ID NO: 4054 - DNA, 832 bp, Homo sapiens
  misc_feature 281, 534, 642, 647, 676, 680, 684, 688, 700, 716, 720, 726,733, 739, 766, 769, 778, 782, 791, 802, 809, 828, 829: n = A,T,C or G
tcactatagggcgaattggagctccaccgcggtggcggccgcccgggcaggtacagaggacaagccccactttattcggagttaacctatggtgcagtggccttagaaaaacttaagagtaaaaagctaccataaaaaatgctggttatatgtatgaccagacggtcaactcctccttcttctctctctttgctataacagcacctgttggcttctaagtgcacagagttctcacaacaatgtgccaaaaccgccacccttcccatcctggcacccacctncccccaccccaggagacctgcatatcagatattacttcctgctgtctatgaccacaccaccttggcagttaacatcaaaagcaaacacatggggagaacagaaggcactggagcagcgggggaagaacaagcataggtaatgtttcataaacatttttctggtgcccaggtgcaaaaaccttggaacttcacatgtatttcagctgatcatctaaggacccaccttctttcttccaagataagtgagctgaangcccttccctgcctccactcccagtgcttctgtacctcgggccgtctaaaactagtggatcccccgggctgcaggaattcgatatcaaacttatcgatacccggcganctcgnggggggggccccggtacccaacttttgtncccnttantgangggtaatttgcnccttggccgtaatcangggncaatanctgtttncttggngaaaattggtattcccctttacaaatnccncacaaacanaccnaccccgggngccataaaatntaaaagncccgggggggcctaatganngag

SEQ ID NO: 4055 - DNA, 879 bp, Homo sapiens
  misc_feature 537, 635, 647, 678, 700, 714, 718, 722, 737, 751, 765, 769,774, 780, 783, 788, 790, 799, 812, 834, 840, 852, 855, 856,860, 865, 868, 876, 878: n = A,T,C or G
ggcgaattggagctccaccgcggtggcggccggggggacctcctcgtccaaagaagggaagaccttgtcggcaccattgagaggcgtgttctcttctggctgccgctcgagcaccgagagctccagctcgtctactggctgtgagggttgggccaggtccatgtgccggcagggaaagtctccccgcgtacctgcccgggcggccgctctagaactagtggatcccccgggctgcaggaattcgatatcaagcttatcgataccgtcgacctcgagggggggcccggtacccagcttttgttccctttagtgagggttaattgcgcgcttggcgtaatcatggtcatagctgtttcctgtgtgaaattgttatccgctcacaattccacacaacatacgagccgggagcataaagtgtaaagcctggggtgcctaatgagtgagctaactcacattaattgcgttggcgctcactgccccgcttttccagtcgggaaacctgtcgtgccactgcattaatgaatcggccaacgcgcnggggagaggcggtttgcgtattgggcgctctttcgcttccttgcttcactgactccgcttgcgctcggtccgttcggcttgcgggcgaagccggtatnagccttcacttnaaaaggcgggtaaataccggttatccacaanaaatcaagggggaataaacgcnaaggaaaaagaacnatgntgangccaaaaaagggccnagcaaaaaaggccnaggaaacccgtaanaaanggccngcgttnggntggcngnttttttccnataaggcttccgncccccttgggcgaagcattacnaaaaanttcgacgctttnaanntcanagggnggngaaaaacncng

SEQ ID NO: 4056 - DNA, 918 bp, Homo sapiens
  misc_feature 12, 13, 19, 29, 37, 66, 69, 301, 390, 582, 604, 617, 625,645, 675, 678, 686, 693, 720, 721, 722, 724, 725, 727, 730,757, 767, 775, 797, 803, 804, 807, 825, 828, 829, 830, 836,839, 842, 854, 857, 879, 880, 883, 886, 888, 890, 891: n = A,T,C or G
  misc_feature 892, 904, 911, 915, 916, 918: n = A,T,C or G
ccttcccctttnncccccncacttttggnaaattgcngctccccgcggtggttgccgcccgggctngtncaaattttttctggacaatctgtgctgtgattttggaaattgtgtgtgaaagaggagagtagctgggccgtggtggctcgcgcctgtaatcccagcactttgggaggccgaggagggtggatcatgaggtcagttcaagaccagcctggccaagatggtgaaaccctgtctctactaaaaataaaaaaaatagccaggcatggtggtgggtgcctgtaatcccagctactcnggaggctaaggcagagaattgcttgaacccgggaggcagaggttggagtgagttgagatcacgccactgcacttcagcctgggcaacanagtgagactctgtctcaaaaataaaaacaaacaaacaaaaaagaagagagtgaaagaatttgagtccttgcacaagacaataactgttttttatgtttaaactttttagtttcttatgtttaaaactttttaatgtttaaaactttcaaaaaggtttgaaattaaatttttcatcttttattgccttgccantttattaaattaagccaaaaanttttcccttggantatggtcnaaaagggcccaccaaaaaanttaaatttttttaggctttaaaggtacccntcngggcccgnttctaanaactagtgggatcccccccgggccttnnnanngnaantttcgattatcaaagcctttttctgantacccgtctnacccttcnaaggggggggggcccccgggtnccccannctnttttggtccccttttaantgnnnggggtnaanttngccccccttggncgntaaacaaaggggcaaaaagctnnttnccngngnnngaaaaattttgnattcccntccnnan

SEQ ID NO: 4057 - DNA, 815 bp, Homo sapiens
  misc_feature 2, 593, 683, 695, 703, 725, 767, 777, 778, 786, 787, 792,797, 801, 813, 814: n = A,T,C or G
tngggcgaattggagctccccgcggtggcggccgcccgggcaggtacaaaatttgggggccccacctcacatcaggcaagggcagctcatttaaactctatttttatctctcctacacaatataccaagctgtctacaaggattgagtgaatccagatttcaaggtaaaaagaaagactaactgccacattaagccaaatctagaagcatgaaaaagatctacccctacagtaattaatctgaatcttgggccttcaaacctccaaaatttaggcccaatatactagaactttaggcgttcctctttggaaaaagaaaaccagaactagatacttgtagcccacacaaccaacctgaagactcttgaatcaggcatggctctctcggtaaataattaagaacaggctcagccaggcgcagtggctcatgcctgtaatcccagcactttgggagaccgaggcgggcggatcatgaagtcagaagatcgagaccatcctggccaacatggtgaaaccccatttctactaaaaataccaaaattagctgggtgtggtggcgtgtgcctgtaatcccagctacttcgggacgctgangcaccgagaatcacttgaacccaggaggtggagttttgcagtgagcccgagattgcgccactggcactccaacctgggtgacagaagaangacttccatttnaaaaaagnaaaagaacagggctcaacttanttcaattccaggaatttttcccaaaaaaaaaaaaaaaaaaancccccttttnngcccgggnngaaanaaccntttncccccccttaanng

SEQ ID NO: 4058 - DNA, 877 bp, Homo sapiens
  misc_feature 2, 7, 8, 9, 10, 11, 12, 14, 15, 587, 610, 623, 713, 735,748, 767, 775, 790, 801, 833, 854, 861, 865, 876: n = A,T,C or G
gnagttnnnnnntnntaatacgactactatagggcgaattggagctccaccgcggtggcggccgaggtaccagcaagccctgggggccgagagttctgcctggtcccacctgatcactctgtcatgacctcagttcatgtgaacctttcgcccaccttcgtctcaaacccagccctgagaccctccatgctgggatgcgtgcagggaccccgtgcaggcttcccagagcaggggagcactcaactatgcagaacatgtcaactccacagatgcacagcaggtcatgactgaaatgacttcccaagggaactgtccttgtcatcctttttaaaaacattaaatgtcagaaagacgatatgagagctcagactgcgcccacgtggggaactgagagagagaggcccagtacctgcccgggcggccgctctagaactagtggatcccccgggcttgcaggaattcgatatcaagcttatcgataccgtcgacctcgagggggggcccggtacccagcttttgttccctttagtgagggttaaattgcgcgcttggcgtaaatcatggtcataagctggtttcctgtgtgnaattgttatccgcttacaaattncacacaacatacnaagcccgggagcattaaaagtggtaaaagccttggggtgccctaattgagtggagctaacttaacaattaaattgggtttggcgcctcanttggcccgctttttcaagttcnggggaaaaccttntccgtggcccaccttgcanttaattgnaattcgggcccaacncccccggggangaaggccggttttgccttatttggggcgcctnttttccgcttttctttggttnaattganttgnctttggggctng

SEQ ID NO: 4059 - DNA, 965 bp, Homo sapiens
  misc_feature 2, 6, 7, 8, 15, 419, 499, 535, 555, 557, 565, 592, 612, 631,643, 649, 668, 671, 688, 693, 695, 697, 701, 724, 755, 756,770, 772, 783, 784, 787, 792, 796, 801, 802, 806, 807, 816,821, 822, 825, 830, 844, 846, 847, 856, 858, 861: n = A,T,C or G
  misc_feature 865, 878, 879, 884, 891, 893, 903, 910, 911, 916, 923, 925,927, 929, 930, 933, 936, 942, 945, 954, 957: n = A,T,C or G
gnaagnnngaccacntcgcgtaatacgactactatagggcgaattggagctccaccgcggtggcggccgcccgggcaggtactggcattctaaatgcaaggataagcttaaagagattatttgaatctaagagtgtgggagggacattggctctcacggtccagcaggtgtgagtcggatctagctaactccctgaggatcaaggattcaattgccatgctgaacgggcacccctgattcctacaagttcaactctttatgagacttctcccatttaccttctctggacctcgcttagcactaccctatgtgagggaatcatggggacagaaggaagcctcctcgccctgccacttcccagcagccctgccctgaaggcactctccccacactttggttctttaagggagccccacatnatgcaaagcgctgaaccacaagctcgctcgttaccttggcatcaccagcactgaccaagaaaagctggtgttaggtgtangctacaagccaaacacttaaggtcccagcccttttncaccacagactgtcacccangnaatatagnaacaattttgtccaattcccttcccanaatggcaccattggtccttnttggggagccaggtttttntaccctttttgnggaaantttattaccacaagccctnggnggtcaaaggcccaaatnaaaantnancttntttggacccccgcggtacccttngggccgctttttagaaactaaaggggggaannccccccggggcttntnggggaaatttnnganatttnaaanctttnntatnnttaccccgncccanncanaaaangggggggggccccngnncccccaaantnttnggtncccttttaattgnnggggnttaaaantngcgccccttnggggggnnataangggggananancnntgnttncccctnggnggaaaattnttntaccccct

SEQ ID NO: 4060 - DNA, 898 bp, Homo sapiens
  misc_feature 3, 4, 554, 635, 671, 678, 709, 726, 742, 778, 786, 809, 830,855, 864, 886: n = A,T,C or G
gtnngagcgcgcgtaatacgactcactatagggcgaattggagctccaccgcggtggcggccgggtgtggtggcttatggagtccctaacgtttgcacaaaatggttgctacattccacactcccatgtgccctgagcaacctccagggaaacttcagataccgtggggcttggcctgccagctgagctgacccagcgatcctttctaccacagctttgatcttcactgggttgggagcctgtctgaatctaaacatctgcctctctactgcccaccccttcggcatttcctagctctccctgaaaggtgcaaacatgcatgcagttactcaaacagaatatttatccttaactccctgtccctcacaatttcttttaaaacaatccactattgtctacccccgcccccgcatcaccctttcatccaggtgcccattcccttctctctagtcctgcaatacctaagcatcgatctgcctttagcacatccatccccgccttattctccacgcaggagctgagtgacctgcacaaaatcccctgctaaatacggnacctcggccgctctagaactagtggatcccccgggctgcaggaattcgatatcaagcttatcggataccgtcgacctcganggggggcccgggtacccagcttttgttcccttttantgagggntaaattgcgccgcttgggcgtaaacatgggncatagctgttttcctgngggaaattggttattncgcttcaacaaattttccacaacaaacattaccgancccgggangccataaaaagtggtaaagcctnggggtggcctaaatgagtgangctaacctcacaatttaattggcgnttggcgctnacctggccgctttttcaagtcngggaaaacctgg

SEQ ID NO: 4061 - DNA, 883 bp, Homo sapiens
  misc_feature 570, 576, 620, 642, 680, 759, 770, 772, 779, 782, 783, 788,790, 798, 810, 814, 824, 833, 863, 869: n = A,T,C or G
gtaatacgactcactatagggcgaattggagctccaccgcggtggcggccgaggtactttcacatgctataccacatttaattaattctaacaacagcactggaaaataagtataattatgctctttagttccttctagacagaaagctttcatggggatgaaagactgttccttagctcagagtagggaatcaaagtaggcggggcttagttcagagtgggcggggcttagctcagaataggccatcaatttgtagaattgaagtgtgaactctgaggatgaagaaacagggctgcaggggtgtgtaacttgcaccaagtcaccctactttacattgcgccacaccgcccagctaagtcttcgaaatgttcataaggtgcttgagcactgattcctttgcctgttcaatgtttgaattccactgtcactggcttttcttttttcctcgtaatgaagcaaaacctggtgggttaattaatccttcttgatgctgggcagcagtaataggatcaagaagaaagcctttctcctcctgtgctcccaaggatgcccagcggggagactgtgangagatngaacacagccttcactctgttaatttgttcaagagcaaaatcancatggagatctgtcctctccanggctctggcttcctcaaggacagctggccacccaggtnctatccatcttgtaaggtccaccgccgtacccttgccccgggccggcccgctcgatgccgtattggggcgctctttccntttccttcgcntnaattganctnncttgngncttcgggncgtttcgggttncggncgaagcgggnattaacttnctcaaaaaggcgggtaataccggtttttcncaaaanttaggggataaccc

SEQ ID NO: 4062 - DNA, 933 bp, Homo sapiens
  misc_feature 6, 7, 8, 9, 435, 462, 523, 539, 540, 576, 578, 580, 597,608, 622, 659, 667, 673, 725, 748, 795, 804, 807, 808, 819,820, 821, 822, 826, 836, 846, 892, 895, 903, 904, 909, 911,926, 930, 931: n = A,T,C or G
atatgnnnncgccgtaatacgactcactatagggcgaattggagctccaccgcggtggcggcccgaggtacatttggagctttatttccactggcaatgcagaaacacccagcaaaaatgtgagaggagttggtggggcttcctaagaggacaagaagtggaacctggcaggagatccatgggagctcctgggactagagttctgggaagttgaaagaaattctcagaaagagatatgtaatttccagactgggagaggagccttccctgcaattttttttgtggggaggagaagggcatggctcacgtgttgtcctgagctttgttggcccccaactgcaggcagagaaccaggagcagggtggcagggctggccctgaacaggagctggagcaaagcgcatgctggagaaaacagaaggcaatgtgtcccaanaaaaagtggtccccgcgtacctgcccnggcggccgctttagaactagtggatccccccggctgcaaggaattcgatatcaagcttatngatacccgtcgacctnnagggggggcccggtacccaacttttgtttcctttantnanggttaattgcgcccttngcgtaatcatngtcatagctgtttnctgttgtgaaatttgttatcccgcttacaatttcccnaacaacantaccancccgggaaccattaaaagtgttaaaagccctgggggtgccctaattgaagtngaaccttaaactcacaattttanttttgcgttttccccttcacttggcccccttttttccaattccgggnaaaaccctntcnnggcccaccttnnnntttnattaaatttngggccaaacncccccgggggaaaagggcgggttttccgtttttggggccctttttnccntttttttnnttaantnaattccttggccttngggnnct

SEQ ID NO: 4063 - DNA, 907 bp, Homo sapiens
  misc_feature 679, 694, 700, 715, 728, 742, 768, 774, 777, 778, 779, 780,789, 790, 791, 801, 804, 814, 818, 822, 835, 837, 838, 839,845, 865, 869, 883, 886, 890, 894, 895, 902: n = A,T,C or G
gcgcgtaatacgactcactatagggcgaattggagctccaccgcggtggcggccgcccgggcaggtacccaaatcttagcccaacccctggtatagagtagttcctgggcaggtcattgaagagggacatttgtgcctggagatgggaatgtgtaggacttgtaggtgggaatgtcaggttgtccagggtcactttaatggaagggggagaaaaggaagagtttgaggccagacttggaggcccttggagaatgtggtaaggagaaagattagacttgattatgaacacactggagaatgacttgtgttttttgagcaggggagtgatatgcttagatacttgttttggacaacagaaaaaaatggagccagaggaactaatatctttgtgtatatgaacttattcatttattcaaaatttattgcagaccaaccaggcttttttttttgagactgaatcttgctctgtcacccaggctagagtgcaatggcatgatctcagctcactgcaacctccgcctcctgggctcaagcaattctcctgcctcatcttcttgaacagcttggattacaggcattcgccaccacattccgctaatttttgtatttttaagcaaaaatgggggttttcaccatgttggcccagccttggtctcgaaatccctgacccttaatgatnttggcccaacctttnggcctncccaaaagttgcttnggaccttcaagcnttttgggcttaacnggaacccagcctttgccagggctttntttttnttnnnnagagccttnnnattttaaatnggngaagagggtncctnggcncgccttttaaaantnnngggatncccccgggcttgaagggaantttngttttaaaaccttnttncgancccnnccacccngaggg

SEQ ID NO: 4064 - DNA, 881 bp, Homo sapiens
  misc_feature 530, 542, 560, 591, 598, 617, 620, 633, 644, 645, 674, 685,692, 696, 698, 700, 701, 706, 707, 711, 741, 749, 760, 761,766, 767, 784, 799, 800, 802, 807, 808, 809, 812, 813, 816,820, 836, 837, 849, 852, 855, 861, 862, 865, 866, 868: n = A,T,C or G
  misc_feature 869, 870: n = A,T,C or G
gggcgaattggagctccaccgcggtggcggccgaggtacccagctgggctctggagggaaatccggaggtagattcagcttctgtccttgccgggtggcaaaccgggcccttccatctggagctcctaaataattcgtttaaataattactgctagcccaagggctcacgcctttagtcccagcactttgggaggccgaggatagtggattgcttgagcccaggagtttgagaccagcctgggcaatatggcaaaatcctgtccctacaaagatgttaataaaaaattagctaggagtggtggtgcaaacctgtaatcccagctatcttggaggctgacttgggaggatcgcttgaggctgagaggcagaggttgcagtcagcaaggatcatgccactgcactccagcctgcgcaacagagcaaggcccagtctcaaaaataaattaattttaaaaaggagggtggggctgccttcccacaggcctcagctgcttctgtagagagcacactgttcaaatgcagtggcctntaagctaccccnaagaaagcccatcttcanagagctcacatgatgggaggttcccgagttnaaagcgnaccaccttgcaaagccttntgnggcaccttccttncccttataccnnagaaaaaattaaaggagtagggccttctngggcccctttnttacttnaagngncnnttttnnaaanaaattcccccccttttttttttttttgggncttggggntaggccttttnnggggnntgggggagggacaaaanaatttccactttccnntnttacnnngtnnttncaanggggccattttttccnnttttttttgccnccngcntctagnnaanntnnntcagggggggg

SEQ ID NO: 4065 - DNA, 912 bp, Homo sapiens
  misc_feature 497, 531, 538, 545, 548, 551, 552, 553, 556, 557, 559, 560,561, 563, 568, 571, 573, 576, 582, 584, 587, 589, 590, 591,595, 603, 605, 609, 612, 614, 615, 619, 620, 622, 623, 625,626, 629, 631, 635, 639, 641, 644, 645, 646, 648, 650: n = A,T,C or G
  misc_feature 651, 653, 654, 655, 658, 659, 661, 663, 665, 666, 667, 669,670, 672, 673, 676, 678, 680, 681, 682, 684, 686, 689, 691,693, 698, 701, 702, 706, 708, 712, 713, 716, 718, 719, 720,722, 724, 733, 734, 736, 738, 740, 744, 745, 746, 751: n = A,T,C or G
  misc_feature 753, 754, 757, 759, 760, 766, 768, 772, 773, 774, 775, 789,791, 792, 794, 795, 796, 798, 800, 801, 806, 809, 810, 812,816, 821, 827, 828, 829, 838, 841, 842, 844, 849, 851, 852,854, 855, 860, 861, 863, 864, 865, 870, 871, 874, 885: n = A,T,C or G
  misc_feature 887, 889, 894, 896, 901, 903, 904, 911: n = A,T,C or G
actactatagggcgaattggagctccaccgcggtggcggccgaggtacgcgggatttctggaattttccgtttactctttgcagactttggttgaccttggggagcaaaccgaggaccgcgaaaccacagatcaagggggagctcgtgtcatagcagctctaacttagtgcttacaacatgcaggcactgttctagtcattttgcgtatattcatgaatcctcccacaaccaccgtgttcacgaggaagcggaggcagagggaggtttagtgagttgctggaggcagcccagctggtgagctgaggctcagccgcacgaccgtgctctggccccaaaacactcctcggtaacccccatcctgcccacacaaatggccccggaacacagcggctgctttgagtcagtttctctctcgatgacttttccacgttggcttcgatctgggagttccgttttctgtgtatttgctgtcaatttctatgcctttggatgttantcattttccgaaggtgcttaaaagggggcttggngggggtntttttantcntannnatnngnnncncaggnatngnttnaaagananccngnnnaganccattggnanaagnccngnntganngnntnnggncncctntttnanggnnnananngnnnacnngnantnnnanngnnctngngnnnantnacngntnggggnganncggntnttannctnannntnanagagcgtgnnananangggnnngtccncnnaancnngggggngngatnnnnggaaaaaaaaattntnngnnnanannggccnccnnanaggnccganaccccnnnaaaaaggcncgnntngttgngnngnnttttnnannnagggnncgncccccttgtgngngngttananaaaantnngagctcnc

SEQ ID NO: 4066 - DNA, 903 bp, Homo sapiens
  misc_feature 599, 603, 625, 631, 653, 664, 676, 684, 688, 691, 693, 705,707, 721, 722, 724, 726, 728, 752, 753, 755, 763, 770, 779,788, 798, 801, 805, 806, 820, 821, 823, 836, 838, 842, 846,847, 848, 849, 860, 863, 864, 876, 878, 880, 888, 893: n = A,T,C or G
  misc_feature 899: n = A,T,C or G
gtaatacgactcactatagggcgaattggagctccaccgcggtggcggccgcccgggcaggtacgcggggagactttccctgccggcacatggacctggcccaaccctcacagccagtagacgagctggagctctcggtgctcgagcggcagccggaagagaacacgcctctcaatggtgccgacaaggtcttcccttctttggacgaggaggtccccccggccgctctagaactagtggatcccccgggctgcaggaattcgatatcaagcttatcgataccgtcgacctcgagggggggcccggtacccagcttttgttccctttagtgagggttaattgcgcgcttggcgtaatcatggtcatagctgtttcctgtgtgaaattgttatccgctcacaattccacacaacatacgagccgggagcataaagtgtaaagcctggggtgcctaatgagtgagctaactcacattaattgcgttgcgctcactgcccgctttccagtcgggaaacctgtcgtgccagctgcattaatgaatcggccaacccgccggggagaggcggtttgcgtatttgggccgctctttccgctttctngctnacttgactcgctgggcttcggncgttcnggttgcggggagcggttttaanctcactcaaangcgggaaaaacnggttttcnccanaantnaggggggtaacncncggaaaaaaacatnntnancncaaaagggcccccaaaaagggccnngnaaaccccnaaaaagngcccccttncttggcggntttttcatanagngccnnccccccccggaggnncnttaaaaaaaaatngncccnttannnnggggggggggngannccccgggagggntnanaaaaacanaccangcgccncccg

SEQ ID NO: 4067 - DNA, 923 bp, Homo sapiens
  misc_feature 2, 5, 7, 8, 9, 557, 570, 573, 577, 583, 584, 594, 600, 613,615, 617, 622, 625, 627, 633, 634, 636, 639, 641, 649, 652,664, 665, 673, 683, 688, 710, 717, 723, 726, 728, 729, 733,742, 745, 756, 757, 758, 790, 792, 799, 833, 837, 840: n = A,T,C or G
  misc_feature 844, 846, 852, 860, 864, 870, 886, 890, 894, 901, 904, 922: n = A,T,C or G
gnagngnnngacgcgcgtaatacgactcactatagggcgaattggagctccaccgcggtggcggccgaggtactgacttttggagttacttaagaaccacagttcctaaaacattttatttgggagctcaacttctggcttcctacttaccaagaggcagtaagttataacctctggcctttgtctttacattttcaactttctggatccctaacctctggtcccaagttactacgcttgcctatatccactaaccactcactaggtcacaaagttgatggctctggcttgacccagtgaatgagaagtgtcctagatgtttttttttttttttttcgcaaatcttcataggcacagttgcctgtttaattttttcttcagcccttcccttagaggagggagccttaagttacctttcaaggttgggggttaggaatctatcataactagtctagagatttctcaccaagggaaattctccttatctaaaagaggaacttcaggtctcaaccctgccagtcacacccaattaatggccttcacaaaaataaaccgcntatgttccctttngantttnagtttnnggggagcctnacagcnaaaatttaccctntnanttttnttntngccccnnanccncngactgatnttngccgggatcaanntttacctnaaaaggcggnaaatnccgggttattccccagaatccngggggantaaccncangnnaaanaacattgtnaanccaaaaaggcnnncaaaagggcccaggaacccgtaaaaaaagccncngttgctnggcgtttttttccataaggctcccgccccccttnaacnagnattncnaaaaancgaccccncaangacaanaggtggggggaaaccngccngggnctttaanaanccaggccggtttcccccng

SEQ ID NO: 4068 - DNA, 941 bp, Homo sapiens
  misc_feature 537, 551, 561, 562, 568, 581, 592, 594, 597, 598, 602, 607,608, 617, 624, 628, 631, 646, 658, 663, 670, 680, 684, 685,692, 704, 710, 713, 719, 720, 721, 746, 749, 753, 757, 762,774, 778, 784, 785, 789, 797, 809, 814, 818, 828, 830: n = A,T,C or G
  misc_feature 831, 832, 834, 837, 847, 855, 858, 860, 864, 869, 870, 881,882, 885, 886, 894, 904, 907, 908, 910, 912, 913, 916, 925,928, 932, 933, 935, 939: n = A,T,C or G
gtaatacgactcactatagggcgaattggagctccaccgcggtggcggccgaggtacgcggggagctcattccactgaaggtgattgtgacagatgagtttcaataaataagccccttcacatgacatacatgtgaaaaataacttttggtttataataaaatgcttgttttacacattcttatcctatttggttataatataaattcttaaatgtaacaattatacttccagaatgtgttatttgaattacttggttattttatctttttttatgagaatttgttcccttctcattttctaaccacatttaaattgatactgtttgagtataaacttagtatttcccttcatgctataaataagttactatcttttttttttttaacttttccatttgttctttttgttgtagacagggtcttgctctgtcattcaggctggagtgcagtggtgcaatcacagctcactgccgactccacttcctaggctccagcgatcctcccttagcttcctgagtagctggggaccatatgtntgcaccgccacgcntggctgatcnnttggcnttttttcagaagngccattggggntntcnnccancttgnncccaggaanggccctntggnacntccttggagcctcanagcctaaccccncctanctttttngccctccccnaatnngctgggncattttctgggnggtggngcnaaactnnngccccgggccggcttgttaataaanttnaganggantcccncccgcgcctggngaangaagtnncggntttcccanatttgggggcgnttctntgcngtttccctgngnnngnggngactcggatnccctcggnttngntccngcttnngggggaggggnnatnnggcccccnttgaagaggnggnntngnncgngttttcccncanaaanngngggnag

SEQ ID NO: 4069 - DNA, 869 bp, Homo sapiens
  misc_feature 4, 5, 6, 171, 244, 273, 314, 452, 595, 640, 680, 698, 706,730, 746, 751, 754, 779, 783, 807, 822, 826, 833, 853, 861,862: n = A,T,C or G
aagnnngacgccgtaatacgactactatagggcgaattggagctccccgcggtggcggccgcccgggcaggtactttttttttttttttttttttttttttttgagacagtgtctcgctcttggggcccaggctggagtgcagtggtgctactgcggctcactgcaacctntgcctcctgggttcaagcgattctcctgcttcagcctcccaagtagctgggattacaggtgctcatcaccacncccatctaatttttctatttttaataganaccaggtttcatcatgttggccaggctcttctctctactgngataatttgattagctcctttatgttccagcttgaacgtatgtatggtaggttaatcctcccaaatcactggggaagccatttatcattgaaattttacaaatggggaagctgaggcgaagtgattttctcaatgtcncacagagaaaaagtagtttcagtaggactcaaaaccagggctttgagtcaagttaacgacttttccaccattttacagctgccttcatgggtaaagcaacttagttctcttaaagacacaggaccaacatgcaggagactcanacagttgtaggtgcctgagagtaacagcagcaagccagcaacttnttcaaaagcagtcgctaattaataagtgcagggcccttanaagcctcgctttcccctnttttgaanacagatggcaaccggcaccctggncctttctacctaactncaggntgnttttttcattttttttaaaaaaagngaanaaattccttttgaatttttttttnccctcggcccggttntaanaactagnggatccccccgggctggcangaatttcnntttcaag

SEQ ID NO: 4070 - DNA, 856 bp, Homo sapiens
  misc_feature 404, 501, 523, 527, 611, 621, 630, 685, 693, 718, 720, 727,733, 761, 764, 772, 784, 804, 825, 837, 843: n = A,T,C or G
gcgtaatacgactcactatagggcgaattggagctccaccgcggtggcggccgcccgggcaggtgtggctaagactggactgtagaacagggagagtatctggggttgtccagtgggctcaatatagtcacagtcagggaatgttctctggccggaggcaggagagacatggcagaagactagaggctgagactgcccaacccaccattgctggagggggccacttggaaagcatgagaaggaagggggacccagtcctacagctgcaaggaataattgagccaactgtgcataagcttgaaggcctccagggtgaacccagcacctcagacactggccccatgagactgagcagaggacccagctgggcctggctgaactcaagcatctgacttagagaattngtgagataatcagtggtatttaaactgccaagcctgtggtgatttgttgtcatggaagcaatagaaaactaatacaacagggctgggcgcgcctgtnatcctagcactttgggaggtgngcgngatcaccttatgtcaggagttcaagatcagcctggccaacatggtgaaacctagtctctactaaaaatacaaaattacaaaatncaaaaatcancccggcgtngtggcaggtgcctacccgtgttccttcggccgctctagaactagtggatcccccnggctgcanggaattcgatatcaagcttttcgantncgtcganctcgangggggggccccggtacccacttttgttnccnttagtganggttaaattgcncccttggcgtaatcaatggncattagcttgtttcctggggngaaaattgtttntccccntcacaatttccct

SEQ ID NO: 4071 - DNA, 913 bp, Homo sapiens
  misc_feature 124, 370, 378, 401, 415, 442, 501, 540, 605, 625, 626, 643,645, 648, 654, 661, 673, 676, 678, 682, 687, 689, 707, 714,717, 727, 728, 731, 733, 741, 743, 746, 756, 769, 775, 776,784, 790, 794, 798, 801, 807, 814, 816, 848, 856, 860: n = A,T,C or G
  misc_feature 861, 863, 871, 873, 876, 877, 878, 879, 894, 899: n = A,T,C or G
gcgtaatacgactcactatagggcgaattggagctccaccgcggtggcggccgaggtactttttttttttttttttttttttttgagagatggagtcttggtatgttgcccaggctggcctcanactcctgggtttaaatgaccctccctccacggccctctgaatagctgggactacaagcacacaccaccatgccctgctccaaaattcttttgatctgaatttccaagataggtaaagtttttgctctggaattttctctatattatcaccatgtgaagagataattccctgactcctcgcctcccaaaaaggacatttgaaccaagtgaagcatcctcgtttattaaccctatttttccatggctntttcacanagctatttttttttttttttganacggagtctcgctntgttgcccaggctggagtgcagtggcnccatcttagctcactgcaagctccgcctcccgggttcacaccattctcccgcaaagctnttttttatgcccgggtacctgcccgggcggccgctctanaactagtggatcccccgggctgcagggaattcgaatatcaagcttatcgatccgtcgacctcgangggggggcccggtaccccanncttttgttcccctttangngangggttnattggcnccctttggcggnaantnaatnggccnanaagctggttcccttgggngaaaaanggntattcccgcnncanantttccccnanaanaatacaaagnccgggggagcatnaaaggnnaaaagccngggggngccntaantgngggaanaaacccncncatttatttgggggtggcgggcttcatgggcncgttttcnaagnngngaaaaacntntgnnnnccaacgtgcatttantgaanccgggccccccccc

SEQ ID NO: 4072 - DNA, 1172 bp, Homo sapiens
  misc_feature 6, 10, 14, 16, 18, 20, 21, 22, 28, 30, 31, 32, 35, 37, 39,40, 41, 42, 48, 49, 51, 52, 55, 58, 59, 60, 61, 63, 64,65, 66, 67, 68, 73, 76, 78, 80, 83, 84, 86, 91, 93, 94,96, 97, 99, 101, 102, 103, 106, 107, 109, 111, 112, 113,117: n = A,T,C or G
  misc_feature 118, 120, 122, 123, 124, 128, 253, 429, 447, 477, 499, 526,533, 543, 557, 559, 579, 588, 623, 640, 650, 659, 661, 674,685, 689, 693, 696, 701, 714, 726, 727, 736, 737, 768, 769,783, 788, 793, 806, 817, 823, 859, 866, 873, 883, 898: n = A,T,C or G
  misc_feature 911, 915, 918, 920, 922, 923, 930, 936, 943, 946, 950, 955,956, 963, 971, 975, 982, 995, 998, 999, 1001, 1004, 1015,1024, 1025, 1026, 1028, 1033, 1034, 1036, 1037, 1040, 1050,1052, 1062, 1065, 1066, 1071, 1072, 1076, 1084, 1085: n = A,T,C or G
  misc_feature 1089, 1093, 1094, 1095, 1100, 1101, 1105, 1106, 1107, 1114,1119, 1121, 1130, 1131, 1134, 1138, 1139, 1146, 1147, 1149,1156, 1162, 1163: n = A,T,C or G
cccccncgtntatntnantnnnggtgtncnnnaantntnnnnttactnntnnaancannnngnnnnnnatatngtnantnttnntnatcanannanntngnnnagnngngnnnctgnncncnnntacnactcactatagggcgaattggagctccaccgcggtggcggccgcccgggcaggtacaaaagcttgtttgggtggcttcagtgtttgggagtgtatatgaagtccctactgccagaggccccatanaccattttgcaagaggcttgagcaaatcttaaagcttaaatatatgttcctgcagactgaggcaaaagaatcgcttgaacccgggatgcggaggttgcagtgagacgagtatcgcggcattgcacttcagcctgggcaagagggcaagactatgtcttcaaaaaaaaaagaaaatnaccaaaactttttgaaanctggggccgcaatggcatgtgccctatcgntcccaacttactcagggagggntgaaagtggggaaggattattttggcnccccaanaaaattttgnaggcccaccaggtngngggtattaatcaatcttggncaaaataancccacttgcaacttaccaaaaacttggggccattncctaagccaaaggaacncttgtttttntttccacananaatacaaaaaatntgtataagccnttanaaanaanaaaanaggttacccttcngggcccggcttnnttaaaaaanntaaggtggggattcccccccgggggcctttnnaagggaaaattttnctaantattnaaaaggccctttnattcggaatancccggngcgggaccctttcataaggggggggggggccccccnggttacncccaaancttttttggnttcccccttttaaantgggagggggttnaaanttngncnnccccttntgggcngtaaaanaanaatngggtnnaataaanctgggttncccntggtggngaaaaaaattggnttnntnccnctttcccaaantttcccacnnnanaaaanntnnaantcccgggggngncttttaaaangtnnaaaanngccnttgggggnngccnttannncgggnngggnnnctaaccntccancntttaatttnnggnatgnngcttaanntngcccccntttttnnaaaaaaagg

SEQ ID NO: 4073 - DNA, 1113 bp, Homo sapiens
  misc_feature 7, 11, 16, 17, 24, 26, 28, 29, 30, 31, 33, 36, 38, 41, 49,50, 51, 57, 58, 59, 60, 64, 68, 69, 70, 74, 77, 79, 82,90, 94, 95, 98, 101, 110, 114, 117, 484, 525, 555, 561,578, 667, 671, 699, 740, 756, 788, 790, 794, 809, 820, 829: n = A,T,C or G
  misc_feature 832, 860, 870, 879, 882, 886, 888, 901, 926, 936, 938, 943,955, 956, 959, 963, 969, 975, 976, 983, 984, 992, 995, 1005,1011, 1032, 1042, 1046, 1049, 1056, 1070, 1081, 1086, 1091,1097, 1098, 1102, 1103, 1107, 1112: n = A,T,C or G
ccccccnccantagannggttatntnannnncntgncngtnatctcacnnncttcgnnnncatnatannncttnttntnagncagggagntgtnngcnacnctcctcatngcgncgnattggagctccaccgcggtggcggccgcccgggcaggtactgaggctggtgcactccacattcccacccacatcctgccacatgttggtgagagtctggggagccccagcctactggcacgccttgttccctctgaatttctggagcttatttatttttaccacctccctctctgctttctgtgtccattccttctgctccttttaggtaactgcagccagagaaaggatgctgataggatttttctgaagaaaggtgtttttgatcaagagagttaaaatcacagaatgaagtttggcttgttatacctttaaattctgtgggctcatgaaagccatgataaccaaggttagttgtggcatggttngttcaaagccagtgggccccttttcctaaaagcctaaagtncattcattttcttcaaggagaatcattgtngactgnccttaaagccttcaatnatttaaaaaaggccttaagttttttcttagggcttttcaccctggtggatttttcaaaaattttccaaaaaccaaagccccttaatggntaanctgggccatttttggcttccttaaaaangaaccccaatttttttccttaaaaatacccctttttggggnaatttttaataaattnaatcctccccaacccaaagggccattgggccnanttcntttggggaaaaaaantttttttaccnttatttacnccnaggggatttttggggggggtaaagaaangggggccccnttttggttnagntttngnaaaggggggggantgggttaacttaagcccctgaaccnttaccttttntnggggnaaatcccattannttncccnatcccngccggnntaaaagnnggggttantanatttttttcnaaggtnccaatttttcccccccttttnttgaaacaanaacntgnattcttngggaaaaatttatnctacctccaanccccnctttntttccnntttnngggnttaanc

SEQ ID NO: 4074 - DNA, 856 bp, Homo sapiens
  misc_feature 368, 559, 560, 566, 574, 579, 615, 618, 625, 626, 649, 655,657, 667, 677, 681, 688, 700, 713, 730, 747, 761, 764, 765,771, 773, 774, 785, 786, 795, 797, 804, 809, 824, 828, 836,844, 848, 854, 856: n = A,T,C or G
ggagctccaccgcggtggcggccgcccgggcaggtactctactagagattacacattatagaatagtgcagaaagcaagccacatgaaagggtcaatttaatgtcgcatcctgcagaggtgaggagttgatctccaactattctcattggttacacaatcacattgaggtatttaaatcctggcaggtgggagcctttgcttcctttgctcaacggtgaattcacatggtggtgtggtaggcagaggttgcacggcattctctaatagctacaacttacctagtcttatccagtataggtatcaggtaagtgattacacatgttcagatcatcaatttaacagtaatcaaagagttcttttaacttanaactcagggaagtcaggtctgtcttctcaagctgagaagaaccaaagccatggtatagacataaccatacacaggtaatgtaaaactattaagctgaaaacagggtatagaaaaaaacacgagaaggatgccgtttatgaagagggttgcaagatgcctaatggacccagtttcctccccaactaagctgnnggtgangaccccanagttnagggagcctacccaggactggaaattcccaagcccnggnttcccanncccaggggttcccctttttttgnttgggnanacctggattnccttttttgncccncttgaancccccctttggnctttttccagggnttggggcctttttctgntttacatttattcgacntaagtcttggaagncannagcttnannacttttttttnnccggggggngntcaagcntttanccaagcccaaagttncttnaaaaaaanaacctttnggangatttncn

SEQ ID NO: 4075 - DNA, 1321 bp, Homo sapiens
  misc_feature 1, 2, 3, 4, 13, 20, 21, 22, 24, 25, 36, 45, 54, 56, 58, 65,73, 84, 88, 92, 94, 100, 103, 104, 105, 107, 110, 112, 113,119, 121, 126, 133, 139, 151, 178, 229, 236, 294, 300, 322,329, 336, 358, 383, 405, 413, 429, 460, 476, 479, 496: n = A,T,C or G
  misc_feature 499, 507, 510, 511, 512, 518, 519, 524, 526, 534, 545, 552,554, 594, 597, 605, 607, 615, 620, 621, 629, 634, 636, 640,643, 646, 648, 660, 665, 666, 673, 677, 685, 688, 702, 716,721, 726, 729, 731, 739, 742, 751, 759, 763, 790, 794: n = A,T,C or G
  misc_feature 801, 805, 816, 818, 821, 822, 828, 834, 837, 841, 853, 859,861, 866, 884, 891, 894, 897, 899, 902, 906, 909, 915, 916,922, 924, 925, 927, 934, 935, 938, 941, 952, 955, 957, 963,968, 973, 976, 981, 988, 991, 993, 1000, 1013, 1022: n = A,T,C or G
  misc_feature 1023, 1034, 1038, 1039, 1052, 1057, 1061, 1063, 1065, 1072,1075, 1078, 1085, 1086, 1087, 1089, 1091, 1094, 1098, 1102,1105, 1108, 1113, 1114, 1115, 1122, 1124, 1135, 1140, 1141,1144, 1147, 1151, 1156, 1158, 1160, 1166, 1170, 1171: n = A,T,C or G
  misc_feature 1176, 1179, 1183, 1184, 1185, 1191, 1195, 1197, 1201, 1206,1215, 1219, 1220, 1222, 1225, 1226, 1229, 1232, 1235, 1236,1238, 1245, 1248, 1254, 1256, 1259, 1263, 1265, 1266, 1268,1271, 1272, 1274, 1277, 1278, 1280, 1281, 1290, 1298: n = A,T,C or G
  misc_feature 1301, 1311, 1319, 1321: n = A,T,C or G
nnnntgttatatnttatgtnnntnngttttcttatntcctatatnttattttgntncntatatanatgttatntcatatatttntatntttncnagcctnggnnntnccntnntctttncnctatncatatgnactatnagggcgaattgnagctccacccgcggtggcggcccgccngggcaggttctcgggaggaaaaaaaaccctccaattatatctgggggtgcngatacanaaaatgttatctggtgtgactcctgtgaggcttttgcctggtttttggaaatgctctnatccantcattggacaggttcctggaanagcaggntttggtncttgatcacagctgaaaaggtngtggaactgattcataggggcttgnttcagagatacacaagctaaanactttcancttctgttttctgggnttcaacgggcatttatattgcccttttcagnattttcctggggacgnggncaagggacctgtcttcnccnagaacatnttnnnccgggnncaagngntaaatggnccgcccttggntttaacnanggggccttaccttttcaaaagtaatttccataaggtgggnggnaattaaanangttccagnccccnngctattgnccttnantaanggntgntngcctttattttnggccnnggtttcncaanggccttanggnaaaaaaaaacctgnccccccgttggganctttntgggnttngncaatgggnacntcctgtatngccctatngttntatttaggtatgcccaaccaattcaanaaanactcgcnaccncaattctcatngnggnncatggngttgcnaantttnaaccttcataanaattangntgttnaatttcccccttgacaanctttttncgntgnantgncccnaanatggtnngggtgntnntnatcccannccntgntaaggttctanagngntaattngttgnatatnaanacaanacccttntgncncctaaantatggggtcccanaattccccnntttcttgttantttnnaaagatttcccanaacantttntncnttggggncantanggtttgnnncngnccntttntgtnatnatnccccnnnttttccncnataatgaaggngcttnnatnggnctcncaatnanantatgtntttnngacanctngtgnnnaccttntgangntttntcaantggatgacnaaannanttnnatntcnacnntntgatctnttnttgtgncnacnatgntnngnaannantanntnnttaccatcntttctttnttnataaaaaacnaaataatnan

SEQ ID NO: 4076 - DNA, 858 bp, Homo sapiens
  misc_feature 542, 612, 613, 659, 681, 682, 699, 703, 730, 744, 745, 754,757, 758, 759, 778, 779, 782, 793, 808, 809, 818, 822, 824,846, 852, 854: n = A,T,C or G
gaattggagctccccgcggtggcggccgaggtacgcgggacaactagaagatcactgtattcaatactctaatccctgatatatcatgaatgctgaaagaggatttagactctactacacagccgccctgaaagagctgcaggaggcacagggaattatattaacatagtggattgcacgttagggacagaaatggaccaaggagcacatgagaagtccacattgatagaggtgcctggcatgggctctccttctctgcccagatggtgttggtgtgacctgatgggtggcaccttcttgacaaggatccttgctttagatatttggaatattttatgttatcaagctatttagaaattttaagtcactgcaaaagtgctcattccaaattctgtttcttgcctttgtcttgaatccatatctgaatatttaggaagatttggtattggtatagagaggtatcaatttggcaaagatccttctttgccaaattcctggaagtggaattgctggtgtcaaggacaggtgcacctgaaaatgtnggacaggtaatgccagatttccccaccccccttttctaataacagtgaatgaccctgagaaagtaattgnntcccctttagaatttcatttagaattaccattggaaattgaaaggntagaaattgaagaaatccaacnntgtgggaaaaaaatatntttnttaactaaggaaattgatgttcccttncccgggccggccgnntttaaaacntannnggatcccccccgggccctnncanggaatttcttntttcaagctttttcnntttacccgncgcncntctgaagggggggggccccggngacccncntttt

SEQ ID NO: 4077 - DNA, 859 bp, Homo sapiens
  misc_feature 2, 3, 8, 641, 724, 747, 769, 777, 789, 792, 842, 843: n = A,T,C or G
gnnggccncgtatcgactcactatagggcgaattggagctccaccgcggtggcggccgaggtactgacactacccttgctgtgtcgaccaaaaatgtttccagacgtgtcaccccagctgagaaccactgatttagaagaagggaaatcagggcggtgatatgactggaaatcatgttttttgaaaaatagttgagggaactagggtggtttaatttgaagaagactaaatatagtgatatcatttcagtatttgaaaggtggtgtttggcctgttctccatcactctggaggaagaaacagaggcactgagtgaaagttctaggagattagatttagactcaaaatactttggagaaactttccaacagagctcgcggagactggcctgcaaatgcatgtgcaagcagggcctgggtaaacacacagggggtgggaaaagtttctagtacctcggcccgctctagaactagtggatcccccgggctgcaggaattcgatatcaagcttatcgataccgtcgacctcgagggggggcccggtacccagcttttgttccctttagtgagggttaattgcgcccttggcgtaatcatggtcatagctggttcctgtgtgaaattgttatccgctcacaatttncacacaacataccagccgggagcataaaagtgtaaagcctggggtgcctaatgagtggagctaactcacattaattgcgttgncgctcactggcccgttttccaantcggggaaaccttgtcggcccnagctgcanttaatgaaatcnggnccaacccccccggggaaaaggccggtttgcgtttttgggcccctttttcnntttccttggttcactg

SEQ ID NO: 4078 - DNA, 863 bp, Homo sapiens
  misc_feature 2, 4, 9, 384, 643, 652, 681, 688, 689, 690, 691, 693, 694,695, 696, 697, 698, 699, 700, 701, 702, 703, 704, 705, 706,709, 717, 724, 742, 747, 768, 769, 778, 794, 795, 803, 820,832, 844, 853, 854: n = A,T,C or G
tngnggccnctaatacgactactatagggcgaattggagctccccgcggtggcggccgaggtacaactttggctctgggtaggggaaaggaaaacagcttcctagagaaatgttaaccacaagctagccctcatgagagatttcagctaggatggatgctatctgtgtagtgcaaaaaaaaaaaaaaaatccatagccagattttgtgctttaatgtggacctaggtcaatagtgactgcaaagccagaagcagtggctcacccctgtaatcccagcactttgggaggccgaaggaggtggatcgcttgaggtcaggagttcgagaccagcctggccaacatggtgaaaccctatatctactaaaaatacaaaaatgagcctanagtggtggtgggtgcctgtattcccagctacttgggaggctgaggcacaagaattgcttgaacccaggaggcggaggttgcagtgagccaaaatcgcaccactgcattctagcctgggcaacagagtgagacaccatctcaaaaataataataattaaaaaaaagtgactgcaggggactgggaagaggaaacacaaaatctttactggggaatggaatttcgagtgtatgcaccaacccttaaaaatcacaaaacatntgacccttnttgaaaataaccccctgagtggagacagnccaaaannnnannnnnnnnnnnnnnaanttccttgnccgggcnggccgttttaaaactagnggatnccccccggcctgcaggaattnnattttaaancttattcattcccgcnnaccttgangggggggggccccggtnccccactttttnttcccttttatngaggggttnntttgcccct

SEQ ID NO: 4079 - DNA, 870 bp, Homo sapiens
  misc_feature 517, 538, 574, 576, 578, 613, 620, 630, 674, 682, 700, 711,713, 717, 723, 730, 740, 742, 753, 796, 799, 803, 810, 822,825, 831, 840, 841, 849, 853, 861, 866, 870: n = A,T,C or G
tatagggcgaattggagctccaccgcggtggcggccgaggtacaaatcaaagatttgaaatgttgtgccgctcatcagcttcacattcatctagatacctctctcgttaagacatctgtccaagtagtaaggaggaaatgctttaaaaacttgctcattattagccacctttagtctcacccagcccagaatttctcctgaactgaacgaagtgctttttattctgtatcgtttcgaaattgcttatttaaaaatgaaaaaccacaacaaagctgcaaataataaatatgacataaaattagttaagaaaaacaggtgatgaaaaccaaaataaaacaagatttaaaattctataaccctgcaccatttcttttgtcactaaaacttaatttgaatactaagcaatatcgtgtgccactctctgtatctagtcttctctcactctctacaagccaaatttctttaactagctcttactcaaaaacaatcaattatttcttgctcatcttttctccanactattattaatgagttgggnataaaaaaaaaagcctggaagctggatattctctangngngccacaattttttttcttccattcataaaccacanggctcantaccagactnactctttaaacctggtccccaaacttcccaccttttcctttggnttttcaantctcttaggtaacaattntttccccctcnangctnttactnggaattnccattcaccnantttttggaacnaccgggaatttaaaaaagggggatttcctatttcttcttttgncantcanatttggnctctttggaccncantggttntctttggcnnccccccangttnttgaaagnctctngacn

SEQ ID NO: 4080 - DNA, 858 bp, Homo sapiens
  misc_feature 579, 637, 673, 681, 701, 707, 721, 730, 737, 759, 764, 784,786, 788, 789, 801, 804, 806, 812, 829, 833, 844, 845, 856,857: n = A,T,C or G
tagggcgaattggagctccccgcggtggcggccgaggtacacaaaaacgtgaattatttgaagcagcagctagaaataatcttttcccttcgagcccccatgacccactgattctctctcttgtatcttgtgttgcagtgactcaacaaatactcactgggcactgaccacatgcctctcccagagcataggctgcatcctaccctatgtcacagttataacccatcctggctgtgaagccccctgaggccactcacctctgcctgccctctacagtgcttgccacggctataccgatgttggttgcaggaagaacacagaagcatggccaccctgatttaccatggcacatgtggcagggtctgggccctgagatgttcttctagttggggctgggagaacgagcgaggggccaggccctcctctacactgctgcatccatcagctcaaccgttcattcattcttcagtctcatatttatatatacttcattccatacatccttacaataatctgtcttggagggattatttttcctcattttagaagtaaagggaaactgacagagggtaaaagtanttcaaagccaaaaaactaagtttattatttaatttaaactaacatcaaaaaccccganggtctggagggtcaagctattgacatggttaccctnccgcgttnccttgccccgggcgggccgnttttanaacttaagtgggantcccccccnggcttgnaaggaaatttccaatatttaangcttnttcggatacccggccgaccntngnnggggggggcccnggngncccaancttttggttccttttangggnggggttaaatnncgcccccttgnng

SEQ ID NO: 4081 - DNA, 865 bp, Homo sapiens
  misc_feature 35, 65, 67, 81, 112, 149, 211, 220, 246, 255, 286, 384, 390,409, 416, 438, 440, 441, 456, 462, 504, 537, 540, 563, 594,603, 608, 610, 611, 616, 625, 628, 644, 654, 669, 670, 674,681, 685, 691, 695, 697, 701, 705, 713, 719, 723: n = A,T,C or G
  misc_feature 724, 729, 734, 735, 739, 740, 743, 745, 746, 759, 760, 761,763, 764, 766, 768, 784, 785, 788, 794, 799, 805, 811, 818,822, 823, 829, 832, 835, 841, 852, 861: n = A,T,C or G
ggagctccaccgcggtggcggccgcccgggcaggnactttttttttttttttttttttttttttngnaaagacagggtctnattctgttgcccaggctgaccttaaactccngggctcaagcggtcctcccactttggcctcccacagngctagaattgcaggcatgagccactgtgcccagcagttctaactgctgacaatctgataagngcaaaaagnaactttctgctctgctgctttcattngcacttctntactttctattaaaattgggcaacacctgtntgttgattagctgtttgccaattgttcttccttcaaggactccacccccttagaaatggagcctctccaggtgtgtttgatgagttggggtggagccnaaactntcccctcccttgttttgcntactgcnctttttgttcatacagccctgntnnattggacactgggcncaaagngctcacagaacaatgccccaagctgccattccccctgggggnggtctgatgttaccctggaaaatgtccgtgttnggnataagctaggggggggaccccgnttttaaggcttgggggacccaaaagatcccncccctcctntttantnngggantaggggatnganccacccagaggggaantggccaaaanagccttttggggganncttnaagcccncacntaaggnaccnantggnaaangggggccngggggnaaannttttngaganncccnnccnannggggccttctttnnnannantnggggcttttggacccnnatnccttgncccantgggcnaaaganttttccngccnnaaaacngtnganaccccnttgggcccccnatggggganattt

SEQ ID NO: 4082 - DNA, 860 bp, Homo sapiens
  misc_feature 94, 98, 104, 107, 224, 279, 282, 287, 311, 342, 348, 463,470, 484, 559, 563, 566, 568, 591, 601, 613, 617, 618, 657,669, 683, 684, 692, 703, 706, 709, 720, 721, 724, 726, 734,738, 741, 742, 743, 750, 758, 760, 762, 776, 782, 785: n = A,T,C or G
  misc_feature 792, 800, 802, 815, 818, 819, 831, 835, 836, 844, 849, 850,857, 858, 860: n = A,T,C or G
gggcgaattggagctccaccgcggtggcggccgcccgggcaggttggtaacaacgcagactacgcgggaagcagtggtaacaacgcagactacncggnaagcantgntaacaacgcagactacgcgggaagcagtggtaacaacgcagactacgcgggaagcagtggtaacaacgcatactacgcgggaagcagtggtaacaacgcagactacgcgggaagcantggtaacaacgcatactacgcgggaagcagtggtaacaacgcagagtacctcggncgntctanaactagtggatcccccgggctggnggaattcgatatcaagcttatcgataccgtngacctngagggggggcccggtacccagctttttgttccctttagtgagggttaattgcgcgcttggccgtaatcatggtcatagctgtttcctgtgtgaaattgttatccgctcacaattncacacancatacgatccgggnagcataaagtgtaaagcctggggtgcctaatgagtgagctaactcacatttaattgcgttgcgctcactgcccgntttncantncggggaaacctgtcggtgcccancttgcattantgaatcggcccnaccnnccggggagaggccggttgcgtatttgggcctttttccgnttccttgctaanttacttgcttgggnnggggccgnttcggcttgcntgngangcgggtttaannttnanttaaaaangggnggnnnttccggntttttccncnanatttaggggggttncccccnggngaaaaanacattttntngccaaaaaggccnccnnaagggccacggnaacnnttaaaaangggcnncgttttnntn

SEQ ID NO: 4083 - DNA, 895 bp, Homo sapiens
  misc_feature 61, 63, 78, 79, 83, 84, 85, 86, 94, 96, 97, 101, 492, 498,499, 513, 548, 570, 577, 587, 591, 602, 611, 623, 629, 631,649, 674, 680, 682, 685, 691, 700, 701, 720, 727, 765, 766,774, 784, 798, 799, 800, 803, 805, 806, 807, 812, 813: n = A,T,C or G
  misc_feature 815, 816, 824, 828, 831, 834, 837, 838, 843, 852, 855, 858,872, 873, 875, 876, 884, 889, 895: n = A,T,C or G
ggagctccaccgcggtggcggccgcccgggcaggtactactcagagaaggaacaatggggncntgagaacctcctganngctnnnntttttttntnntttnaaggctgaacagatgagaaattacaatgtttgcattcatgacacctggaggaaaacaaacctacttactatttttaaacaaaaagaaaggcagtttgctcatgtaagaggaagaaacgaagagagccaacgagagtgagcttgagctcaaagcagattaaatatgctttaatagctgcatagaaacctgaagctcataaattttccttcatgtgcctaggaggacagggaattgcatatttatgagtttcgtgttgggaaatctgtaactgtatcttcaaccattatacaacacctttttgaagtagccattccaaaggactgcctgttttgacatttaaaggaaaataacttcaggacaatcattcctacccacattttccaccccatgncttacnnggcccttttctttnacttcaaaaggtgccctatttttggaccattcacnacccccttttttcttgaaagtnagtggcntttttaggancaanttcaaaaagtnagccccttngccaaatttggnttcaantngaaaagggcttacccagnccccccgaaaagggggattaggggnggtttngnccncccaantttttttgnnaggtcctttttccccagantttaaanggcccctcttggaaaaacaaaaaccggtttggcccagnncccccccnaatgggtttnagagaatttcaacnnnccntnnnttttnngnncccttacncccncanggnganntcgcnttaaaaggngtnttncaaagaaaaaaagnncnngtcaaaanaaatncccttn

SEQ ID NO: 4084 - DNA, 842 bp, Homo sapiens
  misc_feature 50, 415, 417, 454, 458, 475, 480, 492, 501, 507, 533, 551,575, 577, 578, 585, 592, 595, 596, 597, 605, 611, 626, 630,634, 653, 656, 657, 673, 674, 675, 680, 691, 693, 694, 695,697, 698, 710, 711, 714, 716, 719, 722, 724, 726, 727: n = A,T,C or G
  misc_feature 729, 731, 737, 740, 741, 744, 767, 768, 769, 776, 782, 790,791, 792, 794, 795, 804, 805, 806, 814, 816: n = A,T,C or G
gaggtacgcggggggtggttgggtggtaaagatggcggctgtgagtctgnggctcggcgacttggtgtgggggaaactcggccgctctagaactagtggatcccccgggctgcaggaattcgatatcaagcttatcgataccgtcgacctcgagggggggcccggtacccagcttttgttccctttagtgagggttaattgcgcgcttggcgtaatcatggtcatagctgtttcctgtgtgaaattgttatccgctcacaattccacacaacatacgagccgggagcataaagtgtaaagcctggggtgcctaatgagtgagctaactcacattaattgcgttgcgctcactgcccgctttccagtcgggaaacctgtcgtgccagctgcattaatgaatcggccaacgcgcggngngaggcggttttgcgtattgggcgcttcttccgctttncttnggtcaactgactcgctngcgcntcggttcgtttngggctggcnggcganccgggtatcagctcaactcaaaaggngggtaaataccggttatnccacaagaattcaggggaataacncnncggaaanaaacatnttnnnaccaaaangcccanccaaaaaggccccgnaaancccntaaaaaggggccccctttnttnngggtttttttcacaannngtccncgcccccctgnannngnntttcaaaaaaanntgncnccnctnanannanangggggnggnnaancccccctggggtttttttaattnnncccgggngttttntcccttgnnnannatttttttnnncccccctncnccccccccccccccccccccccccct

SEQ ID NO: 4085 - DNA, 852 bp, Homo sapiens
  misc_feature 4, 6, 8, 10, 19, 36, 42, 50, 88, 150, 217, 271, 286, 351,450, 502, 538, 554, 566, 604, 618, 625, 667, 679, 680, 697,706, 713, 720, 730, 734, 737, 763, 765, 779, 794, 803, 804,834, 841, 842, 847, 852: n = A,T,C or G
caantngnanctccaccgngggggcggccgcccggncaggtncccggggngactttccctgccggcacatggacctggcccaaccctnacagccagtagacgagctggagctctcggtgctcgagcggcagccagaagagaacacgcctntcaatggtgccgacaaggtcttcccttctttggacgaggaggtccccccggccgctctagaactagnggatcccccgggctgcaggaattcgatatcaagcttatcgataccgtcgacctngagggggggcccggnacccagcttttgttccctttagtgagggttaattgcgcgcttggcgtaatcatggtcatagctgnttcctgtgtgaaattgttatccgctcacaattccacacaacataccgagccgggagcataaagtgtaaagcctggggtgcctaatgagtgagctaactnacattaattgcgttgcgctcactgcccgctttccagtcgggaaacctgtcgngccactgcattaatgaatcggccaaacgcgccgggngaagaggcggtttgcngtattgggggcnctcttcccgcttccttcgcttcacttgacttcgcttgngcttcggtcgttcngcttgcnggccgaagcggtatcagctcactccaaaaggcggtaataacnggtatccacaannaatcagggggataaccnaaggaaaanaacatgntgagccnaaaaggccangcanaanggccaaggaaccctaaaaaaggccgngnttgcttggcgtttnttccataagctcccnccccccctnnccaagcattgaacaaaaaatctaccgcttnaagtcannaaggngggcn

SEQ ID NO: 4086 - DNA, 919 bp, Homo sapiens
  misc_feature 84, 92, 94, 283, 288, 289, 346, 353, 359, 374, 392, 480,502, 514, 522, 554, 555, 568, 576, 584, 605, 630, 633, 636,641, 642, 648, 649, 657, 666, 671, 678, 687, 695, 696, 702,705, 706, 722, 735, 753, 754, 755, 758, 765, 767, 770: n = A,T,C or G
  misc_feature 787, 790, 801, 803, 811, 819, 820, 847, 853, 854, 863, 865,889, 890, 893, 898, 902, 904, 905, 909, 911, 912, 914: n = A,T,C or G
attggagctccaccgcggtggcggccgaggactttaggagacccaggcgggcagattgcctgaggtcaggagtttgagaccagnctggctancntggtggaaccctgtctctactaaaaatacaaaaattagccgggcatggtggctcacgcctgtagtcccaactgcttgggaggttgaggcaagagaatcgcttgaacccaggaggtggaggttgcagtgagccgagatcgtgccactgcactccagcatgggcgacagagcaagactccatctcataatnaaganngaaggaaacaaagaaaaagaaaagcttatattgaacttctctaaaacaaagaaaaanaaaaganagcctngatgcacacaaatcnaaatttggcaaggtcgantcaattaaagggatattttattttgcatcacaaaataattcttttacttccccccccaaaaaaattcaattaaaaaggtttcaaaatnagccaaccttttccctaatggnggtttaaaaaangtgaatcnccccaaaattccattgtgtccccccaaccttnnttttccaagtttntaaatttnttattggnggtaaaagggggagggttttnccctggaaggtggaggcaattaaangangangttgnngccttnnaaaacctnccctggaanagagngggggtntttttttanaattttgnngggaanatnnttggggggccccaaantttttttcaaaanctttttttttttgccccnnnccnggggccntnttntttttttggggggctcnaancagggtttttngnggaaaaantttttttnnccttcccgggggtccttgccccggggnggggcnntttttaaancnaaagggggagaccccccgggggcnnggngagantttngnntttnanncnttttt

SEQ ID NO: 4087 - DNA, 860 bp, Homo sapiens
  misc_feature 2, 3, 6, 9, 11, 16, 41, 54, 57, 110, 238, 240, 659, 676,698, 707, 716, 742, 756, 776, 812, 815, 837, 854: n = A,T,C or G
gnnatngtngncgccntaatacgactcctatagggcgaatnggagctccaccgnggnggcggccgaggtactccagaattctgacttatgatataaaaattttactttgngcttgttgtgattgacagtaaattttttaaaggaatctcaatttgtgttttctattgtgtcattttaatattatgtagtcatctaagatatactaaaggtgaccacaattttagaatatgcatagcananattaatatggagttgattatcaacagaagctaaatgaataaattattgactaatttacactagcctgtccccgaatccattattttggaatcatctgtgatacttatttcttccatgagaagaggaatttagaaactcttattccatttattttgtagtgggtgaaagtaacgcaagcaattttccataagcacaatagcttttcttttagaacaccgtaaatctgaaatacttcctgtctgtcttaacaacattcctgaatgatcatcttaagagctgggtttcccattgtgcttactagtctgtaagcacagcagttgcttcagtatgtatgctactactgcctcgttcctatatgggagaacctcaccatcccaaataagtctgggcaacccttgggagaaaaaaaaaataccttntataatctttataaacnaaagcactacatggtattcagntcagaaccnagatttttnggaaaagaaaaaaaaggtggcctaanaaaataattggggntcaaatagctcacaattttnttaagataatggaaggagaaaatatggaaatattgntcntcaaagaatggcctctttggantaacctattggtaaaanaaaaat

SEQ ID NO: 4088 - DNA, 1093 bp, Homo sapiens
  misc_feature 2, 6, 11, 12, 14, 17, 18, 19, 21, 22, 24, 26, 27, 28, 30,31, 32, 34, 36, 37, 38, 39, 40, 41, 43, 44, 45, 46, 47,50, 51, 53, 54, 56, 57, 58, 60, 61, 62, 63, 64, 65, 71,73, 75, 76, 79, 81, 82, 83, 85, 87, 88, 89, 93, 94, 96,101: n = A,T,C or G
  misc_feature 102, 104, 105, 107, 108, 111, 112, 125, 169, 452, 463, 487,521, 546, 592, 599, 614, 621, 647, 670, 674, 678, 687, 717,732, 734, 744, 746, 751, 761, 775, 798, 802, 814, 819, 829,846, 850, 864, 868, 872, 877, 882, 888, 898, 906, 907: n = A,T,C or G
  misc_feature 909, 912, 922, 923, 930, 931, 935, 952, 953, 959, 968, 970,974, 975, 978, 987, 989, 992, 995, 1000, 1002, 1013, 1022,1023, 1039, 1043, 1045, 1047, 1053, 1066, 1071, 1072, 1073,1077, 1079, 1090, 1091, 1092, 1093: n = A,T,C or G
cncccngtagnnanatnnncnnantnnnannntngnnnnnntnnnnngcnntnntnnngnnnnnntatttnanannttntnnntntnnntagnngnggagnnanngnntgnncgactcactatanggcgaattggagctccaccgcggtggcggccgcccgggcaggtnctttctggtctggggcaaattacactaataactacaatcccccaccctccccaacaaatgagtatgataatataatcatgcgtcttggaggatttcttggataagtaattttaaacagtccaaatataaaaaatgaatactaaatcaatagcatgcttaatccccactaggtccaactcagattacttcttttggatggaagcttcaggcctttgtggtgtcccatatcttagcttttcagagaattctgtcctcacagtgttgtttataagacagtgatgcnaagcagaaaanaatcatcacagtaaacatgggagnagtatgcatgttcccgaattttcattttgtcccntgtcgcctggaagcccactcttacnagtctttcttgaaataaggtaaaacttgaattaacccccgcaatanaactggnttttcttcccccatnaaaaaantcaggttggcataaaaaggggcaggnttaaatggatgggggaagggcancccngatngttgtttangtcctaacgggtgggacaatttttgggganggcttgatgggcttntngggccacccntncaggnccttttttcnttgttttcccgaanggtccacctgggggaatgccctngggnggggcccctttngggantccccccccnctggggttatttcccanaggnccccttttgggccnttgntccncaggnatttnccttgnggcccttggntttttacnngntcntggggccttnnttttcanngttngggtgccaaaggggaannccccancctttttgngncagnngtngtttttaangnccncgnggaancntttatacaagncccttttcnncccccagaaatttttncttnancncccctnccccggttccccnaaagnnnaaananagataaaatannnn

SEQ ID NO: 4089 - DNA, 516 bp, Homo sapiens
  misc_feature 2, 5, 9, 11, 12, 16, 22, 24, 25, 27, 28, 36, 39, 42, 43,44, 46, 49, 50, 51, 53, 54, 55, 56, 60, 62, 63, 70, 71,72, 76, 78, 79, 80, 81, 82, 83, 84, 85, 87, 89, 94, 95,450, 489, 516: n = A,T,C or G
tngtntgtntnnattntctttnanncnntcttcttnttnttnnntnctnnngnnnnaggntnnccacgtnnntcantnnnnnnnntngntatcnncgcgcgtaatacgactcactatagggcgaattggactccaccgcggtggcggccgcccgggcaggtacgcgggaggtcatggaaagtaagaattattactatcaaggggctgatgggccaaaggagggaaggaattaattagaggagctaacagaccaacaaacaaacaaacaaacgagcaaaaaacccaggtcccaggacagggaatcctgatggggcggaggtggtatctccgcagttactgagagaggggctgtggtcagtttcttccccttgaagatgtttcttccccttgaagatgagaatgatgttaatatccactatctggagttgttctgaagatgaaatgacatanatccatgcaccaagcatgtggttaagtgctcaacttatngtattaacagaaaattcaatagtgccn

SEQ ID NO: 4090 - DNA, 399 bp, Homo sapiens
  misc_feature 393, 399: n = A,T,C or G
ctcactatagggcgaattggagctccccgcggtggcggccgaggtactgacttttggagttacttaagaaccacagttcctaaaacattttatttgggagctcaacttctggcttcctacttaccaagaggcagtaagttataacctctggcctttgtctttacattttcaactttctggatccctaacctctggtcccaagttactacccttgcctatatccactaaccactcactaggtcacaaagttgatggctctggcttgacccagtgaatgagaagtgtcctagatgttttgtttttttttttttcgcaaatcttcataggcacagttgcctgtttaattttttcttcagcccttcccttagaggagggagccttaagttacctttnaagggn

SEQ ID NO: 4091 - DNA, 403 bp, Homo sapiens
tactatagggcgaattggagctccaccgcggtggcggccgaggtacggcttagctggacatcactccgaattaaacaaaaagaaacctcttgtgagcttagacttaacccaatctagaggcagaggctttgttgagatgacctcctggggtcttttgcagtttacagttcagatcctttgcttggttgttaagatatgtgtgtggggctccctgtaagagccaagaagctagcgctagtgaagaatgtggactgttgtctctgcgtgtttgtatcagtgtgctgtaggaaagatcaagctagcccacggcctctagggcctgtgccacagggctccttcccgtgctcagtatgcgtgcctttaatcacaacccagccctcttcactgagagccctctggtgcc

SEQ ID NO: 4092 - DNA, 401 bp, Homo sapiens
tactatagggcgaattggagctccaccgcggtggcggccgcccgggcaggtacccagctgagactggctaattctaattcctcccccacactaacctgcctctgccaggccagctgtgctcactggacagaaaccaccccatgctttccaccctcctgcatgatggggacatggattccagggcccagctgtcctgggacatcaccacctctgactgactttccctcatcagcagagaggcctgcccaagaggagtctctccagtcagtgatcaaacgtgcctagggtaggagcgagtgccgctgcctcattcatcactgctgccagggcccggtgctcctagggtcaaatttcattttctcagcatccttgtttcttcttggtgctgaggggtttggcct

SEQ ID NO: 4093 - DNA, 392 bp, Homo sapiens
  misc_feature 47: n = A,T,C or G
gaattggagctccaccgcggtggcggccgaggtaccatcctagacangctctgggagtgttacataacgtatggtaagtgtgctacatggcctttctgaagcccaaaccattttgcattatgaaaatacctggccccaggaatttcagataagggattgtggacttatattttaaatctgtaactcctatagacagtaatttcatagagccagcttcatggagttgtaaatattactgggctagggtcagtttcctcattttaggcttcctttaatccagtccagacaccaaattaaatgtctttgtgtagtccccttcaaagcctcttgcaatcccagtcatgcttcagggtagggatgatcccattaatccaaggacctgcccctagtga

SEQ ID NO: 4094 - DNA, 402 bp, Homo sapiens
  misc_feature 271, 306, 397: n = A,T,C or G
ctatagggcgaattggagctccaccgcggtggcggccgcccgggcaggtacgttccaggaatggtagatagagcatacatatagggcaggctgagaggctggaagggctgccttgaatgccaggctaaggaatttggacttcctaaggaagcatggaatgaattttaggctgggaagggataggatcagatctatgttaatattgctcaccccaattgcagcgtagaggatgggatagaagggaatgtatggattcagggagatggcttanaaccctaagattcatggtagcagggtctcgagcangggcttgcttgagcaagcaggtcctgtggagcaggtttgtcttaactctcgttgtctttctgaatgggtatcaaagaggggcttcctgcanccttg

SEQ ID NO: 4095 - DNA, 429 bp, Homo sapiens
  misc_feature 6, 7: n = A,T,C or G
gatagnngacgcgcgtaatacgactcactatagggcgaattggagctccaccgcggtggcggccgcccgggcaggtacgcatgctcctttcccacttatggcagccacagagtgctctggaccaacaatctaaccagtccgttgaagcgtgtggtgaagccggccaggaatcaaggggctcagaggcaagatcaggggtgtgggatacagcaaagcccctgggtcctcggacagcatcaaatgaagtatactgtttgtttccactctccatttaactggaatgtcctgagtgctgtttgccgggacctgggccaggtcctctcgcattcctgatcttcaggatgctctcttgacattctgattgttctcctcattcagcttgttcattcattgagtccttcattctaccatttgttctttagtttcttt

SEQ ID NO: 4096 - DNA, 911 bp, Homo sapiens
  misc_feature 2, 3, 4, 5, 7, 8, 15, 18, 351, 353, 382, 401, 421, 443, 462,522, 528, 565, 572, 588, 634, 675, 682, 685, 715, 720, 758,768, 772, 795, 797, 815, 820, 831, 837, 842, 873, 876, 893,909: n = A,T,C or G
gnnnnannggccgtntanacgactactatagggcgaattggagctccaccgcggtggcggccgcccgggcaggtacacagtgggcgctggggaccagggccagagagtggccacctgttagagctgcatgtgtgtcttgggcctggtcttctttctctgctcactaatgacagctgtcccagcctcttgcaggctctggcccaccaccttgcttgctgtgattttttttttttttcctcacacatgataagctgaggcaggagaatccgcttgaacccgggaggcggaggttgcagtgagccaagattacgccactgcattccagcctgggcgacagagcaagactccgtntnaaaaaaaaaaaaaaaaaaaaaaaaaaaangtgacaagcagagcaagcncatttaggtgacacccgganatggaatcgggacggcaggatnagcatgggtttgtggcganaaaacccggggcaataatgacatacaatgcaaatttgccagagtcagcaaaaagcctatntggtanaaattgccaaagaacagaaaaagagggaagggtcaanaccttantgcaggctacttttgntacttgacaagcaacccggcacaaaaggagtgtttcactggaagtnaaggaaggaggaaaccaggaggggagatgctgggagccttnaaatccncantttcctggaacaccaaagtaaaatcccatnggttntactttttttttttcaccctttatgaattaaaaggggngctttttacnactngctttttaaacctttatgtggcnantgtcctgaaaaaaaaaanttttnccgggtccctnggtggngaaanaaaaaaccaaaattcccttttttaagggaanaanaaaaatttttcccttgngccgttttaaaaaaanag

SEQ ID NO: 4097 - DNA, 893 bp, Homo sapiens
  misc_feature 7, 581, 612, 628, 648, 651, 654, 671, 683, 693, 722, 726,729, 744, 745, 769, 770, 788, 796, 797, 801, 804, 812, 814,815, 816, 829, 836, 842, 845, 867, 868, 871, 873, 879, 880,890, 892: n = A,T,C or G
tgtgacnccgtaatacgactcactatagggcgaattggagctccacccgcggtggcggcccgaggtacaggaaaggagacttagtcggaaaaaagtcccctataaagggaggggaccaggagggtgctgtcctggaaatcccaggaggaaaatggtcaacacccccagcactccacagagagttgaagtgaaggtgtgtgttgcatctggcaactggaaactcatggatgacttgagcatgaacaggtgccccagggtgggggtgtcataacccgggagagagtgaagcaaggacttggagaacaggggtggtggccactctctgtgggcagctaaatacagcagcagcgcagctatgatggccttgcctctgcacattcgtggctggcccgtcagccctcctccctgaatcatatccccttactcactgttgctcactttgttgtctgcttcattgcccaaattggcaatgacagtttccttttcacctccctctggaagctcaaatttcttccgtagccttatgactgttcctttgtgacatgtttaggtttggagttttcttttactgtaaagccctnaccgagcgtctttggcttccaccaccacctnttgctcttctcctgangccctggtacctgccgggcnggncgntctagaactagtggatncccccgggcctncaggaaattngatttcaagccttattgatacccgtctancctntangggggggccccggtnnccaaatttttggttccccctttanntagggttaaattgcgccncttggcgnnaaanatnggccatancnnngttttcctgggtngaaaatngttttnccnttaccaatttcccacaaaaatnnccnancccggnnaccataaaantnt

SEQ ID NO: 4098 - DNA, 894 bp, Homo sapiens
  misc_feature 1, 503, 615, 644, 663, 670, 692, 740, 762, 763, 766, 768,777, 808, 812, 867, 868, 889, 894: n = A,T,C or G
ngtggccgcgtatacgactcctatagggcgaattggagctcccccgcggtggcggccgcccgggcaggtacattataacaaagtttttaacatggacttcagttgaatatttaaaaacaaactatttttggtaataaatatttttatcagtttctcggtcaaatctgtcactaatactgtgtcactgatacttttctgaatatgattttccatctggttttactagttttaattttttcataaaattgcagtattttgcagagttacattttatacttgtggttgttaacttctacagttgatgcttcactataaccaataatgtttttagttgctaacatactttatatgtgctgctgtccccagttagctcaggaaaaattttgctagatggagaatattcttaattctaatttttttcttattgaaaattataggctgggcgcagtggcttatgcctgtaatcccagcattttcggaggccgaggcagatggatcacctnaggtcaggagttcaagactagcctggccaacgtgatgaagcccccgtctctactaaaaatcacacacacacacaccaaaaattagccagggtgtggtggcgggaaagctganggaggagaaatcacttggacccctgggangcaaaaggttggcagtgangtggganaacatgccactggtacctcggncgctctaaaaactaagtgggatcccccccgggcctggcaggaaatttngaattttcaagccttattgatnnccngncgaacctcngagggggggggcccggttaccccaacttttngttnccctttaagtgagggggttaattgcgccccttggcgtaaaatcatggggcaaagnnggtttcctggggggaaaattngtaan

SEQ ID NO: 4099 - DNA, 432 bp, Homo sapiens
  misc_feature 3, 113, 172, 242, 251, 253, 310, 332, 338, 383, 385, 412,421: n = A,T,C or G
gtngagcgccgtaatacgactcactatagggcgaattggagctccaccgcggtggcggccgcccgggcaggtactttttttttttttttttttttttttttctttggattttnaagtcagtgaaccaggcaatcaccgacactgcccgcgcattatgggcctaattctgcanaggtctgacaaacctgcccagagacagaagattaagctattccaaattacccagacggaggcaagcccanattgggctntntgggacagaggtgggggtggggggacctttcatttctgctctttggagacctccaanactaaacagtttaaaccacatnttgaanaaaattgcctaatcctttcacctttaagtggattccggtgcaatnanttgatttgggagcacccggaggtcatntcacacacnccaggatgggg

SEQ ID NO: 4100 - DNA, 430 bp, Homo sapiens
  misc_feature 3, 5, 228, 428, 430: n = A,T,C or G
gtngncgccgtaatacgactcactatagggcgaattggagctccccgcggtggcggccgaggtactgacttttggagttacttaagaaccacagttcctaaaacattttatttgggagctcaacttctggcttcctacttaccaagaggcagtaagttataatctctggcctttgtctttacattttcaactttctggatccctaacctctggtcccaagttactacncttgcctatatccactaaccactcactaggtcacaaagttgatggctctggcttgacccagtgaatgagaagtgtcctagatgtttttttttttttttcgcaaatcttcataggcacagttgcctgtttaattttttcttcagcccttcccttaaaggagggagccttaagttacctttcaaggttgggggttaggaatntn

SEQ ID NO: 4101 - DNA, 925 bp, Homo sapiens
  misc_feature 1, 3, 10, 11, 511, 597, 647, 650, 663, 687, 691, 694, 710,717, 719, 741, 756, 760, 773, 778, 786, 792, 803, 822, 829,830, 832, 833, 856, 869, 872, 878, 879, 885, 896, 897, 900,901, 910: n = A,T,C or G
ngnggccccnntacgactcactatagggcgaattggagctccaccgcggtggcggccgcccgggcaggtacgcgggctcccaaagtgctgggattacaggcgtgagccaccacgcctggcctcacctgggactcttaagtgatctattcagggacaaaatcaggatggtagtgcacagacaggatcttgacattgatctggaataacgaatcatgctattttgttatccagaattctttgacaatttttgtcttgccctttccctttcaacccttcctttaaaaaaagaaaacgaaagtagaaactattctgatctttattaaatggttaatagactataatgacagtcagcaagaaaaatttttctattccttctaggagggcttagaaagttcattgttgcaacttagctctttaagaattgttgtagtatgggaaatatgctggttttcagctgtgtggaattagaaagggctttaggatgtaaataatgcattttcagtgaatcaanacagctctttttttaccatgataaaagtttgccattcttgtattttcagaaaaagaagggggagcgttcaattcccaaacaggctnctttatttttggagaaaattcccgacctaaagaatgccgatttccccttnaanaagatacccaatngggcattgctggtgtttccagttnaaanggnaattttaaaaccaaangggttgnanttgatttggtgcccattttaanaaggggaactttttnggtnccttgggcccgcntttanaaacttantggatncccccgggccncaaggaattccgaatttcnaagcctnntnngaattccccgccgaccctctganggggggggccccngtncccaannttttgnttcccttttannggnnggggtaaanttgcccccccttggg

SEQ ID NO: 4102 - DNA, 405 bp, Homo sapiens
ggcgaattggagctccaccgcggtggcggccgcccgggcaggtacgggggcctctgtaggctgcctagggagccctggctttgctcttcgtgttgggctcactccatgatcaggagccggtgggactggtccttcctgattcttactgtctgtggttccccatcccctacggggagcctgctttgggccttgagctggatagagagaagagctttggggcccagctggttataggagctgagcttttccacacctctctttgttaacccttggaaacagacctgcctttcacctgacccatcttcctacctgtctggtctgacctgccctctttgaaagcactcatcacctagttttactaggctgattggcagatgtggacatgacaggtgtctatcgagatag

SEQ ID NO: 4103 - DNA, 405 bp, Homo sapiens
gggcgaattggagctccaccgcggtggcggccgcccgggcaggtacagcagtgcaatctcagtcccctgcaacctctgcctcccggactcaagccatcctcccgcctcaacctccaagcagctgggaccacaggcacgcaccatcacactcagctaattttttttttctttgtagttttttttttgtagagatgaggtctcaccgtattgcctaggctagtctcaaattgctgggctcaagtgatcctcccacctcagactgccaaaacactgagattacaggccaggattctcaatttttaagagtgtaaaagtgtcctaagaccaaaatatttgagatccctaatacaggcaataccatttctcaatgcaggtttattatttttaattcttattttgagagac

SEQ ID NO: 4104 - DNA, 400 bp, Homo sapiens
  misc_feature 259: n = A,T,C or G
tagggcgaattggagctccaccgcggtggcggccgcccgggcaggtacgggggcctctgtaggctgcctagggagccctggctttgctcttcgtgttgggctcactccatgatcaggagccggtgggactggtccttcctgattcttactgtctgtggttccccatcccctacggggagcctgctttgggccttgagctggatagagagaagagctttggggcccagctggttataggagctgagcttttccacacctntctttgttaacccttggaaacagacctgcctttcacctgacccatcttcctacctgtctggtctgacctgccctctttgaaagcactcatcacctagttttactaggctgattggcagatgtggacatgacaggtgtctat

SEQ ID NO: 4105 - DNA, 543 bp, Homo sapiens
  misc_feature 6, 9, 14, 15, 22, 31, 32, 33, 34, 35, 40, 42, 44, 45, 62,64, 67, 70, 73, 77, 78, 79, 82, 83, 89, 90, 92, 99, 103,192, 205, 207, 213, 219, 220, 256, 257, 259, 313, 316, 317,418, 458, 461, 474, 480, 496, 503, 505, 511, 523, 536, 540: n = A,T,C or G
ccaccntgntattnnttttttntctctcctnnnnnctctntnanngcaatttgaatgataantnatntantanatannntgnnaagggnngnagaaatngatnctatagggcgaattggagctccaccgcggtggcggccgaggtaccgtgaatctttaagttttagggtgtggggttttccccttaccaantgcaatattaccnanaaaagnataatnncctgagttaaatagcctctttgaaaaacattcatannangccaagtgggttatatgaatggctactctgtcttgattctcagtacctgccatntcnngtccatgccattgatggccagcactgcatgacccactcggatgccgttcccgctggcctaaagcaaccaacacacgctcatcgtgtagcttgagcagcagnatccaagcggatatactgaaaagttttctcagccttagcnccntgggcgccgttancctgtnccaacctgggtaaaantcaagcncngcccantctttttggttncaacccacaattncacnacc

SEQ ID NO: 4106 - DNA, 381 bp, Homo sapiens
ggagctccaccgcggtggcggccgaggtaccaacgtagggctttgattcagaagagtgtgctgtgaggaggcaggtgccaggcggattttatcatgacctgggtgaaagccatctgccctgcagagggagctgtttcagaactcctaataggaaagtcaaacgtccagcacagccagtgcaagagtggtcccaccagcacagtcctggcaaaactcttgactgtgtagccttcaaatctgattctctggatctctgggtggtcccatgaactatataataacatttgatgaaactttttttctgttagctggtgtagattctgtgatgtgtaattgagaatcctaactgaacccacaattttgctcttgatcttttttttg

SEQ ID NO: 4107 - DNA, 388 bp, Homo sapiens
  misc_feature 106: n = A,T,C or G
gggcgaattggagctccaccgcggtggcggccgaggtacgcgggattcaagtaacagaaatctcccttcccttctttctctgatgtgcagtagttctgcctgttanaatcatctggagagcttgttaaaaataccaatgtcaggagctcgaccctagagattcaaatttaactgatctggtgtgggacctggaaatcctctattttttaaaagttccccagttgaggccaggtgcggtggctcacgcctgagtcccggcactttgggaggccgaggcgtgtggatcacttgaggtcgggagttcgagaccagcctggccggcgtggtgaaactccatctctactaaaaatacaaaaaaaattagccgggtgtggtggttgcacacctg

SEQ ID NO: 4108 - DNA, 383 bp, Homo sapiens
gaattggagctccaccgcggtggcggccgcccgggcaggtacatttcaattcccagtggtgcaggctgggagggccatgaggagggagggaaacagacctgtgcctgcagctgctttcttggccacctctgtcctcctccttggtgttctttcctcttagggctggaggcctgctctcaccacctgggaaggagtctggagaaagacgggtcctccctggctccgtggcggcagagccgggattacccactgacattatagctggcagccgtgggctgttggcaccctttaaaagaacacgatggcaattttccagctaaattctcccaattaggcagttagagaaacattatccacctcagcataaagctgatgaaatggag

SEQ ID NO: 4109 - DNA, 405 bp, Homo sapiens
gactactatagggcgaattggagctccaccgcggtggcggccgaggtactttttctttttcttttttttttttttttgttgtttgttttaaatgaaaccctctaggcctcattttcagtgattttgattaggtggactggaagagacactcctctaatagttccaccaaacagtcacaggaacaagaaaggcacatcaggaaaagccacacaggaaatggttttgccaaaagccaaaaaccatgagcatgcaaaaaccaaagtaaattctctgtaagtcacaaaatgaagcatacatcttttttttctttgagatggagtttcgctcttgttgcccaggctggagtgcagtggtgcaatctcggctcactgcaacctccacctcccgggttcaagcgattctcct

SEQ ID NO: 4110 - DNA, 861 bp, Homo sapiens
  misc_feature 649, 664, 682, 728, 757, 792, 795, 825, 827, 829, 831, 847,853: n = A,T,C or G
actcactatagggcgaattggagctccccgcggtggcggccgaggtaccttgctccaccaatcccagctgtcacatcagccctatatgccagtctctgggattttgcttttgtgttttctgtgtaaaaacactgctttttgtttgggctctgctttcctgtgttactgtttagacagtgtccccagacagaaaaatggagaatggcaagattaccttatgtgtttccccttctttgaaggatcacagcctttttatgtcttctgtctaatgcatgaatagggttgcttcatgtagtttatccaatttacaattgtttatggcaaaagggtaactttgataccttttactctgtgatggctgtaactagaagtcctattaatgcctttttaaattaaaaatagcactgccaataaaaccttaatttccatacatcaaaagtcaaccaaaggaaactaataagtagtaaaataaaaatgtggggcaagggtgtgagcagactcgtgtaatttcccattattttaattttcttagaataaaaaaaattccaagagcccgcgtactcctattcccagcagcacagttcacaagctctgtggctgacatgcagaacatgcctgctgctgtgcacgcactcttgacacaaccctntcttcagcgctgctncttttgctcagcgggtantttgggaaacactcccttcacctggaagcacccaccttgccctcantgcccatgctgggcaatggccacaagtcntggggcttctcaagggaggcccttcccttatccanctngttgcagggaaaaacctgtgccaaaacctntntngnctgggggggaattttnttaagnaccaaaat

SEQ ID NO: 4111 - DNA, 868 bp, Homo sapiens
  misc_feature 696, 729, 757, 784, 794, 808, 815, 816, 848, 853, 857, 858: n = A,T,C or G
cgtaatacgactcactatagggcgaattggagctccaccgcggtggcggccgaggtacataaagtgtgtgttgttttttaattattttgaactattcagtatattgaaaaattcaatttttgtttttctctgcatttgggcttgttccttttgctagttttctgattgatttgcatagaccattgactggatgttgtattttttttttctcaaagctaaactgtatgaaaaatcaagacttaaaaaaggtaaatggaggcagttgcacaattacatttgtttaatgagcttttacattttaaaacttttaattaatgttatactatttcagaaattcaactgtagttataaaattataaagaatgcatttgttatttaaagtgagatatgcgtgcagacacacagaccatggtcttcccttcttcctctggtctactgcttctgccttatatcccctagattccttctcactccccaaaaggcagaggttaagaagaaagttaaaatatcaagacacactaaactgtttttgtggtgagtcaagctgcagtgcctcgctgactgggaaacaatggggctgggcctcctagaatatagtaggctggagaaacagaaaatacagcttgactgggccttgccctctcactccaagccctcaacagggatgctagagccttttagcatgctttctgctgnggcctgggggattatttttcttggcaacctagnacaaaaaaccccccaaaacttccccatnggtttgtttttcaagccacctgggaanattggaaaanggcttgaaaggaanaacttannccttttttgaatggaaagggaatggaccttangttcnttannattttttaag

SEQ ID NO: 4112 - DNA, 910 bp, Homo sapiens
  misc_feature 420, 423, 475, 515, 525, 531, 533, 535, 556, 557, 570, 585,597, 607, 618, 669, 681, 686, 687, 705, 711, 726, 731, 732,746, 749, 751, 755, 761, 777, 783, 786, 787, 788, 791, 800,808, 810, 819, 827, 834, 842, 848, 849, 852, 858, 859: n = A,T,C or G
  misc_feature 860, 861, 862, 864, 867, 871, 872, 873, 876, 888, 893, 894,897, 899, 900, 904, 907, 909: n = A,T,C or G
gaattggagctccaccgcggtggcggccgcccgggcaggtacgcggggacacaattttagtaataagcttcaaaacccatcactccactgaatccagggatgccagaattgagagtccataggacccgtttaacggatcccacattcagtagacggttttttgtatgcttcgagggaaggaaggtattttcaaatgcaacttcttttttttttcttgctctagttagggctgattttaccactgggcaaattgcatacatttggatccatgccacgctaaatactgtttattttggagatctgtcagaggcaagcacatggaagacaaggggattcttggtttgaaaaggcaattctcatccagacagattcagatggagaggagcggtgtggattaaaatgcgccgaagtgacagcgtnttnaccctgtcaccgtaagctggagtgcagtggtgagatcacggctcactgcaanctcgactttaatgggctcaaagccgatttcttctgccctnagccctcctnaagtangntngggatcataggcacttgccannacatcccggcttnaattttttttgtagnagacaggatttnaccacctttncacaggctggntttaaaaacttccgaagcttaagtgaatcttgcctggaatttggccttccnaaaagcgcctgnaaaannacaaaggcggtgagcccntttacnccttggcccttccanaacanncctttggtttgggnggntnaaangaattnaaaccaaaggaccccncggggngtnnnccnttttttttngggggggncnaatttaagngaaacccnttttttntttccccncctccnnganaaaggnnnnnanggngtcnnnatnccaaatactttnccctnnccnannaaanaantnt

SEQ ID NO: 4113 - DNA, 930 bp, Homo sapiens
  misc_feature 70, 126, 195, 220, 338, 436, 444, 446, 460, 475, 496, 521,544, 568, 578, 582, 586, 594, 615, 628, 634, 646, 666, 670,673, 676, 684, 689, 696, 699, 720, 722, 732, 739, 756, 759,770, 775, 776, 777, 783, 785, 786, 795, 797, 801, 806: n = A,T,C or G
  misc_feature 817, 823, 830, 835, 837, 841, 842, 844, 846, 855, 863, 864,880, 881, 891, 892, 895, 898, 906, 908, 913, 918, 919, 920,923, 926: n = A,T,C or G
gaattggagctccaccgcggtggcggccgcccgggcaggtactttctttttttttttttttttttgctgntgttttcttctctgtctttttaactttgcagaaagcccttccagttatacactcanaccctgttcaggacgttggtggccaaacagtccccttttgttaagcgagcgtcccatttttgtttctcntgaaaggtgtcctccaggacagcanagcctttctttgggctgtttataattgagccctgaagaaaaacagaaatcattctaaacccaggccaagtgcctccttggcctagctaggcaaagctaaactcacacaagatgaaatntaaccagctggttacctgagaaccacctttcgggagttctccggcttgactgctttcgccttggccaccatcttgagctccagcgacagctgagggtnagggcctntntgtgcagaagagtnggaagagaatcatanctgttggtgaaaggttaggtngcattgttttgaaagggtcctaatntcaagctttgcaaaaatgctatnggatttggaaagaattcctgaaanaaatgggttnggangaanaaaatttnatggacccggtaagttctaanttgttttttggangtgggngccaattttaancccagggaatttttttcttntttngcnggntcaaaggnttttnaaaaaangtntccctttttaaaaaaaaaggngnggtgggaatntaatttnttttccttaaatttaanaanaaaagggggtntttannngctttnanncccccttgnanaaanatttnttggccttttntttttnttggccnttttntnttcnncnanatttttggngctctttnngggaaaaatggggggnnaaataatggnnttnganaaattggnanggggnggccnnnttntantttt

SEQ ID NO: 4114 - DNA, 899 bp, Homo sapiens
  misc_feature 403, 495, 520, 551, 563, 623, 633, 641, 645, 650, 652, 669,688, 695, 696, 700, 746, 754, 763, 764, 765, 766, 768, 773,783, 785, 790, 806, 808, 809, 810, 812, 820, 822, 834, 845,848, 852, 859, 893, 895, 896, 897, 898: n = A,T,C or G
gcgaattggagctccaccgcggtggcggccgaggtaccacacattgcaggctggaagacaccaagggagacacatgttagttgcaactattgggacaggtgtgtcctgttaacacacaggcagttgctgatgtgcagactgggtttatgaacaacttgcgcatgtggcctatgctgggtgcatgtaaggcagatggcctttgcccctaattctgaaaacatgaacagtgagtgctccaaggatgcacttactcccatgtcaaggcagagaataagcgagttactagagcaaagcagacccgcctggtgtggctttgccttcccaccagccagagggagctttctattcgccctgcagcagtattaaaccctcgtgtcccaggtggagcccaaggcaccttctntggtctcagggtgggtatggacaacagtcacattaatatgaaacccaactactgttataggtaaggagcccagagcccttgagaaacaaccntgagggaagcatgtgtcctcaaatnctggttgccaagagaaggaatggctttgcantgagcctcaganaaccaggctggaaaaaagcccaaaagtggcccggcctcacctgtgtcctggcttcccccntgctgccaangggaagancctntgggntntttgtcccttgaccatnttcttttttgggaagaaanaaaaaannactngggcttccttaacaaaccccttttttttccctttttagccctgtgnaccccttnaattttaannnntnaagtngcccgttttnanttttngggccttggttgaaantnnngngttcaaananaattcagccttnagcccggaaantcntttnattgaanttaaaccaaggggcctcttcttggccaaaagggntnnnna

SEQ ID NO: 4115 - DNA, 922 bp, Homo sapiens
  misc_feature 5, 490, 504, 531, 568, 596, 606, 610, 611, 625, 630, 631,634, 642, 643, 648, 649, 660, 663, 665, 668, 677, 686, 701,706, 711, 715, 724, 727, 740, 742, 744, 745, 756, 758, 760,761, 762, 763, 767, 780, 781, 786, 789, 791, 802, 803: n = A,T,C or G
  misc_feature 814, 817, 826, 828, 835, 837, 843, 844, 859, 860, 862, 863,864, 880, 894, 896, 902, 907, 914, 916, 917, 918, 919, 920: n = A,T,C or G
ggcgnattggagctccaccgcggtggcggccgcccgggcaggtacgcggggagactttccctgccggcacatggacctggcccaaccctcacagccagtagacgagctggagctctcggtgctcgagcggcagccagaagagaacacgcctctcaatggtgccgacaaggtcttcccttctttggacgaggaggtccccccggccgctctagaactagttggatcccccgggctgcaggaattcgatatcaagcttatcgataccgtcgacctcgagggggggcccggtacccagcttttgttccctttagtgagggttaattgcgcgcttggcgtaatcatggtcattagctgttttcctgtgtgaaattgttatccgctcacaattccacacaacataccgagccgggagcataaagtgtaaagcctggggtgcctaatgagtgagctaactcacattaaattgcgttgcgctcactgcccgcttttncagttcgggaaaancttgtccgtgccagcttgcattaaatnaaatcgggcccaaacaccgccggggggagaagggccngttttgcgttatttggggccgctttttncggcttttcnttgnnttcaactgaactcngcttnngcntctggtcnntttcnnacttgcgggcnaancnggntattcaatnttttacttnaaaagggcgggttanttacngtttnttcnccaaaaatnaangggggataaaacncnannaaaaaaaacantngnnnnccanaaaagggtccagnnaaaangtncnttgaaaccctnntaaaagggccncgnttgctgggnanttttttncntaaggnnttccgtcccccctgnngnnngtagttataaaaaaantgacccctttaaantnaaaagngtggnggtaacncnnnnnga

SEQ ID NO: 4116 - DNA, 963 bp, Homo sapiens
  misc_feature 270, 406, 517, 524, 528, 536, 564, 579, 584, 590, 596, 637,646, 657, 670, 672, 686, 688, 694, 697, 704, 714, 727, 729,733, 767, 776, 783, 784, 787, 790, 796, 800, 805, 810, 812,820, 822, 826, 831, 840, 841, 851, 856, 859, 860, 866: n = A,T,C or G
  misc_feature 867, 870, 872, 875, 878, 880, 893, 895, 901, 921, 925, 929,930, 940, 944, 947, 950, 958, 959: n = A,T,C or G
gtaatacgactcactatagggcgaattggagctccaccgcggtggcggccgcccgggcaggtacaggaaatatgcttacataactactctttatggtatgggatgggaaaagctaggaagccagagagcactgggtgctagatgcattaggaaaagccccccatctactccccacccccacactctgcatgggcagccaccagtcaggggctgtgctcactgatatccaccacccctgaatatgtccccaccacctgcaaggggccgacngatggagcctactagcaatcactgcatctttggtttactggtcacagcatgttaacatttagcttccttttccccctcaggagttttaaaaatgatggcagagaaagtatgccatgtaagagaaaaaaaaaaaatnccactagggagatgagcagaccaggttagcagcctgcttcagctcttgggaaggtaaagaaaccttttccggacccttggtttccttttcttgataagccacccaacattnttggttnaccnttcaaaantttttcagaaaaaactttttaaaaaatnattaaaaattggtanttacnaaaatngcccgnaggtattaaaacaatttttaatggtttttaatttggaattnacaaaaatngcccgaagttnttaaaacattttnantggttttcccgggntnaatttnaanggggagnttttggtccnttttgggaaatanangtgntttgggttttaaaggggaaaaaaaaaatggggcnttttgaaanaaacctnnggnccncttttnaaanttaantggantnccccccgngnctgnccagnaatttttgnnttttaaaacnttttnttnntccccnntgnanccntangnggggggggcccgnancccccnattttttttttccctttttntggnaggnnttaattgggncccnttnggnggatatanntggg

SEQ ID NO: 4117 - DNA, 912 bp, Homo sapiens
  misc_feature 487, 540, 586, 592, 615, 619, 627, 639, 645, 646, 647, 651,665, 671, 679, 683, 697, 699, 701, 716, 728, 729, 730, 745,747, 748, 762, 765, 766, 782, 793, 794, 800, 801, 804, 805,806, 807, 827, 832, 833, 834, 840, 841, 846, 848, 850: n = A,T,C or G
  misc_feature 851, 858, 861, 862, 868, 869, 870, 871, 872, 873, 874, 875,879, 880, 883, 885, 888, 889, 895, 896, 897, 902, 904, 905,909, 912: n = A,T,C or G
actcactatagggcgaattggagctccaccgcggtggcggccgaggtactgcaatatgtcatgaagaaccaagagaagctaagcagtggcgatgtaagattggtgggcagacagactgaaagcaagaagaaccgtgaagaggttcctggagaaacccaagcctgaagtgtctaatctaggatgatgggatagtaatggagagaggaacaaatctgaggtaatctgagggaagaaacaacagaatttggtggccgactggatatacaagacgaaaaacagtcaaaggcaggggttgcaaaggcaaaggtggtcatgggccaggcaggaaatatgaatgggagaagcagctaggtggagactggcaagccgtgaaccccggcgccatctaaagtggatgcctgaccctgggatggagcccagagtagccagttcttgctctgccttctctctgggtctctccagtctcacttccctccagtccaacctncacgatgtgtttcagggtgtcaaagcgaccttttgaaacaaaaaccttaattnttgtcacatcactgcttaaaaatctttaaatggtccccccttggangctatnttttttcacactgttttttttancagncaaacccntttctttaaatnaaaatnnncctngcccgggcgggccnttttanaaactttngganaccccccccggccntngnggaatttttattttntaaccttttttnnnttcccgtccccctcngnngggggggggccccnttnncccccttttttttttnccttttatatnnggggtnnatnnnnccccctctggggttaaaaantgggnnnttattnngtttncntnnggtgaantanntttttnnnnnnnnctannctncnaanntttttnnnccctntnntttntan

SEQ ID NO: 4118 - DNA, 1207 bp, Homo sapiens
  misc_feature 3, 11, 13, 22, 23, 25, 31, 32, 43, 45, 47, 48, 57, 59, 61,65, 74, 75, 77, 78, 80, 84, 85, 91, 92, 94, 97, 106, 222,455, 481, 534, 535, 555, 584, 595, 602, 680, 692, 705, 721,739, 773, 803, 812, 817, 826, 828, 835, 836, 839, 842: n = A,T,C or G
  misc_feature 849, 851, 869, 879, 881, 909, 916, 923, 927, 928, 935, 957,970, 974, 975, 981, 988, 990, 994, 1012, 1035, 1041, 1050,1059, 1067, 1069, 1070, 1071, 1074, 1076, 1080, 1084, 1087,1091, 1095, 1096, 1098, 1108, 1117, 1124, 1127, 1134: n = A,T,C or G
  misc_feature 1148, 1149, 1155, 1172, 1173, 1174, 1177, 1184, 1185, 1186,1194, 1197, 1198: n = A,T,C or G
ttnaatttttngnttctttttnntntttttnntattttctcgnanannagttttttnancntttnttttatttnntnntnagtnnaggggnngntgngcttttacnatcactatagggcgaattggagctccaccgcggtggcggccgcccgggcaggtacgttcaggaattttcccagtgagttatagaaaatactcaaggaatacataatcagaacatancaaactcttcccaagaagagagatcaaaacaaagaaacaaacaaaaactttaagacagcagtaagcttcagtgtcaaatcgcttgaggaaaggataagaaaggaaaattagaggccagtttccctcacgattatacatacagtaagtcccccaccctcccccaaaatcttcaaggagtcaaaattccagcgacatgttaaaaaaaaaggtgtttgttaaaaaaccatccatgnaaaatgtttgttttatccaagttaanacagtttccatgttagaaaaatctatttaaattaaaaattttgcccgcaatanngaaaattccaaccaaaaaanaattcattatggacccaccctttttaaanaggaatggtangaaaaanagggggaccgccaagggtggggattcaacccttgaaggggtttgggggaaggtttcctaaagaaccccaggcccttgnacccaaggccantggggaagaaaanccaccttgttggttcntaaccttaaaaaaattancaaaaaatttaagccccgggggccgtttgggttngggctgcccaatggccccttggttaattcnccccaggcntaccnttagggggnanggccttnnagnggncaagggnangaaaattccgcctttggnaacccccggngnagggcccggtaagggtttgccccgtggnagccccngagtaantccnncacccantttggcaacttccccaaccttnggggcaaacaaangttnncctttngggcccngntttntaaataaaacctaaggangggaatcccccccggggccttgncagggntattttccnattttcaangccttttntnnnatnancccngttntancccnttcnnangggggggggnccccgggancccccanccntttttgnatttccccttttanngggagnggggtaaaatttgcggnnnccnttggcgnnnttttattnggnncaaaatacg

SEQ ID NO: 4119 - DNA, 849 bp, Homo sapiens
  misc_feature 476, 500, 503, 511, 531, 563, 580, 620, 621, 656, 690, 691,722, 724, 729, 732, 737, 740, 742, 743, 745, 755, 760, 761,763, 779, 785, 787, 788, 795, 805, 806, 810, 817, 821, 824,826, 828, 842, 846, 848: n = A,T,C or G
ggccgaggtacttgagggcatcattaaaatcagccagtgttcaagtgagagacttgatgatggatttaatagtattaaatgggcaaaaatgcccttggcctttacatgctcatttaaaaacatataaaagagcagtaattcaggcagttatacttctctcaaagattttgctctaaatcacagatggcagcgggaggccacggctgtgtgctggctcacaccccactcactccaaccgaagccagaagtgctcgttgggtcataattagcaaaccacccgcaaactcgactctttaaatcagaggccagtgactgccaggctggggcatagacgggagaaaacaagcagaaatggtcaaggtgctctctggagcctgccttcggatagctgtgacccccacgttaggcatcaagacagggtttccacacctgcgccgccacccctgcagtgtgagcgctgtattttgctttctganaaagcctcacggtttggctctttnggntgcatganggcttttaagggcgatgtgnccccttgcccagcttgttgcccaagcttcccnagccctttggccacagnccagcatacatcttttgtttttagaaacaaattatttaanncactttaaatcaatgaattcccccgatgatggtancctgccccgggccgggccgcttttaagaaactanntggaattcccccgggcctgcaaggaattttngntattnaangcttnttngnntnccgtccaaancctcnnangggggggggccccggnaccccnanntttttgnttcccttttnnttgnggggttnaatntgncncnccttgggcgtaatnaatngng

SEQ ID NO: 4120 - DNA, 1218 bp, Homo sapiens
  misc_feature 1, 2, 3, 4, 5, 10, 17, 19, 23, 25, 26, 29, 33, 34, 35, 41,43, 47, 48, 51, 53, 56, 57, 58, 59, 62, 63, 65, 68, 70,74, 81, 83, 84, 85, 87, 89, 94, 110, 140, 143, 277, 480,499, 516, 520, 526, 538, 556, 561, 593, 605, 617, 644, 648: n = A,T,C or G
  misc_feature 658, 665, 666, 671, 676, 688, 697, 710, 744, 746, 747, 753,756, 759, 767, 771, 772, 780, 785, 786, 792, 803, 804, 807,809, 810, 821, 823, 825, 826, 829, 836, 844, 845, 852, 855,857, 860, 863, 869, 874, 900, 903, 904, 912, 915, 918: n = A,T,C or G
  misc_feature 923, 935, 955, 956, 960, 962, 974, 984, 987, 1005, 1014,1019, 1039, 1046, 1049, 1068, 1071, 1072, 1080, 1082, 1088,1090, 1100, 1104, 1112, 1118, 1119, 1124, 1152, 1157, 1160,1165, 1171, 1176, 1178, 1186, 1189, 1209, 1217, 1218: n = A,T,C or G
nnnnnttttnttattcntntttntnnttnttannngttttntntaannaantntannnnatnntnatngnactntttttanannntntnagganagggggagcgcgcgtntcactatagggcgaattggagctccaccgnggnggcggccgaggtacatctggccttagggctgtctatagattctaactcttaagtaagatgttatgttttatgtatttactactgcacagttatcattttaaaaaaaaaactcttactttccctactaacagtanttgagtgatgataagttttagaatataaaattcacggttccaagatggctgaataggaacagctctggtctgcacctcccagcgtgattgatgccagaagatgggtgatttctgcatttccaactgagctctgaagagaagccagttggctctcccagccaccggtgttttgagctctgagaaatgggacagacccacccttncttcaagtgggggtccccnttgacccccctggtggntaancccctnaacttttgggangaccaccccttccccaantaagnggggccccgtacctggaacaacccttcattancaaccttggggntggccccccttnaaggaattgtaaaagccttttcccaanaagnggaaaagggnattttannggccngccanaataatttttgntttgggttnctggcaaaattantttttgcctggtttcttgccaagcaccctttttngnnttgggnttngantacccccnacanncaataaangggtnnttggtnaaattggtacnnttncnnagctaaaaacntncnnaancaaaaancttgccanntttgaanggnanccntgnaacttnttttncaaaggggaaaaacctttatcctaanccnnaaaagggnaancantccantccaaacattcnatacccaaaaaaagggtacnnttcntnaccccaaaaaancctttcattnttngggggggtaacccatggnttcaaaagnccccnaaaggggttggttttaatanccccccnaangaattgggggaaaaaaaanccnnaaggccancnaaaacntngggaaaaccncttnaaaaaaantaaaanngggcnctttttctttttttccaaaaggaaaaanacatnttntttcncccaantaatngngaaaaaanatnttgggccggggaaaatgaantttttttnn

SEQ ID NO: 4121 - DNA, 876 bp, Homo sapiens
  misc_feature 591, 631, 646, 659, 686, 698, 699, 718, 720, 738, 743, 756,761, 768, 772, 777, 783, 788, 791, 795, 798, 802, 806, 810,814, 820, 827, 833, 835, 836, 841, 842, 848, 851, 862, 865,867, 874, 875: n = A,T,C or G
ggcgaattggagctccccgcggtggcggccgaggtacatcttaatagaaactctaagagccggggcttctgggtaataagcacggagtatgaagccgctgtgttttactgacttataaataggacaccctttagtcagctctgtgccttagaaagcatgacactcacccccaccccatgccccaccgaaaaagaaaccacagaccagattatcacctctccgaatgaggcattggaataatcttcgcactgttccgcgacccgaagggctcaggagtgctggaaaaagattcttcacctgttgagcagttctagcggagaaaagatcaggctcggcctgcttccctgcgaatctgccgtctgttgagacaagacatctgaaccagaaagccggggaggaggtggctctccatccccgtgggaaggctttccctggtcctttcacttaccttattcaggcctctttagttcagaaatagccttaggttttgctcctggctccattttcctccttaatagcatcgctctttttccatgtttctgtgtggatgggggatgggatctggcttgtgggaccccttttttctttttnttggaagctggggaaagggggaagaaagggtggtcccttnaaaacttgggccccncgaaagaagaggngaatccccctggggggcttttggtttnaattcttttaanncccaaaaccaaagggcttntntttgaaggggcaaaggcnttaantgggctcaccccnttggnaatttcnaaanctttngggaanggccnatnccangcnaaantacntttngccnttgggngttttgnaaaccnannccctnnggtaanagnggggggaaaanccngnttttttnnt

SEQ ID NO: 4122 - DNA, 890 bp, Homo sapiens
  misc_feature 2, 646, 656, 671, 693, 696, 697, 709, 719, 737, 749, 751,774, 778, 782, 783, 791, 795, 801, 810, 813, 829, 830, 842,847, 850, 860, 861, 864, 868, 870, 872, 875, 876, 877, 879,880, 890: n = A,T,C or G
gnggccgcgtaatacgactcactatagggcgaattggagctccccgcggtggcggccgcccgggcaggtaccaccacacctggctaatttggtatttttagcagagacggtgtttcaccgtgttggctaggctggtgtcaaattcctgacctcaggtgatccaccggcctcagcctcccaaagtgctgggattacaggcgtgagccactgtgcctgacccataacatctttaactttcaaaaagatgcactgtttctgctgggggtttcttttactaatttgattagagaattctttgttttgtccatgatatttggagtttttctcgtgggggagaatgcaggttttctcttgatggtaataattctacagtagaattagaattcttcttcactatcaaagagtctttatcttctgtaaagaatctcatgatatggtatgtgaaacccaaccagccaacacattaggaagttccagttgaagtttctgaaatcaaagaagccacctgcgtccttcctctcttgaaaatatgccacatttgtgggatcttaaaaggagacctgtttttccatttgtctcttctcaagcttagaatctatagtaaagttaaaaaactcagattgtatctatcatgggttaatgccanccaaaccctnagcttttgggaaaanattgtgaaaaatgttttttttnttnnagggggattaanaaaaaaaggngttttttttcccccccgnaaaccatatttntnggagaatttaaattttccccatnaatngggnncccccaanggcnaaattnctttaaaangtnggaaatttaaccttanntttttttttaanttccnctngccccccccnnaanttgncntntgnnnannaaaattgggn

SEQ ID NO: 4123 - DNA, 896 bp, Homo sapiens
  misc_feature 644, 672, 683, 714, 727, 730, 731, 732, 739, 740, 754, 761,772, 792, 808, 809, 811, 813, 818, 831, 842, 843, 844, 848,862, 864, 865, 870, 892, 893: n = A,T,C or G
gtaatacgactcactatagggcgaattggagctccaccgcggtggcggccgaggtacttgtgaattcaaaacagcactcaggcatataggttacattggcaccaggaaacctaagcagtatttccatgaccaaattctaagtgaattcaacaccaaaggagaaaaggaaatgttctttgctctctgtatagattcctcttctgcttgcttgggttttacaaagttcttctaatttttatgtgcgattggacaatgcagttttggtaaagttgctaaaaccataactgttactcttggttttaaatatcaaaccaggtaaaagggagggaggaacttaatgttacagaagggaaaaatgacttaaatatccgaacagacaccatatgggaggctttttactcccctttcctcctttaaaaacagtgtgttatttctccctctagattccagttactatggagggatttaggatttagtgggactagtgttgctgaattagctttgtaagacaagtctgtttacttttttatactaaattttcatgcttaccactgactctgatttagtttgaagaaagctatttctaagaattctggttccttaacatttattagaaaggggaaaagttggcccgggccgtgggngactcatgcctttgtggggccccagcancctttgggaanggcccaagggcgggccaagattcaccttggnagggtcagggagnttnnnagaaccnncccttggcccaaanaataagngaaaacctttntcttttttttaaaaaataancaaaaaatttaatttnngntnttggngggccagggcccnctgtggttccnnntttnctttggggaaggcntnnaggcnagaattatccccctttgagccnnggg

SEQ ID NO: 4124 - DNA, 936 bp, Homo sapiens
  misc_feature 2, 6, 16, 454, 485, 565, 573, 582, 653, 654, 661, 665, 691,697, 698, 709, 714, 731, 741, 748, 754, 760, 761, 763, 764,780, 805, 807, 813, 816, 822, 823, 824, 830, 847, 859, 860,872, 876, 878, 880, 881, 882, 887, 892, 898, 899, 900: n = A,T,C or G
  misc_feature 901, 905, 907, 910, 919, 920, 923, 929, 935: n = A,T,C or G
gnggcntcgtaatcgnctcctatagggcgaattggagctccaccgcggtggcggccgaggtacttgagaacagtaggcatagttcaggttaagggcatcatactggaaaacagggagaattaaataaaaatctgcatgttgatctgagagttattcccagtctctttttccctcccagttctgagaatactggctgacaagttcttgccccatctagctgtgagattaaaagattcatcctgtgacagcaaactgctgagatcaggaaaaatatctaactgataacagatgtggcccagattgataatcctacagtatgtctactcattaagacagaatccctaggcaacttttaagtgcctcaatcttaaatatgagattaaggatcaccaaacatttgaggataacctttaatatgaaagagaagagggaaatggaaatacttcaagaagangacaagtttttgtaaaaagttaactgatttnttcagaagtaaaggtatttgcatctttgaaacaagaaaggattgctatgaaaaaagcagtgcccagaaaacaagagcttntagaaaanttagaatantgaaacactttcatagaagagttgggaaaattcaagaaatatttaaatttcttttagaagggtttgggaannataaaantttngagaaaaaccttccccaccgggaggnagggannaaaaaaaggangtttnttaaaagggtggggaanaaaaatttanggaaaancttggngaatcnncnnttttgcattgcccccnttccaacaattttgaaaaaaggtangnaatttngtntggggnnnccaagngggtttcaccccctgtnaatccccaaccnnttttggggtggntccnangnnngggcngtttncccctnnnnggtnanggnattattaannacncccccngccccnt

SEQ ID NO: 4125 - DNA, 1225 bp, Homo sapiens
  misc_feature 3, 5, 6, 7, 9, 10, 18, 22, 25, 30, 34, 35, 40, 41, 42, 44,46, 47, 48, 55, 56, 65, 67, 68, 72, 74, 76, 82, 83, 84,91, 100, 101, 107, 111, 166, 246, 330, 341, 346, 359, 364,377, 401, 420, 441, 448, 450, 456, 460, 481, 503, 513, 516: n = A,T,C or G
  misc_feature 524, 527, 555, 567, 568, 572, 601, 609, 634, 641, 672, 674,683, 702, 723, 725, 742, 744, 761, 773, 783, 788, 795, 803,805, 816, 832, 845, 857, 878, 882, 895, 907, 908, 912, 914,918, 923, 945, 963, 966, 967, 971, 981, 1002, 1010: n = A,T,C or G
  misc_feature 1014, 1015, 1023, 1036, 1039, 1040, 1043, 1046, 1049, 1057,1070, 1075, 1078, 1081, 1084, 1085, 1088, 1095, 1105, 1112,1115, 1124, 1125, 1127, 1130, 1132, 1135, 1137, 1148, 1155,1162, 1163, 1164, 1165, 1166, 1172, 1173, 1174, 1176: n = A,T,C or G
  misc_feature 1177, 1178, 1179, 1185, 1188, 1194, 1208, 1215, 1218, 1225: n = A,T,C or G
ttntnnntnncttttttntatntcntcatnctanntgaannntnannnttatttnnttttttttntnngacntnanattttnnnttaaagnggcccgtanncgcgtnaacnactcactatagggcgaattggagctccaccgcggtggcggccgcccgggcaggtnctttaggagacccaggcgggcagattgcctgaggtcaggagtttgagaccagcctggctaacatggtgaaaccctgtctntactaaaaatacaaaaattagccgggcatggtggctcacgcctgtagtcccaactgcttgggaggtttgaggcaagagaatcgntttgaacccangaggnggaggttgcagtnagtcnagatcgcgccacntgcactccagccatgggcgacagnagccaagactttcattctnaaaatttacagaaaaggaaangaaaacnanagtaanaggnaaaaggcttatattggaaacnttcttctaaaaaaaaaggaaanaaaaaaaagnaanagccctgnatngccacaaccaaaattcttaaaaattttngggcaaagttcnnaatncaaatttaaaaaggggattaattttttanttttggcnaattcaaccaaaaaaattaaatttnccttttnaccttcccccccccaaaaaaaatttccaaantnaaaaaaagntttccaaaaataatgccanaccttttttccttaaatggtntntttaaaaaaattggttnanttcaccccaaaaattancaattgttgttncccccaaacnttttntttttcncaaggttnantaaatttcctnatttggtgttaaaaangtggaggggtatnttttcccttggnaaagttggaggggcaaattanaaanaagaagggtttgnaggctttataannaacntngccnttggnaagaagaaagctgttgttttcntttttttttaaaaagtcnttnnaggnaaaaatgggntttgggggggccccaaaaatnttttcttncaanncttatttncttttttcccttnaannccntgnagncctcttanatttttcttttgngattnaanacnttnngtnttttttnggaaaaaacnttttgtnttnacccttggnnanctntntgngnccctttttttnaaaaatnaaagatnnnnntccccnnngnnnntgtagnggnattttnattatttacagctntattttntanccccttn

SEQ ID NO: 4126 - DNA, 965 bp, Homo sapiens
  misc_feature 4, 19, 349, 426, 445, 490, 491, 492, 493, 498, 506, 509,513, 520, 522, 543, 556, 563, 569, 582, 585, 586, 600, 602,618, 634, 642, 658, 659, 666, 667, 678, 679, 689, 692, 697,699, 702, 710, 711, 714, 723, 725, 737, 739, 744, 752: n = A,T,C or G
  misc_feature 753, 754, 755, 766, 771, 773, 774, 775, 776, 787, 788, 789,790, 792, 801, 805, 811, 813, 825, 827, 831, 836, 837, 838,839, 840, 842, 843, 844, 845, 849, 850, 854, 855, 864, 865,866, 868, 869, 872, 877, 881, 883, 898, 900, 902, 905: n = A,T,C or G
  misc_feature 913, 916, 919, 921, 922, 934, 942, 943, 947, 963: n = A,T,C or G
atgnggcttcgtaatacgnctcactatagggcgaattggagctccaccgcggtggcggccgcccgggcaggtatcataaagaagccagcagatggtgttatactagctttcgaagttccttcgtctgcctcagctgaactctccctgaagccaaataaggacatctcaacatccacatgggcacacacacgcctgcgcgtgcacacacacacactgctgtttttatgtaacgtgtagctatgctgagttttacctccactctgtcaaaggtggtctttttgttgattgatgaatttgttttctgtctctactaaaaatacaaaaaattagccgggcgtggtggtggacncctgtagtcccagctactcgggaggctaaggcaggagaatggcgtgaaacctaataggtggagcttgcagtgagcanaggtagtgccactgcactncagcctgggtgagagagtgagactccatcccaaataaaaaaaaannnntaaanaaaaaaangtncctnggcccgntntaagaaactaagtgggatccncccgggctggcangaaattntgattntcaaaggcttttnttnntataccggccggancntttgaggggggggggncccgggtccccaaacntttttttnttccccttttaaagtnngggggtnnaatttgccgcnnctttggccgntanatcantnggncaaaaaannttnttttccttngnggtggaaaattngnttatncccggttnnnnaattccccccnaaaantnnnnaaatcccgggnnnncntaaaatatntttntaaaancnttgggggggggncnttantttgnnnnngnnnnaaanntctnnaattttttnnngnnttngagcncaantncccccctttttttcnananagngaaaaaanctncgngnngccctcttctantattattnnattncctccccccccccccncg

SEQ ID NO: 4127 - DNA, 880 bp, Homo sapiens
  misc_feature 604, 688, 689, 702, 726, 745, 769, 776, 777, 786, 789, 815,820, 842, 856, 865, 867, 871, 875, 879: n = A,T,C or G
gactcactatagggcgaattggagctccaccgcggtggcggccgcccgggcaggtactggggattgattagccacagtctttgccacagactcttttggactgagccgataggtcaaaggttagcttatgcagtagcatgggctgtaggttttttgcactgatcaacaccggaacttttagaagacttttagaagatttgttgctgctgtgagtgacatcagttcacacagcctgagagagaactctcagtccatgctgtccctccttgggctcactcaagcgaaatgggtcgagctgcaacactgtgcggtgccaaccgggagaaatctgcctatcggggctgagagacatcctgtagtggctgcccgtctcctttgccccaaatgtcaagtggaagaggtgcttcacatatttatttcttcctacatgggctcatttattgtaagcccattgtgacccttggaaagccaagcttttatcttgattttggagtgtgatcaaggtgacagttgttctcccggatgacaggaaatctgactttggttttgcttttttccatagaaggtcaattggcctcaaaattttgggcccaattttgcattnttggagggagaccctcccaaggacagatgccttgtcctcattagcctaattttgtcaaggcaggtctttcctgtgtgggcacannaacccttttatangaatttttttcctcaaacctcgtnttttgggttggcccaagtnccctgcctgccttttttttttttnggaaaanngtgcctgtnttnttttggggggggaccgtggactcccntggtngcggtttttttttttccaaatncattttcccttttncccttatcnanaagncctngttnt

SEQ ID NO: 4128 - DNA, 915 bp, Homo sapiens
  misc_feature 407, 526, 557, 573, 580, 594, 596, 606, 629, 634, 640, 651,666, 677, 689, 693, 695, 705, 727, 732, 736, 745, 747, 760,772, 789, 797, 804, 809, 820, 823, 826, 829, 830, 834, 835,837, 839, 840, 841, 842, 845, 847, 848, 849, 851, 852: n = A,T,C or G
  misc_feature 858, 867, 880, 884, 888, 907, 914: n = A,T,C or G
gcgtaatacgactcactatagggcgaattggagctccaccgcggtggcggccgcccgggcaggtacgcggggccagcagccagagtgagcatataaaatgcagttctgatcctgtcacctctctgcttaaaactcttcagaggttcaccatcgcttccagaaaaagatcaatactcctgacgtggcaacctgtcgagactcaggaccgctaggaaatcagctcttgtttacccctctatccattacactacgatccagctgggtttaggtatcacttcctctgagcaatcctccctgatgtcatgaggcagtgctgagtgccttctctggaccctctgtttacttgcctgttaaatcctgaacatctggaagggagtcgtgttcagcaacatatctacgccttgcancacggtgcctggcctgcagctggtgttccgtaaacagctgctgactgacgggatgcatcgccaattctagatttgagtcaattctagaagaccaccatggtggagaagtgcatatgcangcaccgcccaggttaactgatcctggctgancccaagcccttccaancccattncctggccaaaggtntnaaattgtgangtggaaaccatctttggaacttntgcantatttnaacctttattnttcaacctggaattnttcacccaaanagaaccctgtcntttntngatggcttanattggaagtgggaacaaatttncccancttnaagcttttntncacattccttggnccccaaaaattnattgagaaatttaaaantaaaaaantgggctngttgntttttaacccnaanacnaannaaannanannnngtnannnannggtccnttggggccngtttttaaaaaantaantggnatccccccgggcctggcanggaaatnc

SEQ ID NO: 4129 - DNA, 1244 bp, Homo sapiens
  misc_feature 3, 11, 15, 16, 23, 24, 25, 27, 32, 34, 35, 36, 42, 66, 67,68, 72, 76, 78, 82, 85, 99, 103, 104, 116, 119, 130, 176,246, 369, 380, 385, 392, 434, 458, 463, 474, 475, 513, 535,538, 547, 554, 556, 570, 578, 586, 597, 599, 601, 612: n = A,T,C or G
  misc_feature 617, 624, 634, 640, 654, 657, 658, 659, 663, 666, 668, 678,680, 688, 692, 695, 696, 697, 720, 773, 780, 784, 787, 792,797, 799, 806, 811, 821, 828, 838, 846, 856, 871, 884, 885,886, 888, 892, 897, 903, 904, 906, 911, 913, 923, 924: n = A,T,C or G
  misc_feature 929, 935, 943, 953, 957, 963, 970, 972, 978, 993, 1000, 1001,1007, 1008, 1024, 1026, 1029, 1035, 1044, 1047, 1059, 1061,1071, 1084, 1091, 1095, 1099, 1101, 1102, 1104, 1128, 1129,1134, 1136, 1143, 1145, 1146, 1151, 1154, 1156, 1165: n = A,T,C or G
  misc_feature 1167, 1170, 1173, 1184, 1189, 1190, 1195, 1199, 1207, 1213,1219, 1221, 1223, 1228, 1231, 1232, 1235, 1242, 1244: n = A,T,C or G
ctntcatttanattnnttttatnnntnttatnannnatttanattcatattataattatttttttnnntgtnattntnaatnatnttattattaagttngagnngtccgcgtgatncanactcactatanggcgaattggagctccaccgcggtggcggccgcccgggcaggtacncgggggagtaggaatgttccataagtaagagagatgactagggtttcaagaacaaggaccagcacctatnaaggctctgaggcacagaccactgtgacctgtggagaagtggctcccacagtttcccagaactgcccccttggtcagagtcacggttctcctcttgtaagagaagctcaagggcagaccctcngcaggaagcanaccancattttntggaacttccccggactgctcttcagacccctcactgagggnattttaatgggagtgactcacacngaccntgaaacaaagnncaaagatggaagcaccttggttcttgcctatttcttgnttccctttttggtgaggacctnaanaaagttacnctttcgngntccgccttcttaanaaaacctnagttgtgnattcccccccngngngtcttggctantgganaatttcnggaattatancaaagnctttatgcggaatnacnnngttnatnancctttttgangngggggggngccnccnnntttacccccaaacctttttttanttatcccctttttaagttggaaggggggtttaaattttgccggccgcctttgngccgttnaaantcnattgnggatnanataaggncttgnttttccctgnttgttgnaaaaattttngtttattnccgtattcancaaatttttccacanccaatctattacnnnantccncgggngatgcnntnaaaangntttttaaaannccccnggggcntgtccctnaaatggatgntggngccttnaactttnanaattanaattttggcgttttntgggctnncacatnnaccccgcttttttctnanttntggggnaaaaccttnttntttccccagctngnttttatatgnaaattattggccntaccccncccntggnannanggctgtgtttttcctttttttagnntcgcntntatttcnannttcanttngntataatttnantcnacnatcgcctttgngttcnntttcntttntgctggcntagctnggtttntntnttatnttnnatnggggggntn

SEQ ID NO: 4130 - DNA, 941 bp, Homo sapiens
  misc_feature 459, 483, 509, 529, 592, 596, 606, 636, 651, 668, 670, 672,702, 712, 718, 732, 755, 776, 791, 803, 815, 841, 845, 858,873, 879, 893, 894, 896, 897, 901, 902, 908, 909, 915, 916,925, 927, 928, 929, 932, 940: n = A,T,C or G
gcgcgtaatacgactcactatagggcgaattggagctccaccgcggtggcggccgaggtacattttatcaagttacctatgaaccgatgtatttcgttcacttaataccattcactaaattcagttattgacctagtcaataactgcccaacttcacatttcacatacagtgaagaaactcttgtttcaacattcttttttgggttggttggtttgtttgttttgtttcttttttacacaaggcaatccaaactgcccaatctactccatccgagcctgtgtgcaaaccccttttcccacaccctgaatttcctttcttccttaacgtccaccaaatatgagtcaaaggatctttttacaaagctatggtttacaagcaagagccacattcctccagaactcgtgtagagttgctttgtcttcaaagccccacctgggttttccaccatattgctttcngtcaacgacactcaccacagcatnctctctggcggtttgtgaatctcccngccctgggtcatgacactangcgacccccggctgggcttttctgcgggctgctattcgcttggctgctgcttcttcgctgganggtngctttgtttnaccagggggttggccaagggaacctgggantattaggcacccttnttaaaaacaacaacaangncnttggggccaaaaaagaactaccaaaccgancgaacttttngggcanaaagaaccaaaaangaaaaaaggggggccccaagggnatttttcttttttttcctttntttccaaaactttancctaaaaccttnttatcttgtaantttgggaaaagggccaaaaccctttnttgnaaaaccgggtttnggggaagggtttaancaaggncgtcccgaagcctnngnngganncccttnngccaanntttttttcncnnncgncccccccng

SEQ ID NO: 4131 - DNA, 872 bp, Homo sapiens
  misc_feature 389, 414, 419, 439, 449, 496, 509, 527, 534, 541, 542, 546,561, 592, 597, 599, 622, 630, 645, 657, 669, 683, 689, 693,712, 717, 719, 724, 727, 731, 733, 752, 760, 765, 772, 774,777, 782, 788, 801, 802, 807, 814, 828, 837, 846, 851: n = A,T,C or G
  misc_feature 855, 864, 865, 866, 867: n = A,T,C or G
ggcgaattggagctccaccgcggtggcggccgcccgggcaggtacttttcagatgagcaaaaatgtaaacaattgttaatgttcatggttggcaagagtgtgaagtcatggggatccttgcatcacaagttcttaaaaactgcacatgccttgccctagtaattcactttatagaacttaatttaagaaaatagatgggcatgcccagcactttgggaagtcaaggtgggcggatcacaaggtcaggagtttgagaccagtctgaccaacatggtgaaaccctgtctttactaaaaatacaaaaattagtcgggcatggtggtgcatgcctgtaataccagctacttgggaggctgaggcgggagaattgcttgaacccggaaggcagnaagttgcagtaagccgagatggctncatancactccagcctgggcgacanagcgagactncgtctcaaaaaaacaaacatacaaacaaaagtgcaaaaggaaggcantaaggttttgttnggggagatgcaaaaacangaaccangagggtnnggangagaattctaaaagncttggaggaaaggaaaacttgaaccagcttntttgnanggcttttttgaaaaaccaaaaangaaatttnaaaagggggaacccncaaatggccaanggaaattggtgnagccagtttgcctnataaancttnggaaccggggctttttaanctttnancaacntgngcananggaaaatgggggggatttntatgtttnttggnaatcacnangtntgtancctttnggcccgcttttannaaacntagtggnatcccccccggggnctgtatggngattttcanattantaangcttttatnnnntaccc

SEQ ID NO: 4132 - DNA, 879 bp, Homo sapiens
  misc_feature 253, 452, 458, 483, 500, 506, 517, 519, 550, 554, 565, 614,635, 643, 647, 656, 660, 674, 688, 692, 693, 696, 697, 703,709, 710, 714, 718, 720, 723, 727, 743, 745, 747, 752, 753,761, 762, 765, 767, 768, 776, 784, 785, 788, 792, 795: n = A,T,C or G
  misc_feature 805, 806, 821, 823, 824, 825, 831, 832, 834, 835, 836, 837,841, 843, 846, 847, 848, 853, 863, 877: n = A,T,C or G
gactcactatagggcgaattggagctccaccgcggtggcggccgcccgggcaggtacgcggggccgggcgcggtggcacgtgcctgtagtcccaagtagctgagattacaagcgtgcgccatcacacctggctaattttttgtatttttagtagagatggggtttcaccatgttggtgaacaggctggccttgaactcctgacttcaagtgatccgcccatctcggcctcccaaagtgctgggattaccggcntgagccaccacgcctggcctcgatgacttcttaagaatttatgtcagagtattctatttggctacctgttttattatattcctgtctgagaaatggtggtcggtctttcagactgagagagcagcacgtctcttttgaactgtcaccccttagcactaataacttctttttgcaccatgcatagtgtgaagctggattnaggtgnaacttatctacaagccatctccctnttttattgcctcatttncctganaaaatgggttntngactaaccaagaacattttttaaaaccagtngttnttgtttttcanggtgcaccccctgtgtaaaaatggcataacaagctttttttggcaagcncattaaataattgggtttgtntaaagttnttgntggcccacnaagnccttttgggttttnaaaaaaacaatttnttgnnttnnaggaanaaattnnttgncttnanaangagngggtgtaaaaaatccncncnttttnnaaaggggnnttncnnaaaaaaanatgggggnnccngggnttnttttcccccnnttatataaaaaaacngnnnaaaaanntnnnnaccncnccnnnctttnaaaaaatatntgtgtgttcccccncg

SEQ ID NO: 4133 - DNA, 830 bp, Homo sapiens
  misc_feature 597, 627, 635, 653, 654, 655, 681, 695, 709, 711, 712, 713,714, 715, 716, 717, 718, 719, 720, 721, 722, 723, 728, 746,760, 772, 773, 784, 790, 801, 804, 806, 819, 821: n = A,T,C or G
cgtaatacgactcactatagggcgaattggagctccaccgcggtggcggccgcccgggcaggtacgcgggatactctacagcgtgtgcatggctggattcagaatttttggttttaaaaattaagcttttatttatatttacccatcaggtcaccgaatacttggattcaaccaaatgcttgaaagcttcttcatttgggggaaggtgggtttggaggcagaaatccctgcagactccacacccagggttttactaggtcctccgcggcaggtggaaggaaagcttgttgccctgcagttccgtttgcttcaaaaacaagggtgggaagggttcaccaattgatctttgtgcatatccagtgtaggaaaagtgttatttagagtatcattataaaatcggctgcatatggtggctcgtgcctgtaatcccagcactttgggagtccaagatgggcagatcgcttgaagtcggaagtttgagaccagcctggccaacatggtgaaaccctgtctctactaaaaatcaaaaaattacccgggcatggtagccgggcacctgtaatccccgctactcggggaggcttgaggcccaagganaatcactttgaaccccaaaaaggaggaggnttgccatngagcccaaaattgcaccnnntcatttccaaccctggggtgacaganccaaggactccatnttaaaaaaaaaaanannnnnnnnnnnnnaaagntccctcgggccgcttttnaaactaaggggaanccccccgggctnncaggaaatttnaaattnaaacctttttncgntnccgcccaaccccngnggggggggg

SEQ ID NO: 4134 - DNA, 896 bp, Homo sapiens
  misc_feature 5, 349, 455, 470, 488, 521, 523, 534, 553, 559, 574, 593,600, 610, 611, 623, 632, 641, 642, 649, 663, 678, 693, 695,697, 701, 715, 721, 725, 726, 732, 742, 753, 754, 766, 780,782, 783, 785, 788, 793, 801, 803, 808, 812, 814, 819: n = A,T,C or G
  misc_feature 827, 829, 836, 838, 846, 847, 848, 856, 858, 862, 865, 880,890: n = A,T,C or G
gactnactatagggcgaattggagctccaccgcggtggcggccgcccgggcaggtacgcgggaggtaacatgtcatagctgacctcagacctcgggttttgatgttagtttaaattaaataataacttagtttttggctttgaatactttacctctgtcagtttccttactctaaaatgaggaaaataatccctccaagacagattattgtaaggatgtatggaatgaagtatatataaatatgagactgaagaatgaatgaacggttgagctgatggatgcagcagtgtaagaggagggcctggcccctcgctcgttctcccagccccaactagaaagaacatctcangggcccagaccctgccacatgtgccatggtaaatcaggggtgggccatgcttctgtgttcttcctgcaaccaaacatcggttatagccggtggcaagcactgtaanaggggccaggccagnaggttgaagttggccttnaaggggggctttcaacagccaaggaatggggtntntaaacctggtngaccataaggggtagggantgccanccctaatgccttctnggggaggagggcattggtnggtccangttgccccanntgaggtattttnggttggagntcaccttgnntaccccnaggatttccaaggngaggaggaaatcacntggggttcaatgggnancnttcnaaagggggaaaaanaatttntttnntagctngtgggttttnaaaaaaaattnnaccgttttttgngggttcccttgggncnntntanaaacnaaaggggntnccccngggncnggggngaaaattngnaaattanangtttttannnacccccgncncccntcnggggggggggccccntccccccatntttttt

SEQ ID NO: 4135 - DNA, 882 bp, Homo sapiens
  misc_feature 501, 553, 571, 579, 585, 596, 619, 622, 626, 651, 678, 687,746, 763, 765, 799, 811, 839, 848, 850, 851, 855, 858, 860,864, 865, 869, 871, 881: n = A,T,C or G
gcgcgcgtaatacgactcactatagggcgaattggagctccaccgcggtggcggccgcccgggcaggtactatacttccattagagacttttttttttgagatggagtctctctctgtcgctcaggctggagattgcagtgagccaaaattgtgccactgcactcactccaaactgggcgacagagtgagactccgtcttaaaaaataataaaaataaaataaaataaaatggtaaggcacatgttgtagtcattattgagaacaaaagaaaagcaaaattaactgagaatctttgaagttaggtattgttaactactgattgtctaaatccaccacttcagtttgttttaaagtctgcttttctatcaaaattttgaacattcaccgtaaagtatgcctccagaaatgaccactaatatattattaaactattcttaactattccatgcatagtgggagatattgaggtctattgcttgatataagaaaattaaaactgnatttcttctttcttttccctgctgggaggggtaaatttaccaaaaataatcngataggtttccgtgggcncctggttnaaagtnggaaaatgccnctcaaaaataaattaccaatttnaangggngccctaccagaattttttataaatngccccaaggttaaatttattctttcanaaaaaattnttgcccccaataccaggtattgtttacccgggatacccaattaaaggaattccaatttntttttttttctttgaanancttttggcttgggtttttttggtttggtttggtntgggttgggttnggttgggtttaaaaaaaagggaaatttnacctttttncnncccnaancnttgnnatgncnaaggcccccnt

SEQ ID NO: 4136 - DNA, 824 bp, Homo sapiens
  misc_feature 557, 607, 627, 637, 665, 689, 704, 710, 749, 758, 759, 760,762, 786, 800, 812, 814, 815, 824: n = A,T,C or G
gcgcgtaatacgactcactataggggcgaattggagctccccgcggtggcggccgcccgggcaggtacctttaatcctccactgactttggaaaaacaacaaaatgccagcttccaccagatcatttcttcttaattaaaagttagccagattcttttggagcactcaattttctggtcaggtcaacaaaaaagtaatgaacaccacacacacctccctcccctgtcttcctagccccattcctggagttatgcaacccttgggggcggcatacacttcagctatttgctctgtgttcataattagattgtctagacaggagatgttgctggagcaataggaaaatattttacaagatgttccgcagaaccacacttataacagtgattaggacacactgccagacgccgaagccagcagaattggcccgggccacgagccggtttcacccagagcagaagccctttcaagctctcatttcaggaagaggtgccaaattagagctctgagggcatggagcagcaacttcttggcctttggatccgagaaagcaaggntgagataatagaatgatgtctgcgatgcccttctttcttccttcacctgntgacacttagtcaacagggnggcagatggnagtttgctggttttaccagcatttttcnaaaaggatcccgggtacctttggncggttttaaaatagngggatnccccgggctggaaggaaattcgattttaaagcttatttngataccggnnnanccttgaagggggggggccccggtnccccaactttttgnttccctttaaangnnggggttaan

SEQ ID NO: 4137 - DNA, 882 bp, Homo sapiens
  misc_feature 422, 506, 517, 607, 614, 619, 631, 645, 699, 716, 718, 722,724, 728, 730, 731, 733, 738, 739, 740, 741, 744, 745, 748,751, 752, 753, 754, 755, 756, 764, 765, 774, 779, 790, 791,792, 795, 801, 813, 816, 818, 828, 830, 833, 837, 840: n = A,T,C or G
  misc_feature 849, 857, 859, 860, 862, 869, 870, 879, 882: n = A,T,C or G
gcgtaatacgactcactatagggcgaattggagctccaccgcggtggcggccgaggtacgcgggacaaaaaagggagttctacccctacatcctcatagctgagtcaccaggctgactgcatggatggctcctccctggagagaggaggaccatctgactgccaagatggggccagcgccacctctttgagcccctcctagggtgctgaaacagcagctgaatggctgctgggcttagcatggctgaggtggcatcatgagagagaggctggggatgatgtgacatggaccttccccgccggaaaccaagtcccgcatcaatcccgctgagcccggcagcttcacttgctgtgaactgaggacagcttgcaggtcaggttgtcatgtgagctaaggacaaaactccagcctgctaaggtatnagaatatgtgccctgtgggggatgaagatgaccggaaggaggcagggaagggttgtgggcaccgttcaggtcctttggtgtggntgctgcagtcnagtttttgagccatttcattccagcttttttgcttattggtcttacaccactttttcgggattatattttcatatttcaataaaaaagangttttcnaaaantttccaagcttngctttggggaaganttccattccttttacttcttgaatagcctttttttttagtccctttcccccaanaaaaaaaaaccaaaacncnaatncntatntnnantaaannnnatnnatnatnnnnnngtttcttnncccgggggngggcngtttttaaaannnagngggaancccccccggccngcnangaaattttcntnttnaaanctnttttttgantacccccngnncncctttannggggggggnccn

SEQ ID NO: 4138 - DNA, 895 bp, Homo sapiens
  misc_feature 3, 5, 8, 506, 532, 563, 582, 626, 667, 687, 689, 699, 703,718, 730, 742, 746, 798, 827, 841, 847, 854, 872, 889: n = A,T,C or G
agngnccncggcgcgcgtaatacgactcactatagggcgaattggagctccaccgcggtggcggccgaggtacgcgggagcgggcttatttttgaaaggcatctgttacttcagtggcataaagtgccctcacactgctgtgcagccatcaccaccattcatctccagaatttgttctcagtcccaaactgaaactataccattcaaacaacagcgctccccatttccccctcccccgagcccacgacatctccttattattattttttttgagacagggtgtttctctgttgcccaggctggagtgcggtggtgtgatctcggctcactgcagcttccacctcccgggttcaagcgattcttgtgcctcagcctcccaagcagctgggactataggcacgcaccaccacacccagctaagttctgtatttttagcagagacgggatttcactaggttgcccaagctggtctcaaactactgacctcaagtgatccacccgccttngccttccaaaagtgctgggattacangtggtgagccaccgcgcctggaccacatctncttattcttaaatggatgnggtttctcaatgggttggatttaattcttgctgggccattttancccctgtcatggctttaattcgcccattcttaaagccagangaatactggctttgaccggntnttaaacccancttnttcccttgaacttgnaaggcctggcantattccaagtanggtntaactgggaaaattttgtaaccttggccccgggccgggccggttttaaaaanttaagtgggaattccccccgggcctgcangggaatttccaaanttaaangcctttnttccgatacccggccaancctctaagggggggggnccccgg

SEQ ID NO: 4139 - DNA, 905 bp, Homo sapiens
  misc_feature 3, 7, 291, 551, 587, 593, 624, 660, 662, 665, 679, 686, 688,699, 700, 702, 735, 746, 756, 762, 765, 784, 785, 787, 825,836, 858, 867, 869, 872, 873, 878, 881, 890, 894, 900: n = A,T,C or G
agngcgncgtaatacgactactatagggcgaattggagctccaccgcggtggcggccgaggtacaggtttttgtgtggatggatgttttcttggaagctaacttttcgaaccagacatctagtagcgtttttgtggctttctggacgttcaactctttgaacagttgaactgtgggaatcttgcccatgtcctgcctcaccttcctccagggaactccggccgctctagaactagtggatcccccgggctgcaggaattcgatatcaagcttatcgataccgtcgacctcnagggggggcccggtacccagcttttgttccctttagtgagggttaattgcgcgcttggcgtaatcatggtcatagctgtttcctgtgtgaaattgttatccgctcacaattccacacaacatacgagccggggagcataaagtgtaaagcctggggtgcctaatgagtgagctaactcacattaattgcgttgcgctcactgcccgcttttcagtcgggaaacctgtcgtgccagctgcattaatgaatcggccaacgcncggggagaggccggttttgcgtattgggcgctcttncctttntcgcttcacttgacttcgcttgcgcttcggnccgttccggcttgcgggcgaagccgggtattcagcntnacntcaaaagggcgggngaaatancnggttattccannanaaattaaggggggattaaacccccagggaaaanaaacattgttnatccaaaaanggccancanaaaagggccagggaaaccnntnaaaaaagggccccggtttgcttggccgttttttttcanaaggcttccgnccccccctgaccaagcatttanaaaaaaatngnccnntcaanttnaaaaagggngggnaaaaancccct

SEQ ID NO: 4140 - DNA, 905 bp, Homo sapiens
  misc_feature 1, 3, 4, 548, 549, 550, 551, 558, 559, 560, 561, 562, 563,564, 565, 566, 567, 568, 569, 570, 571, 593, 697, 704, 709,711, 712, 722, 730, 733, 755, 761, 775, 776, 812, 824, 835,846, 847, 863, 878, 880, 881, 893, 905: n = A,T,C or G
ngnngccgcgtaatacgactcactatagggcgaattggagctccccgcggtggcggccgcccgggcaggtactgtgtcctgttttattaggtctttaagaatgggagttactcgcccagagcaaataaagattaactggcacatagtaggaagcccaaaaggaaccagtgaagcaacagaagatagagtgaatgaataaagacacatgaatgcactaaatcttttgtgcacatggcttttactgattttcacctgtaatgtcctataaggctatagacagtcaaactaaaaaattgctgtcattgggagagaggcgggtggatcacctggggtcaggagttcaagaccagcctgaccaacatggagaaaccccgtctctactaaaaatacaaaaattggccgggcatgatggtgggcgcctgtaatctcaattacttgggagactgaggcaggcgaatcgcttgaacctgggaggtggcggttgcagtgagccgagatcacaccattgcacttccagcctgggcaacagagtgagactcccatccccnnnnaaaaaannnnnnnnnnnnnngttccttcgggcccgcttctanaactagtggatcccccgggctgcagggaaattcgattttcaaagcttatttcgattacccgtcggaccctcgaaggggggggccccgggtaccccaactttttngttcccntttangnnggaggggttnaattggcnccnctttgggcgtaaatcaatgggnccatangcttgttttcctgnngtgaaaaattgttattccgcttcacaaatttccccnacaaacaatacnaaacccggggngccataaaagnnttaaacccctgggggnggccttaatggaggngnnccttacctcacnatttaaattgcn

SEQ ID NO: 4141 - DNA, 895 bp, Homo sapiens
  misc_feature 526, 616, 639, 682, 700, 709, 711, 723, 758, 765, 766, 767,772, 777, 778, 779, 780, 783, 792, 793, 795, 796, 797, 798,829, 832, 836, 858, 868, 878, 883, 889: n = A,T,C or G
actactatagggcgaattggagctccaccgcggtggcggccgcccgggcaggtaccagggcactccaaatatgtaatttaacacattcattaataactatgataaatagatattttattccaagaacaatatcattagagagttagattggagggcaaggggattaagtatcttaagtttattgtttcccgagtgaccatttttaaaagcctccttccaggaactgtggaatgcctgccaggctccctgactgctgtctggtgagggtccctactggtgctgtggacagcacaatacacaatggggcacaagaaagccacgcagcctccccctcctagacacatgctgtgcacccccttggctctgcttggaaggttcagctctgcaaatggaaggttgcaaacatcagacaccttctttctgtttctgtctctctccccttcttctccccacagtgtccagccttggcccctgacttttcctggggttggggaggcctgtagggttcagaaagctgagcagcttnggtgaagacctcccttagctcaatgtgctctggccataggggagcaggaccaagcaagctgagttttgggggtagcccctaagacacatnggaaaaaaagaaaacaagttttntttaccttccacccccttccatagaatgacttcatttaaaaangtcgcttggtttaataangggaaaaangntaggcaccttcntttggtttagggcccaaaccccttaaaagggcatnttttttnnngaaanccctnnnnttnaaaaaaaannannnnaaaaaaggtcccttgggccgctttttaaaanctnaggnggattccccccggggcctgggnggggaatttngttttcaaanccttnttcgantccccg

SEQ ID NO: 4142 - DNA, 575 bp, Homo sapiens
  misc_feature 5, 28, 35, 40, 43, 52, 62, 80, 85, 110, 118, 140, 155, 194,203, 229, 236, 308, 362, 375, 435, 444, 446, 460, 477, 502,525, 542, 558, 568, 569, 570, 573: n = A,T,C or G
cgtancgcctacttggcgaatggactcncgggtgnggcgngtnagggggagntcgctctgcnccagctggagtgagtgcncatcnggctactgaagctctgctcggtgtnaagcgatnctcctgctcagcttctaagtantaggatacaggcgcnccgtcaccacgcttgcctaatttttgatttttagtaganccgaggttncaccaagttggcaagatggtctcaancttctgnctcgtgaccgccgctcggctccaaagtgccgggattaccaggccgtgagccaccgccccggccgctctaganctagtggatccccgggcctgaggaattcgatatcaagcttatcgataccgtcgncctcgaggggggnccggacccagcttttgttcctttagtgagggttaattgcccccttggcggtaatcatggncatagctgntnctgtgtgaaattgnatccgctacaattcacncacatacgagccggagataaagtgnaagcctgggtgctaatagtagcnactccattaatgcgtgnctactgccgtttcatnggaaactgcnnncanct

SEQ ID NO: 4143 - DNA, 1391 bp, Homo sapiens
  misc_feature 3, 29, 42, 62, 76, 80, 260, 282, 323, 346, 425, 499, 527,567, 660, 664, 729, 781, 782, 789, 834, 844, 859, 874, 880,894, 914, 952, 984, 992, 1014, 1025, 1038, 1072, 1076, 1096,1103, 1114, 1129, 1139, 1160, 1169, 1224, 1233, 1243: n = A,T,C or G
  misc_feature 1247, 1254, 1260, 1270, 1278, 1279, 1288, 1293, 1304, 1338,1351, 1380, 1390: n = A,T,C or G
ttncctttaatacgactcactataggggncgaaattgggagnctccaccgcgggttgggcgngccgggttgggcgngggnacgcaagggggggagggcaagggggtggacgggccccgaaatcttcctcaacaagctcccaagggaactggcttgcgccttggttgggttgggcgggcgggcttccctcgcggcttttccttttcccccgcggttaccttcgggcccgcttctaagaaactaagttgggaatcccccccnggggcttgcaaggaaatttccnaataatcaaaagccttaatcggaatacccggtcgaaccttngtaaggggggggggggcccccgngtaccccaagctttttttgtttccccttttaagtggaagggggtttaaaatttgccgccgcctttgggccgttaaatcnaattggggtcaataagcctggtttttcccttggtggttggaaaaattttggtttaatcccggcttcaaacaaanttcccaacaacaaaccaattaccggaanccccgggggaaggccaattaaaaaaggttggttaaaaagncccttgggggggttggcccctaaaaattggaaggttggaaggccttaaaccttcaaccaattttaaaattttggcggttttggccggccttcnaacnttggcccccggcttttttcccaagttccggggggaaaaaacccttggttccggttggcccaaagnccttggccaattttaaattggaaaattcggggccccaaacggccccccgggnngggaagnaagggccggggtttttggccgttaattttggggggccggccttcntttccccgcntttttccttcgggcnttcaacttggaaacnttcgcnttggccggccttcngggttccggttttccgggcnttggccgggccgaaagcccgggttattcaaagccttcnaacttcaaaaaagggccggggtaaattaaccngggtttantttccaaccaaggaaattcaanggggggaatanaacccccaagggnaaaaaaaaaacaatttttggaaggccaaaaaaangggncccaggccaaaaaaaggggnccaaggnaaaacccgttnaaaaaaaggggcccnccgttttgcntggggcgtttttttttccaantaaagggcnttccggcccccccccttgggaccgaggccatttaaccaaaaaaaaatccggaccnccttcaaantttcaaaaanggtnggggggnaaaaanccccgaccanggggcctnntttaaaggnaatancccagggcggnttttccccccttggggaaaacttttcctttttgngccccttttcttnttttccgaaccctttgccggttttaaccngggataaccnt

SEQ ID NO: 4144 - DNA, 936 bp, Homo sapiens
  misc_feature 309, 349, 424, 528, 533, 558, 578, 583, 598, 600, 603, 604,605, 621, 625, 634, 668, 670, 671, 689, 690, 691, 693, 696,708, 711, 721, 730, 734, 736, 738, 748, 757, 758, 760, 794,799, 801, 806, 817, 819, 832, 833, 836, 841, 842, 855: n = A,T,C or G
  misc_feature 858, 866, 867, 869, 872, 890, 891, 903, 913: n = A,T,C or G
ctatagggcgaattggagctccaccgcggtggcggccgcccgggcaggtacgcggggatatttcacatgtgcctgtcccagaggaattccttaactctcccttcctggaaccgaaatgcttccaaagacagagagctcctatatatatttctctgttttccccagaggaccgtgcatgaaaggcgcctttcctggcgcgtgtgtctctgaccctgtggatcttctggacaattcccggaatttcttgcagggcaagcacttccccttaagtcgctctttctcgtttgggatagtcagtatttatatagncactattctctttttgggtagccatctaattttatactgntagtcaagctctacttcctttcccctaagagtttgaatttatttttctttaaaccgctacacaaaccccaaattnaaactcaaccaaaagcgggctttacctaactttctaactacctaccaaggaaaaatattccaccaaaagggagaagaaaccggagaaagctttggcaatttccngggangaaaaaaaaaaaaggaatttccccnaatggggaaaggggatgtgnttgcncctaaaaaaaagggnanggnnncctttggggcgggttntaanaaactaagnggggatccccccggggcttgggagggaaatttcnanntttcaaagccttatttgnnnanccngcccaacccctnaangggggggggnccccgggancccnancnttttgtgttnccttttaanngnggggggtaaattgggcccctgggggggaaaaaanagggnanaaaanccggggttccncnggggggaaaattnnttnttccnngtcacaaattttnccnccaaaaanncnganccccggggggcaaaaaanngttaaaaccccngggggggccnaaaaaaagggggggacaaaccct

SEQ ID NO: 4145 - DNA, 883 bp, Homo sapiens
  misc_feature 256, 274, 374, 377, 399, 442, 464, 472, 485, 496, 517, 523,528, 530, 536, 550, 603, 615, 621, 632, 647, 648, 651, 688,689, 699, 702, 718, 721, 722, 725, 726, 727, 728, 739, 741,764, 784, 788, 793, 794, 804, 809, 820, 831, 833, 838: n = A,T,C or G
  misc_feature 841, 842, 845, 851, 854, 855, 868, 870: n = A,T,C or G
ctactatagggcgaattggagctccaccgcggtggcggccgcccgggcaggtactaattagccagtcatgatctccattcttaccagggtcgttaccctggacttggcactacagggtcttgttgtctttgcttttgccttcttttccagctccttaaagcttttgtaagcacaaagtaacaagaggaaagagaaacatgatgtgaatgtcagaaagaacaaatacttgagaccaccttgaagggaaacttccagncctttattcattactcgntcattcattcacttatcaaatatttttagggcatgttcaatgtgcctggaaccatgctaattgctaacattacaaataccacttaattacataaaaaggntgncagccttccaggataactcttntattttggtagcccaataaaggggccccatgcatctggtctgngggactggaagaaaattcagtnactctttnctaaaagaatacngggagggatgncccctggcctggctggaggtnaccctnttttntntggccnctggcttctgggcntttgggcctccctggtcattcacaggcttttttttttaactttttttcctggntggggtccaagntttttngggggcctctnaaatttacccctggnngcnataaaaacaataatttttctttcccttaaattggccnnaagggcttgnttnccttgggggggggganggnnggnnnnacccaatcccnanggggtttttttttaaaaaccttntttggggggggaaaatttgnttancccgnnaaaagccaanggccnccaaggggganaaatttggggntngcccntcnnccnaagggngcnntttttttttgggncncggggccccttgg

SEQ ID NO: 4146 - DNA, 867 bp, Homo sapiens
  misc_feature 530, 599, 657, 669, 713, 719, 730, 739, 753, 769, 782, 784,798, 803, 833, 842, 844, 852, 862, 865: n = A,T,C or G
cgtaatacgactcactatagggcgaattggagctccccgcggtggcggccgcccgggcaggacgcggggggatacgcttccatagcaaagggttgcccttggctacaggaggacgcgggctggcaggcttggttcctggcgagtttctaagcccccgcctgcggtctgaggcaccggctgaaccatgtcggagatcctgtgccagtggctcaacaaggagttgaaggtgtcccggaccgtgagtcccaagtcatttgcaaaggcattttccagtggctatctacttggagaagttctacgcaagtttgaacttcaggatgatttttcagaatttttggacagcagggtttcaagtgccaaacttaataatttttctcgcttggagccaacacttcaccttctgggtgtgcagtttgatcagaatgtggcccatggcatcatcacagaaaagcctggggtggcaacaaagctgttatattcaattgtacctcggcccgctctagaactaagtgggatccccccggctgcangaaattcgatatcaaagcttattcgatacccgtccacctcgaagggggggccccgttccccagcttttnttccctttaagtgaagggttaatttgcgccccttggccgtaaatcatgggtcattaancttgtttccctntgttgaaaaattgttaattccccttcacaaatttccccaccaanattacnaagcccggganccattaaangtgttaaaaccctnggggtgccctaatgangtgagcctaaccncncatttaatttgggntttgngcctcactggcccgcttttccattcggggnaaaaccttntntggcccancttcttttanatnat

SEQ ID NO: 4147 - DNA, 897 bp, Homo sapiens
  misc_feature 2, 3, 9, 13, 17, 23, 32, 47, 56, 82, 528, 630, 633, 656,680, 691, 701, 703, 705, 712, 713, 714, 722, 724, 730, 741,745, 746, 747, 751, 755, 763, 765, 767, 775, 781, 782, 794,797, 800, 801, 804, 816, 817, 821, 825, 841, 843, 844: n = A,T,C or G
  misc_feature 845, 860, 862, 867, 875, 882, 884, 885, 888, 889: n = A,T,C or G
gnnaggttnggcnttgnacacgnctactattnggcgaattggagctncaccgcggnggcggccgaggtacaagccaatgccngcgtcagagctgcttttgtgcatgcctttggagatctatttcagagtatcagtgtgctaattagtgcacttattatctactttaagccagagtataaaatagccgacccaatctgcacattcatcttttccatcctggtcttggccagcaccatcactatcttaaaggacttctccatcttactcatggaaggtgtgccaaagagcctgaattacagtggtgtgaaagagcttattttagcagtcgacggggtgctgtctgtgcacagcctgcacatctggtctctaacaatgaatcaagtaattctctcagctcatgttgctacaagcagccagccgtaacagccaagtggttcggagagaaattgctaaagcccttagcaaaagctttacgatgcactcactcaccattcagatggaatctccagttgaccaggaccccgactncctttttttgtgaagacccctgtgactagctcaatcacacccgtcagtttcccaaatttgacaggccacctttaaaacattgctgcttttgcagtttctggnttnttagaaaaattaggggacccaangggaggaaattcattgttatgggngcaaaagcccnaatgtgatcngntncaattcnnnttgcgctnanccgttntaagaataagntccnnngggngggnaattaccngntntttccaanaatttnnggggaaaaaaanctnggnnttnaacttgcggganngagngttnttgaatattccccggnannnggccaaaaggggccngngtggntttggggntttttcncnnaanncccccccc

SEQ ID NO: 4148 - DNA, 864 bp, Homo sapiens
  misc_feature 68, 186, 239, 274, 292, 319, 333, 336, 393, 419, 421, 532,535, 547, 577, 581, 594, 599, 609, 627, 628, 632, 634, 638,641, 653, 658, 664, 680, 683, 692, 694, 697, 701, 719, 728,733, 736, 737, 738, 741, 750, 751, 758, 763, 768, 775: n = A,T,C or G
  misc_feature 786, 787, 793, 795, 797, 800, 803, 805, 808, 813, 817, 824,826, 834, 836, 842, 847, 860: n = A,T,C or G
gaattggagctccaccgcggtggcggccgcccgggcaggtactttttttttttttttttttttttttngagacagagtttcactcttgtcgcctaggctagagagcaatgacatgacatcagctcactgcaacctccgcctcctgggttcaagcgattctcctgcctcagcctccaaagtaactgngactacaggcgtgcgccactatgccctgctaacttttttgtatttttagtagnagacggggtttcaccattttggccaggctagtctnaaattcctgacctcaggngatctgcccacctcaacctcccaaagngctgggattacagncangagccacggacgcccggcctctacttttctacctttgactaacctgctgtagtatgngaccacagaacagattccctactttnanaaagcttcagaccaaaataaaccaaacattttaccagttttttaaaaaatttaactcataatcttttgccataccatgggtgggaaaattcagcactttcctgcacaggtnttnttaaaagttgtntgagacaggaataatgccttttgctttcgnattnaatttttataggngcctngaacattaanaaataactttttaggggnncgcncntcangtnaaaaattaaccnccttncccaangccgaaattttggaanggnggggttttntnaantttntttggaaattttaaaaanaacttgggnaacanggnnnaangggaccccnntctttancaaancccanggatttnttgggtgaganngaaaantncnccnggncntgnccagncccnggggggnanccctggangntccccntgttnttttttcccaagngggg

SEQ ID NO: 4149 - DNA, 842 bp, Homo sapiens
  misc_feature 485, 557, 581, 634, 657, 683, 684, 688, 718, 736, 739, 748,750, 763, 772, 778, 794, 797, 802, 808, 813, 814, 820, 831,842: n = A,T,C or G
attggagctccaccgcggtggcggccgcccgggcaggtacgtattccaaggaagctgaatgaacttctataagtatcctttatacagctaaaactcatcttgatagtcatgttttaataaatttagaacaattatcagtaaaagaaatatagttgggctgggcacagtggctcacacctgtaatcccagcactctgggaggccgaggcaggtggtacctcggccgctctagaactagtggatcccccgggctgcaggaattcgatatcaagcttatcgataccgtcgacctcgagggggggcccggtacccagcttttgttccctttagtgagggttaattgcgcgcttggcgtaatcatggtcatagctgtttcctgtgtgaaattgttatccgctcacaattccacacaacatacgagccgggagcataaaagtgttaaaagcctgggggtgcctaatgagtgagctaactcacattaattgngttgcgctcacttgcccgcttttccagtcgggaaacctgtcgtgccagctgcattaatgaatcggccaaccncccggggagaggcggtttgcgttntttgggcgctcttccgcttccctcgctcacttgactcgctgccgctcggtccnttccggcttgcggcgagcgggtntcaagctcacttcaaaagggcgggtnntacngggttattccccaagaaatcaagggggatnaccccaggaaaagaaacnttntgagccaananggcccacctaaangggccaggnacccgnaaaaaaaggccggggntgntgggngttttncattnnggttcngcccccttganagagataaaan

SEQ ID NO: 4150 - DNA, 859 bp, Homo sapiens
  misc_feature 627, 668, 670, 673, 687, 692, 693, 703, 721, 780, 791, 801,809, 823, 824, 826, 827, 830, 831, 838, 859: n = A,T,C or G
gcgtaatacgactcactatagggcgaattggagctccaccgcggtggcggccgcccgggcaggtacccctgttgtaagtccagtgaaggggtctagggaactctcccgtctcataggagttcctgatgcctccagttgacacaccttttctctgccatatggcactctgtctggacatctggtttactatccttttctttgtccatcagatcttaccactttcctgaaagtatcctcagcgacctcagactgtgtgtcccttttctcaatgggaataatcttaattcttgtgactcccgcgtacctcggccgctctagaactagtggatcccccgggctgcaggaattcgatatcaagcttatcgataccgtcgacctcgagggggggcccggtacccagcttttgttccctttagtgagggttaattgcgcgcttggcgtaatcatggtcatagctgtttcctgtgtgaaattgttatcccgctcacaattccacacaacatacgagccgggagcataaagtgtaaagcctgggggtgcctaatgagtgagccaactcacattaattgcgttgcgctcactgcccgctttccagtcgggaaacctgtcgtgccagctgcattaatnaatcggcaacgccgcggggagaggcggttttgcgtattggncnctnttccgctttccttnggttnnctgaattcgntgcgcctccggtcgtttnggcttggcggccgaagcggttttaaaccttcactccaaaaggccgggaattaccggttntcccccaagantcaggggggnttaccccngggaaaaaaaaatnngnnccnnacggccncccaaaaggcccgggaacccn

SEQ ID NO: 4151 - DNA, 858 bp, Homo sapiens
  misc_feature 524, 567, 597, 659, 716, 727, 730, 765, 768, 770, 794, 795,797, 798, 811, 813, 841, 842, 847, 849: n = A,T,C or G
gtaatcgactcactatagggcgaattggagctccaccgcggtggcggccgcccgggcaggtaccttagaatcagctcactgtttgagagtaaagctctttacagttgtttacccagaaatagactgtttaaattcctttgcatctcagctctctggtgtcttctgaacccactcaccagctgtggtgaggattctggctggtggccatcttgtgctctatagctctagcctacaggaatattctgaagagatgtgaggaaaaggaaaaaaaaaagtacctcggccgctctagaactagtggatcccccgggctgcaggaattcgatatcaagcttatcgataccgtcgacctcgagggggggcccggtacccagcttttgttccctttagtgagggttaattgcgcgcttggccgtaatcatggtcatagctgtttcctgtgtgaaaattgttatccgctcacaattccacacaacatacgagccgggagcataaagtgtaaagcctggggtgcctaatgagtnagctaactcacattaatttgcgttgcgctcactgcccgctttncagtcgggaaacctgtcgtgccagctgcanttaaatgaaatcggccaaccccccgggggagaaggcgggtttgcgtattggggcgctctttncgcttttctttggcttcacttgactcgcttgcgcttcgggtccgttccggctgcggncgaagccggtnttnaagcttcacttcaaaaggcgggtaattaccggttnttncnccagaaattcaggggggattaacnncnnggaaaaaacattntngagccaaaaaaggcccccaaaagggccnnggaancntaaaaaggg

SEQ ID NO: 4152 - DNA, 863 bp, Homo sapiens
  misc_feature 6, 9, 19, 496, 597, 609, 644, 673, 703, 745, 746, 756, 758,769, 770, 773, 787, 789, 800, 804, 806, 807, 811, 821, 823,825, 828, 836, 838, 841, 845, 853, 861: n = A,T,C or G
gtgcgngcntcgactcaanttactatagggcgaattggagctccaccgcggtggcggccgaggtaccctagactctctttggaggactcccaagggctcctgaagctgctttgccctcctttgcagagagcaagaggtgccagggatttatgtcctggcagggcagtgctggatcaatgacttagtaggaggtctggaaagcctagtgcccttgccttgagtctggacacactttggagttgcagttcacatccaggctgcagctggggctctcccagcacttccttcagtcacacacacatggattcttgtcttggtgtctggtttgggggaacctgacttaagtcacttttgtggacattttggagagcaggttatttcagccggcaaccaggaactagactcccgcgtacctgcccgggcggccgctctagaactagtggatcccccgggctgcaggaattcgatatcaagcttatcgataccgtcgacctcnagggggggcccggtacccagcttttgttccctttagtgagggttaattgcgcgcttggcgtaatcatggtcatagctgtttcctgtgtgaaattgttattncgctcacaattncacacaaacatacgagccgggagcattaaagtgtnaagcctggggtgcctaatgagtggagctnactcacatttaattgggttgcgctcaactngccgctttttcaatccgggaaaccttttcgtgcccacctgcnnttaatgaaantnggatcaacccnncgnggaagagggcggtntngcggtttttgngacncnnattnacgggttttnancnctngaaaaaanancantttngacccagnagggcccngg

SEQ ID NO: 4153 - DNA, 861 bp, Homo sapiens
  misc_feature 2, 3, 5, 9, 17, 19, 655, 671, 704, 748, 755, 760, 763, 764,778, 782, 783, 785, 792, 798, 803, 832, 837, 855: n = A,T,C or G
gnntnggtngacgcccncncgtaatacgactcactatagggcgaattggagctccaccgcggtggcggccgaggtacgcgggggactgtcatgtaagaagtcacaagaattaagattattcccattgagaaaagggacacacagtctgaggtcgctgaggatactttcaggaaagtggtaagatctgatggacaaagaaaaggatagtaaaccagatgtccagacagagtgccatatggcagagaaaaggtgtgtcaactggaggcatcaggaactcctatgagacgcgagagttccctagaccccttcactggacttgcaacaggggtacctgcccgggcggccgctctagaactagtggatcccccgggctgcaggaattcgatatcaagcttatcgataccgtcgacctcgagggggggcccggtacccagcttttgttccctttagtgagggttaattgcgcgcttggcgtaatcatggtcatagctgtttcctgtgtgaaattgttatccgctcacaattccacacaacatacgagccgggagcataaagtgtaaagcctggggtgcctaatgagtgagctaactcacattaattgcgttgcgctcactgcccgctttccagtcgggaaacctgtctgccagctgcattnatgaatcgccaacgcncggggagaggcggtttgcgtatttggggcgctntttccgctttctttcttaattgacttcgcttgcgctcgggtccnttccggnttgcnggnnaaccggttttattntttnntnaaaaggngggttnttccngtttttccccaaaattcaaggggattaanccaanggaaaaaaacctttttgnaccaat

SEQ ID NO: 4154 - DNA, 888 bp, Homo sapiens
  misc_feature 2, 9, 11, 19, 26, 71, 83, 86, 109, 177, 192, 195, 382, 387,431, 443, 457, 463, 503, 515, 547, 549, 555, 556, 565, 578,607, 620, 644, 646, 653, 655, 673, 677, 678, 686, 694, 698,704, 723, 726, 727, 728, 732, 734, 752, 754, 756, 757: n = A,T,C or G
  misc_feature 761, 762, 768, 773, 782, 785, 789, 792, 795, 808, 814, 816,822, 831, 832, 834, 837, 840, 842, 848, 856, 860, 864, 870,871, 883, 888: n = A,T,C or G
gnatcggancngcaccggnggggcgnggcgcccgggcaggtacctatgcggaaagtcccttccttccagangcctccactganttntgatgccaaggagcttctgcggngccctgcacgcacctttacagatgcaggtggctgtttcctgtgtcagactgcaagctcccgtgagctnggttcattgctaatngtngacttggcctggcaaataatgacttggcctggtaaataatgattacacgaacaaatgtaactaagacatccagatacaatctaatgcatttcatgcaactcgtgtaaccaagtgaggttttccagctgtttcagcttctattataacttacattacagccccgccgtacctgggccgctctagaacnagtgnatcccccgggctgcaggaattcgatatcaagcttatcgataccngtcgacctcganggggggcccaggtnccccancttttgtttccttttagtgaggggttaaattggcgcgctnggcgtaatcatnggtcataagctgtttcctgggggtgaaatttngntatccnnttcaacaantttcaacacaacnataacggaggcccgggaggcatttaaaantgttaaaagcctngggggtgccctaaatgaagttgangncttaacntnaccatttaaatttggggnttgnngcttcaanttggcccncttntaacantcccggggaaaaacctggnccnnncccnancttgcatttaatggaatncngnnccanntccccnggggnagaagggcnggntttngcnttntttgggccgctcntttccngnttttcnttgcttaanntnganttncntggcgnctcgggantttnagantggcgnngaagcgggattnaaatn

SEQ ID NO: 4155 - DNA, 917 bp, Homo sapiens
  misc_feature 375, 389, 392, 419, 444, 466, 470, 500, 503, 508, 522, 559,565, 575, 582, 583, 590, 594, 598, 606, 608, 637, 642, 654,658, 661, 667, 669, 677, 678, 691, 716, 719, 722, 731, 732,738, 739, 745, 747, 748, 752, 760, 761, 764, 774, 776: n = A,T,C or G
  misc_feature 779, 792, 794, 796, 797, 799, 813, 815, 823, 827, 829, 831,842, 843, 844, 845, 847, 848, 850, 867, 868, 875, 877, 879,880, 884, 886, 887, 888, 899, 900, 903, 906, 909, 910, 912,913, 917: n = A,T,C or G
gactcactatagggcgaattggagctccaccgcggtggcggccgaggtacgcgggaggcttggacattttctcctgccctaccgtctttgtggtcccaagtgtcatgccccagtaaatgcttccatgcctgttcctgaacccaaagaactgttattgaatgggacagagactgaatgactaaggaaaccctagctgcctccagccccacacttggctaagctgtaatcagctctgtgtgaggctgggcatggagtaggtgtagtcaatgtcctcctctctgtctcgtctcggttgtatcttcatttggtgccgctctcacggacgcctatcttcctctctgtctgttcctattgtctttccaggctcctggctgncctttctgtcatancanccccagtgattttgataatgtcagcgnggagccccaaagctggtcgcccatntgtgataagttggataggggancccncatgaaaatgcttgaggggaaatggaaaanaanaagtngggggccagtcaangttgttggcaaaggggtggccattttgcccataaggntacctngccccggggnggggccnnttttaanaaanttangtggggantnccccccggggcttggaagggaaaatttcnaattnttcaaagccttntttngantccccngncaacctcnnaaggggggggggnccccgggtccccacacttttttttngtnccnttttattgnngggggnnataaantnngccncctctgtnnggnaataaatagngnaanaaaaatggatttntntnngnggggaaaaaaaatngntttcttcnctcnananaaatccccccnnnnannantaacccgggcgggggannaaaaaantnannttcnannncgggggggttnnatnaanggnngnnaacn

SEQ ID NO: 4156 - DNA, 837 bp, Homo sapiens
  misc_feature 597, 612, 618, 635, 677, 682, 683, 686, 693, 710, 713, 715,742, 750, 754, 758, 768, 772, 781, 813, 823, 825, 828: n = A,T,C or G
gcgtaatacgactcactatagggcgaattggagctccaccgcggtggcggccgcccgggcaggtacgcgggggagccttacaggcttacaatacaaacttgaacagtcaggatgtttcactgcaaatctttacagaagtgctcttcgactgatagtcattgtggaggaaaagaaacaaatgctgaactaggaggcaacttggggttttaatatgttccttaagtttgcatcctcccaccttccctggatgaaaaccactggtgatgtgatttaattcttttggctgagtgagatagacaagaggaatgcagaaatggtacctcggccgctctagaactagtggatcccccgggctgcaggaattcgatatcaagcttatcgataccgtcgacctcgagggggggcccggtacccagcttttgttccctttagtgagggttaattgcgcgcttggcgtaatcatggtcatagctgtttcctgtgtgaaattgttatccgctcacaatttcacacaacatacgagccgggagcataaagtgtaaaagcctggggtgcctaatgagtgagcttactcacattaatttgcgttgcgctcantggcccgcttttcantcgggnaaaccctgtcgtgccanctgcattaatgaatcggcccaacccccccgggggaaaaagcngtttnngtntttgggngctctttcccttttctnggntnactgactcgcttgggctcggtcctttncggcttgngggncaanccgttttaanttanctcaaaggngggtaattcccgggtttttccacagaaatcanggggaattancnccnggaaaaaat

SEQ ID NO: 4157 - DNA, 875 bp, Homo sapiens
  misc_feature 3, 573, 591, 668, 688, 690, 696, 704, 705, 713, 717, 726,735, 736, 747, 751, 788, 792, 793, 795, 801, 806, 809, 814,835, 842, 845, 846, 848, 851, 861, 862, 868: n = A,T,C or G
gtngacgccgtaatacgactcactatagggcgaattggagctccaccgcggtggcggccgaggtacacagggcggggagcctcgggagcggctcccttagcaggacctgagggtttcgggagagtcctggctttgcacttagttttcccgctgcctggctgcctccgtggcggttgtactgctttttatgcaggatgtaggatcgaaggcaaatcatcctttccctacgtcccctgccaacccctgccgctctcctctattttgtacctgcccgggcggccgctctagaactagtggatcccccgggctgcaggaattcgatatcaagcttatcgataccgtcgacctcgagggggggcccggtacccagcttttgttccctttagtgagggttaattgcgcgcttggcgtaatcatggtcatagctgtttcctgtgtgaaattgttatccgctcacaatttccacacaacatacgagccggggagcataaaagtgtaaaagcctggggtgcctaatgagtgaagctaacttcacattaattgcgttgcgcttaactggccccttttcagtcnggaaacctgtcgtgccancttgcattaatgaatcggcccaccccccgggaaaagccgttttgcgtattgggcgctttttccctttctttgcttanttgactccttggcttcgggncntttcgnttgcgggnnaagcggtnttancttaccttnaaaggcggnnaataccggttnttcncaaaaaattaggggggtaacccccggaaaaaaaaatntttnncnaaaaanggccnccnaaaanggccccgaaacccttaaaaanggcccgntgnntnggngttttttcannaaggcncccccct

SEQ ID NO: 4158 - DNA, 901 bp, Homo sapiens
  misc_feature 472, 504, 574, 582, 596, 634, 637, 638, 642, 659, 665, 694,695, 698, 711, 719, 720, 721, 731, 733, 749, 754, 756, 757,760, 761, 762, 764, 768, 777, 779, 780, 786, 797, 798, 803,804, 806, 811, 820, 824, 825, 829, 833, 834, 836, 837: n = A,T,C or G
  misc_feature 858, 861, 865, 867, 868, 874, 876, 877, 878, 881, 883, 884,885, 900: n = A,T,C or G
ggcgaattggagctccaccgcggtggcggccgaggtactcatcacgttgaagggtcatcatatgtgttcccatttttttctctgcaggaaagtgagcttctggaaggctgtatctgagtcctgttcctccaatattcaatgaatgctgtctgaatggatcaatcaaatggagctctgctctagaactagtggatcccccgggctgcaggaattcgatatcaagcttatcgataccgtcgacctcgagggggggcccggtacccagcttttgttccctttagtgagggttaattgcgcgcttggcgtaatcatggtcatagctgtttcctgtgtgaaattgttatccgctcacaattccacacaacatacgagccgggagcataaagtgtaaagcctggggtgcctaatgagtgagctaactcacattaattgcgttgcgctcactgcccgctttccagtcggggaaacctgncgtgccagctgcattaatgaatcggcccaacnccccggggaagaggcgggttgcgtattgggcgctcttcccgctttccttcgcttaactgactcggcttgngcttcggnccgtttcggcttgncgggcgaagccggttttcaagcttcacttcaaaaggcnggnnaatnacgggttattccacaanaaatanaggggggaaaaaccccaaggaaaaaaaannttngggagcccaaaanggcccaannnaaaaaggccncngaaacccttaaaaaangggcncnnttnnntngccntttttttcnannatgggntcccccccccnnggccnngnctttnacaaaaaanttgnncccnaaanncnnaagggggggggggaaaacccnccngggntnnttaaanannnccngnnntttcccccttgaaanc

SEQ ID NO: 4159 - DNA, 883 bp, Homo sapiens
  misc_feature 484, 498, 506, 508, 512, 531, 538, 567, 568, 589, 592, 595,597, 616, 618, 649, 657, 659, 683, 685, 694, 695, 699, 704,710, 733, 747, 749, 756, 770, 774, 778, 779, 791, 798, 803,810, 815, 816, 820, 821, 824, 826, 831, 832, 838, 845: n = A,T,C or G
  misc_feature 852, 853, 857, 859, 865, 868, 869, 881: n = A,T,C or G
ggcgaattggagctccaccgcggtggcggccgaggtactttacagtttacaaggtgttatttcattacattttgcactacggttctagcatagccattgttatttttattcacagacagaaaaaaatgaggttgtctcactcatataacctggcctctctcagctctggttgctgtggagagtagcataagtgatatctcttcaatggtggttctactgcacaaagagaaaacaaaacgttgtcttctggccttccaatggcagaatttgacctgcttttggctttgaaatgcctcatatgatattcttctagcagatttgtctaattatattttgcttgggctaagattaaaattaattggtcttttcatgatcacacatcaggagagtaataggaccaggcacctgagaccaagccagggattaaagattggttatgggataatccactagccagagagtctgaatattggtgggagatgantggaggagacccantgggcctncngcancttgtttatcactggcatntttcatnacaagcctttattgtggcagggaatttcnncctgatgtgcccacagctggntgnctnantggcacgcaccaccaaagntntgtggtaccctggcccggggcgggccgcttnttagaacntnagtgggatcccccccgggccttgnanggaatttcnnatantcaangctttnttcgatacccggctaccctctanggggggggccccgntncccccanctttttggttcccnttantggnnggggttaattgnccccctnggggntaaatcntgggnnaaannctngnttccnngggggnaaaatangtttccnnttancnatttcncannaacataccgagncc

SEQ ID NO: 4160 - DNA, 1179 bp, Homo sapiens
  misc_feature 1, 2, 5, 9, 11, 14, 15, 17, 18, 32, 33, 34, 35, 36, 42, 43,44, 54, 56, 60, 63, 66, 78, 79, 80, 88, 95, 100, 117, 153,155, 438, 457, 480, 494, 546, 572, 575, 578, 580, 581, 588,593, 595, 624, 643, 661, 663, 666, 683, 696, 697, 698: n = A,T,C or G
  misc_feature 716, 725, 745, 784, 790, 796, 800, 822, 823, 825, 828, 839,846, 848, 856, 857, 863, 875, 915, 951, 954, 978, 985, 987,989, 998, 1004, 1005, 1008, 1010, 1012, 1022, 1023, 1025,1026, 1035, 1039, 1045, 1046, 1047, 1070, 1074, 1080: n = A,T,C or G
  misc_feature 1083, 1094, 1106, 1110, 1113, 1114, 1120, 1122, 1125, 1139,1152, 1164, 1165, 1171, 1176: n = A,T,C or G
nngcntcantnttnngnntgtataaattcctnnnnnttattnnntcgaagtttnantatnttnttntaaatatatggnnnaggggggnttggaanattcnaaaaactcactataggncgaattggactccaccgcggtggcggccgaggtacncngggcttgcataatttggcattagcaacctcaaaaactctggaaaaggcttcattttctccagtctcctgggagaggagaggcaccatgaaggcagacccatccagagaacacctgcgacaggctgagaagccattgggagacacacttctgaacgccaccactggaaaatcacacatgctgaaatgggagagttccctgacccccttgcaggatatgtgacaggagtgtggctcatcttgttcagctgggagtgcatactcaaaccccttatgagacaaaggnagtatgcataccagaaggntgccagggaactgggggaagccnaaaataataaactnagtttaaatttgatccctccaaagaagtttaaaagccgggtttttaaaatantttacttggaccaggttaaattattnaanccnannttgggtngtttngnaacccccccaattggaattccttcaattngaaattcaattaggattanggcaaacctggccttttnanttngggaaccattttggaanggcttttttattnnncccatgcctttgccctanaaaaaaaantaaaaattgccacccctttnaaattttttttaaaaatttggaaaatttatttaaaagcncccaanaaaatnattnccttaattgggcttcttatttnncntcntttaatttttnggggggntnttaacaanngtggancttccaataaantttttcccttttcccctttgaaaaagaaattttttaaacntttttaaaaagggaaaacctttttcctttttggaancgntttaagggacaaattttcttaagnatttaantncnaaaattggnattttnncantngntttttccaanngnnttaaaaaanatanccttannnattgtctttttttaacaaacccntttnagaaanaanagaaaaagccnacctttttaatnaccnaanntttttncntanttttgccccccttnccatcttcaaaanaaaaaaaggtgnnttcaanttccnttt

SEQ ID NO: 4161 - DNA, 846 bp, Homo sapiens
  misc_feature 460, 580, 624, 642, 668, 676, 679, 722, 723, 733, 751, 753,775, 782, 783, 791, 802, 812, 817: n = A,T,C or G
ctatagggcgaattggagctccaccgcggtggcggccgcccgggcaggtaccttcagtccccagcctctcacagtagggctttgctcagtataccccagtgtccctcagcgttcttagcacttgtcctgacagtgtcccagatccgatatcaactgcatgaaatttgccaatgagggtgctattagtttctgtagaacgtcatcaaaccagagttccccaaacctgaattctcttccattatccattggttgcatttttaatcacgtattccaggacctgctctgtacctcggccgctctagaactagtggatcccccgggctgcaggaattcgatatcaagcttatcgataccgtcgacctcgagggggggcccggtacccagcttttgttccctttagtgagggttaattgcgcgcttggcgtaatcatggtcatagctgtttcctgtgtgaaattgntatccgctcacaattccacacaacatacgagccgggagccataaagtgtaaaagcctggggtgcctaatgagtgagctaactcacattaattgcgttgcgctcactgcccgcttttcagncgggaaacctgtcgtgccagctgcattaatgaatcggcccaacnccgcgggggagaagcggnttggcgtatttggggcgctctttccnttttcttnggntcacttgacttccgttgcgcctcggtcgtttcgggctggcggnngagccgggtntcaagctttactcaaaangngggggaataccgggttttcccnaaaaatnnagggggantaccccagggnaagaaacttntgganccaaaaggcccccaaaaagggcccggact

SEQ ID NO: 4162 - DNA, 840 bp, Homo sapiens
  misc_feature 542, 550, 559, 560, 566, 569, 576, 627, 630, 635, 660, 678,697, 703, 719, 725, 737, 745, 747, 748, 749, 751, 766, 771,775, 785, 793, 799, 802, 807, 809, 813, 821, 826, 827, 829,833, 840: n = A,T,C or G
gctccccgcggtggcggccgcccgggcaggtacaccaacaacagccaagctcagagccaaatcaggaaggcaataccattcacaactgccacaaaaagaataaaatacttaggaacacagccagccagagaggtgaaagacccctgcaatgagaatgcaaagcactcttcaaagaaatcagagatgacacaaacaaatggaaaaaaagtccatcctcatggagaagaagatttagaggctactgattaggagtttcagtggaaagtggggtctgaagccaaattgcagaagtctgaggtgtatgcatgcagtaagtaaagagacagcagataatgaatcttctttagaacacagagcaattgttttccatttttttttttcatggaagggaaagcaagtgtctaatatatcatgacagccccatgttgttctctaaacactactattgcatcctgaattttctttgaattttgcactccacttattttacgtttgggagatactaaatattgggtatcctgggttttgcaaactgagaaaangacttgantgcaaggcnnaaaggnccngggaagnaaagaaaaaggtgtttagggaggggcatggtttgagctgggttgccccctnttnggccnactggagctggggtctcactgggancttttgggagggaccccnccaaaacacaccttttggnggatcnttcccttggaaaggcntggaangggggggaaaanttttttcntnnncnttccaagggggggcngactncctngccccccaanggcccaanaagttnggnccctnangggnattaaatnccccnngncccncccaaan

SEQ ID NO: 4163 - DNA, 1187 bp, Homo sapiens
  misc_feature 3, 6, 7, 14, 16, 18, 22, 26, 27, 31, 33, 34, 35, 36, 37,38, 39, 40, 41, 44, 58, 63, 69, 73, 74, 75, 76, 83, 88,91, 98, 101, 104, 106, 107, 125, 223, 291, 335, 405, 442,446, 471, 483, 491, 503, 549, 583, 592, 595, 600, 611, 652: n = A,T,C or G
  misc_feature 662, 695, 699, 703, 719, 741, 749, 754, 758, 781, 794, 813,823, 833, 839, 840, 843, 849, 861, 873, 874, 908, 910, 913,920, 921, 928, 933, 938, 951, 957, 958, 975, 977, 980, 985,986, 994, 995, 996, 1000, 1001, 1006, 1009, 1028, 1032: n = A,T,C or G
  misc_feature 1035, 1065, 1068, 1089, 1105, 1107, 1111, 1115, 1117, 1125,1126, 1128, 1132, 1142, 1144, 1148, 1151, 1155, 1160, 1167,1170, 1171, 1172, 1175, 1187: n = A,T,C or G
aantanntagtaanananttanatanntttnannnnnnnnnttntatataataattanatttntattcntatnnnntattatnttggnttntataatnatnctncnnatgccacttactataggncgaattggagctccaccgcggtggcggccggcacagacgtagtctcatcgagaattaacacagggagctttccagagacctttagcaaaagtgttcanatactgaaccaaaacagaaaggatggccctttctggagctccttccccagcacaatcccgcgtacctnggccgctctagaactaagtggatcccccgggctgcaggaattcnatatcaagcttatcgatacccgtcgaccttcgagggggggccccggtacccaagcttttgttccctttantgagggttaatttgcggcgcttgggccgtaaaatcangggncataagcctggttttcctgttgtgnaaatttgtttantccgcttnacaaatttccancaccaaacaattacccgaagcccgggggagccattaaaaaggtggntaaaaaggcccttggggggggtggcccttaaatngaaggttgnaangcctnaacctttcaancaatttaaaatttggccggttttggccggccttcaaacttnggcccccggnttttttccaagttccggggggaaaaacccttgnttcnggtngccccaaccttgccantttaaaatggaaaattcggggncccaaaanacccnccgnggggggaaagaaggggccggggntttttgcccgttnaatttggggggccgccttnttttcccgcntttacctttnggcttnnaanttgaantttccgccttgncggccttcgggnncccgttttcccggcctttcccgggccaaagccgngnttnttcaagnntttcaantttcnaaaanggccggggtaaantaaacnngggttaattcccacaananaanttcannggggggannnaacnnccaanggnaaaaaaaaaacatttgtgngaanccnaaaaaagggcccacccaaaaaaggggcccnggnaaacccgtaaaaaaaaggccnccgtttggctttggcncntttntttncntataaggnntncccncccccccttntnacanagncatntaaanaaaaaanttnnncgncctcaaatttan

SEQ ID NO: 4164 - DNA, 909 bp, Homo sapiens
  misc_feature 419, 506, 517, 525, 602, 622, 653, 655, 666, 670, 672, 676,680, 693, 698, 702, 721, 723, 729, 753, 754, 755, 766, 768,769, 780, 788, 794, 797, 799, 806, 809, 810, 811, 814, 826,827, 828, 836, 853, 855, 861, 862, 865, 866, 867, 870: n = A,T,C or G
  misc_feature 874, 875, 882, 883, 886, 901, 906: n = A,T,C or G
gaattggagctccaccgcggtggcggccgcccgggcaggtggagggacaccagtgaggctgcaggaggttctccagcaatatggcacaacatagagaccactcactaggacactgtgcttttatcataacccattattgttggctgagcttgcttaaaaaactgagcagactttaacaacttgcagacttcacttaaagtccagattcccagcttctcttctctttaaaaaaaaattaatagaactgcaaatcagcagccctaggactatattccaatatggtaacaactggctggatttcaaaagccactacctctcctgggtttgccacaatccccagtacctcggccgctctagaactagtggatcccccgggctgcaggaattcgatatcaagcttatcgataccgtcgacctcnagggggggcccggtacccagcttttgttccctttagtgagggttaattgcgcgcttggcgtaatcatggtcataagctgtttcctgnggtgaaaatgntatccggncacaatttgcacacaacaaactaaccgggaagccataaagtgtaaaaacccctgggggtgccctaatgactgaaccnaaccccacatttaaattgcngtttgggcctcacttgaccgctttcccaggncngggaaaaaccngtcnangccnagcntgcatttaaatgnaaatngggnccaacccccccgggggagnanggcggnttggtgttttggggggctttttannnttttctaagcncnngtggacccccntgggcttngggccnttncngcctttngannnggngggtttccaccnnnccccaaanggggggaaaaacgggantnttcccnnggnnnccngggnntaaacgnnaanggaaaaaaacctgtnggggnaag

SEQ ID NO: 4165 - DNA, 1253 bp, Homo sapiens
  misc_feature 1, 2, 3, 4, 13, 15, 17, 18, 23, 26, 27, 29, 30, 31, 32, 36,41, 42, 44, 45, 47, 48, 55, 60, 61, 67, 71, 74, 75, 78,79, 82, 83, 85, 88, 89, 90, 94, 95, 96, 97, 102, 104, 105,112, 165, 197, 198, 201, 206, 207, 210, 222, 228, 230, 233: n = A,T,C or G
  misc_feature 238, 372, 440, 449, 456, 462, 519, 523, 530, 533, 542, 567,568, 578, 585, 597, 603, 605, 618, 630, 634, 637, 660, 668,689, 709, 727, 747, 749, 752, 755, 756, 767, 769, 802, 805,810, 814, 816, 839, 844, 870, 875, 887, 889, 891, 892: n = A,T,C or G
  misc_feature 895, 905, 906, 911, 916, 924, 930, 938, 940, 941, 943, 946,952, 970, 972, 999, 1005, 1009, 1018, 1020, 1021, 1024,1029, 1033, 1037, 1044, 1047, 1050, 1051, 1056, 1059, 1065,1071, 1079, 1081, 1101, 1102, 1104, 1106, 1108, 1122, 1132: n = A,T,C or G
  misc_feature 1133, 1137, 1140, 1146, 1149, 1152, 1154, 1156, 1167, 1171,1172, 1182, 1190, 1191, 1197, 1198, 1199, 1211, 1216, 1219,1223, 1237, 1245, 1247, 1248, 1249, 1251: n = A,T,C or G
nnnntttttcttntntnnaatanttnncnnnnaaanttttnngnncnntctcccngaccnntttttntggntannttnnttnnanatnnntagnnnnaggcngnnaaaattncgactcctatagggcgaattggagctccaccgcggtggcggccgaggtacctnattcaggtctgatctgggaccccgtgttgttnngcnttggnnggnacaatagaaaanaaaaananttnttctncttcttgccatccaagccagtctggagaagatggaccccttactctgagctggtcagaaatatgtagatccccttcctcatgattcatccatctctcgtgatccctcaaacttttccctggaggatcttagctnagaaaaatgtctatccagccaaaagaattaaatcacattcacccagtgggttttcatcccaggggaanggtgggganggattgncaaaancttaagggaaccattattaaaaaaacccccaaggtttgcccctccctaagttttcangcantttttgnttntcctttttnccttcccaccaattggacctatttnnagtttcgaanagaaagncaccttttttgnttaaangnatttttggccagnttgaaaaaacanttcnttnggccttggtttccaagggttttntttttttnccccccgccggttacccttgnccccggggccggggcccgcntttttaaaaaaccttagntgggattccccccccggggncntgncannggaattttccnantttttcaaaggccttttattcggattcccgtgncgnacccnttcnanaagggggggggggcccccggttnccccnaacttttttggttccccctttttaanttganggggtttaattntncnnccncctttgggcnnttaanccatngggccatnaaactntttttccntnngngtngaaaantatttttttccccccttncnaaatttccccccccaaatcttacctantccccngggnaaccatttnanngtngtttnaaancccntgggggngtnccnntaatngangttggnggcccnaccccccntnttaaatttggcgtgtggtgnncntntntggccccctttttncctggcctgnnaaanccntttttnttnccncncntcattttattngaanncctccccccncccccccnngtgtgnnnggcgtttttctnttttnggncccnattttcctattttnagcaaaanannnancg

SEQ ID NO: 4166 - DNA, 1202 bp, Homo sapiens
  misc_feature 3, 5, 6, 7, 10, 11, 15, 17, 18, 19, 20, 24, 28, 33, 36, 38,44, 47, 48, 50, 51, 54, 58, 59, 60, 64, 70, 71, 73, 74,77, 79, 82, 83, 86, 87, 89, 90, 96, 407, 447, 473, 476,497, 519, 520, 533, 549, 589, 591, 602, 609, 619, 621, 622: n = A,T,C or G
  misc_feature 626, 627, 633, 668, 669, 671, 677, 689, 694, 696, 698, 722,726, 738, 739, 741, 743, 744, 748, 749, 751, 764, 771, 773,775, 785, 795, 814, 815, 837, 839, 851, 854, 861, 865, 876,883, 886, 890, 897, 899, 900, 901, 903, 906, 909, 914: n = A,T,C or G
  misc_feature 916, 917, 918, 921, 922, 929, 932, 934, 952, 957, 959, 961,962, 963, 970, 971, 976, 979, 980, 986, 987, 991, 992, 995,996, 1002, 1005, 1009, 1015, 1017, 1025, 1027, 1033, 1036,1037, 1038, 1040, 1042, 1044, 1051, 1055, 1066, 1067: n = A,T,C or G
  misc_feature 1069, 1070, 1071, 1072, 1084, 1085, 1086, 1088, 1090, 1093,1094, 1102, 1106, 1107, 1109, 1114, 1118, 1135, 1143, 1145,1147, 1150, 1155, 1157, 1158, 1172, 1175, 1176, 1177, 1182,1185, 1188, 1189, 1190: n = A,T,C or G
ccncnnngtnntctntnnnncttnttanaattnggngnttgacntcnngnntantgtnnngttnttaatnntnnatntnagnnggnngnntggcgnttacatcctatagggcgaattggagctccaccgcggtggcggccgaggtacaatttatttagagacacttttaactaagaaaaaataagagaaagaaaataggctcatacttcttggcatatgtcaaaatttgttttgacattccctgaaatgtttgcattcttaaattttccagtaaacaactcagttttggaacactggtgaagttaaaaaaaaatcccctcttaaaggacttcacaaatttacttcttaaaacatagaaagactttttttttccttttcctcacatctctttcagaatattcctgtangctagagcctattaggagccaccaaggatgggccacccancccaagaaatcctccacccacaaggntgngtggagtggggtttcaagaangaacaccaggaaggaggctggnnattgccaaaaggngaaattttaaaaccantcctatttttcttgggggtaaaaacaaacttggtaaaaangnagcctttttancttcttnaaaaaaccangnngaanncttggnatttcttaaagggttaacctttgcccccgggggcnngncccggntttttaagaaancttantntnggaattccccccccgggggcttgncaangggaaatttctnntntnncaanncntttattcggattncccggtngnancctttcgaangggggggggnccccccgggataccccaannctttttttgttttccccttttnanttggaagggggnttnaaatttnggcncccctttgggnctttaantcnattngcccatnannncntgnttnccctngnnngtnnaaaaatnatntntatttcccgggttcacanaattncncnnnaaacaannaattncannaaatcnngggnngcnnttaaanagngttnaatgcncnctgggggntngccctntannnantngncgccaancttncctttaaaatnngnnnngggcggcctacnnngncngannttttctcnggtnngntaaanactntggaaatttgccccctntcaatttntngnganaaaangnntcactccgcccttnggnnngaggnggnttnnntgatttggtccg

SEQ ID NO: 4167 - DNA, 1393 bp, Homo sapiens
  misc_feature 13, 15, 18, 44, 53, 56, 76, 156, 159, 171, 185, 194, 211,260, 263, 277, 283, 380, 390, 516, 537, 559, 615, 625, 640,641, 650, 651, 652, 653, 654, 655, 656, 657, 658, 659, 660,661, 662, 665, 667, 668, 670, 672, 677, 678, 681, 682: n = A,T,C or G
  misc_feature 683, 684, 685, 686, 688, 689, 690, 691, 692, 693, 708, 725,730, 735, 741, 796, 805, 808, 810, 813, 832, 852, 863, 870,872, 896, 901, 906, 912, 938, 947, 951, 960, 992, 1008,1094, 1097, 1110, 1116, 1133, 1136, 1142, 1146, 1165, 1179: n = A,T,C or G
  misc_feature 1216, 1218, 1219, 1224, 1234, 1239, 1263, 1272, 1293, 1300,1317, 1330, 1337, 1338, 1341, 1349, 1351, 1352, 1354, 1360,1387, 1392: n = A,T,C or G
actcactataggncnganattgggaagctccaccgtcgcgtggngcgggccgnagngtaccgcgggggaacttgcnaataagggaaaatcaattgttctgggttcgccgggcaaaagggcgggaaaaaagggctttggggggaaaaggggtgggtngcntaaagccgccantcgtaagggtggcntccccgggngaataaacaatcccaangggcaattacaaaaaacccgggcttatttcgcccggttttgggcttcgngcnccgggtggggccgntcaaanccgcattttcccgggtctttaatcttatggaagggaagaacttcgaaagggtggttgcctttaaaagggtttttctttaagaagaaaaccgttttantttcggaagnaacgccccgtccaccctattaccgggaagccaccgccccaaaagccggcccaaaaaacttgttcaacaaagccccattggggattggttaagttattaattggcccccttaaaaaaaccgttcaanggggggcccgccaacccttcntggttaattggggccttttccngggccggggctttggaaaattccttaaaagaaaaattacccgcccgggggtccttnccttggaagnaaacctttttcaaannaaaaacccnnnnnnnnnnnnnaananngnanaaaannttnnnnnnannnnnnggggttcccaggttnggggggaaggccttaanttttntttgnaacaanttgtttcccaacctttggggaaaaggtttgggttaaaaaaaaaaacaacggaacnttggcaagntcnantcnttttctttgtgggaacccnccttttttattatttttttntttgaaaaagntttcaancnttggaaaccaaccccaattgggcnttggngaagnccccangtttgttcaaaaacccggaagtttangttggtttntttncccccgggnaccccttttttttaatttgggcccttaaaaanggggggaatccttttngggaaaaaaaaaaaaaaagggggccctcggtttttcccttttgtttttaaaaaaggggaaccttaagggccccccaaaattttaangtnggggggggtaggncccccntttccaaaaaaccaaantantaaccnttcnggctttggttttaatttcnaaaacttggcaaanggggaaaaaagttttgaaaatggaattgttattttgnannccctngattttttanccccnaaattacccctttccccggggccnggggccccnttttttaaaaaaaataaagtnggggatncccccccgggccttgcnagggaaaatttcnttttttnnaancctttatntnnanacccgntcaaaccccttaaaagggggggggggnccccnt

SEQ ID NO: 4168 - DNA, 893 bp, Homo sapiens
  misc_feature 4, 512, 574, 630, 646, 647, 651, 684, 707, 712, 715, 716,730, 741, 743, 748, 752, 764, 770, 776, 778, 780, 791, 798,802, 814, 828, 829, 848, 862, 863, 871, 885: n = A,T,C or G
gtantacgactcactatagggcgaattggagctccaccgcggtggcggccgcccgggcaggtactagaaacctagcaggcattaataattgttgaggcaatgactctgaggctatatctgggccttgtcattatttatcatttatatttgtatttttttctgaaatttgagggccaagaaaacattgactttgactgaggaggtcacatctgtgccatctctgcaaatcaatcagcaccactgaaataactacttagcattctgctgagctttccctgctcagtagagacaaatatactcatcccccacctcagtgagcttgtttaggcaaccaggattagagctgctcaggttcccaaccgtctcctgccacatcgggttctcaaaatggaaagaatggtttatgccaaatcacttttcctgtctgaaggaccactgaatggttttgtttttccatattttgcataggaccccctaaaagactagggtgacttggcaaacacacaagtggnagtataaattcttttgcttctgctttttttttgaaaatcatgtttaagaattggattttaantcagaaattcactggatggtcaaggtaatcaattattgggaggggagaatttgtgntgtcaaccccaaggtnnttgntcccatgggccccaggggattttttggtggttnccctgaaatcttgctttttttangtcanccnngaattggaaaaccnttgaaccagtngnatgtntttnttttgccaaaangccaanaaaaantntnaaaggggaaantttttanggantttttggaaaanaaaaaaaacaaaanncctcctccagggggccttnttggaacccccccnncatttttnggaagtttggcccnttccattg

SEQ ID NO: 4169 - DNA, 889 bp, Homo sapiens
  misc_feature 612, 639, 672, 701, 709, 752, 782, 786, 793, 794, 799, 800,804, 811, 817, 821, 822, 829, 835, 836, 843, 844, 846, 849,861, 881: n = A,T,C or G
gactactatagggcgaattggagctccaccgcggtggcggccgcccgggcaggtacagtgacactgtcacggcccactgcagccttgacctcccaggcccaagctatcctcagcctcctgagtagctgggagcacagacgcgcgtcaccaaaccaggctaatgaatttttttttttgtagaggcagcatttcactacgttgtccaagctggtctcaaactcctgggctcaagtgatcttcccgcctcggcctcccaaagtgctgggaccacaggcaagagccaccacacccggccttttattttatcccaactgtaataaacagtttccttcacatgctctgtgcttcccacttccatatgtttgctcaagctgctgttgcctgcatcaccactaaggttcccacatgtgtcggatgtttcacctggcgccttcagctgcaagctcctccgtctccccgcgtaccttcggccgctctagaactagtggatcccccgggctgcaggaattcgatatcaagcttatcgatacccgtcgacctcgagggggggcccggtacccagcttttgttccctttagtgagggttaattgcgcgcttggcgtaatcatggncataagctggttcctgtgtgaaattgntattccgctcacaattccacaacaacatacgancccggggagcataaaagtggtaaaagccntgggggtngcctaatggagtggagcttaactcacaattaaatttggggttngggcttcactgggcccggtttttcaaatcngggnaaacccnnttgtnnccancttgctnttaatngaannggggccnaccccnnggggggnnanggngggggtttgcgntttttgggggccccttttcncctttccc

SEQ ID NO: 4170 - DNA, 887 bp, Homo sapiens
  misc_feature 2, 3, 4, 5, 6, 13, 527, 565, 584, 590, 611, 652, 686, 696,699, 703, 741, 742, 753, 765, 830, 844, 857, 869, 874, 875,880, 885: n = A,T,C or G
gnnnnntaggggnccgcgtaatacgactactatagggcgaattggagctccaccgcggtggcggccgaggtacttgctcttttctaagatttgcctccaaattgctactgaagcacattacctgtcttactatgaataattgtaattgtttctcagtgagcatgctagctactttagatatattatgtaatttaatcttcagaatctgtgacagagaaaaaaaaatctttgtttcataaacgaggaaactgaagtcctcagagggtaaagtcagttctttgcccagcacacaaatcacgttgtggtgaaactgacattaagcttgggtttctctgactccaaaggccatgcagtctgcaagactgcggcatttgttggcatttgcaccacgtagtagcactgcaggcagccagggaaaggggagctgagataggtgagggtggtcctcatggaggcgattctgtgtgcttgcatcctggaaccccttcattccctttgtgctgtacctgcccgggcggccgctctanaactagaggatcccccgggctgcaggaatttcgatatnaagcttatcgataccgtcnacctcnagggggggccccggtacccangctttttgttccctttaatggaggggttaattgcgcgcttnggcgtaaatcatggtcatagctgtttcctgtggngaaaaatgtnatncccntcacaatttccccaacaaacaataccgaagcccggggnngcataaaaggngtaaaagccctngggggtgccttaatgaagttgagcctaaactcccatttaaatttgcggttggcgcctcacctggnccgcttttccaaancggggaaaacccnttctgtgcccantcggnntaatngaaancc

SEQ ID NO: 4171 - DNA, 869 bp, Homo sapiens
  misc_feature 2, 3, 4, 6, 9, 10, 11, 531, 585, 667, 691, 696, 732, 742,763, 764, 780, 816, 841, 856: n = A,T,C or G
gnnnanagnnnacgcgcgtaatacgactactatagggcgaattggagctccaccgcggtggcggccgcccgggcaggtacctggatgttagagggatttgtctagacaggcagatagatatgatccagtgccaacactgtaatgctggctgaaatccagatggttgttttattgttaataaaatctatcttgtgggtgggtgggtgtcaggccttcatcattatatggtgcctgtcagatttatctacagacagaaccctgaaaacagcttgtgcctgccccgcatttttgaccccttgccaagatactgtacctcggccgctctagaactagtggatcccccgggctgcaggaattcgatatcaagcttatcgataccgtcgacctcgagggggggcccggtacccagcttttgttccctttagtgagggttaattgcgcgcttggcgtaatcatggtcatagctgtttcctgtgtgaaattgttatccgctccaattccacacaacatacgagccgggagcataaagtntaaagcctggggtgcctaatgagtgagctaactcacattaattgcgttgcgctnactgcccgctttccagtcgggaaacctgtcgtgccagctgcattaatgaatcggccaacgccccgggggagaggccggtttncgtatttgggcgctttttcgcttncttgnttactgactcgtggcgctttgggtcgttcggctgcnggcgaacggntattcaagttacttcaaaggnnggtaaataccggttanttccacaaaaaatcaaggggataaacccaaggaaanaaacattgttgagccaaaaaaggcncaccaaaagggccangaaacccgtaaat

SEQ ID NO: 4172 - DNA, 875 bp, Homo sapiens
  misc_feature 574, 634, 635, 664, 690, 703, 741, 756, 762, 764, 781, 785,788, 793, 800, 827, 833, 834, 843, 848, 849, 863, 866, 870,872: n = A,T,C or G
gactactatagggcgaattggagctccaccgcggtggcggccgcccgggcaggtactgctccaagaactctaacttcatcatcactccgacccccacggtccgccactcctgtctccacataccactgtcctgctcggttgatccgaagaatgggctcccggctctctacatcagaacttggttcaatgatctgagggctggtggactcctcaggaggacttagctctctgatatccagcacagcactaacctgacctcgccggtttccctttggggtattatgtcgtgggctaagggagcggttgagatttggtgtaaccctgtgagactctggaggtctctcttgatgctttgtccttgtttgacttaattcttgcttcaacctcagccacattaattttgaaatgaatgccctccaggatctgtgtacctcggccgctctagaactagtggatcccccgggctgcaggaattcgatatcaagcttatcgataccgtcgacctcgagggggggcccggtacccagcttttgttccctttagtgagggttaaattgcgcgctttggcgtaatnatgggtcataagctgtttcctggtggtgaaaaattggttaatccggctcacaaatttccnnaaccaacaataccgaagcccggggaagcnattaaaagtggtaaagccctgggggntgccctaaatganggtgaagcttaactcaccatttaaatttgcgtttggcngcttaactggcccgncttttncnaggccgggggaaaaccntgtnggngcccnaacctgnaatttaatgaaatcgggcccacccccncggggnngaaggcggntttgnntatttggggccccnttncccntnccc

SEQ ID NO: 4173 - DNA, 914 bp, Homo sapiens
  misc_feature 117, 194, 224, 444, 634, 640, 670, 709, 718, 739, 761, 763,770, 797, 801, 813, 814, 847, 856, 857, 871, 880, 886, 891,894, 904: n = A,T,C or G
gactcactatagggcgaattggagctccaccgcggtggcggccgcccgggcaggtactttttttttttttttttcaggtgtgaaatattgctattaatagtgtctatctcatagggnggctaagatgattaaatgagatgatatagtttaagttctcaaaaaagccaacaatgattgttacctttcttttaggngttgggtatcagcctcaatttctaaagaanaatctcttttgcctcccaattgtgctgaattggaaaccttacctatgtatttatttattcattcaaaaaccatctattataaaccatatttgtgccaaactctaagccagttactgaaaacacataagtcaataacagcacaatccttatcctccaggagttcataatccagtcagggaaaaggagacacacagataaagagaggagggatagagcgaanacattggagaaatcaggagcataccaacaccctaatttttcacagcagggacccgcgtacctcggccgctcttagaactagtgggatcccccgggctggcaggaattcgatatcaaagccttatcggatacccgtcgacctcgagggggggggccccggttcccaagctttttggttcccttttagtgangggttnaattggcgccccttgggcggttaattcatnggtcataggctgtttccctggtggtggaaatttggttantccgttcanaatttccccaccaaacattancgaagcccggggagcattaaangngttaaangccccgggggggggccttaattgaagngggngcctaacctccnnatttaatttggcggttggcgcctcactggcccncttttccannttggggaaaacctngcggggccnacttgnttttnatngaatttgggncaaccgcccc

SEQ ID NO: 4174 - DNA, 497 bp, Homo sapiens
  misc_feature 6, 76, 79, 80, 81: n = A,T,C or G
atactntgcgcgtaatacgactcactatagggcgaattggagctccaccgcggtggcggccgacgtacccggtgcnggnnngcatgatggtgacatgcgaatggtgatagtaacagaaaccattcagcctcttttttccacttctggatcagagtttattctaaattcagaagcacagtttcagacatctcaattttggattatggaaaagacaaaagcaataatgaaacatctacatagtcagaatgtaaaattgctcatatctagtgtgaaacaaccagatttagttagttattatgcaggggtgaatggcatatcagtggttgagtgtttatcatcagaagaagtttctcttatccggaggatcattggtctttctccatttgtacctcggccgctctagaactagtggatcccccgggctgcaggaattcgatatcaagcttatcgataccgtcgacctcgagggggggcccggtacccagcttttgttccct

SEQ ID NO: 4175 - DNA, 479 bp, Homo sapiens
  misc_feature 355, 440, 452, 466, 474, 477, 478: n = A,T,C or G
ggagctccacccgcggtggcggcccgcccgggcaggtacgcggggagttgtggggaagattagctccctgctcagcctctctgatacaactgggcagctagtttttgcttctgcaacaagacataggtttatgatgagcttcctgttcatctctgctgaaactagggaaagtggttctaggttggaggcgttagcagcattttggctggggtatatgggaggcaatatggaaaccatcaaacttgttctcacgtcattctgcaagtcctggtgtcctgaggtgtgctgaagccctatccccaagatgactatatttggagacaggatttttggaggaatatttcatcttttggtngtagaaaattcaaagcattcaagtttattaaggacacatgcacctgtctgtcatcacagtgctattcacaatagccaaaacatgnaaacaacctaantgcccatcaacagngggattgnatnng

SEQ ID NO: 4176 - DNA, 1225 bp, Homo sapiens
  misc_feature 5, 7, 9, 16, 18, 22, 26, 27, 41, 42, 46, 49, 53, 56, 57,58, 60, 67, 73, 78, 80, 82, 88, 89, 93, 95, 97, 102, 103,106, 109, 110, 111, 126, 132, 152, 201, 203, 209, 211, 222,223, 228, 236, 238, 344, 353, 364, 366, 370, 372, 373, 386: n = A,T,C or G
  misc_feature 415, 439, 459, 510, 562, 567, 585, 589, 645, 658, 687, 717,724, 734, 741, 747, 753, 761, 777, 780, 782, 793, 795, 796,813, 823, 831, 841, 842, 846, 848, 859, 860, 874, 875, 876,886, 895, 900, 903, 906, 912, 913, 916, 931, 936, 939: n = A,T,C or G
  misc_feature 945, 967, 973, 984, 1029, 1041, 1050, 1057, 1060, 1061, 1078,1089, 1090, 1093, 1095, 1098, 1108, 1116, 1121, 1125, 1126,1140, 1141, 1145, 1156, 1174, 1179, 1191, 1197, 1200, 1203,1204, 1212, 1223, 1224, 1225: n = A,T,C or G
ccccncnanccatttncnttanatanncttctctacatctnnacancanctcnttnnnanaacattntaattnatttntnancctttnnttcntncngaggnnaanaannntgcgatttcctattnggcganttggatctccacccgctggnggcggtcgcaggtacctgcccgcaggaggggaaggatgggcttcctgcngngctccntngccccacggannacaanaatacccncngccgctctagaactagtggatcccccgggctgcaggaattcgatatcaagcttatcgataccgtcgacctcgagggggggcccggtacccagcttttgttcccttnagtgagggnaaaatgcttcncntccncnnaaaacaacggatnatgagcctgtttccatgaagtggaaaatntgttatttcgctcaccaaatttcncacaacaaaccataccgaancccggggagccattaaaaagttggtaaaagccctgggggggtgccttaatngaggtggaggcttaactccaccatttaaattttgccgtttgcggcttcaacntgccncggcttttttcccaagtnccgngggaaaaacccttgtccggtggccccagccttggcaatttaaaattggaaaattcngggtcccaaaccnccgcccgggggggaaagaaggggccgggnttttggccgttaatttggggggccgccttncttttcncggctttttnccttccngccttnaacttngacctccngcattgccggccttcnggngnccgtttttcgngnntttgccagggcctaaanccggggttantttcaagncttccacctnnaaananggggcgggggnnaaatcaccggggtnnnttcccccaanaaaattcancgggnggnatnaaaccnnccngggaaaaaataaacnatcgnttnaggccnaaaaaaggcccccgccaaaaanggcccnagggaaccccnttaaaaaaaaggcccgccggatttgctttgccgttttttttccanaaagggctcccnccccccccnctggacnaanncatttaacaaaaaaatnctacccctttnnaantnaanaagggggggnggaaaaanccccngccnngggactttttaaannaatncccacggccgnttttccccccttgggaanacttnccctccggggcngccctnttnctnntttcccanccccttggccnnn

SEQ ID NO: 4177 - DNA, 1139 bp, Homo sapiens
  misc_feature 1, 3, 6, 9, 10, 11, 13, 14, 20, 21, 22, 30, 33, 37, 38, 43,46, 50, 52, 53, 57, 59, 63, 67, 69, 71, 73, 76, 79, 80,86, 90, 100, 103, 113, 138, 414, 497, 597, 681, 692, 704,710, 734, 758, 775, 778, 791, 801, 809, 822, 829, 831, 857: n = A,T,C or G
  misc_feature 863, 876, 892, 912, 916, 923, 924, 928, 936, 937, 941, 953,967, 984, 987, 990, 992, 995, 996, 998, 999, 1007, 1008,1012, 1013, 1023, 1026, 1027, 1029, 1033, 1034, 1038, 1050,1051, 1059, 1075, 1089, 1092, 1095, 1096, 1098, 1101: n = A,T,C or G
  misc_feature 1104, 1106, 1108, 1110, 1114, 1123: n = A,T,C or G
ncnccnacnnntnnataatnnnttttttcnatntttnnttttntanacanannaatncntttncatntntncnctnttnnctcatnaggnggcgcagttnttnacttaggcanattggagctccaccgcggtggcggncgcccgggcaggtacgcggggatagttgaaatggagggcggggaagtcaggcagtggtttctgaaagccaagaacttagtagcactgtgccattctcttgcctgatccagtgccattcccttcacttgatatctgtttactttagaggaggcagtttttgagaaaggatcataaatatcctggcccagtgccccaggagctatgacaagcaaaggaacatacttgccttggagatagccttttgcgatatttaaatgtccgtggatacagtaaatntcttgcaggcaagtttgctccaggagcatatttgcaggaccaaagccctgtaaccgaatagtttaaaatttcaccggccattntggggatttccctaaatccttttccgaaaaatggccaagggttgtgaagttgccctgtaataaaaaataatttcctatggttttaccctttcaaaccttnctttgtttctggggcttatggttgggtattcttttggattcccttagccaatttaaggccaaaattaattgggggtaacccttncgggctcggcnttcttaggaaanctaagntggggatcccccccccgggggccntggcaaagggaaatttccgaattnattcaaaggccttttanttnggattaaccccgntcctaacccnttccaaangggggggggggcnccccggntnacccccaagcttttttggtttccccntttaanggggaagggggtntaatttgggggcgccntttgggccgttaaatcaatngggncattagnnttgntttccctnntggnggaaaaatatgngttttccccctttnaccaaattttccacaanaancantnacnnanncccggggnnagcnnataaaaaagntgnntnaaanncccntggggtgggccnnaaatgagnggtgagccctaacctntacaatttaaattngcnttnngngcnttnantngngccngttttttcnaattcgggggaaaccg

SEQ ID NO: 4178 - DNA, 1112 bp, Homo sapiens
  misc_feature 1, 3, 5, 7, 9, 11, 12, 15, 16, 17, 18, 21, 22, 23, 26, 27,30, 34, 36, 37, 39, 40, 41, 42, 43, 44, 46, 47, 49, 50,52, 54, 55, 56, 60, 62, 66, 67, 70, 72, 74, 79, 80, 81,82, 83, 85, 91, 92, 94, 98, 99, 100, 105, 106, 107, 275,340: n = A,T,C or G
  misc_feature 370, 482, 553, 621, 738, 743, 746, 826, 831, 834, 842, 844,880, 882, 899, 902, 905, 909, 918, 936, 937, 938, 939, 940,952, 965, 966, 969, 1001, 1004, 1006, 1009, 1010, 1013,1018, 1019, 1030, 1031, 1041, 1043, 1044, 1052, 1058, 1064: n = A,T,C or G
  misc_feature 1068, 1070, 1075, 1085, 1087, 1089, 1097, 1100, 1108, 1110: n = A,T,C or G
ntntncntntnntgnnnnttnnnggnnttntttnanntnnnnnntnntnntnannntttntnattnnttntnangtttnnnnntntgaagnngngagnnnggacnnnttagggcgaattggagctccaccgcggtggcggccgaggtacagtgtatcttgggtgattttttcaccaagtataggatatgtctgaatagctacaggcttataaccagccataattccatataattgcactattgtccaagagtcactattttggaattggtattanaaataattacagtgactctgccttaattctccactgagccccaaagggtccgacgagacacctcnacccaaggacaattaatcggactgtgccanctccctaccctgcgcagtttcagcagcactggcgtaaaaatcacatggaccctcaagggagcccggcgtacacacacagccccgcgtaccttgccccgggcggccgctctangaactagtgggattcccccgggctgcagggaatttccgatatcaagcttatcggatacccgttcgaccttngagggggggggcccggtacccagcttttggttccctttagtgaaggggtttaatttgccgccgccttnggcgtaattcatggtcatagccttggttttccctggtgtgaaaaattggtttattcccgcttcaaccaaattttcaacaacaaaccattaccggaagccccggggaagccattaaanaggtngtnaaaaggccctgggggggtggcccttaaatggaagtggaaggccttaaccttcaaccaatttaatttggcgttttggcggnctttnaantggccccngncttttttcccaagttccgggggaaaaaacccttgtncnttggcccaaaactggcnatnttnaaanggaaattcnggcccaaaactccccccnnnnngaaaaaaggccnggtttttgccgtnnttngggggcggcttttttcccggctttccctcggnttnanatnnaanttcgnnttgggcctttnnggtcgttttngnnttgccggncaaaangggtanttcnangtttnaccttaaaangngnggggtaanttnccgggttntnct

SEQ ID NO: 4179 - DNA, 983 bp, Homo sapiens
  misc_feature 1, 2, 6, 8, 10, 21, 32, 64, 261, 328, 358, 392, 406, 411,426, 444, 481, 501, 506, 507, 544, 558, 567, 595, 596, 604,615, 618, 620, 675, 685, 696, 698, 702, 705, 718, 722, 725,733, 754, 759, 768, 772, 782, 794, 797, 805, 812, 813: n = A,T,C or G
  misc_feature 824, 837, 842, 843, 856, 868, 897, 903, 939, 949, 951, 952,970, 977: n = A,T,C or G
nnaacnantnactataaggcnaatcggagctncaccgcggtggcggccgcccgggcaggtactngggttcggggccgaactggaaatgtgcttaagctgaaagttaactttcttcctgagattatcacactatccaaagaagtccggaacctcaaatggcttggtttccgcgtcccactggcgattgtgaacaaagcccatcaagcaaaccagctttacccgttcgccatctcactgatcgagagcgttcgttacctcggngcgctctaggaactagtgggatcccccgggctgcaggaattccgaatatcaagcttatcgataccgncggacctcgaggggggggcccggtacccancttttgttccctttaatgaagggtataatttgcngcgccttgggcggnaaatnaatggtcattagctngttttccctgtgtgaaanttgttatcccgctcacaatttccacacaacattaccngagcccggggagcataaagntggtnnaagccctgggggtggccttaatggagtggagcttaantcaccatttaattngcggtttgngcctcaacttggccccgctttttccaanntccggggnaaacccttgtnccntngcccaagccttggcaattaaaaatggaaattcgggcccaaacagcctccgggggnaaggaagggnccggttattgncngtanttngggggccgcttcntttnccncctttccnttggttcaactggaactccgnttgangccttccgntccngttttccagnatttgccgggcngangccggttnttccaanncttcaaccttnaaaagggcgggtnaaatnnccgggtttaattncaccaagaaatncaagggggaataaacccccagggaaaaanaaaccntgttgaagccaaaaagggccacccaaaaaagggccnctggaacccntnnaaaaagggcccccgtttncttgggngttttt

SEQ ID NO: 4180 - DNA, 970 bp, Homo sapiens
  misc_feature 2, 3, 4, 43, 252, 355, 438, 441, 442, 451, 456, 462, 467,478, 481, 482, 486, 488, 490, 493, 496, 497, 504, 506, 509,513, 514, 516, 518, 520, 523, 529, 531, 536, 539, 541, 546,548, 549, 553, 559, 565, 571, 579, 580, 585, 587, 590: n = A,T,C or G
  misc_feature 591, 601, 602, 603, 610, 615, 616, 617, 622, 623, 625, 627,632, 634, 636, 638, 639, 645, 649, 650, 654, 656, 657, 662,663, 664, 665, 676, 677, 679, 681, 684, 689, 690, 699, 703,705, 707, 708, 715, 716, 719, 721, 722, 727, 730, 732: n = A,T,C or G
  misc_feature 733, 735, 739, 740, 741, 743, 747, 750, 756, 758, 762, 763,764, 770, 771, 772, 789, 792, 799, 803, 809, 813, 814, 815,817, 819, 824, 828, 830, 836, 856, 862, 863, 867, 875, 881,882, 890, 894, 897, 900, 902, 909, 910, 914, 915, 919: n = A,T,C or G
  misc_feature 921, 926, 928, 929, 939, 942, 944, 947, 950, 951, 955, 959,961, 967, 968, 969: n = A,T,C or G
annnactataggcgaattggagctccaccgcggtggcggccgnggtactgccatttctttctttttttaaagaagatatgtttacaaaataggtgaccaactaaggtaggtgtgtgtgaagagaggcagtgagagagaggggatcctgaaattcttttcagtaaaggaaaaagataattttagggatgtttttaaaaatatataacttgatgaattttttatagcatgagtattatttaggtgctgtcctanaccagtgtggccgtataggctatagaagattggtcctgaatgctaacggcagggatgagtgtaaagatcatcaaaacttatttgtgggaaggagagctactgnacaggagcccgtgtattacatgactccagtctgggcttgataggcctgccttaaaagcatagctagagggcaggcaccggctngtnnttgaccctngaatntttttnttttncctctcccttntgnncccntncntgngcnntttttcncnttnttanntntntntgnccttantntaatnccncnatttntnnatantttttnattatnttgttnatcccacnntatcntnctnnttatacatannnttcctcntgggnnncaaanncntncttanantntnngccctntctnngggnanncaaannnntcccttatatnncntnggntaaanntatttcatnacanantnnatattgnnttntnnttccnccngnntntgtnnncncccntcncccccntnaatnnntatccnnntttctttttcttatatntgnttatcanttcnactttntatnnntntnggatncccncnctcccngcctttactttgagcctatngtattnnagtntcttattnatccgnntacttatncgantcnatnanttcattnnaccnnatancnttttncnnacaatttgcnttnanacnttnncatnattntntagctnnnc

SEQ ID NO: 4181 - DNA, 1067 bp, Homo sapiens
  misc_feature 2, 3, 12, 14, 23, 25, 42, 87, 88, 90, 102, 105, 113, 114,175, 176, 247, 283, 294, 296, 310, 351, 374, 387, 389, 404,409, 428, 478, 486, 520, 521, 523, 530, 555, 556, 564, 567,577, 582, 613, 618, 621, 624, 631, 635, 679, 688, 701: n = A,T,C or G
  misc_feature 712, 722, 724, 757, 759, 763, 765, 767, 791, 792, 806, 818,837, 838, 842, 844, 846, 848, 851, 859, 868, 880, 883, 884,894, 895, 909, 914, 920, 922, 923, 934, 938, 945, 947, 949,959, 976, 979, 984, 985, 999, 1015, 1018, 1029, 1062: n = A,T,C or G
tnngttagggcnanttggtgctncnccgtggtggcggccgtncgggcaggtacagggcaacatcatgggaatgtggagcctgggggnncncagagtaaccanagnaacaagannttcaaccaggttcccctccggactgaaggaccctgccttccccaggaccctccggaagcannggacacagcagatccagcccatggaccaaatctgaccaccgcctgttttttgtgtggcctgagagctaaanaacagtttttacatttgtttacagcttgtaaaacanaacataacaanangcaaaaccagagangaatacgcaacaagagaccattatgcgggctgggcaaaagncttaaaaattactattggtgggncccttttacattnanaagtatttttgcaanaattnaaaacccccagtaaggganaaaaacattatgggaaaccaaatattcttttcaatggacccctttgggantttaaagncacaaggggtttttccattgggaatattggaccnncnccaaaanaggccattaaggccaaaaaattgcnnattcaganatnatttacaagnaaaangggaaaaaaaggggaaaaaaaaaaagttacnctttnggnccnggctttnttangaaaccttaaggtgggaattcccccccccgggggcttggcaagngaaaattcngattattcaaggnctttattccgnattacccggngnggaaccctttgaagggggggggggcccccgggnancccnangnctttttggttcccccttttaaggnngaagggggtttaantttgcggccgcnttggggcggttaaattcanngggncntnangcnttgttttncctgggggntgaaaaaattgngtnntcccgctttnnacaaattttccacncctancaattncnnggcccgggggnggcnttaaaantngnaaaagccctnggggggggccctaattnggnggtgnngcttacctccccanttttatttgggggttnggngcttaaattgncccgggtttttccaataccggggaaaaccctgnttccg

SEQ ID NO: 4182 - DNA, 849 bp, Homo sapiens
  misc_feature 8, 13, 297, 406, 487, 536, 548, 583, 619, 633, 639, 672,690, 696, 711, 714, 747, 774, 784, 793, 798, 808, 813, 821,837, 840, 843: n = A,T,C or G
tactactnctatngggcgaattggagctccaccgcggtggcggccgaggtacgcgggggaaaaactgtaaccatgatgaaggcaaaggaaagagcagagagctcggtagacagaggaaggagcctgtcctcagacaggcccaaaagtgagtgtgtgtgggagtttgtgctaatgttcagtaggtggaagctcagggatttccactgtattcttaaggtgaagtcagagatttgagagaggatacccacttgaaccatacagctgccattttgggctgcaacaacgaggccagtgtanaaggagaataaagaaactggtgcatttggagtcagacaaaaagttcattcatggctctttcagtctggaagattctgaaactttggtaacatagtaattcctaaataanaataaaggcaagtggattttaataaagggcaataccagtgatttcaaagaaagagaaatactgcaaggtgcttgcatcatnaaaaagcagtcccatgaaagaaaaagattctgtcagagcattccttatnaaaaaaccagtncgtaaattgcccatttttccttgtaaaaacaaaanggcccctgacttaaaagcccctttaaaaacaggatnggattttcaaccanaagctncgccttaaacctcttccctgtccatgaaagtcnatgggggggggaaagggntaatantttttttttaaaaancantcccttggtttttttttttccttttattatttnattcctcccatttggggaattttttancccccagtcnttttaaacnaaaanctcaaattcnttggngttttggntaccaaaaaaggtttnttnaanattttt

SEQ ID NO: 4183 - DNA, 368 bp, Homo sapiens
  misc_feature 2, 10: n = A,T,C or G
gngctcccgnggtggcggccgcccgggcaggtacgcgggtggcctacatgggggtgcccgctcatctcatcttaagtgagcagtaattattcaacaaactattgttttgcctggtcattttcccttcggttttgtcattacaaaaattcaaacattctaaacagagatgactatacctcaactttgtaacccctctggagttagaatactaactccctttgacaatcagaatgaaactgttctcagaacagaacctactcagaggagttctcagatatgataaacgaagggtggaagaaggtacctcggccgctctagaactagtggatcccccgggctgcaggaattcgatatcaagcttatcgata

SEQ ID NO: 4184 - DNA, 395 bp, Homo sapiens
  misc_feature 89: n = A,T,C or G
gtaacgactcactatagggcgaattggagctccaccgcggtggcggccgcccgggcaggtacttttttttttttttttttttttttttngactaaaaaaagaaagagcttcctcatctagtgggagcatcgctccatcatgctccagatcccgttcctgctcccacacacctagggagttgcacttgttttatgtaagagctgctttctaagcagcctggacgctgaatggctttctcaaaagtgaaaaatgggcactattctgatagtccatctttccatcagttcagctaactttcactgtacctcggccgctctagaactagtggatcccccgggctgcaggaattcgatatcaagcttatcgataccgtcgacctcgagggggggcccgga

SEQ ID NO: 4185 - DNA, 852 bp, Homo sapiens
  misc_feature 527, 533, 578, 583, 605, 606, 617, 619, 624, 627, 632, 638,640, 694, 702, 721, 733, 737, 747, 759, 764, 765, 789, 795,808, 833, 842, 844, 848, 850: n = A,T,C or G
ggagctccaccgcggtggcggccgaggtacacgtcatgaggagaagacatagcagaagctcaggaaaactatgtttgttatgctcccccatcctagttacagcaatacagcaggcacccatgtttcacagggtcacacagggaagcacaaaccttggtcaggaggccgaggggcagaaactcagggatagcctaggccaggccattattggaatttctgcagggaagttaaggcagagcaggggagcagtttaggactggctagtttgcataatttcagtgggctctaagctgaaagaatgatctccagttacctggtacctgcccgggcggccgctctagaactagtggatcccccgggctgcaggaattcgatatcaagcttatcgataccgtccgacctcgagggggggcccggtacccagcttttgttccctttagtgagggttaattgcgcgcttggcgtaatcatggtcatagctgtttcctgtgtgaaattgttatcccgctcacaattccacacaacantacganccgggagcataaagtgtaaagcctggggttgcctaaatgaggttnagctnactcacatttaatttgcgttgnngctcactgccngnttttncantcggnaaaacntngtcgtgccagccttgcatttatgaaatcggcccaacgcccgggggagaaggccngttttgcntatttgggccgctttttcngctttccttggnttanttgactcggntttggctcggtncgttnnggttgcggccgaggcgggtttcanctttanctcaaaaggcggntaataaccgggttttccccaaaaantcaaggggntnaccncngg

SEQ ID NO: 4186 - DNA, 869 bp, Homo sapiens
  misc_feature 548, 580, 641, 646, 678, 683, 688, 695, 698, 705, 707, 721,727, 728, 748, 756, 761, 762, 770, 776, 777, 788, 803, 810,830, 847, 858, 865, 868, 869: n = A,T,C or G
gaattggagctccaccgcggtggcggccgcccgggcaggtacgcggggggccgagtcctaggccaggtctggggtaacctggaacttccacctgggctctgcgctaggtctctgtttcactccctccccgcggggcgcacagctcgcgggtctttggacaccaccggtcctgagtccgcggactgccattttcattaagaactgccacttagaggtacctcggccgctctagaactagtggatcccccgggctgcaggaattcgatatcaagcttatcgataccgtcgacctcgagggggggcccggtacccagcttttgttccctttagtgagggttaattgcgcgcttggcgtaatcatggtcatagctgtttcctgtgtgaaattgttatccgctcacaattccacacaacatacgagccgggagcataaagtgtaaagcctggggtgcctaatgagtgagctaactcacattaattgcgttgcgctcactggcccgttttccagtcgggaaacctgtcgtgccagctgcatttaatgaatcggncaacccccggggagaggcggtttgcgttattngggcgcttttttccgctttcttcgcttcaactgaactcgcttgcgctcgggtccgttcggnttgcnggcgaagccggtattaagcttcacttcaaaangcggnaaatnccggttnttncaccagnanttcaggggggattnaccgcnnggaaaagaaacattgttggngccaaaanggccnngcaaaaangggccnnggaaacccgtnaaaaaagggccgcgnttgcttngcggttttttccaataaggnttccggcccccctgggncgaggcattanaaaaaanttnn

SEQ ID NO: 4187 - DNA, 845 bp, Homo sapiens
  misc_feature 2, 477, 531, 542, 651, 674, 679, 711, 713, 738, 746, 751,760, 763, 770, 772, 777, 791, 801, 802, 820, 829, 833, 836,845: n = A,T,C or G
tngggcgaattggagctccaccgcggtggcggccgcccgggcaggtacgcgggggggtggatatccaaattcagaataatatgtcctatgagaatggcagctgtaatacatatgaattacagctctttgtcattaaaataacctgacagctttctcttacagcatggtaacagcaatacacttaatatgaagtttgaggatttcagggcacctagagttatcaagatcaatgagagaaaaccataaagtaaatgggacttcttgtgtgttttgtaaactggctctgaaggcaacttcaagaaacttgaaaatacagaagcatgaaaatattgttgaagaataatgctgcgcttgtatatccaagaaacttttattttttttttgagaaagactcttgctttttccgcccaggccagagtgcactggggcaatcttggctcactgcaagctccgcctcccgggttcacgccatttctnctgcctcagcctccccagtagctgggaatacaggcgcccgccaccacgcccggntaatttttttngtattttttagtagagaccggggtttcaccatgttagccagggatggtctcggatctcctgatcttgtgatctgcccgcctttgccttccaaaagtgctgggattacanggcatgagcccccgtccccgggncccanggaaacattttttaaaaaaaaggggatttccnangaagaagttttcagcaacaaaaatnccaaggtnccttnggcccgctntanaaactantnggatnccccgggcctgcanggaatttcgnnatcaagcttattcgattnccggtcgancctngangggggggcn

SEQ ID NO: 4188 - DNA, 825 bp, Homo sapiens
  misc_feature 85, 86, 89, 99, 103, 105, 542, 571, 648, 655, 656, 657, 665,675, 678, 686, 688, 692, 693, 699, 707, 708, 709, 712, 716,724, 726, 739, 742, 744, 763, 778, 780, 785, 786, 796, 801,802, 805, 809, 810, 821, 824: n = A,T,C or G
ctatagggcgaattggagctccaccgcggtggcggccgaggtactataagcccaggtgcacgaattcagctttaaacatctattnnagnggtaactgancaancntggtgagctctaaaatactgcaattgcctcaacattacccttttatggacagttccaaattaacttatttttctatgggaataccactttgcttagatatcagaaaaagcttctgattcaacactctaccttctgcatcctgttgaacaccatatacatcagtttgagtattaccgactgctgtaacaaacaagaccctcaatttcagggagtttacaaattagaaattaaatttgcgaaagtaaaatgtggatgttgccggacagctggtagatatgctccacatagtgattcagtggcaatatcaccttccttcttgtagttttgacattgctttgagtctcagaactttctgtgacagtcattattcacccgcgtacctgcccgggcggccgctctagaactagtggatcccccgggctgcaggaattcgatantcaagcttatcgataccgtcgacctcganggggggcccggtacccagcttttggtccctttagtgagggttaattgcgcgcttggcgtaatcatggtcatagctgnttcctgnnnggaaattngttatcccgntcnaaattccnanaaanntccaancccggggnnnctntaanggggaaananccgggggggggcnaangnggggggggcccaaccccantttaattgggggggngnctccnnagggccccgnttttnnaangggnnaaacctgtggnggnc

SEQ ID NO: 4189 - DNA, 851 bp, Homo sapiens
  misc_feature 2, 8, 13, 129, 131, 134, 135, 137, 743, 808, 822, 842: n = A,T,C or G
gnataggngagcncgcgtaatacgactcactatagggcgaattggagctccaccgcggtggcggccgaggtacttctgtcctacagatccagggttttgtcttttctgctctaaaatatttctccgctnanttnnancaattcgttttcttctcataacagtagaccctgtagccctcttattttgatgcaggacattaggacctcttttccataagggaactgattcttcttcagcagttcttagagtcacagacggataactttcttcacaaacaggacttctttgggtgcaatataatgtcgcatcttgccgggcaactgcttgagtgccatttgaatgatttatttttgcgaaagtttggcactctgaagaacaatatgatggcagtgatggtatcacagtgactaggtcagaacaagcatttgagagtggagaactactttcctgattccactgattcaaactgtgttctgttggaaccccgcgtacctcggccgctctagaactagtggatcccccgggctgcaggaattcgatatcaagcttatcgataccgtcgacctcgagggggggcccggtacccagcttttgttccctttagtgagggttaattgccgcgcttggcgtaatcatggtcatagctgtttctgggtgaaattgttatcccgctcacaattccacacaacataccgagccggggagcataaaagtgtaaaagccctggggtgcctaatggagtngagctaacctcacattaaattggcgttgcgctcacttggcccgctttttccaatccgggaaaccntgtcgtgcccagcntgcatttaaatgaaatccgnccaaccccc

SEQ ID NO: 4190 - DNA, 575 bp, Homo sapiens
  misc_feature 2, 3, 4, 5, 6, 7, 9, 12, 13, 14, 17, 18, 20, 21, 22, 26,27, 28, 30, 32, 36, 44, 47, 53, 57, 58, 59, 61, 63, 66,68, 71, 72, 73, 74, 86, 140, 219, 294, 333, 418, 442, 465,467, 480, 558, 560, 570: n = A,T,C or G
tnnnnnntnatnnntcnntnnnttannntnantatngatttttnatnatttantttnnntngnttngntgnnnnatttattattangcgatttggactccaccgcggaggcggccgaggtcataagtggagtgcttggangagagaaagaggagaagagtgaaagcctatttgaggtgcatttttgatctgcttacaactgtgggcagctgtgactcantcccactgatcaaactttgagaattggtgtatagtacctgcccgggcggccgctctagaactagtggatcccccnggctgcaggaattcgatatcaagcttatcgataccgtcnacctcgagggggggcccggtacccagcttttgttccctttagtgagggttaatttgcgcgcttggcgtaatcatggacatagctnttttctgtgtgaaattgttatccnctcacaattccacacaacatacnanccgggagcataangtgtaaaagcctggggtgcctaatgagtgagctaacttcacattaattgcgttgcgctcactgcccgcttttcagtcngnaaacctgtcntgcct

SEQ ID NO: 4191 - DNA, 596 bp, Homo sapiens
  misc_feature 3, 6, 7, 8, 10, 13, 14, 16, 20, 21, 22, 24, 26, 28, 30, 32,33, 45, 46, 48, 51, 54, 55, 57, 58, 59, 61, 65, 66, 67,69, 72, 74, 76, 81, 83, 84, 86, 90, 96, 102, 106, 137, 166,168, 260, 338, 384, 400, 455, 469, 472, 479, 490, 528: n = A,T,C or G
  misc_feature 531, 555, 571, 582, 584, 588, 591, 593: n = A,T,C or G
tcnacnnntnacnnantaannnantnantntnntattcttttttnntnatnatnntnnntngttnnngnttngngngcgcntnncnttcntttctnatatgncganttggagctccaccgcggtggcggccgatgtncaatttatttagagacacttttaactaananaaaataatgagaaagaaaataggctcatacttcttggcatatgtcaaaatttgttttgacattccctgaaatgattgcattcttaaattttncagtaaacaactcagtttttggaacactggtgaagttaaaaaaaaatcccctcttaaaggacttcacaaatttacttnttaaaacatagaaagactttttttttccttttcctcacatctcttnagaatattcctggagngctagagctatagagcacaagatgggccaccagccaggaatccttaccacagctngtgagtgggttcanaanacaccanaagagcttganatgcaaaggaatttaaacagtctatttcttgggtaaanacntgtaaagagctttactctcaacantgagctgatctaaggntaccctgcccngnctgncgntntag

SEQ ID NO: 4192 - DNA, 1066 bp, Homo sapiens
  misc_feature 3, 4, 6, 7, 8, 9, 10, 11, 13, 14, 15, 16, 17, 18, 19, 20,21, 22, 23, 24, 25, 26, 27, 28, 29, 30, 32, 34, 35, 36,37, 38, 39, 40, 41, 43, 44, 45, 46, 47, 48, 50, 51, 52,53, 54, 56, 58, 59, 60, 63, 66, 67, 69, 70, 72, 73, 75,76, 78: n = A,T,C or G
  misc_feature 79, 80, 81, 82, 83, 84, 85, 86, 87, 88, 89, 91, 92, 93, 95,96, 102, 105, 108, 110, 111, 130, 467, 500, 768, 792, 841,845, 882, 890, 900, 908, 909, 923, 925, 926, 929, 943, 950,953, 965, 968, 977, 981, 988, 995, 997, 1000, 1001: n = A,T,C or G
  misc_feature 1002, 1009, 1013, 1021, 1036, 1050, 1055, 1056, 1064, 1065: n = A,T,C or G
ccnncnnnnnntnnnnnnnnnnnnnnnnnnanannnnnnnntnnnnnngnnnnntngnnnttnatnnanntnntnntnnnnnnnnnnnntnnngnngggggnggngangnnctcctattgggcgaattgnagctccaccgcggtggcggccgcccgggcaggtacgcgggaagcgtggtttctgcccgtgaaggcctacagcctcataaggcttccacagttcaaagaagtcccttatgtattgtggattaggagaaatacatacatgacagaaaatgctaactccaataacattttctcattctttcatccaaaaaacaatcctctatgatgttgaaggagttgtaatagaaacaaaagtatatttaagaataactaggaccaattccaggtaatatatgtatctatttcactctgaaagtcacatgactcccgcactcaagtgtgggaccatgcacagtaacttncttttaaaagcttacaggcattatgtttaaagnaaaaaaaaattcttggaccactttgttaaagaaacagggaaagccagactttatattagggacccatttgcagtaagggtataggaaaaccaccagccaaatggggggtttttgcaaatggaagggttggagctcaactcctaattaccaaggaaggaaaaaaaaagtggggggatttatagctaagggatcctatccccttggactccttggaggggtggaggggaaatcagagggatgaggaaatttcttaacaggaaaatattcntaggggtcaagcctggggcaccangtggggctgaatggccctggtaaatcccccaagccacctttcggggaanggcnaaaaaggttgaaattgggctttaactttggggggggncaggggangctttaaagnaaaccagnnccttgggccccaanannggnggaaaaacccctgntcttttnctnaaaaaaaaagcncgngggggttancccncgggggnggggggntnaannncccctgnttanttccccantttacctttgagagngggtgtgggggccnaaaannattttttnng

SEQ ID NO: 4193 - DNA, 848 bp, Homo sapiens
  misc_feature 2, 5, 13, 538, 542, 553, 555, 557, 609, 610, 638, 668, 674,706, 711, 749, 750, 752, 754, 783, 787, 791, 792, 794, 795,798, 816, 818, 821, 823, 832, 840, 847: n = A,T,C or G
anacnctactatngggcgaattggagctccccgcggtggcggccgcccgggcaggtactccatagccatgaagcaaagataaaattcatctatacacagactgaactttgtcttcattaacactctaggctaagggtcatagctaatcagctacaactgtaatgtcctgataattgtgaattaactgcagggcacccagcaaaaggtttagttataatctaatagctgtctgtagagattagcctaataaagggattttttaaaaaagaatctggccgggcatggtggctcaatcctgtaatcccagcactttgggaggccgaggtgggtggatcacctgagatcgggagtccaagaccagcctggccaacatggtgaaaccccatgtctactaaaaatacaaaaattatccaggcgttttggtgagcacccacaatcccagctacttgtgaggctgaggcaggaggatcacttaagcctaagaggcaagaggttgcagtgagccgagatcatgccactgcactccaagcttccgtcntttnaaaaaaaaatntnanaggaaatctatcaatcaaccacttttcatttaagcacctgctatgtgcccanncatgtgcttaggaaagaagataaggggngaaagggggacaccaatttcaaaacagaantttttntttgaggggtaactggctttaccgaaggagcnttttntgcccccttaaaaaaccaaaaaccaaaccaaaaacccnnancnacccaaaaacccaaccaggaaaatgccantttnattnntnnccnttgatgccctgtttgaananccntnggatttgtnccctcggnccgcttnt

SEQ ID NO: 4194 - DNA, 854 bp, Homo sapiens
  misc_feature 3, 5, 16, 48, 53, 59, 61, 68, 83, 206, 242, 269, 276, 288,310, 398, 416, 501, 549, 567, 598, 610, 612, 629, 637, 643,645, 654, 677, 680, 684, 691, 692, 693, 710, 715, 716, 721,741, 750, 752, 770, 783, 786, 793, 795, 799, 805, 807: n = A,T,C or G
  misc_feature 819, 841, 843, 850, 853: n = A,T,C or G
ttncnactcactatanggcgaattggagctccccgcggtggcggccgnccggncaggtncncgggacnaggtcaggaaagatntgaaaatcaaatattttaatgattgctttaaaaacatctcttttatcccacggctacaggactacatagataaaaatcaagacaaaaagtctgattcttcaggttgataaataattacaaagntgaattcacaaccactgcatgtttttttaatgaaantgctagagcattgatccagaaagagtngtatccntagaatgggaanggggacagctaggtgaatccanatgtgattgtatcttgaatccccaaaccaattgagcccttttttatcccagcaggaagcaaactcattttcctttttaataagactgncctctttgcatgcatagnctgtaatgacctcagctgagacagttacattgcaaagggttgctaattttctccatgcccttcatttgccaactctcattgcctntagacctctaattagattcatatcctagcatgttcaatgggggacaancacaaaagccagtgccantattagaaggcttttattactgaaagaattngcataatttttngntggactacattcacaanaaaccttnagggantntggttttgngaaactggatttttgctttttanccngaanaacaaannnaaaaaaacccttttagnattgnngttgnatttcaagggggggttccgntttgccaananattgttgaaatttaaagnggttcaagccttntancaatgantnatcncttaananttccttttgggnccagcttgactcaatttcaatngncagcccncant

SEQ ID NO: 4195 - DNA, 860 bp, Homo sapiens
  misc_feature 538, 585, 615, 651, 677, 714, 733, 734, 759, 770, 789, 824,838, 848, 849, 852, 857, 858, 860: n = A,T,C or G
cctatagggcgaattggagctccccgcggtggcggccgaggtactttaaaattgctgcactgagagtggaagaaagacagaagcaacagggctgtggataggggaaagggaatgtattgggaagagagacgcaccatggagtcacgtccccacaaatacacagcacatttccagaaagaaaggcaggcaggcactggccaaccaaaacgagtttgaggaaaaatctataaaaggttctgtgccacacaggaaagactgcctgacaaattagctaatgaggacaaggcatctgtccttggaggtctcctccagatgcaaattggcccaaatttgaggccaactgacctctatggaaaaagcaaaaccaaagtcagattcctgtcatccggagaacaactgtcaccttgatcacactccaaaatcaagataaaagcttggctttccaagggtcacaatgggcttacaataaatgagcccatgtaggaagaaataaatatgtgaagccctcttccacttgacatttggggcaaaggagacnggtagccactacaggatgtctctcagccccgttaggccagaattctnccggttggcacccgcacagtgtttcaagcntcggaccccttttcgcttggagttggagcccccccnggaggggacaagccatgggaactggngagttcttttcttaaggcttgtggtgaaacctggatnttcaccttcaccagcaagnnaccaaaattttttttaaaaagttcnttttaaaaagnttcccggggtttgatccangtgccaaaaaaaaccttcaggccattgcttcttgngttaagctaaaacntttggaactnnttngggtnnan

SEQ ID NO: 4196 - DNA, 1650 bp, Homo sapiens
  misc_feature 2, 3, 4, 5, 6, 7, 8, 9, 11, 12, 13, 14, 15, 16, 18, 19, 20,21, 24, 25, 26, 27, 28, 29, 30, 31, 32, 33, 36, 38, 39,40, 41, 42, 43, 44, 45, 46, 47, 48, 49, 50, 52, 53, 54,55, 56, 57, 58, 61, 62, 63, 64, 65, 66, 67, 68, 69, 70,71: n = A,T,C or G
  misc_feature 72, 73, 74, 75, 76, 77, 78, 79, 80, 81, 82, 83, 84, 85, 86,87, 88, 89, 90, 91, 92, 93, 94, 95, 96, 97, 98, 99, 100,101, 102, 103, 105, 106, 107, 108, 110, 111, 112, 113, 114,116, 117, 120, 121, 122, 123, 124, 125, 126, 127, 128: n = A,T,C or G
  misc_feature 129, 130, 131, 132, 133, 134, 135, 136, 137, 138, 139, 140,141, 142, 143, 144, 145, 148, 149, 150, 151, 152, 154, 161,165, 172, 173, 205, 210, 246, 402, 474, 506, 584, 586, 652,725, 740, 758, 769, 799, 804, 818, 820, 889, 959, 978: n = A,T,C or G
  misc_feature 1005, 1019, 1022, 1049, 1064, 1093, 1107, 1112, 1146, 1157,1162, 1188, 1191, 1199, 1214, 1239, 1240, 1245, 1257, 1269,1323, 1331, 1337, 1371, 1386, 1387, 1398, 1403, 1406, 1407,1414, 1419, 1423, 1426, 1437, 1444, 1452, 1456, 1471: n = A,T,C or G
  misc_feature 1486, 1488, 1506, 1508, 1510, 1512, 1514, 1515, 1516, 1526,1528, 1531, 1532, 1539, 1544, 1549, 1563, 1568, 1581, 1590,1596, 1600, 1603, 1604, 1609, 1625, 1633, 1634, 1637, 1638,1642, 1649: n = A,T,C or G
tnnnnnnnnannnnnnannnnttnnnnnnnnnnatntnnnnnnnnnnnnntnnnnnnnttnnnnnnnnnnnnnnnnnnnnnnnnnnnnnnnnnnnnnnnnnnnannnntnnnnntnnttnnnnnnnnnnnnnnnnnnnnnnnnnnagnnnnngngaaagcncgcnttatacnnactcactattagggcgaaattgggagctccancccgngggtgggcgggcccgccggggggttggctttccggngctttgcctaatgcggcccgtgggccgtgggcttcacggtgggcccctaagttttccggggttcttcctcaagttcttgggaatggggcaatggtttgggcaagcccaagaaccgaaaaaaaaagcccccgccgttaccttgcccgggggcgggcncggcttcttaagaaaaccttaggtgggggattcccccgggggccttgccaaggggaaatttcggattattcnaaagcctttaatccggattaccccggttccgnaacccttccgaaggggggggggggggcccccggggttaacccccaagccttttttttgggtttcccccttttttaagntnggaaaggggggtttaaaaatttggccggccgccttttgggcccggttaaaattccaattgggggtncaaattaaggcccttgggttttttccccttgggtgggttgggaaaaaaattttgggttttaatttccccggcnttccaaaccaaaaanttttccccaaccaaaccnaaaaccaattnacccggaaaggcccccggggggggaaaggnccaanttaaaaaaaagggntnggttaaaaaaaaaggccccttggggggggggggttgggccccctttaaaaattgggaaggtttgggaanggcccttaaaaaccctttcaaaccaaatttttaaaaatttttgggcccgggttttgggcccgggccttcnaactttggccccccggccntttttttcccaaaagtttccggggggnaaaaaaacccttgnttnccggttggcccccaaggcccttgggcnatttttaaaattggnaaaattccgggggccccaaaaaccggccngcccgggggggggnaaggnaagggcccggggtttttttgggccggttattttnggggggccggnccttnttttcccggcctttttccctttggcntcnaacttggnaactttcggctttgncgggccttcggggttccggttttcnngggcntggccggggccnaaagccggggtnatttcaaagcctttcaaacttcaaaaaaggggccgggttaaaattaacccgggntttaattncccacncaaagaaaattcaaggggggggaaattaaacccncccaagggaaaaaannaaaaaattttnttggngcnnaaaaaanggggncccnctnaaaaaaggggngccccgnggaaaacncttnaaaaaaagggccccnctttttccttcgggngntttttttttcataaaaangntntncnnncccccccccntntgnnggggggnggtcntatanaaaaaaaaattttncgccntctatatattaantaagggggngggggngtanaannccccncccgggggagcttttnaaaaaaannaannaaancccgttnt

SEQ ID NO: 4197 - DNA, 886 bp, Homo sapiens
  misc_feature 64, 437, 519, 532, 578, 609, 632, 640, 655, 659, 670, 672,688, 693, 698, 723, 726, 734, 738, 740, 750, 761, 765, 767,784, 785, 786, 793, 797, 804, 819, 820, 821, 826, 831, 832,838, 840, 843, 854, 855, 857, 858, 862, 874, 875, 879: n = A,T,C or G
  misc_feature 884: n = A,T,C or G
actatagggcgaattggagctccccgcggtggcggccgcccgggcaggtacccattctctcacncccactacccacagaaatccagcctcacttagaatcctggaattacataagtttctggttggaaagggatttacataaatcccatagctcttcccattctgggtctgtgatcttgaatgaagctattaaaaaaaaaaaaaaaagcgggcaggtccaaccaggaggtccaagctcagtcccacccaggcctggtgttccccgcatgcacaattggcttcccaggttctagcagtgctctgcccagcacagcaaatgcacttagggaaggctccaggcagcctttaatctatttcacaattcactttctgtgtaggctgttctggatgggaccaggaaacagccccaagtcaggaataaggacacaacccccctnagatcccgaggggctggcacaactctatggctttatggctttatgtcaatgaaaaatttatttcattagaaaactgtccagntccttcggcccgntctagaactagtggatccccccgggctggcaggaatttcaatttcnaagcttatcgatacccgggcgaaccctcganggggggggccccggtaccccaanctttttgnttcccctttattggngggntttaattgcgncnccttgggcgttaatcntgggngcatnagcctgttttcctggggtgaaaaantgnttttcccncttncnaaatttcccnaccaaacaatnacananccggggagcaattaaannngttaaangccnggggggngccctaatgaagtgnnncttancctcnncatttnanttngggttggcgcnncnnttgnccgtttttcaanncggnaaaanct

SEQ ID NO: 4198 - DNA, 924 bp, Homo sapiens
  misc_feature 1, 8, 108, 427, 659, 671, 679, 700, 720, 728, 742, 754, 769,779, 780, 781, 788, 794, 820, 821, 824, 842, 844, 854, 865,868, 872, 875, 882, 894, 903, 904, 909, 910, 924: n = A,T,C or G
nactatanggcgaattggactccaccgcggtggcggccgcccgggcaggtacgcggggagactttccctgccggcacatggacctggcccaaccctcacagccagtanacgagctggagctctcggtgctcgagcggcagccagaagagaacacgcctctcaatggtgccgacaaggtcttcccttctttggacgaggaggtccccccggccgctctagaactagtggatcccccgggctgcaggaattcgatatcaagcttatcgataccgtcgacctcgagggggggcccggtacccagcttttgttccctttagtgagggttaattgcgccgcttggcgtaatcatggtcatagctgtttcctgtgtgaaattgttattcgctcacaattccacacaacatacgagccgggagcataaagtgtnaagcctggggtgcctaatggagtgagctaactcacattaattgcgttgcgctcactgcccgcttttccaagtcgggaaacctgtcgtgccagctgcattaatgaaatcgggccaaaccgccgccgggggagaaggccggttttgccgttattgggggcgctctttcccgctttcccttcggcttcacttgacttcggcttggcgcctcgggtcccgtttcggcttgcgggcnaagccggttatnaagcttcnacttccaaaaggcgggttaantaccgggttttttccaccanaaattcangggggaattaaacnccagggaaaagnaacaattttgaggcnaaaaaggccnnncaaaaanggccanggaaacccgtaaaaaaaagggccccnnttncttgggcgtttttttcantnagggcttccnccccccctggncanggcnttncaaaaanattcgaaccctnaaagttcannagggnngggggaaaaccccn

SEQ ID NO: 4199 - DNA, 954 bp, Homo sapiens
  misc_feature 2, 13, 316, 457, 536, 551, 571, 611, 630, 649, 650, 652,668, 670, 689, 699, 702, 704, 714, 726, 751, 770, 773, 783,796, 800, 801, 804, 819, 825, 826, 856, 859, 866, 867, 875,880, 882, 883, 886, 887, 903, 905, 918, 921, 934, 944: n = A,T,C or G
  misc_feature 945, 947, 948: n = A,T,C or G
cnactcactatanggcgaattggagctccaccgcggtggcggccgcccgggcaggtacccattctctcacacccactacccacagaaatccagcctcacttaaaatcctggaattacataagtttctggttggaaagggatttacataaatcccatagctcttcccattctgggtctgtgatcttgaatgaagctattaaaaaaaaaaaaaaaagcgggcaggtccaaccaggaggtccaagctcagtcccacccaggcctggtgttccccgcatgcacaattggcttcccaggttctagcaagtgctctgcccancacagcaaatgcacttagggaaggctccaggcagcctttaattctatttcacaattcactttctgtgtaggcctgttctgggatggggaccagggaaacagccccaaggttcagggaaataagggacacaacccccctcanatcccgagggggctggcacaactctatgggcttcatggcttttatgtcaatgaaaaattttatttcataggaaaaactngtccagttaccctcnggccgcttctaagaaactangtgggaatccccccggggcttgcagggaaattttcggatnttcaaagcctttattcggntacccgtcggacccctttnnanggggggggggcccccngnttcccccaagcctttttgnttcccctttnaantngagggggttnaaattggcgccncctttgggcggtaattcaattgggnccataagctttgttttccntgntggtgaaaanttggtttttccgnttannaantttcccaccacaaanattacnnaaccccgggggccttaaaggtggttaaaanccntgggggnnggccttanttggngnnggnnccttacctcacatttnantttggcggttggnggntaacttggcccgngtttttcaanntnngggaat

SEQ ID NO: 4200 - DNA, 876 bp, Homo sapiens
  misc_feature 450, 519, 526, 589, 591, 593, 623, 641, 651, 658, 665, 671,673, 676, 691, 720, 733, 739, 741, 742, 754, 779, 782, 785,786, 789, 800, 801, 805, 813, 827, 828, 836, 838, 839, 840,845, 849, 858, 870, 875: n = A,T,C or G
ggcgaattggagctccccgcggtggcggccgaggtacgcgggtgcattttaagaatacattatccgcaacaggctggttcagttaacattttaaaagtgcaattccaggcttacagaatgttaaagtggatggagtcttatatcagctggtctcatggttttcagattgctcggagactccaaagctgttccaaggaggtgactcaatattaatatttttacatggctgggcatggtggctcacgcctgtaatcccagcactttgggaggccgaggagggtggatcacctgaagtcaggagttcgagactagcctggccaacatggtgaaaccccgtctctcctaaaaatacaaaaattagctgggtatggtggggggccgcctgtaatttcagctacttgggaggctgaggcaggagaatcacttaaacccaggaggaggaggttgcantgagccaagattgcccattgcctccagcctgggcaacaaggagggaaactccgcctaaaaaaaaaaaanaaaaaanaaaggtcctgcccgggcggccgctctaaaaacttagtggatccccccgggctgcagggaattncnanttcaaagcttaatcgataccgcccacctcnaagggggggggccccggnaccccaagcntttttgnttccccntttaantngangggttaaatttgccncccctttggcgtaaaattcattgggccantagccttgttttncctggngnngaaaaattgttnttcccgcttcacaaatttccccaanaanaannccnaaccccggggnnccanaaaagtgnaaaaccctgggggnngcctaatngnnnggacntacnccccatttnaatgccgttggncctcnc

SEQ ID NO: 4201 - DNA, 885 bp, Homo sapiens
  misc_feature 568, 579, 581, 588, 605, 629, 634, 643, 649, 656, 671, 695,697, 698, 702, 717, 720, 728, 739, 741, 749, 757, 760, 763,767, 770, 780, 786, 787, 794, 804, 806, 809, 814, 819, 821,822, 831, 834, 840, 845, 855, 856, 858, 859, 860, 861: n = A,T,C or G
  misc_feature 862, 872, 879, 881, 882, 885: n = A,T,C or G
gaattggagctccaccgcggtggcggccgaggtacgtctgtccattccttccttcagtgttgatgacatgtttgtagctgccaggccctccggtagtcattggaggtaggactgcattctacctgcaaggagtttacagtctggaaaaagcggtaggtaacacaccgtggactcttgactgtgccctcagctcatctaaggctctgcatgttcacagcccctgaccccaccaagggaggagttatcccgcttacagatgaggagattcgggcatggagcgcttaagacacttgcctgaggccacacagctcctaagaggtgggaccacagttcacaaccaaggcaggctgtctccagggcccatggccctttaccttacttaatgttgcttttgtgccggagggatcaggcagagcccagagaggggtgatgtgttgaagtaagcagggtgcaggacagaagaggcggcatttcagtggggtctgcctttgcggttgagcagaggggaccagaatgtaccttgcccgggccggcccgcttctagaactagttggatcccccgggctgncagggaattcngntatcaanccttatcgaataccgtngacctttgaggggggggcccgggncccancttttggtncctttnaagtgangggtttaatttgtgnccctttggccgttaatcattgggncnntaanctgttttcctgtggntgnaaattggntattccgtttncnaattctcnccccaaanaanacnaacnccngggaagcctntaaaanngtaaaanccctgggggngnccnttatngaagngnngcctaactnaanattaantttgncgttggcgcnncnnnnncccccttttnaattcgngnnaan

SEQ ID NO: 4202 - DNA, 798 bp, Homo sapiens
  misc_feature 34, 41, 53, 54, 57, 58, 62, 65, 70, 72, 87, 92, 100, 149,178, 190, 238, 253, 303, 314, 353, 358, 368, 418, 436, 437,473, 481, 489, 514, 551, 599, 610, 614, 617, 622, 632, 635,637, 648, 663, 668, 670, 681, 700, 711, 712, 713, 723: n = A,T,C or G
  misc_feature 747, 748, 750, 751, 755, 756, 760, 761, 766, 771, 791, 796,797: n = A,T,C or G
tccccgcggtggccggccgcccgggcaggtactnttttttntttttttttttnnggnngaanggntttgntnagctttaaattttantgcanggcttcanagctttcacagcccaggtcctttcctatttgttaactgtctggagtggngtctctaacatttttataaactgcagcanggacggaccttntgctgaacctcaacgacttccttaatggcttccatcctcccaccattnccatggaagtcactnttttctacaccaactcatcagctcttccctggaaattctggaacacaaanaaaatagtctntctctggacacctgggtcataatatgaaaaacatggggntggcngccatgttgngccacctggaccaaacaggcaaagactgctggtccatgacagaaaaggantaactcagaaacactgannggagtggattgctgggaaagaggcataataccaaangagagaangaaagagngtcctcctggccccatccatgcaanatcctaacccaatccctggctcctaacctggattccntaaacagccctataatcccttccacgaattcccttttttttggggttnagttgagttangggnctntttcnccagtaaccnaanantccccctggantaattagaggggttnttacngnccctttcccgntttttgtttttgaaagaangccacgattannnaaccctacanggtggggttgactggaacccagcnnanntccnnttanncccanaagangttctccccccccctttggnacccnnt

SEQ ID NO: 4203 - DNA, 821 bp, Homo sapiens
  misc_feature 91, 92, 95, 275, 325, 356, 363, 395, 451, 472, 490, 499,542, 554, 582, 615, 621, 625, 636, 639, 686, 702, 712, 715,723, 727, 730, 740, 761, 777, 781, 787, 804, 807: n = A,T,C or G
tccccgcggtggcggccgaggtacctacctctggggtttgttaaaaaaaatcagaaacttgtaaaactcttagaatagttcctgacacatnntangcactcaataaatgttagatgtttttgttattattattgtgacacaggagggaatgatgaagggagaagggatactcttgagttgaccaaagaatgttactttagggaataagagttacagtttggctttgccatctccacccaattttcaggcagccccagaaatctctttttctccanatgcatcttgtgcatgtctgttttatgtgttctctctgtacctgcccggncggccgctctagaactagtggatcccccggncttgcangaattcgatatcaaagcttatcgataccgtcnacctcgagggggggcccggtacccagcttttgttccctttagtgaggggttaattncgcgcttggcgtaatcatggncatagctgtttcctgtgngaaattggnatccgctcacaattttcacacaacaatactagcccgggaagcnttaaaagtggtnaaagcctgggggtgcctaatgaggtgangctaacttcacattaaattgcagtttgcgcctnaattgnccgntttttcaagtncgngaaaacctgttttgcccagctgcattaatgaaatcggcccaacgccnccgggaataaggacanattttgggtnttngggcgctntttncgnatttccttgntttaacttgaattcgcttgcncctcgggcccttttcngggngggggncgagcggggtataaatnttnattcaaaagggggg

SEQ ID NO: 4204 - DNA, 1029 bp, Homo sapiens
  misc_feature 4, 7, 10, 12, 13, 17, 18, 24, 28, 29, 41, 43, 49, 107, 120,195, 208, 217, 267, 297, 331, 347, 386, 395, 412, 419, 443,448, 452, 457, 488, 503, 542, 557, 562, 566, 567, 572, 576,589, 595, 596, 599, 603, 612, 618, 622, 628, 631, 646: n = A,T,C or G
  misc_feature 648, 650, 658, 661, 667, 688, 693, 704, 722, 723, 727, 730,732, 753, 756, 757, 759, 761, 769, 776, 778, 783, 789, 791,792, 794, 796, 801, 803, 812, 813, 814, 829, 836, 848, 849,851, 852, 867, 870, 871, 872, 883, 890, 892, 900, 901: n = A,T,C or G
  misc_feature 903, 910, 915, 917, 920, 921, 924, 944, 945, 946, 968, 970,982, 999, 1005, 1006, 1012, 1013, 1014, 1017, 1021, 1027,1028: n = A,T,C or G
aagnttnggngnnttgnngctccnccgnngtggcggccggncncagtgnctcatgcctgtaattccaacacttgggaggctgaggcgggtggatcacctgaggtccngagttcgagaccngcctgaccaacatggagaaaccctgttctctactaaaaatacaaaattagctgggcgtggtggtgcacacctgtnatcccagctactngggaggctngaggcatgagaatcgcctgaacccgggagacagaggtttgtggtgagccnagatcgtgccactgcactccagcactccancctgggcaatgacaagcgaaactctgtctcaaanaattatatacatatanattttttttggccaggcagcaagtggctcaccgcctggnaatcccagnacttttggggaggcccnagggcanggcaagattcattggaaggtccangggangatngggangaaccccttccttgggcttaaacaacagggnggaaaaccccccggnttttcttaccttaaaaaaattccaaaaaaaaatttatgnttccaatggcagttntttgngccnngggcngccnttgtttaggttcncccaannttncctnggagggaanggcctngaangcccanggnataaaattgggccgntngnaaccccantgnaagaangggccgggaaccctttgccantttgnaagcctggaantattcgcctcccaacttnntacnttncnaaccctggggggggacctcanatnnangnacttccgnacttaanancccangtaatntnngngnaattngntaaatttannngtttccctttggccnctttctnaaaacctaagtnngnntcccccccgggcttncannnaaattcaaatnttaaaancntttatttnntnccccggnccgancntcnnagnggggggggccccggttcccnnnctttttggtacccttttatatngngggggttaattntgcccccccttggcggnaaatcnnggggtnnntanattntttccnng

SEQ ID NO: 4205 - DNA, 1228 bp, Homo sapiens
  misc_feature 1, 12, 14, 15, 17, 18, 20, 21, 22, 24, 25, 26, 27, 28, 31,34, 37, 38, 39, 40, 41, 43, 44, 45, 46, 51, 53, 56, 66,68, 69, 70, 73, 80, 82, 84, 87, 88, 89, 90, 91, 92, 93,98, 103, 105, 106, 107, 109, 110, 111, 112, 129, 139, 141,149: n = A,T,C or G
  misc_feature 205, 225, 392, 405, 412, 421, 436, 473, 487, 500, 520, 569,571, 574, 576, 594, 601, 625, 627, 640, 648, 654, 660, 668,674, 681, 689, 699, 700, 707, 710, 712, 721, 726, 727, 729,731, 732, 743, 762, 764, 769, 774, 807, 810, 818, 821: n = A,T,C or G
  misc_feature 824, 831, 866, 875, 877, 893, 902, 903, 906, 928, 930, 931,944, 948, 954, 964, 971, 986, 1001, 1005, 1014, 1020, 1022,1027, 1054, 1055, 1057, 1066, 1074, 1075, 1082, 1084, 1102,1110, 1112, 1117, 1129, 1130, 1136, 1137, 1143, 1144: n = A,T,C or G
  misc_feature 1148, 1157, 1160, 1171, 1178, 1182, 1183, 1194, 1195, 1199,1216, 1223, 1224, 1228: n = A,T,C or G
nctactcttatntnntnntnnntnnnnngantgnctnnnnntnnnnatttntntanttttttaagntnnnttnatttatntntntannnnnnnagttnagagngnnngnnnntagagtactaactttanggcgaattgntntctccacncgcggtggcggcccgaggtacctgcttgtcgattctctgtaacagggctgtctgtncagcatggaaattattgatnaaataaaaatggctattaaattgggacgtgatccataatcacaaacaatggtggacattcctctcttagatcctcggccatgcatcaagtcgtttctttttttcccctggccgtaatttatattgcgctgacacttgggctcattaggtttatcctttctgctcaanaggcaccgagcgngtttagngaccagcangggaagttcgggggnagggaaagaagagggaagaagatggatgggccccccnggcccagggggatnctgggcccaagtngtacctcaactgggggcctnaagccatttaaaaccattggtttggccaagttaaaaaaattaccaattntncancnatttaaaccaaaggtttncccccantttttttggttcccaatttttttngnaaagtttttggcnaggttttnctttgnagggtnggggcaanttttgnatgccgncaaaattnccaccaagtnnggtttgntgntnaaaccaagncccanncnannttggttccccnctttttccccaggggaacnanttttntgganttccacccccccaccaaagggggctatccttcnttnttatttgnccnatngaaaaancccgggggttttccccttttcccaattttcccccntttcccccngnccagggcccccttttnaaaataccnnccnaaacccttggcccttttttggntnnttttttaggggantttnggtgtnaattcccctngggaaanattttctcttttatntaaaatggggaaaantccntttcccaanaaattngnggaanccttttttttgtaaccccttgccccanngncgtggcccnttttttannaaactanangggggaatcccccccggnggcttgtnangaaantttcgatttttnnaaaacnntatttnntttncccggtgtnacnttattaaaggnggggggncccnngattccccaanntttnttttttcccttttaatngaggggnntaan

SEQ ID NO: 4206 - DNA, 830 bp, Homo sapiens
  misc_feature 10, 27, 40, 50, 321, 342, 344, 422, 436, 454, 463, 573, 577,612, 659, 660, 663, 666, 682, 714, 741, 755, 764, 801, 806,809, 816, 822, 824: n = A,T,C or G
gcgaattggngctccaccgcggtggcngccgcccgggcangtacacagtnggcgctggggatcagggccagagagtggccacctgttagagctgcatgtgtgtcttgggcctggtcttctttctctgctcactaatgacagctgtcccagcctcttgcaggctctggcccaccaccttgcttgctgtgattttttttttttcctcacacatgataagctgaggcaggagaatccgcttgaacccgggaggcggaggttgcagtgagccaagattacgccactgcattccagcctgggcgacagagcaagactccgtctcanaaaaaaaaaaaaaaaaaaaangngacaagcagagcaagcgcatctaggtgacacccggagatggaatcgggacggcaggatgagcatgggtttgtggcganaaaacccggggcantaatgacatacaatgcanatttgccanagtcagcaaaaagcctatgtggtagaaattgccaaagaacagaaaaagagggaaggggtcagcacctagtgcaggctactctggtactgacaagcagcccgacacataangagngtttcactggaaatgaaaggaaggaggaaccagangggagattctggggagcctttaaatccacactttcccttggaacacnnaantanaattccccacggttcntactttttttttttcaccttcaatgaattaanaggggaagctttttaacactgggcttntttaacctttatgngcctagggntcctgaaaaaccaaaattcttcccgggttcctggggnggganaanccaaaancaaaantnggggga

SEQ ID NO: 4207 - DNA, 785 bp, Homo sapiens
  misc_feature 55, 61, 84, 555, 593, 598, 618, 626, 677, 705, 706, 711,745, 771, 784: n = A,T,C or G
tccccgcggtggcggccgaggtactccagaattctgacttatgatataaaaatgntacttnagtgcttgttgagattgacagtnaattttttaaaggaatctcaatttgtgttttctattgtgtcattttaatattatgtagtcatctaagatatactaaaggtgaccacaattttagaatatgcatagcagagattaatatggagttgattatcaacagaagctaaatgaataaattattgactaatttacactagcctgtccccgaatccattattttggaatcatctgtgatacttatttcttccatgagaagaggaatttagaaactcttattccatttattttgtagtgggtgaaagtaacgcaagcaattttccataagcacaatagcttttcttttagaacaccgtaaatctgaaatacttcctgtctgtcttaacaacattcctgaatgatcatcttaagagctgggtttcccattgtgcttactagtctgtaagcacagcagttgcttcagtatgtattgctactactgcctcgttcctatatggnagaacctcaccaccccaaataagtctgggcaacccttngtaangaaaaaaaaaaataccgttnctataatncttataaaccaaagcactacatgttttcagttcagaacccagatttttctnggaaagaaaaaaaaaaaaggttgcctannaaatnttgggtttccaataagctcccattttcttttatnatggaagaagaaaaattttgaaattntgttcctcaaagng

SEQ ID NO: 4208 - DNA, 789 bp, Homo sapiens
  misc_feature 80, 83, 118, 270, 332, 529, 568, 590, 607, 612, 643, 663,690, 710, 712, 740, 750, 752, 754, 780, 782: n = A,T,C or G
tatagggcgaattggagctccaccgcggtggccggccgcccgggcaggtactttttttttttttttttttttttttgganggntttgttttgctttaaattttaatgcaaggcttcanagctttcacagcccaggtcctttcctatttgttaactgttggagtggtgtctctaacatttttataaactgcagcaaggacggaccttctgctgaacctcaacgacttccttaatggcttccatcctcccaccattaccatggaagtcactnttttctacaccaactcatcagctcttccctggaaattctggaacacaaagaaaatagtctcnctctggacacctgggtcataatatgaaaaacatggggctggcagccatgttgtgccacctggaccaaacagcagagactgctggtccatgacagaaaaggaataactcagaaacactgagggagtggatagctggaaaagaggccgaagacaaaagagagaaagaaagagtgtcctcctggccccatccatgcagcnttctagcccaatccctggctcctaacctggattccgtanacagcctaaaatccttccaacngaattccctttttttgngttanttgagttaggtctttttccccagtaaccaanaatcccctgactaataaaanggttctacagtccttttcccttattgnttttgaaaagaggcaagatntnaaacctacaggtgggtgactgaaccccncagaatcctnananccaaaaaaaaatcatccccccccttngnaccttgc

SEQ ID NO: 4209 - DNA, 844 bp, Homo sapiens
  misc_feature 659, 674, 676, 706, 711, 719, 722, 727, 741, 742, 747, 751,753, 754, 755, 757, 758, 760, 766, 769, 771, 775, 776, 777,779, 781, 786, 791, 795, 796, 805, 809, 813, 814, 817, 819,820, 821, 823, 826, 827, 830, 831: n = A,T,C or G
gcgcgtaatacgactcactatagggcgaattggagctccaccgcggtggcggccgaggtacggtaatacatacaccaagaacagagacaattacaaaaacaagtaagtgttgatataggcggacccacaaacaagaatgtaaacataatcagatagaaattatctgctaaaatacatttgtctatgccaataggcattttacttaacaataggttatcaaagagtcaatctttgagaacatatttcatattttctcttcattatctaagaaatgtgagctattgaaacacaatatatcttaggcaacttttttttttctttccagaaaatctggctctgaactgaatacatgtagtgctttggtttataaagattatagaacgtatttttttttcttacaagggttgcccagacttatttgggatggtgaggttctaccatataggaacgaggcagtagtagcatacatactgaagcaactgctgtgcttacagactagtaagcacaatgggaaacccagctcttaagatgatcattcaggaatgttgttaagacagacaggaagtatttcagatttacggtgttctaaaagaaaagctattgggcttatggaaaattgcttgcgttactttccccactccaaataaatgggataagangttctaaattcctcntntcatggggagaaataagtttcccagatgantcccnaattaatnggntttcngggggcaaggcctnntggtnaaantnnncnnanaatttnttncntttnnncntnttggnggggnaaannaaccccccntatnaaannccngnnngnggnncannttttaaaaaaggg

SEQ ID NO: 4210 - DNA, 857 bp, Homo sapiens
  misc_feature 67, 76, 77, 91, 92, 93, 95, 96, 106, 111, 390, 427, 428,440, 452, 454, 462, 491, 496, 507, 516, 519, 522, 537, 539,544, 546, 558, 559, 561, 572, 576, 579, 581, 584, 585, 586,587, 589, 590, 593, 600, 605, 606, 611, 619, 620, 622: n = A,T,C or G
  misc_feature 625, 628, 629, 636, 640, 641, 642, 645, 647, 649, 654, 659,663, 667, 672, 675, 676, 677, 680, 683, 686, 689, 692, 694,696, 702, 704, 712, 715, 721, 724, 728, 729, 731, 734, 737,738, 739, 743, 746, 748, 753, 762, 765, 766, 772, 775: n = A,T,C or G
  misc_feature 780, 784, 787, 791, 792, 795, 796, 804, 805, 808, 810, 814,818, 821, 823, 824, 825, 832, 836, 839, 840, 841, 843, 848,849, 855: n = A,T,C or G
ggagctccaccgcggtggcggccgcccgggcaggtacttcaaagcccacttctttcccttaaaccancactgatgnncaaatgacaaactnnntnntttacccgtnacatnaatgtttatactcggcatttgtaatacaataaaacataaaatgtttatactcggcatttgtagtacaatttatattttaaagttttctgatatttgatgtatcagatgttggtgcttatcagataaggaaacaagggtccgaaaggtttcttaacttccaagagctgagcaggctgctaacctggtctgctcatctcctagtgggattttttttttttctcttacatggcatacttctctgccatcatttttaaaactctgagggggaaaaggaagctnaatgttaacatgctgtgaccagtaaaccaaagatgcnntgattgctagtnaggctccatcgncngccccttncaggtggtggggacatattcaggggtggnggatntcaatgagcanagcccctgnctnggnggctgcccatgcaanantgagngnggttgggggagnntntgggggggccncttnccntntannnnannttncaacctnacatnnaaatngggggatnntntcnggnnattccancacnnnatnancnggggnattancgcnttgnaaaanaannnttnttnaancanatngngncctgtntntagggccntgnaaaccncgntaannanggnccnnnttgnttngncgttntttttacanaannttttcntcnccccncgangangccnntannaaaaaatnnatncnctcnttanatngnnnggggggnatanacnnncntgganntatttntt

SEQ ID NO: 4211 - DNA, 879 bp, Homo sapiens
  misc_feature 671, 683, 709, 748, 753, 755, 762, 786, 791, 798, 801, 805,806, 811, 815, 817, 818, 822, 828, 835, 843, 846, 851, 858,863, 871, 874, 877: n = A,T,C or G
gcgcgtaatacgactcactatagggcgaattggagctccaccgcggtggcggccgcccgggcaggtaccaataagatagttgtttaagactatagctctctaaagagtagtcttttaaatttagagaatttctttatctcataagtgactcaagccaaaaaggcttttttcatggaaagtccctgaggtaactttccgggtttagaatacgacaggcaaaattggcatctttttttaaatgggtgcgaaagatgcagccttcatgatcctccccaaaatttactcccagaaataagctaagatagcagatctctgttaccacaggcggttaaggatggtgtagctggtctccctatgagcacatggacacgtggccacatgggggtgcctctagtcacagacctgccaacctgtgacgcctgtgacacagggcaggcacttcagggattagactttcccagcactaaccaggcaacaaagatggaaagcaaccagaagcccttcatggatagaactccttttaggacagactccactgacagcttggcacatttggggagaaaaaagaaagtgctgcttaaaaatttgacatggcttcaggatttcccagtgctttttagactagctactggaccgtgacctgaaaattcaacaccccccagaggccaganacccaaagggangaaatgctcccttttggggtaccaantcaaactcttgaaaggggctttaaagccaggaccgaaanggggnancccttcnttccggtttttatttttaaggggnccccncaagcanaantttnnttttnaaanannattncgggtntttgttngaaaaccnttnaaaantcccccntttgngggggggngangcnct

SEQ ID NO: 4212 - DNA, 886 bp, Homo sapiens
  misc_feature 67, 73, 74, 75, 87, 94, 98, 102, 221, 223, 312, 351, 362,395, 405, 419, 444, 489, 498, 505, 509, 522, 531, 537, 538,539, 541, 545, 547, 554, 571, 573, 575, 596, 599, 606, 612,616, 649, 663, 668, 675, 680, 681, 682, 685, 688, 692: n = A,T,C or G
  misc_feature 699, 711, 712, 714, 729, 734, 742, 751, 769, 772, 773, 775,793, 799, 800, 801, 802, 804, 807, 812, 814, 816, 838, 843,847, 853, 865, 876: n = A,T,C or G
ggcgaattggagctccaccgcggtggcggccgaggtacttttttttttttttttttttttttggggncggaannncatccaggctgnaatgcantggntcanttttggctcactgcaacgtccgcctcccatgttcaagcgattctcctgcctcagcctctcgggtagctgggattacaggcatgagccaccatgcccggctaaccttgtattttcagtananatggggtttctccatgttaagaattgagagagccactgaaaggtgagtcaggaagcatcatgatcacagccgtgccttaaaaagccttntccagcagcagtatgggagatggactgaaagaaagagtngcaggaccaanaaagtgagtcagtggtgcaaaagcaagggaatntgcagcaganacaaccaggacctntgccatgccagaaggaatggggatnagaggggaggtctgggatttcaaaaaagcaagttcattagatganctttgatangttaacngggnttaaatttttggnggagggganaaaggnnngnaatncnattgggntaaccttaaaagctttntngntttttaggggcctaagggggnagnggtttgntggtcncccnagacccggaaaaaagaaaaaaggggattttggnctttggttggcaanaaaanataaaantggannntgntgncaantttttanaagttccccccnntncctttccccggggcnggccnctttttanaaactaagngggattccccccggcctngcnngnaatttcgattttaaaggnttatannnntnccnggggnancntttagggggggggccccgggtnccccnaccntttttnttcccttttaanggagggttaantatgcccccg

SEQ ID NO: 4213 - DNA, 853 bp, Homo sapiens
  misc_feature 2, 3, 4, 5, 6, 7, 8, 9, 786, 789, 824, 830, 840, 850, 852: n = A,T,C or G
gnnnnnnnngagcgcgcgtaatacgactcctatagggcgaattggagctccaccgcggtggcggccgcccgggcaggtacagatttctttcatgttaacatcttatgtatccacaatatatttaccaaaactaagaaattaacattgatataacattactaactgaactgaagtctttatttggatttctccagttttttcacgaatgcccaattctgttccaggaccccagccaggatactgtgatgttctcagtcaccatgactcctaagagccttctcttcagtggtgcatttcacagggttctaaaacacactttcaaaccagcagaaggaaagggaaaaaagttaacaaaacatatggtaaataggatatataaaataagatacaaataagtcctaaagtaacagtatgaataataactataaataaaatgtcagtagctaaataaaaaggcagaaaatatctaggcagaaactcttagtcttgatactgagaactgtgaggaatatacttaaaaggatagagaaagactgaaaagaaacagacagataaatgatatagcaggtaaatatgaaccaagaaagagtagtgatattaacagctaaaaaatataattgaaggtaaaaccatcattatttatcaaagagagatatagccatatgataaaatgcacaaacaccacacacacgcacacacatgcaaaacaattagtcttggaaaaaactctgaagcaacaactggcagaactgtaggaagaaacagcccaacaattgtagtttgganggnttggaagcccccttcttcaggaagaggataggttnaaatanaaaaagccanccgaagggcntna

SEQ ID NO: 4214 - DNA, 793 bp, Homo sapiens
  misc_feature 480, 612, 663, 686, 705, 751, 759, 768, 780, 784, 787, 791,793: n = A,T,C or G
ggagctccaccgcggtggcggccgcccgggcaggtactcatcattaagaaattaaagataatccgtaaataaaacaatgacaatataatagtttagagagttaagatttaggaagtagtagataaaataattatctgtgttatgcaaatataatccttagaatgcaatatttgattaataggagttgtcctatatgtcattcataaacttgtagcagagagaaacctctgcataagctcaggtgttcaagtatgcaagaaacacagttttctgtattttgctcttgctaaacttaatttgtattctgggccctggtttcatcaagtggcagaaactcaatctcagtcagccctaactgactatcctccaggactctgtctacaaaatgccaggtggggggccatctggccctcagtgccatcagccacccctgctggcacccactgagacttcctgctctgtggtcactggtccttgtangttgccactgcagcctccttgtcctcattccaaggacacattaggccttctggctctatgaagtatttttcactggagaaaattttgcttctgctgtacctcggcccgctctagaactagtgggatcccccngggctgcaggaaattcgatatcaaagcttatcgatacccgtcgacctcgangggggggccccggtcccccagcntttggttccttttagtgangggttaaattgcgcgcttgggcgtaatcatgggcatagctggtttncctgtgtngaaaattgntatcccgctcancaanttncccncn

SEQ ID NO: 4215 - DNA, 803 bp, Homo sapiens
  misc_feature 565, 623, 731, 734, 760, 763, 769, 780, 781, 798, 802: n = A,T,C or G
ggagctccaccgcggtggcggccgaggtactatcctagacaagctctgggagtgttacataacgtatggtaagtgtgctacatggcctttctgaagcccaaaccattttgcattatgaaaatacctggccccaggaatttcagataagggattgtggacttatattttaaatctgtaactcctatagacagtaatttcatagagccagcttcatggagttgtaaatattactgggctagggtcagtttcctcattttaggcttcctttaatccagtccagacaccaaattaaatgtctttgtgtagtccccttcaaagcctcttgcaatcccagtcatgcttcagggtagggatgatcccattaatccaaggacctgtccctagtgatagaaggaaatgggtgggagccgctctagaactagtggatcccccgggctgcaggaattcgatatcaagcttatcgataccgtcgacctcgagggggggcccggtcccagcttttgttccctttagtgaggggttaattgcgcgcttggcgtaatcatgggtcatagctgtttcctgnggtgaaaattgttatcccgctcacaattcccacacaacattacgaagccggggagcanaaaagtggtaaaagcctgggggtgccctaaatgaggtggagctaacctcacatttaattggcgttgccgctcaactggcccgctttttccagtccggggaaaacctgntgntgcccagcttgcatttaatgaaatcnggnccaacncccccggggannagggcggttttggcgtntttng

SEQ ID NO: 4216 - DNA, 1059 bp, Homo sapiens
  misc_feature 3, 4, 5, 6, 8, 9, 11, 13, 14, 17, 19, 20, 21, 23, 25, 26,27, 28, 29, 30, 32, 33, 34, 35, 37, 38, 40, 41, 42, 45,46, 48, 49, 50, 52, 58, 60, 63, 67, 68, 69, 70, 71, 73,76, 77, 79, 80, 81, 84, 85, 86, 92, 96, 98, 100, 101, 106,112: n = A,T,C or G
  misc_feature 115, 124, 745, 818, 829, 846, 883, 890, 893, 895, 898, 909,943, 946, 968, 978, 986, 1001, 1018, 1022: n = A,T,C or G
ccnnnntnntnanntcntnnntntnnnnnntnnnntnncnnnttnntnnnantttttncntanttcnnnnntnctnnannnttnnntatagntagncngnntcttngctccngtnccatcatanagggcgaattggagctccaccgcggtggcggccgcccgggcaggtactttaggagacccaggcgggcagattgcctgaggtcaggagtttgagaccagcctggctaacatggtgaaaccctgtctctactaaaaatacaaaaattagccgggcatggtggctcacgcctgtagtcccaactgcttgggaggttgaggcaagagaatcgcttgaacccaggaggtggaggttgcagtgagccgagatcgcgccactgcactccagcatgggcgacaggagcaaggactccatctcaaaataaagaaagaaaaggaaaacaaagaaaaggaaaaagcttatattggaaccttctctaaaaaaaggaaaaaaaaggaaagcctggatgccacaccaaaattcttaaattttggcaaggtccgatcaaatttaaagggatattttattttggcatcaccaaaataatttctttacttccccccaaaaaattcaataaaaaaaggtttcaaattagccaactttttcctaaattgtgttttaaaaatggtaatcaccaaaattaccaccgttgttcccccaactttctttttccaagtttattaaatttcttattgtgtaaaagtngaagggttttaccctgaaggtggaggccaattaagaagaagtttgaagccttcaagacccttgcccttggganaaagagccgtngtttccttttctttaanaggttcttggagggaaattggggttggggggggccancaaaaanttncntcntccaaattccntttttttccttttttccccctcattcccttgganccntctttaatttttccttggggcnccaaacctgncttttctnggttaaaactttttnggttcaaccttgggttncctncgggcccgctttttaaaaccttagtggggatcccccc

SEQ ID NO: 4217 - DNA, 1078 bp, Homo sapiens
  misc_feature 2, 4, 5, 6, 17, 21, 22, 26, 27, 28, 33, 34, 35, 37, 39, 43,50, 52, 57, 58, 60, 61, 67, 69, 71, 72, 73, 78, 79, 81,82, 84, 86, 87, 88, 90, 91, 96, 97, 99, 100, 109, 116, 462,478, 504, 552, 558, 568, 653, 659, 690, 704, 738, 742: n = A,T,C or G
  misc_feature 786, 813, 833, 847, 862, 888, 889, 908, 911, 913, 914, 922,929, 935, 938, 947, 1001, 1006, 1009, 1025, 1027, 1032,1034, 1036, 1038, 1042, 1059, 1062, 1067: n = A,T,C or G
cncnnntttttattttntatnntatnnnatttnnntntnatanttaatantnattanntnngttatntntnnnttttnngnnangnnntnntaatnntnntattacttngggcganttggagctccaccgcggtggcggccgcccgggcaggtacttttttttttttttttttttttaaagacagagtcttgctctgtcacccaggctggagtgcagtggcacgatctcggctcactgcaagctctgcctcccgggttcacgccattctcctgcctcagcctcccgagtagctgggactacaggtgcccgccaccatgcccggctgatttctttttgtatttttagtagagacggagtttcacccgtgttagccaggatggtctcgatctcctggacctcgttgatctgcccgccttgggccctccaaagtgctggggattaacagggtgttgaagcttacncgcgcccggcctattntcctttgtaccttcggcgcgctctanaaactaagtggggatcccccggggcctgcaagggaattccgatatcanagcttntcgataccgntcgaaccttcgagggggggggcccggttaccccagctttttggtccctttagtggaggggtttaattgccgcgctttgggcggtnaaatcnttgggtcaataggcttgttttccctgttgtngaaaaatttggttnttcccggcttcaaaaaattttcccacaaccaacnattnccgaagcccgggggaagccattaaaaggtggttaaaaagccctngggggggtgcccctaaattggaaggtngaagccttaaacttcaccantttaaattttggcngtttgggcggccttnaacttgggccccgccttttttccaannttccggggaaaaaaccctnttngnnggccccgnccttgcnattttnaantggaaattncgggcccaaaccccccccccgggggaaaaaaggcccggtttttgcccttatttnggggncgncttttttccgcctttncnttcgntntnancttnaactttcgctgtgggcntcnggttncttttcggggg

SEQ ID NO: 4218 - DNA, 1067 bp, Homo sapiens
  misc_feature 2, 4, 6, 7, 8, 10, 13, 16, 17, 20, 21, 22, 24, 25, 27, 28,29, 30, 33, 35, 39, 44, 46, 51, 52, 57, 58, 62, 63, 67,68, 69, 70, 72, 73, 77, 79, 86, 87, 89, 94, 95, 100, 111,115, 120, 125, 128, 131, 172, 377, 515, 547, 637, 652, 689: n = A,T,C or G
  misc_feature 706, 742, 775, 816, 876, 879, 881, 892, 897, 920, 926, 935,946, 947, 952, 963, 967, 975, 978, 992, 994, 1006, 1008,1029, 1051, 1054, 1060: n = A,T,C or G
cntncnnngntgngtnntannntnntnnnnttntngtanttgtntntcttnntttannaagnnactnnnngnntcantntattccnntnctagnnaggtntgttttattcnaatnatacntactntanggngaattggagctccaccgcggtggcggccgcccgggcaggtnccttctgttttacagaaagcctttgggaacttgagtcaaagcattactacttgggattttatctaaggaaggtaaatgaagatttgaggggagacagttagttcaatatgaaagaggaattggcttaaaacacaattttactatggaaaatttcagacataaacaagagtagagaaacagtatagtgaatccccttctacacatntcccagctttcacagttaccaactcatgaccaatcttattttctcttccctagcaatgctggtccaccttctccctcagattattttgaaagcaaatctcaggaggttgtattaatttcatggtttcaaatattctgngtatattctctaataggattttttaaaaaagnaaaaacctaacctcagtggcatttttttacaccttaaaaaatatgttaaccaatttccttagttatccttaaaaaaaccttagaccagtngttccaaaattttcncctggatccgactccatggaatttttttttttcggtnttggtttggtttcaaanttaaggaatcccaaaattaaagggtcccaaaaaagncccggggccatggggtggccttcacaacccctngttaatccttcaaggtgggtttcttgggggaaagcctgaanggccaggggaagggattttgccttttggagccccccaagccaagtttcttggacccaagnccntnggggccaaatngttanccgaagaatttagcccagggccntggatngggccattnttacccctggnngggtnccccagcttancttnaagggaangcntggaagccagggangnattcaccctggnanccccaaaaaaattttgaaaanggcttggcaaggggaagcctanttnaatccncacccat

SEQ ID NO: 4219 - DNA, 1113 bp, Homo sapiens
  misc_feature 3, 9, 10, 11, 12, 13, 15, 16, 21, 26, 27, 31, 32, 33, 34,35, 36, 41, 45, 56, 57, 63, 65, 67, 75, 79, 85, 86, 89,93, 94, 97, 104, 111, 113, 125, 173, 174, 215, 341, 362,451, 475, 485, 498, 513, 520, 573, 665, 683, 684, 705, 740: n = A,T,C or G
  misc_feature 751, 760, 790, 839, 840, 844, 865, 871, 902, 916, 922, 923,931, 939, 946, 949, 952, 962, 968, 974, 979, 980, 981, 990,1008, 1018, 1023, 1029, 1037, 1038, 1047, 1064, 1068, 1074,1080, 1090, 1093, 1095, 1102, 1104, 1106, 1112, 1113: n = A,T,C or G
cancttttnnnnntnntattnatatnntttnnnnnntaatnttcnatattttatannttttgnangnttttatgnaatnttattnnttntagnnagngagtttnttgtttngnttaaatatactntctataaggcgaattggagctccaccgcggtggcggccgaggtacttnnttctttttttttttttttttttttgagacagagtctccctntgtcagccaggctggagtgcaatggcacgatctcggctcactgcaacctccgcctcaacctcctgagtagctgggattataggcgtgtgccaccacacgtggctgatttttgtatttttagtaganacgggagtttcaccaccgttngacaggctggtctcgaactcctgacctcaggtaatccgcctgcctcggtcctccccaagtgctggggattgcaaggccgtgaagccctntgcgccccggcattgaaagccatntttaaagaanagttttccattgntttaaaggttttcanaagtttngttgaaaatttccataacattctcctttcttggggctttttaaattttgggcnctgtaatttctttccttttatgccaaaactgggcagaaaatttttttcattattcctggtattattcaagtccaagtggcccattttttaanccttgttgccccttgggnngccggggtccatttatttggnaccctggcccccggggccggggcccgcttcttaanaaaactaaggntggggaatncccccccgggggcctggcaagggaaatttncgaattattcaaaagcctttatttcggattaccccggtccggaaccctnngaanggggggggggcccccgggtanccccancctttttttggttcccctttttaagtgggangggggttaaatttngcgccnnccttgggnggtaaaantccattnggngcnattaagcctngttttnccttgngggtnnnaaaatttgntttattcccgcttccccnaattttcccncaacnaaaaantaccgaanncccggggangccataaaaagtgttanaaancccctngggggnggcccttaanttnangggaagncntnaacctnn

SEQ ID NO: 4220 - DNA, 772 bp, Homo sapiens
  misc_feature 585, 613, 658, 688, 694, 699, 710, 755, 764, 767: n = A,T,C or G
ggagctccaccgcggtggcggccgcccgggcaggtaccccaggtgggggaatgaagacaagaagaaggcagatttcggcatggggtcctgggagagccaccgcctcccaggaatgacacacactgagcgggcttagaggagggaggactcagaaaccaaagcagttggccaggcgcagtgactcacatctgtaatcccatcaccttgggattacaggcatgagccactgcatccagatcaaagttgggttttgaaatataggcatcagttctcttttttaacaactaaatggacatctaagatattccctgacaccctcattcatacaaatctgctcttaccttgctcctgcttctgcatagctagtagtctggaatgcatgacaactctactgcccctgcctctatccaggcagagacaaagataacctgcccaggaacaaatcttagccccaggctgataaagaatagctctacctaagtatgcacctgttggaaaagttggcagggaggggatgattaaatgggagaatatgagaaagtgcttcagaaacaaagctgtccaagggcaaagcagtcttcttgntcgatctctcttccttgacgctgctccncaccttgtccaacctcgtaggcattttctatctcccattggcaanggagacaaacagttggctcaaattacctgncaatgnttgtngataatgaganaatgatcctttaccaattaccaccaaaagaaccaccaggccctgnttttttttnggnttttt

SEQ ID NO: 4221 - DNA, 850 bp, Homo sapiens
  misc_feature 260, 360, 368, 428, 501, 544, 547, 580, 599, 606, 611, 620,634, 637, 638, 649, 653, 658, 661, 662, 666, 669, 683, 688,689, 693, 695, 696, 698, 699, 703, 718, 719, 725, 727, 736,743, 746, 751, 753, 755, 760, 786, 807, 816, 817, 819: n = A,T,C or G
  misc_feature 821, 827, 830, 837, 849: n = A,T,C or G
ggcgaattggagctccaccgcggtggcggccgcccgggcaggtactttttttttttttttttttttttttttttgagtagagacggggtttttccacattggtcaggctggtctcgaactcccgacctcaggtgatcttcccgcctcagcctcccaaagtgctgggattacaggcgtgagccactgctcccggccactgctaaccttaatacaatgcaatatgtgctatgatcattgacaaataaatggttaagtgaacncggaggatggagaaatcatttcaatgaaagggggagatctgtaaggttttacagaggaagcagaatttaagctgggccttgcaaagcaaagatgggactntaggcatntggacagaggtaacggtgagagcaaatgcctatgtgctttcaagtatggtcagggcacanaattcaggacccatggacaggggcacaggatgcccaaggaaaagaaaacacagtgagaccagaagctggaaanaaactcaaagtggaaagccctggatgccaacctttcatcctgnggnctctgggaaatctttaaaagtttttgggcaatnggagactccaaatgagctnttgcctnggggnggtttattngggccctttttccnccnntttttttactngggnataanaannccgnttntaccttggggcccnttttnnaaantnngnnggancccccccgggccttnngggaantncaaatttanccttttntgntcccncncncctcngggggggggggccccggccccccccntttttttttcctttttttggngggggtaanntngncccctnggngggaaanaaataggggaana

SEQ ID NO: 4222 - DNA, 826 bp, Homo sapiens
  misc_feature 674, 683, 704, 716, 717, 735, 739, 742, 744, 765, 766, 795,807, 808, 820, 822, 823, 826: n = A,T,C or G
ggagctccaccgcggtggcggccgaggtacgcggggagctcattccactgaaggtgattgtgacagatgagtttcaataaataagccccttcacatgacatacatgtgaaaaataacttttggtttataataaaatgcttgttttacacattcttatcctatttggttataatataaattcttaaatgtaacaattatacttccagaatgtgttatttgaattacttggttattttatctttttttatgagaatttgttcccttctcattttctaaccacatttaaattgatactgtttgagtataaacttagtatttcccttcatgctataaataagttactatctttttttttttaacttttccatttgttctttttgttgtagacagggtcttgctctgtcattcaggctggagtgcagtggtgcaatcacagctcactgccgactccacttcctaggctccagccgatcctcccttacttcctgagtagctgggaccatatgtgtgcaccaccacgcctggctgatttttggattttttgtaggcatggggtttcaccatatggcccaggctgggcttgaactcttgagctcaagcaacccacctacttttagcctccccaaagtgctgggattaccgggtgtgagccactggcgccccggccgctctanaaactaatngggatccccccggggctgcanggaatttccgannttcaagccttatcggatncccntcnanctccaagggggggggcccggnncccaactttttggttcccctttaaggggngggggtaaattnngccccctttggngnnaan

SEQ ID NO: 4223 - DNA, 1007 bp, Homo sapiens
  misc_feature 6, 8, 9, 10, 12, 14, 16, 18, 20, 22, 25, 26, 31, 34, 37,38, 39, 41, 42, 47, 48, 49, 50, 53, 54, 56, 59, 61, 62,64, 68, 69, 70, 71, 73, 74, 75, 76, 77, 78, 79, 80, 89,90, 93, 98, 100, 180, 182, 187, 188, 189, 395, 452, 484,521: n = A,T,C or G
  misc_feature 562, 740, 748, 762, 782, 787, 796, 846, 860, 861, 875, 915,931, 937, 938, 940, 953, 966, 967, 973, 988, 991, 993, 996,997, 1000, 1002: n = A,T,C or G
cccgcntnnntntntntntntntanntcccnttnacnnntnnctcgnnnnttnnanatntnntnttcnnnntnnnnnnnnagaagggtnnggngggtntncgctcactatagggcgaattggagctccaccgcggtggcggccgaggtactttttgatcaacaccttccctttctccatncncattnnnccccagcctctgacacattttcactcatattaggtgacatttaaattatagaaactaatggttttagtatacaacaagcaaataaacatcattaacgttaaatacatttattagaaagtttgactaattagggatagaaataaatgggcagcatttttggccagaaaacaaaagataatgattattttcaattaccagacccaagngatttgaaatggaaaggtttaggcctaaaatacgttattgaatttatgacagccagnaaattcaggatcatatttttctgatcattgtnaagtaatataaattattgacctaatatgtaacccaancaaataatattctagctaccattcaaattttattaaaggtntttaaaaaattaacttcctgggttaaatgggaagattccaaactgaggattgcatttaatgggattgagggggaaatgttaatgaggaaggtatattgatgaaaagcccaaaaccttaaattcaaaataagtaattttgcccaatattaagttaccttctattaggaaaaaaccagtngaaagttnttatcactttcacnaaattttggtgcaccaatgntaagnatggagttnttcttaattattttaaaaaaaaatttaccccacttaccaaatttttttgnttacccttcattanntattattttggganggaagagcctggtccttttttaaaatggaagggtaaactnagggattttttggttntggaannanggctggtccatcntgccaaccagaannatattntttttaaggttttgnctncntgnnggnancctgc

SEQ ID NO: 4224 - DNA, 1134 bp, Homo sapiens
  misc_feature 2, 4, 7, 9, 10, 11, 14, 15, 16, 17, 18, 19, 21, 22, 23, 24,26, 27, 28, 30, 32, 33, 35, 36, 37, 39, 40, 41, 43, 44,45, 46, 51, 53, 54, 59, 60, 63, 66, 68, 72, 73, 75, 76,77, 79, 80, 81, 82, 83, 84, 88, 96, 98, 100, 101, 386, 538: n = A,T,C or G
  misc_feature 581, 648, 668, 774, 796, 814, 816, 864, 877, 881, 895, 904,927, 936, 948, 978, 986, 989, 995, 996, 1008, 1018, 1028,1032, 1033, 1034, 1054, 1055, 1057, 1067, 1072, 1074, 1076,1080, 1081, 1102, 1103, 1128: n = A,T,C or G
cncnctnannnatnnnnnnannnntnnnantnncnnnannntnnnnaagtntnngtttnntantantntttnntnnntnnnnnnaganggggggtnananngatcactatagggcgaattggagctccaccgcggtggcggccgcccgggcaggtactaaagaatgtgcatttatttgtggggaggagaggaggtctaaatagacaataaacatataaatattaatattgtgaaagtggtatgaagaaaaataaagcatgataaggagagagaggtgttccctggctctccagagggctgaggtggaagaaaaggactcctgttttaggtaagatatcagagaagacctctctgattgactgaaatgtatgcaaaggcctgcatgnaagccaggggaccatgccgtgctgacatctggggggaggattatcctcaccagaagggggaaaaagggaaagtgccaaaatgcccgttgaggttggggagggacccatgttttggttatgtttcaggggagggaacaggggaggccagttgngggcctgggaggcaaggttttcaagcccatggggaaggcccanaaggattgaggatcaaaaggagaatagtgggggaggatcaccggtaagagaattttatggggcccanttggtgagggattggtggcnaagcatttgaagaagactggtttgaatgcctttaaaaaccaaaccagcccatttttaattttaaaatatcttccatggaatttttgtgggtccaagggaaatggtngggaccaaggaagccttcaaancttgggggaagaatttgngntccccacttcccattggttaaggcaatccaagaaaagaaccaggggtncttcttttgggtnggantattttcaagcttnggaagaaantaaagttttaaattattgcccangaggtttcnaaggaattgggntttttccacttccccaatttggaacacccnttttggcnaangggatnngggcttgggaanggggctttgnggcttccaancccnnnaatcaattttaaaactgggnngnggcccttggnattantncnactnntcccaccccaatggggggggnncttttaaaaaatttggccctcaaantttaag

SEQ ID NO: 4225 - DNA, 858 bp, Homo sapiens
  misc_feature 527, 638, 658, 661, 667, 677, 693, 710, 716, 720, 722, 735,756, 758, 769, 795, 805, 820, 822, 825, 829, 838, 840, 847,851, 853: n = A,T,C or G
ggcgaattggagctccccgcggtggcggccgggtgtggtggcttatggagtccctaacgtttgcacaaaatggttgctacattccacactcccatgtgccctgagcaacctccagggaaacttcagataccgtggggcttggcctgccagctgagctgacccagcgaccctttctatcacagctttgatcttcactgggttgggagcctgtctgaatctaaacatctgcctctctactgcccaccccttcggcatttcctagctctccctgaagggtgcaaacatgcatgcagttactcaaacaagaatatttatccttaactccctgtccctcacaatttcttttaaaacaatccactattgtctacccccgcccccgcatcaccccttcatccaggtgcccattcccttctctctagtcctgcaatacctaagcatcgatctgcctttagcacatccatccccgccttattctccacgcaggagctgagtgacctgcacaaaaaatccccctgctaaatacgggnacctcggccgctcttagaactagtgggatcccccggggctgcaggaattcggatattcaaagcttatcgatacccggtcggacctcgagggggggggccccggtaccccanctttttgttcccctttaggngangggttnatttggcgcngcttggggggtaaatncatggggcataaggtgntttccntggngnggaaaattggtanttccggttcaaaaatttcccnanaaaacattacnaaccccgggaagccataaaaagtggnaaaaggcctngggggggcctaaatngnggngggngctaacctnanaattaanttgngngtggg

SEQ ID NO: 4226 - DNA, 1153 bp, Homo sapiens
  misc_feature 6, 7, 9, 10, 16, 20, 23, 25, 26, 33, 42, 43, 54, 66, 68,73, 76, 79, 80, 84, 87, 89, 91, 92, 94, 95, 97, 103, 104,107, 111, 116, 117, 124, 125, 127, 195, 196, 197, 198, 201,210, 214, 215, 218, 220, 226, 303, 441, 470, 512, 591, 618: n = A,T,C or G
  misc_feature 658, 659, 667, 701, 712, 713, 723, 729, 796, 807, 811, 812,841, 861, 883, 916, 924, 931, 939, 992, 1007, 1022, 1023,1026, 1029, 1033, 1052, 1053, 1059, 1060, 1061, 1065, 1070,1075, 1076, 1093, 1121, 1126, 1134, 1136: n = A,T,C or G
cccccnntnntttttntttntantnnttttctnttttcaacnntgcatggaaangttttttttttnantttcnatntcnncttntcntntnncnngnggtgtnnggntgcnattcnntttattnngncgaattggagctccaccgcggtggcggccgcccgggcaggtacaatggcttgatcttggctcactgcnnnntgngcctcgcangaannaancnattctnctgcctcagcctctggagtggctgggattacaggcgcccaccattcacgcccggccaattttttgtatttttagtanagacagggtttcaccatgttggccaggctggcctcgaactcttgacctcaggtgatccacctgccttggcctcccaaagtgctgggattaccgtcgtaagccaccgtgaccggccacaaaagagtcttttatgggagnaaaatagaggaatgggaattaaaagcccngataaaattcaaatttactggctcattaaaaatgggcccatngcttccttttctttaacaatggttcccccctttacctggcaagaagggcctattattattcttaaaagaaattggaggnaggaaaaaaggccaaattcaccacctngtttggcttttattgaagccaaattcttaccaattgaaanntaccaaanaaaattccccccttttcttgaaaaaaatttattnaacaaattttnngtttattttnaaggantgttgttaattgttaaaaatttttcccccacccttggtggtttacctttttttttattaccaaaagncccaaaaaccnttanncaagggaaatccttcttaaatttattcanttacccaattgaaggggatngggcttttaaaccaaagggggnttgttttggcccagccccccaccaaaaatgccnaaattttnggatttnttccagcnattgaaaggggccaaagaacttgggccaaattttaacaaaactttcccagccnaccaaggttaacctnttgaaattttttaannaanccntttnattttaccccaatggggannaacttnnntttngcttnttttnnaaataaaaaaaaaaaangggaaccattttttggaggggatccccntttgncctgggantntgggaggttaaaaaaat

SEQ ID NO: 4227 - DNA, 1035 bp, Homo sapiens
  misc_feature 3, 5, 6, 7, 8, 9, 10, 11, 12, 13, 14, 15, 16, 18, 19, 20,23, 25, 26, 28, 29, 30, 31, 34, 36, 38, 42, 44, 46, 47,48, 49, 51, 53, 57, 59, 61, 63, 64, 68, 72, 73, 75, 76,81, 82, 83, 84, 85, 86, 87, 88, 89, 90, 91, 92, 93, 94,95, 99: n = A,T,C or G
  misc_feature 102, 103, 108, 109, 110, 112, 114, 125, 166, 181, 209, 213,409, 431, 517, 541, 780, 802, 807, 826, 845, 846, 849, 944,959, 962, 980, 990, 991, 1032, 1033, 1034: n = A,T,C or G
ccntnnnnnnnnnnnntnnnatntnntnnnnttntntntgtntntnnnntntncttngntntnnttantttnntnnatttnnnnnnnnnnnnnnngggnagnnatttnnnancnctcctataggncgaattggactccaccgcggtggcggccgcccgggcaggtnctttaggagacccangcgggcagattgcctgaggtcaggagtnaganaccagcctggctaacatggtgaaaccctgtctctactaaaaatacaaaaattagccgggcatggtggctcacgcctgtagtcccaactgcttgggaggttgaggcaagagaatcgcttgaacccaggaggtggaggttgcagtgagccgagatcgcgccactgcactccagcatgggcgacaggagcaagactccntctcaaaataaagaaagaaagnaaacaaagaaaaaggaaaagcttatatttgaaccttctctaaaacaaagaaaaaaaaaggaaagcctggatgcacacaaaatctanaattttggcaagtcgatcaattanaagggatatttatttggcatcacaaaaaataatttcttttacttccccccaaaaatcaataaaaaagttcaaatagccaacttttccttaatgtgttttaaaatgtaacccacccaaataccattgtgtccccccaacttctttccaagttataattcttattggtgtaaaggtgaggtattacctgaagttgaggccaattacgagaagtttgaagcctttcagaccttgcctggaanaggagcgtgttcttttctttangagtntggagggaaaatgggtttnggggggcaccaaaattctnntcnaatctttttttctttttccccttcattccttggagccttccttatttttttctttggtcctcaaacctggctttttcttgggttaaaactttttntttcacccttggtanccnttcgggcccgcttcttanaaaactttanntggggattcccccccggggccttggcaaggaaatttccaannnt

SEQ ID NO: 4228 - DNA, 1123 bp, Homo sapiens
  misc_feature 1, 2, 5, 6, 7, 8, 12, 13, 15, 18, 20, 23, 27, 28, 34, 36,43, 44, 46, 47, 49, 50, 54, 57, 63, 68, 79, 80, 83, 84,87, 88, 98, 101, 111, 114, 115, 116, 119, 130, 173, 179,198, 230, 251, 253, 257, 271, 435, 440, 442, 462, 473, 479: n = A,T,C or G
  misc_feature 480, 482, 511, 517, 546, 553, 563, 587, 589, 594, 608, 619,627, 652, 668, 673, 684, 688, 698, 703, 716, 718, 729, 746,748, 765, 768, 769, 776, 779, 786, 797, 815, 832, 837, 842,845, 849, 854, 855, 869, 886, 887, 901, 908, 909, 915: n = A,T,C or G
  misc_feature 916, 931, 949, 954, 968, 969, 970, 980, 982, 991, 1000, 1017,1021, 1023, 1025, 1041, 1047, 1051, 1057, 1060, 1067, 1068,1069, 1070, 1073, 1075, 1076, 1077, 1081, 1082, 1085, 1091,1094, 1097, 1099, 1108, 1111, 1116, 1119, 1120: n = A,T,C or G
nnacnnnntttnntntantntgntttnngaatcngngattttnngnngnnacgngtntattangtcgntttttgctctnntcnntcnntagaaggggngangtcgaggggnttnnnttnaggcgaattgnactccaccgcggtggcggccgcccgggcaggtacgcgggcggngagccnagattgcgccattgcactncagctgggcaacaagagcaaaactcttctcanaaaaaaaaaaaaaaaaaaaancngaangagaaaaagtgttntagtttgagcaataaattgtatgaccactctactaaaatgagtagcttttgatcggtgcctgagtttatttcttcccaaccatgtagattccattctcagacccggtgagccgagattgcgccattgcactccagctggggcaacaagaagcaaaactcttaangtganangaaaaagaaaaaaaaaaaanagggttccctngggccnntntaaaaaactaggggggatcccccggggcntggcangggaattcgatatcaaaggctttattcgnataccgnccgaccctcnaaggggggggggcccggtacccangnttttnggttcccttttagnggagggggttnaatttgcnccccttgggcgttaaatcattgggncattagctggtttttnctggngggggaaaaanttgntttttcccgnttcanaaattttccacancnaaacaattacngaagcccgggggaggcntnaaaaagttggtaaaagnccnnggggggnggnccttaantggaaggtggnggcttaaaccttccccantttaaatttgggggttnggggncttcnacnttgntcccnngtttttttccaagntcggggaaaaaaccccnntctgttggcccaancttggannttaaannggaaatacgggcccnaccccccccggggggaangaagncgggatattggcgnnntttggggcgncntttttccgnttttccttngggtccaattgaaattngctngngnctccgggccttttccnggtttngggnggaaancgnggttttnnnntcncnnnaaannggnggggtnatntcngnttttttccncanaaatnagnnggg

SEQ ID NO: 4229 - DNA, 1174 bp, Homo sapiens
  misc_feature 2, 5, 6, 7, 8, 11, 12, 14, 15, 16, 17, 18, 20, 21, 22, 24,27, 29, 30, 31, 33, 34, 35, 36, 41, 42, 44, 45, 46, 47,48, 49, 51, 53, 54, 56, 58, 61, 63, 64, 65, 67, 70, 72,73, 74, 75, 77, 80, 81, 82, 85, 86, 88, 89, 90, 91, 92,93: n = A,T,C or G
  misc_feature 94, 95, 99, 100, 106, 107, 109, 111, 112, 113, 114, 117,123, 131, 134, 668, 671, 685, 690, 706, 729, 748, 776, 783,793, 806, 809, 838, 847, 860, 868, 875, 884, 896, 898, 903,906, 914, 916, 923, 941, 944, 947, 949, 954, 955, 973: n = A,T,C or G
  misc_feature 975, 978, 990, 991, 996, 997, 1007, 1010, 1014, 1016, 1019,1022, 1028, 1030, 1053, 1054, 1055, 1058, 1064, 1066, 1067,1092, 1095, 1096, 1097, 1099, 1101, 1106, 1121, 1122, 1125,1128, 1137, 1148, 1156, 1157, 1159, 1160, 1162, 1169: n = A,T,C or G
tnccnnnntcnntnnnnntnnntnatntnnntnnnnatttnntnnnnnntntnntntnggntnnntnttntnnnncnttnnnttnncnnnnnnnntagnngggggnngngnnnnttntacgcnatagggcnganttggatctccaccgcggtggcggcccgaggtactttaggagacccaggcgggcagattgcctgaggtcaggagtttgagaccagcctggctaacatggtgaaaccctgtctctactaaaaatacaaaaattagccgggcatggtggctcacgcctgtagtcccaactgcttgggaggttgaggcaagagaatcgcttgaacccaggaggtggaggttgcagtgagccgagatcgcgccactgcactccagcatgggccgacagagcaaggacttccatctcaaaataaagaaagaaaggaaacaaaggaaaagaaaagccttatatttggaacctttcttctaaaaaaaggaaaaaaaaaaggaaagcctggatgcacaccaaaatctaaaattttggccaagtccgatcaattaaaagggatattttattttggcatcaacaaaaataaatttctttttacctccccccccaaaaaaattcaaattaaaaaaggtttcaaaaattaggccaaaccttttttcccttaaatggnggnttttaaaaaaatgntaaantccaccccaaaattancaattgttggtccccccaaaacnttttctttttcccaggttnattaatttcctaatttgggggggaaaanggggganggggtatttnccctggaaaggtnggnggggcaaattaaaggaagaaggtttgggngcttttaanaacccttgccttnggaaaaangaaaccngtgggtttntttttttttaananggtcntgnaggaaaanangggtttnggggggccaccaaaaaanttnttncnaaaannttttttttttttttcccncnaanacctggggggcnnttttnntttttttttnggnctcnanccnggntttttntngggggaaaaattttggttacccnnnggnaaaccntnnccccggggggggggccggttttttnaannntnanggggntccccccccgggccnnggnggngaaatttcnaattttaaaancttttttnncnnanccccgtnaccct

SEQ ID NO: 4230 - DNA, 1121 bp, Homo sapiens
  misc_feature 2, 3, 4, 10, 12, 13, 16, 17, 18, 19, 28, 30, 32, 34, 36,38, 39, 40, 41, 43, 45, 46, 48, 49, 51, 52, 54, 59, 64,65, 68, 69, 74, 76, 78, 80, 82, 83, 84, 85, 86, 87, 88,89, 91, 92, 101, 104, 110, 121, 212, 518, 559, 575, 580,593: n = A,T,C or G
  misc_feature 594, 620, 633, 645, 710, 747, 752, 761, 766, 815, 818, 823,837, 841, 843, 854, 882, 884, 908, 916, 918, 920, 933, 942,958, 963, 969, 979, 994, 999, 1007, 1014, 1020, 1023, 1034,1055, 1059, 1080, 1081, 1084, 1088, 1090, 1111, 1114: n = A,T,C or G
cnnncctaancnnatnnnntaattattnangntnantnnnntntnntnngnnanaaaanattanntcnnatttnanantntnnnnnnnntnntaaggggtntgnagtatntattactatanggcgaattggagctccaccgcggttggcggccgaggtacgcgggggcacatagcatagacccatataagaggaaggatctgagaaggagtntgaaaaaagtgttggagaggctgcgagaaaacaaggcaggtgtcctggctgagggcaggaaggagacattgcgatggaaattgtgccccattttcttggaggattgggaagaggacctgtggactgggcggcccacacaactgctgtaacctcaggcagttttcaagcagattgaccttcctgctggaacacggccacatgaggtgaaagttctcctctacccagggttttgcttggccttgcctccaccatgcccttgacactgggcggctctgcttggggagggaaaaaagccttgctcttgtntgcctggctggtgttggaaacagaagaggggaagtggcagnacaggtctgggcccangcacnttggggtattcgnngcttctagcccattgccgactcattntttccagttcaanaccctgcccccntgggaaaaaaaaaagaagccccaagaaccttcatcaatggaaattgccttttcccctaagggagnaaaaaattggaaaccagccttgggaccaaattgcctnccctngggtccaangttanggcccctggaaaaggggattggcctgggggaattgccaaccccccttcnaangaatnggaaaccaagcccnaggnantggccccaagntattccccctttttttggcccccaaaantnccttaaagggccacctttttttcntaccttgnananccattatttgggnccttctaanggaagaattgtttttnaaaanaccaancaccccccangcccaaattgggagnccttncccccaantaaaganagaaanctnttttggattcnattctttttaaaaacttaagnagangttataaacttcaaccccttnnccnaaangnactttttgggggtttaattgnaanaatgtca

SEQ ID NO: 4231 - DNA, 818 bp, Homo sapiens
  misc_feature 499, 517, 577, 651, 665, 684, 686, 713, 717, 730, 732, 734,741, 813, 815, 818: n = A,T,C or G
tccaccgcggtggcggccgaggtacctgtggtggggaaggcactgagctggatcctggggcaatgaagatgaacaggacattgtgtgccacagtccaggcaggaaccagggtggtggagggcacaccccgattgggtcgtaggagaagagtttaataaaggacatattgattcagtgtgggcagagtatagggaaccctaaggagatagtgcagactccagggccacgaacaacagaacaaggtgggcaaggctgagggaagggagctgcttccagaacctgaagctatgtgggggacttcctgacagagaggctgtcgcctttagtcaggaggccaccagctcacaggaaccctgtagggaagctgccagagagaccaagagctcagctctcatctcctgctgatggtgagccgcattggccaaatgcccccagaagccagagggcacaggacaccagggtgccatccacatgggagagcagtggggaaagggtgganggtggatatggagggcangacagacaaaatcactgcctgctggggaactttgaatttggatggatgagaaggcacatnatcagaaaaaccccagtggtgcccttaacttaatgcttggaagagaggtattaatgaccgactttccggaagcncccaaggaaggaancgcttgacttcttggggangnttgggggaaaggcttcccaaagaaaanaaanttccaggtgtttntntnttccaangcattcttttcttttgaaaaagctgccttttcccttccgggttaccctgcccgggcgggcggtttttaaaantnaan

SEQ ID NO: 4232 - DNA, 559 bp, Homo sapiens
  misc_feature 3, 5, 6, 8, 9, 10, 12, 13, 17, 21, 23, 26, 27, 28, 29, 30,33, 34, 36, 39, 43, 45, 47, 48, 51, 52, 53, 54, 58, 59,60, 61, 62, 63, 64, 67, 68, 84, 85, 89, 91, 92, 271, 427,497, 498: n = A,T,C or G
ctntnntnnncnntttnttcntngtnnnnnttnntnttntttntntnnttnnnngttnnnnnnnttnngctgaacgagtcgccnnttcncnncttatggcgattggactccaccgcggtggcggccgcccgggcaggtactaatatgtgttcctctgagggctgctgagtatagaactgaactggcagaagggctatttttttttttcagtctgatatgccgaaagcaggaatcctctaatctggtaacttttgttggattggaacactanaatctgaatttatacagtggccacatgaagggaaaggacatgaaaatgtgaaaaactctggtagaagaaatgactcatttcttcattgctgatccaggcattgaatttgactatccactggaggccaagtgctgcctgggtttggttttaaagatncagagggttaggataggtgcttttggcaatggtgatgggaatccaatattgaaaagaaaaggaggtcagnngaaactgcgaatggctcattaaaatcagttattggtcctttgggtcgctcgctccttctcc

SEQ ID NO: 4233 - DNA, 831 bp, Homo sapiens
  misc_feature 312, 415, 416, 418, 420, 432, 444, 489, 506, 534, 537, 545,565, 599, 617, 683, 684, 685, 688, 696, 715, 722, 726, 740,743, 758, 760, 764, 772, 773, 777, 785, 788, 789, 806, 827,830: n = A,T,C or G
tccaccgcggtggcggccgaggtactgggattggttgataccatttacacaggcttcttttctcaaagctgcaaacttccataacacaggatgcttcatctgatttgtcagggcagtcatatttaaaatcacatttctgcattttttcaatgcagtgaccatcagacctgcagataaattcattgtctgtgcagttgtgtggaggtaatgttacaggaactgacgtttctggtggagttgggaggtctgctggcaaattaccagggtagagggtgcagtccataaatgacagatcatcaatcgcaatatctncagtgaagccatctcccactgaagcctccaccaatatctgaaagggctgcctgcttggaaatgttgaggtgtttcctaatccatctgttgccttgattcccanntntntgccaaagcagntgtcccctttgngttcactccccccgggtacctgcccgggcgggcccggttcgaatntttccgctttccttgcntaactgacttcgcttgcgctcgggtcgntcnggctgccngcgagccggtatcaagcttnactcaaagggcggtaataccggttattccacaanaatcaagggggataaccncaggaaaagaacatggttgagccaaaaggccaagcaaaagggccagggaacccttaaaaaggcccnnnttngcttgcgntttttcccaaagggctccnccccctngacnagcataacaaaaancgnacgctcaagtaaaangnggcnaaaccccnnaggncttttaangannccaggcgttgccccctnggaagctcccttggggccctntcnt

SEQ ID NO: 4234 - DNA, 789 bp, Homo sapiens
  misc_feature 485, 515, 520, 573, 597, 605, 606, 638, 655, 684, 685, 688,710, 725, 727, 728, 733, 749, 751, 774: n = A,T,C or G
tccaccgcggtggcggccgaggtacgggttttcatgccgaattagccatcaagacatggttatcctggctgttttatgggaatgccctacctctctccttgccctgcttatcaaattagctcagggtggctaggttttacaaccatctgcagtaggcatggttggtagctacaggtggactttgcttagaaatcggaagctacgacgatttcaccctcacagtcttttttgttggtttgcttgatgattaagacatagtttggaaattccctgtcttccccttctctgcctcctagatgactaatttgagcagtgtttattgcagctgtattgtgttgggtggctatgttctgctattgaaaaaagtccacccagcctgaaatgctgtctcatgtagttgtgggtacctgcccgggcggccgctctagaactagtggatcccccgggctggcaggaattcgatatcaagcttatcgataccgtcngacctcgggggggggcccggtacccagctnttgtncccttttagtgagggttaattgcgcgcttggccgtaatcatgggcatagctgnttcctgtgtgaaattgttatccgntcacaatnncacacaacatacgagcccggagcataaagtgnaaagcctggggtgcctnatgagtgagctaactcccataaattggcnntgngctcactggccccttttccagncgggaaaacccctgncnngccanctgctttaatgaaatngncccaccccccggggaaaggccgntttgcgtttgggcct

SEQ ID NO: 4235 - DNA, 847 bp, Homo sapiens
  misc_feature 73, 75, 91, 94, 96, 104, 293, 312, 319, 406, 462, 482, 552,580, 608, 630, 632, 650, 668, 675, 706, 710, 728, 735, 739,761, 769, 770, 772, 785, 793, 796, 825, 827, 832, 833, 846: n = A,T,C or G
gcgaattggagctccaccgcggtggcggccgcccgggcaggtactttcttcttttttttttttttgtgcaagngntttggaaggagtctcnctntntccaccancctggagtgcagtggccggtcttggctcaccatttgcagtgatttttttttaaaatagcttaatttttctggcaaattaattactttggaagtgtaatccttttcctaatctcccagttttgtaagcagctacagagtacctcggccgctctagaactagtggatcccccgggctgcaggaattcgatntcaagcttatcgataccgncgacctngagggggggcccggtacccagcttttgttccctttagtgagggttaattgcgcgcttggcgtaatcatggtcatagctgtttcctgngtgaaattgttatccgctcacaattccacacaacatacgagccgggagcataaagngtaaagcctggggtgcctantgagtgagctaactcacattaattgcgttgcgctcactgcccgctttccagtccgggaaaccctgtcggngccagctgcattaatgaatcggccaacnccccgggggagaaggcggttttgccttnttgggcgctttttcgctttctngntcaattgactcccttgcnccccgggtcgttccggcntgcggcnaagccggtttttaaactcacttcaaaagggngggntaataccgggtttttccncaaaaanttanggggaataacccccagggaaanaacatttnnanccaaaaaggcccncccaaaanggnccggaacccgtaaaaaagggcccggttgntnggcgnntttttccaaaagng

SEQ ID NO: 4236 - DNA, 876 bp, Homo sapiens
  misc_feature 472, 483, 507, 547, 551, 568, 596, 630, 637, 643, 646, 683,692, 703, 726, 736, 744, 759, 773, 799, 800, 801, 819, 835,840, 843, 848, 849, 852: n = A,T,C or G
ggcgaattggagctccaccgcggtggcggccgcccgggcaggtactggatttccttcgattggcccccagatccattctttcccctcctctgctcagctctgtgctgacatgtgtgaatcaccggtcctttttaaatagaagactttgagtttgttttgtcaatgggagaatggaatccttagatcagcacacagaaggcgagagaactctggatatttcctcctctcctcctttatgtttcagtgacacttttctggcagtgtctgtatcccttcccactgggtgacccctcctctaggactctggctatcactggcaaccctaaaataatatttcctccccatcttcttaagctcaaggactggtagcaagttcctgtctattacttgcctatcatcattatcccttgtttctttcacaagtgcctgcacctttgtaactggttacttttattaaaagtctcttcacttnaaatcaaactngggaagaattctggtcctactcangacacttaacttcaaactggtagtatataccatcacagtnaggnaccaggttcataaaaanggggttttttggatatctgagaaaacangggaagtggcaaaattacttccaaaagcagggtngggaaancatctnaangcttggcttgggggatggaccctccggccggtcttanaacctaagngggatcccccngggctggcagggaatttcgattntcaagccttnttcggatnccgtcgaccttcgangggggggccccggnaccccaaccttttggttcccctttannnggagggggttaattggcnccccttgggcggaaantaaanggncaaannccngtttccccgggggggaaaatggtt

SEQ ID NO: 4237 - DNA, 1113 bp, Homo sapiens
  misc_feature 2, 3, 4, 5, 6, 7, 9, 10, 11, 12, 14, 15, 16, 19, 20, 21,22, 23, 24, 25, 27, 28, 29, 30, 33, 34, 35, 36, 37, 38,39, 40, 41, 42, 43, 44, 45, 46, 47, 49, 50, 51, 52, 56,57, 58, 59, 60, 61, 62, 63, 64, 65, 66, 67, 69, 70, 71,72, 73: n = A,T,C or G
  misc_feature 74, 75, 76, 77, 78, 79, 82, 84, 85, 87, 89, 90, 91, 92, 93,94, 99, 100, 101, 105, 107, 113, 151, 253, 365, 473, 475,503, 577, 632, 640, 688, 689, 697, 717, 718, 729, 737, 743,749, 772, 779, 788, 806, 821, 829, 834, 840, 848, 853: n = A,T,C or G
  misc_feature 857, 863, 877, 884, 890, 899, 900, 907, 908, 947, 961, 962,963, 980, 996, 997, 1003, 1012, 1024, 1040, 1042, 1049,1061, 1075, 1088, 1112: n = A,T,C or G
tnnnnnntnnnnannnttnnnnnnntnnnnttnnnnnnnnnnnnnnntnnnnttannnnnnnnnnnntnnnnnnnnnnntantnntntnnnnnnaaggnnngggntngctatnacgacttactatatggcgaattggagctccaccgcggnggcggccgaggtactttgaatgtgagttttaaagatatatatcctgaaaataaggacaacaagtgccaggggagttaggaatgccctgtcttcccaggcctnagcaccgctctagaactagctggatcccccgggctgcaggaattcgatatcaagcttatcgataccgtcgacctcgagggggggcccggtacccagcttttgttccctttantgagggttaattgcgcgcttggcgtaatcatggtcatagctgtttcctgtgtgaaattgttatctcgctcacaattccacacaacatacggagcccgggcagcataanantggtaaaagcctgggggttgcctaatgnaggtgaagctaacttcacattaaattgcgttgcgcttcacctgcccgctttccagttcggggaaaacctggtcntgcccagcctgcatttaatggaatcgggcccaacgccgccgggggagaaggccgnttttgcgntattggggcgcctcttcccgcttcctttgctcaacttgactcgcctgnngcttcggntcgtttccggcttgcgggcnnaagccgggttnttcaagcntcactnaaaagngccggtaaattaccggtttattnccaccangaaatcaangggggaataaacgccaanggaaaaaggaaacantgttgtangccanaaaaanggcccatnccaanaaanggcccnagggaaaccccgtnaaaaaangggccngccgttttnnttggccnnttttttttccaataaaggccttcccgcccccccccttgnaccgaaggccattnnnccaaaaaaattcgaccnccttcaaagtttaaannaaggtnggccggaanacccccgaccanggggaccttttaaaanantacccangggccgtttttncccccttgggaaancctccccttcggnggcgcctttttcttgtttcccaant

SEQ ID NO: 4238 - DNA, 1113 bp, Homo sapiens
  misc_feature 4, 5, 6, 7, 9, 10, 11, 12, 17, 18, 19, 20, 21, 22, 23, 24,29, 30, 31, 32, 33, 34, 37, 39, 40, 41, 42, 43, 44, 46,47, 48, 49, 50, 52, 53, 54, 62, 63, 65, 66, 67, 70, 73,75, 76, 78, 79, 80, 83, 86, 87, 88, 89, 90, 91, 92, 93,94: n = A,T,C or G
  misc_feature 95, 96, 106, 108, 110, 111, 117, 204, 482, 689, 710, 791,826, 836, 847, 852, 855, 859, 861, 881, 917, 941, 959, 970,982, 987, 1028, 1029, 1035, 1038, 1042, 1047, 1049, 1065,1073, 1081: n = A,T,C or G
gctnnnntnnnntttannnnnnnnttttnnnnnntantnnnnnncnnnnntnnntggctttnntnnntantcntnngnnngcnagnnnnnnnnnnnagagggttgngncnnttgaanacgatagggcgatttggagctccaccgcggtggcggccgaggtacatgcctgtaatcctcagcctctcgtgtagctggaattacagncggccgccaccatgcttagcttatttttatatttttaatagagacggggtttcaccatgtgggccaggctgatcttgaactcctgaccttagatgatctgtctgcctcggcctcccaaagtgctgggattacaggcttgaaccaccaaagcccggcctgacatttttcttttaaatcttttatcaaccagctttcatttcttgtcagatgtcacttttcagcaacctgttgcttatattcctctgttagggaagaacctttttttttttctggcccangactggaggagaaaagggaaatgaaaagggatgggaaggaaattacaagaatcaggccactgcttgtctggtctgttccacgggatgtaacccaccagcacaccgccgtggcttcacgggtacctgccccggggccggcccggagggtaccttggagagtgaaggaggccacctcccctggcattgggtctggttctgggctggagntaatttcagcccagaatcttnggtccgtccggggttttttttaactttccgggttttttgggaggccaaacacttcttttttttggcttggggaataaaaangccccttcttttcaaggcctggtttttttccaaantggggaaaantaaaaaaagtnattanccngggntncttatttccttttcctttcntcggaggtcatttttttcaaatggctttttcttctngcattggggccaaattggcccaantaattccccaccttgggngccaccgtttntttttttggaangggcngggggtttcccgaaattcttttttggttttcttcaaaaaannaaattngcntggnccttngntttggggtttggcccncaatcccncctccttnaaaactaagggggaatccccccccgggggccg

SEQ ID NO: 4239 - DNA, 925 bp, Homo sapiens
  misc_feature 86, 324, 371, 393, 415, 416, 422, 427, 429, 431, 439, 442,453, 454, 457, 458, 467, 471, 473, 474, 475, 482, 487, 492,502, 505, 506, 511, 512, 531, 535, 536, 544, 550, 559, 560,561, 562, 563, 566, 567, 574, 575, 576, 581, 585, 586: n = A,T,C or G
  misc_feature 587, 590, 593, 594, 597, 599, 608, 609, 612, 613, 614, 619,625, 626, 628, 636, 639, 643, 644, 651, 656, 660, 662, 664,668, 670, 680, 684, 686, 694, 695, 696, 698, 702, 703, 706,707, 713, 714, 717, 719, 721, 722, 734, 739, 740, 741: n = A,T,C or G
  misc_feature 746, 748, 753, 755, 756, 763, 767, 773, 777, 778, 783, 794,795, 798, 799, 802, 805, 810, 817, 820, 822, 823, 824, 827,829, 830, 832, 833, 836, 837, 838, 842, 844, 845, 848, 849,850, 855, 859, 860, 861, 864, 865, 866, 867, 868, 875: n = A,T,C or G
  misc_feature 876, 880, 881, 884, 888, 891, 898, 899, 902, 906, 909, 912,915, 916, 919, 920, 921, 923: n = A,T,C or G
gaattggagctccccgcggtggcggccgcccgggcaggtacgcgggtatggttctgtgaatttggacaaacacgcagctaggcagncatcaccacagtcaagattctgtcgccttcaacaatcctgtcctttgaagtcagcccactgctcacatcactgagctcttccccattcccgtagttcagccatttctatggtgtcattagtggaatcatgcagattgtagcctttgagtctggtttctttcacctaatgccgttggagatccatccaggaccttgtatgtgtcaataagttccttcctttttattgctgaggtacctnggcccgctctagaactagtggatcccccgggctgcaggaattcgatntcaaagcttatcgatcccggcnaccttggagggggggccccggnncccaanttttntngncccttttnaanggggggggatnnaanngcccccccngggngnnnaaataanggggnaactnaaggtttttnccnnggggnnaaaaaaattttttttctcncccnnaaaaattncccccnaaaataatnnnnntcnnggggggnnnaaaanaaannnggnaannacncnggggggggnnccnnntgggngggggnncncccccctncanattnngtggggntgggncccncnancccntntcttgtttgnaggngnaaaaaaannntncccnntgnntttttnnatnantnnatatcacccccnacccnnnaggananggaangnnttgtatnttanaaatanatannaattnctatcgaaacnnagnngtnaanattanttaaatnatnannngangnntnnaannnattntnnttnnntttantaannnaannnnnttgatannatanngtnattnttntacatannatntgangantancgnnaannntncg

SEQ ID NO: 4240 - DNA, 858 bp, Homo sapiens
  misc_feature 513, 537, 565, 575, 606, 611, 627, 628, 630, 652, 662, 663,664, 669, 672, 681, 682, 683, 695, 709, 720, 724, 738, 742,743, 748, 772, 780, 782, 785, 786, 799, 801, 812, 816, 821,824, 834, 835, 836, 839, 846, 854: n = A,T,C or G
tccaccgcggtggcggccgaggtaccccatgcccaaatctctctgcttattgacaatgccagagtgtgctcctcgccacacgccaactgtaaaatcctgactgctaacaaagggctggcctcagaatcagcaatgctgacaggatttggttccggcacatactgctggttggctactgcacactggccagcagaattctctccccacatgtacctgcccgggcggccgctctagaactagtggatcccccgggctgcaggaattcgatatcaagcttatcgataccgtcgacctcgagggggggcccggtacccagcttttgttccctttagtgagggttaattgcgcgcttggcgtaatcatggtcatagctgtttcctgtgtgaaattgttatcccgctcacaattccacacaacatacgagccgggagcataaagtgtaaagcctggggtgcctaatgagtgagctaactcacattaattgcgttgcgcttcaactgcccgcttttccangtcggggaaaacctgtcgtgccancctgcattaattgaattcggcccaaacncccccggggnagaagggccgggttttgcgttattttggggncgccntttttccgctttcttnngnttcaacttgacttcgccttggngcttcgggtnnntttcnggnttgcggggnnnagccggttattnaagttctcaattcnaaaaggccggntaanaacgggtttttccncaannaattnaggggggataaaccccaggaaaanaaaaacantntgnnccaaaagggcccngnaaaaagggccnaggnaaccngtnaaaagggccnnngtnggttggngttttttncaag

SEQ ID NO: 4241 - DNA, 1112 bp, Homo sapiens
  misc_feature 3, 4, 5, 6, 7, 8, 9, 10, 11, 12, 13, 14, 15, 16, 17, 18,19, 20, 22, 23, 24, 25, 26, 27, 28, 29, 30, 31, 32, 33,35, 36, 37, 38, 39, 40, 41, 42, 43, 44, 45, 46, 47, 48,49, 50, 51, 52, 53, 54, 55, 56, 57, 58, 59, 60, 61, 63,64, 65: n = A,T,C or G
  misc_feature 66, 67, 68, 69, 70, 71, 73, 74, 75, 76, 77, 78, 79, 80, 81,82, 83, 84, 85, 86, 87, 89, 90, 91, 92, 93, 94, 95, 97,103, 104, 106, 107, 109, 110, 111, 112, 113, 115, 116, 119,122, 124, 125, 179, 602, 703, 725, 774, 801, 871, 884: n = A,T,C or G
  misc_feature 902, 962, 985, 988, 994, 1007, 1018, 1030, 1039, 1049, 1051,1077, 1107, 1109, 1111: n = A,T,C or G
ccnnnnnnnnnnnnnnnnnnannnnnnnnnnnntnnnnnnnnnnnnnnnnnnnnnnnnnnnannnnnnnnntnnnnnnnnnnnnnnntnnnnnnntnaagggnngnntnnnnntnnatnctntnnggcgaaattggactccaccgcggtggcggccgcccgggcaggtacttacagatntttacccattcctgtaaaattcttgcagtcagagtttctacagacctgaatattaggaaaatgcaggtttagtcctaaaaaggataccgtgatgcagccattgatgtagcagtgactggctcccctaggctcaaacaatgcattgacctttagagggcagccaagtggagctcacgcaggttaattccagtgcatggccttgttagatcacatcatatcccctgcctagtgccagacacttaatgcaggaatagtattggtttcagggagccccttctcttgtccaaaatttggtacctcggcccgctctagaaactagtgggatcccccgggcctggcaaggaatttcgatatcaaagccttatccgaatacccgtccgaccctcggaaggggggggcccccggttacccaagctttttggntccctttaagtggaggggtttaaatttggccgccgctttggggcggtaaattcaattggttccataagcctggtttcccttgtggttggaaaatttggttnatccccgcttcaccaaaatttnccacaaccaaacaattaccgaagcccccggggaagccattaaaaaagtngtttaaaagccctggggggtgcccctnaatggaagtggaagccttaacttcaccattttaaatttggccgttggccgccttcaacttgggccccgcntttttcccaagtnccggggaaaacccttgtnccggggcccaagcttgccattttaaatggaaatcggggcccaaccccccccggggggaanaaaggcccgggttttgccgttanttngggccnccttttttccgcntttccttgggnttaacttgaacntcgccttgngccttcggtncnttccggcttgccggccgaacccggtnttcaacttcaacttcaaaaagggccgggtnantnt

SEQ ID NO: 4242 - DNA, 1303 bp, Homo sapiens
  misc_feature 2, 3, 4, 5, 6, 7, 8, 9, 10, 11, 12, 13, 14, 15, 16, 17, 18,20, 21, 22, 23, 24, 26, 27, 28, 29, 30, 31, 32, 33, 34,35, 36, 37, 39, 40, 41, 42, 43, 44, 45, 46, 47, 48, 49,50, 51, 52, 54, 55, 56, 57, 58, 59, 60, 61, 62, 63, 65,66: n = A,T,C or G
  misc_feature 67, 68, 69, 70, 71, 73, 74, 75, 76, 77, 78, 80, 81, 82, 83,84, 85, 86, 87, 88, 89, 91, 92, 93, 94, 95, 96, 97, 98,99, 100, 101, 102, 105, 106, 108, 109, 110, 111, 112, 113,114, 115, 117, 118, 121, 122, 124, 131, 132, 142, 143, 144: n = A,T,C or G
  misc_feature 148, 149, 150, 152, 154, 155, 160, 165, 167, 170, 177, 196,361, 398, 455, 460, 524, 533, 564, 567, 570, 605, 612, 674,708, 727, 732, 822, 843, 874, 912, 944, 966, 968, 1026,1044, 1056, 1067, 1073, 1077, 1089, 1125, 1131, 1145, 1161: n = A,T,C or G
  misc_feature 1177, 1185, 1188, 1195, 1196, 1199, 1208, 1212, 1213, 1226,1232, 1239, 1242, 1251, 1252, 1255, 1265, 1274, 1282, 1285,1289, 1297: n = A,T,C or G
tnnnnnnnnnnnnnnnnntnnnnngnnnnnnnnnnnntnnnnnnnnnnnnnntnnnnnnnnnntnnnnnnnannnnnntnnnnnnnnnngnnnnnnnnnnnnttnntnnnnnnnntnnaanntngtttgannccttttgaannngccnnngngnntttantaaangngcnaattggnagctccacccgcggtggcnggctcgaggtacgcggggctcttcagttgtctgctactcagaggaaggggccggttggtgccggcctccattgttcgtgttttaaggccgccatgagggggtggacaagaggcccgtggtccgtggtggggccgcttttggttccaagaagggagggcccaaggnaagggaagggggttcaaggccctttggggaccacatnatcccattttggactttctattttggtggttgaaaaatgggccttttccccggggtncaaangccaagccacctggatggaaaactttcctttcaagttggaaggggccctttggccttgaaaagnaagggaaantcaagggaacccttgggcttccccaaatttnctngcntggaaaccaggggcattctaattccctttttctcntggggtnggaccaaaaaaaaattaaaaccaaaatgggtggaatttggaataaaatcttggaatttggtngggcttcccaagggggaccattttgggaaaagtngcccaaaaaattggaaagnaaagntttccggaccagggtggggggaattcccttattaaaaaaaaagggggggaaccaatttggaccttaaccagggggaccaccaaaatggtnggggcttggaccccttgggtnggggtgggaataaccttcaaaaggaatttcntggcccaaacccgtttgggaaaaagccttgtttgggcntggccccctggggggggaaaaccaaaaagttncgtggggaaaaaggcccttaananaagcaccaagggaatcccctttttgggaaggggttttttaaaccccattgccctggancccaaaccgaaaaacctngggcttttttgnaaaaattcaangtttcntttntgggatgccttnccaggggaaaaaaatttttcaatttaccaaccaggnggcccncccccaattttttnggaaaaaacctgggantcccaagaaacttccntttggganttnttcaaannttntttggcaanaaanngcctttaaaacangcccanttccaancantggcccccnnttnggttttggangggaaaaantgcctttnttnagtnccccaagntgaaat

SEQ ID NO: 4243 - DNA, 858 bp, Homo sapiens
  misc_feature 2, 18, 19, 258, 298, 325, 412, 415, 421, 422, 425, 448, 456,478, 480, 504, 519, 542, 585, 588, 590, 592, 596, 598, 611,612, 627, 635, 639, 649, 650, 656, 661, 664, 671, 672, 673,676, 677, 678, 679, 680, 681, 682, 683, 684, 685: n = A,T,C or G
  misc_feature 686, 687, 692, 693, 694, 695, 696, 697, 698, 699, 700, 701,702, 703, 704, 706, 707, 708, 709, 710, 711, 712, 713, 714,715, 716, 717, 718, 719, 720, 721, 722, 723, 724, 725, 726,727, 728, 729, 730, 731, 732, 733, 734, 735, 736, 737: n = A,T,C or G
  misc_feature 738, 739, 740, 741, 742, 743, 744, 745, 746, 747, 748, 749,750, 751, 752, 753, 754, 755, 756, 757, 758, 759, 760, 761,762, 763, 764, 765, 766, 767, 768, 769, 770, 771, 772, 773,774, 775, 776, 777, 778, 779, 780, 781, 782, 783, 784: n = A,T,C or G
  misc_feature 785, 786, 787, 788, 789, 790, 791, 792, 793, 794, 795, 796,797, 798, 799, 800, 801, 802, 803, 804, 805, 806, 807, 808,809, 810, 811, 812, 813, 814, 815, 816, 817, 818, 819, 820,821, 822, 823, 824, 825, 826, 827, 828, 829, 830, 831: n = A,T,C or G
  misc_feature 832, 833, 834, 835, 836, 837, 838, 839, 840, 841, 842, 843,844, 845, 846, 847, 848, 849, 850, 851, 852, 853, 854, 855,856, 857, 858: n = A,T,C or G
tngacttactatagggcnnattggagctccccgcggtggcggccgcccgggcaggtactgccagaaaggatcaggacctggagtctggcaagaggaagacagaggcctgtgtgggaagcgagttgttatctttggttatctagctgtatgagtgtattggtcttcataaagctagataaccgaaagtaaaaactccttcaagatcgccggggagcgtgtgagaatgaaagactacagccgagagacagtaaaaaccanaaaggtcaggaatacttattgaatctaactttgtttttgntttgtttttttccttatgattaaaggngggatgagagaaaattaaatgacacacacatgctaaaatatcaagggtccacatatgtcttgacaggggtttgttgcaactgccaanganaaatgnntantgataatgagtaaagatgcatgngcaatttngtctattttaaggcaaaagttntntcagggatttttttttaaaaaggngttgcaaaaattttngtacctcggccctcttaaactantggatcccccggcctgcaggaattcatttaaagcttttcgatnccncnancccnanggggggggcccgnnccccactttttgttnccctttanggangggtaattgnncccctnggcgnaancatgggnnnaannnnnnnnnnnncgcgnnnnnnnnnnnnngnnnnnnnnnnnnnnnnnnnnnnnnnnnnnnnnnnnnnnnnnnnnnnnnnnnnnnnnnnnnnnnnnnnnnnnnnnnnnnnnnnnnnnnnnnnnnnnnnnnnnnnnnnnnnnnnnnnnnnnnnnnnnnnnnnnnnnnnnnnnnnnnnnnnnnnnn

SEQ ID NO: 4244 - DNA, 867 bp, Homo sapiens
  misc_feature 5, 10, 13, 17, 22, 39, 168, 221, 223, 298, 319, 392, 442,559, 573, 587, 600, 624, 637, 640, 641, 642, 643, 644, 645,646, 651, 652, 653, 654, 655, 656, 657, 658, 659, 660, 661,662, 663, 664, 665, 666, 667, 668, 669, 670, 671, 672: n = A,T,C or G
  misc_feature 673, 674, 675, 676, 677, 678, 679, 680, 682, 684, 685, 686,687, 688, 689, 690, 691, 692, 694, 695, 696, 697, 698, 699,700, 701, 702, 703, 704, 705, 706, 710, 711, 712, 713, 714,715, 717, 718, 719, 720, 721, 722, 724, 725, 726, 727: n = A,T,C or G
  misc_feature 728, 729, 730, 731, 732, 733, 735, 736, 737, 738, 740, 741,742, 744, 746, 747, 748, 749, 750, 751, 753, 754, 756, 757,758, 759, 760, 761, 762, 763, 764, 765, 766, 767, 768, 769,770, 771, 772, 773, 774, 775, 778, 779, 780, 781, 782: n = A,T,C or G
  misc_feature 785, 786, 787, 788, 789, 791, 792, 793, 796, 797, 798, 799,800, 801, 802, 803, 804, 805, 806, 807, 808, 809, 811, 812,813, 815, 816, 817, 818, 819, 820, 821, 822, 823, 824, 825,826, 827, 828, 829, 830, 832, 833, 834, 835, 836, 837: n = A,T,C or G
  misc_feature 838, 839, 840, 841, 842, 843, 844, 845, 846, 847, 849, 850,851, 852, 853, 855, 856, 857, 858, 859, 860, 861, 862, 864,865, 866, 867: n = A,T,C or G
ggttngaccnatncgcnttatncgacttactatatggcnaattggagctccaccgcggtggcggccgaggtacgcgggggggggtggtggggaagaaaaaaagaaaaagaaaaattaagcattaacacgtaagatacccagaaaagagggcttactcaatcaatcganaaaacgcacggagtctctgctgtgataggcagcaagctgagggggctgttaananaacagcaagacaaacagaggacacatctggtgtatcagggagcaggacacacagtctgggtcaatgggtgcacanatgggacatatgcaatgaganacagcatggaaagacaggctgcctgacgggcctgacaggttctgaatgctgggccttaggtggtcggcagganaaagtcagggcttcacagccaggacacgacacaaagagacaaaactgtanaaagaggagggaccagctgtaccttcccgggcggccgctctaaaactagtggatcccccgggctgcaggaattcgatatcaagcttatcgataccgtcgacctctaaggggggcccngtacccaacttttnttccctttaatganggttaattgcgcncttgggcgttaatcatgggcatancttgttttcttgngannnnnnnaaaannnnnnnnnnnnnnnnnnnnnnnnnnnnnnantnnnnnnnnntnnnnnnnnnnnnntttnnnnnntnnnnnntnnnnnnnnnntnnnntnnntntnnnnnntnntnnnnnnnnnnnnnnnnnnnnatnnnnntannnnntnnntannnnnnnnnnnnnntnnntnnnnnnnnnnnnnnnntnnnnnnnnnnnnnnnntnnnnnannnnnnnntnnnn

SEQ ID NO: 4245 - DNA, 875 bp, Homo sapiens
  misc_feature 4, 5, 8, 9, 18, 19, 30, 31, 35, 36, 420, 451, 474, 490, 548,608, 625, 634, 643, 650, 670, 672, 678, 679, 685, 686, 750,758, 778, 791, 792, 801, 806, 807, 808, 809, 810, 811, 812,813, 814, 815, 816, 817, 818, 819, 820, 821, 822: n = A,T,C or G
  misc_feature 823, 824, 825, 828, 829, 830, 831, 832, 833, 834, 835, 836,837, 838, 839, 840, 841, 842, 843, 844, 845, 846, 847, 848,849, 850, 851, 852, 853, 854, 855, 856, 857, 858, 859, 860,861, 862, 863, 864, 865, 866, 867, 868, 869, 870, 871: n = A,T,C or G
  misc_feature 872, 873, 874: n = A,T,C or G
ggtnnganncgcgttatnngacttactatnnggcnnattggagctccaccgcggtggcggccgcccgggcaggtaccaggttatagatgggtgctgaggatagagcagtgaacaaaaccaacaaaaattcctggcctttgtctttcattctagcaagtagacacagaaaaggcaataaatgctaaacataataaacaaattatatagaatattaaaagatagccgggcacagcggctcgtgcccgtaatcccagcgctttgggagactgaggcgggcagatctcctgaggtcaggaactcgagaccagcctggctaacatagtgaaaccctgtctctactaaaatataaatacaaaaattagctgggcatgatggtgtgcgcctgtagtcccagctactcgagaggctggtgcaacaaanttgcttgaacctgggaagtggaaggttgcantgaaccaagatcacaccacttgnacttcagccttgggcnacagaatgagaactctgtcttcaaaaaattaatttaattaattaaaaattaaaaattngaaggcttaaaagaataaaaaaagtgcccccggggggaaaaaccaaaccaaagttttggnggattgggagtaccctngggccgctntaaaactantgggatnccccggcttgcaggaatttnanattaanncttatnnataccgcgaccttcaagggggggccccggtacccaactttttggttccttttatgaaggggttnaatttgcncccctttggcggtaaatcantgggccataaacnnggggtttcnggggnnnnnnnnnnnnnnnnnnnnaannnnnnnnnnnnnnnnnnnnnnnnnnnnnnnnnnnnnnnnnnnnnnng

SEQ ID NO: 4246 - DNA, 799 bp, Homo sapiens
  misc_feature 2, 4, 5, 6, 7, 15, 24, 469, 554, 555, 556, 557, 561, 562,563, 564, 565, 566, 567, 568, 569, 570, 571, 572, 573, 574,575, 576, 577, 578, 579, 580, 581, 582, 583, 584, 585, 586,587, 588, 589, 590, 591, 592, 593, 594, 595, 596, 597: n = A,T,C or G
  misc_feature 598, 599, 600, 601, 602, 603, 604, 605, 606, 607, 608, 609,610, 611, 612, 613, 614, 615, 616, 617, 618, 619, 620, 621,622, 623, 624, 625, 626, 627, 628, 629, 630, 631, 632, 633,634, 635, 636, 637, 638, 639, 640, 641, 642, 643, 644: n = A,T,C or G
  misc_feature 645, 646, 647, 648, 649, 650, 651, 652, 653, 654, 655, 656,657, 658, 659, 660, 661, 662, 663, 664, 665, 666, 667, 668,669, 670, 671, 672, 673, 674, 675, 676, 677, 678, 679, 680,681, 682, 683, 684, 685, 686, 687, 688, 689, 690, 691: n = A,T,C or G
  misc_feature 692, 693, 694, 695, 696, 697, 698, 699, 700, 701, 702, 703,704, 705, 706, 707, 708, 709, 710, 711, 712, 713, 714, 715,716, 717, 718, 719, 720, 721, 722, 723, 724, 725, 726, 727,728, 729, 730, 731, 732, 733, 734, 735, 736, 737, 738: n = A,T,C or G
  misc_feature 739, 740, 741, 742, 743, 744, 745, 746, 747, 748, 749, 750,751, 752, 753, 754, 755, 756, 757, 758, 759, 760, 761, 762,763, 764, 765, 766, 767, 768, 769, 770, 771, 772, 773, 774,775, 776, 777, 778, 779, 780, 781, 782, 783, 784, 785: n = A,T,C or G
  misc_feature 786, 787, 788, 789, 790, 791, 792, 793, 794, 795, 796, 797,798: n = A,T,C or G
gntnnnncgcgcgtnatacgactnactatagggcgaattggagctccaccgcggtggcggccgcccgggcaggtaccttttcttctttgattatagtcaaaagccaaggctatgacattcttgaaataacgtggattctcatatggccttattggggaatttaaattggtttcatcagaaagatgtatactttttaatattgttcttcctgaatacagtaaatagccttcatgcctcaggcaagtaactccatcttctgccaaatatccatgggcacaagcacaagttctccgggaatttcctcgataaagacagagttgcttacagccaccattgtccctggcacaaacattggtccctttctctcttactcggttaaatacccgcgtacctcggccgctctagaactagtggatcccccgggctgcaggaattcgatatcaagcttatcgataccgtcgacctcganggggggcccggtacccagcttttgttccctttagtgagggttaattgcgcgcttggcgtaatcatggtcatagctgtttcctggnnnnaaannnnnnnnnnnnnnnnnnnnnnnnnnnnnnnnnnnnnnnnnnnnnnnnnnnnnnnnnnnnnnnnnnnnnnnnnnnnnnnnnnnnnnnnnnnnnnnnnnnnnnnnnnnnnnnnnnnnnnnnnnnnnnnnnnnnnnnnnnnnnnnnnnnnnnnnnnnnnnnnnnnnnnnnnnnnnnnnnnnnnnnnnnnnnnnnnnnnnnnnnnnnnnnnnnnnnnnnnnnnnnnnnnnnnnnnnnnnnng

SEQ ID NO: 4247 - DNA, 1433 bp, Homo sapiens
  misc_feature 7, 8, 9, 10, 11, 12, 13, 14, 15, 16, 22, 24, 30, 34, 48,54, 68, 80, 175, 186, 193, 266, 320, 321, 390, 425, 432,437, 478, 510, 513, 514, 515, 516, 517, 518, 519, 520, 521,522, 523, 524, 525, 526, 527, 528, 529, 530, 531, 532, 533: n = A,T,C or G
  misc_feature 534, 535, 536, 537, 538, 539, 540, 541, 542, 543, 544, 545,546, 547, 548, 549, 550, 551, 552, 553, 554, 555, 556, 557,558, 559, 560, 561, 562, 563, 564, 565, 566, 567, 568, 569,570, 571, 572, 573, 574, 575, 576, 577, 578, 579, 580: n = A,T,C or G
  misc_feature 581, 582, 583, 584, 585, 586, 587, 588, 589, 590, 591, 592,593, 594, 595, 596, 597, 598, 599, 600, 601, 602, 603, 604,605, 606, 607, 608, 609, 610, 611, 612, 613, 614, 615, 616,617, 618, 619, 620, 621, 622, 623, 624, 625, 626, 627: n = A,T,C or G
  misc_feature 628, 629, 630, 631, 632, 633, 634, 635, 636, 637, 638, 639,640, 641, 642, 643, 644, 645, 646, 647, 648, 649, 650, 651,652, 653, 654, 655, 656, 657, 658, 659, 660, 661, 662, 663,664, 665, 666, 667, 668, 669, 670, 671, 672, 673, 674: n = A,T,C or G
  misc_feature 675, 676, 677, 678, 679, 680, 681, 682, 683, 684, 685, 686,687, 688, 689, 690, 691, 692, 693, 694, 695, 696, 697, 698,699, 700, 701, 702, 703, 704, 705, 706, 707, 708, 709, 710,711, 712, 713, 714, 715, 716, 717, 718, 719, 720, 721: n = A,T,C or G
  misc_feature 722, 723, 725, 726, 727, 728, 729, 730, 731, 732, 733, 734,735, 736, 737, 738, 739, 740, 741, 742, 743, 744, 745, 746,747, 748, 749, 750, 751, 752, 753, 754, 755, 756, 757, 758,759, 760-876, 878-1338, 1340-1433: n = A,T,C or G
gggtttnnnnnnnnnngggaancnccgccnatanatagcggaacattnaactcntgaatgtgccctgnaaatttggggangccttcccaccccgccggggttgggccggggccccgggggggggttaagggaaatggggggaaaagccccgttgggggggccaaaaggggggaanggtttgccaangggaaangccccccaatcccttttccccccttcccttgccggggccaagggttacccttcggggccccgccttctttaanaaaaacctaagttggggaatccccccccgggggccttggcaagggaaaattccnnaattattccaaaagcctttaatccgaaataaccccggtccgaccttccgaaagggggggggggcccccnggtaccccaaacctttttttgtttccccttttaanttggaanggggnttaaaatttgccgccgccctttgggccggttaaaatcaatngggtccattaagccttgtttttcccttggaanaannnnnnnnnnnnnnnnnnnnnnnnnnnnnnnnnnnnnnnnnnnnnnnnnnnnnnnnnnnnnnnnnnnnnnnnnnnnnnnnnnnnnnnnnnnnnnnnnnnnnnnnnnnnnnnnnnnnnnnnnnnnnnnnnnnnnnnnnnnnnnnnnnnnnnnnnnnnnnnnnnnnnnnnnnnnnnnnnnnnnnnnnnnnnnnnnnnnnnnnnnnnnnnnnnnannnnnnnnnnnnnnnnnnnnnnnnnnnnnnnnnnnnnnnnnnnnnnnnnnnnnnnnnnnnnnnnnnnnnnnnnnnnnnnnnnnnnnnnnnnnnnnnnnnnnnnnnnnnnnnnnnnnnnnnnnnnnnnnnnnnnnnnnnnnnnnnnnnnnnnnannnnnnnnnnnnnnnnnnnnnnnnnnnnnnnnnnnnnnnnnnnnnnnnnnnnnnnnnnnnnnnnnnnnnnnnnnnnnnnnnnnnnnnnnnnnnnnnnnnnnnnnnnnnnnnnnnnnnnnnnnnnnnnnnnnnnnnnnnnnnnnnnnnnnnnnnnnnnnnnnnnnnnnnnnnnnnnnnnnnnnnnnnnnnnnnnnnnnnnnnnnnnnnnnnnnnnnnnnnnnnnnnnnnnnnnnnnnnnnnnnnnnnnnnnnnnnnnnnnnnnnnnnnnnnnnnnnnnnnnnnnnnnnnnnnnnnnnnnnnnnnnnnnnnnnnnnnnnnnnnnnnnnnnnnnnnnnnnnnnnnnnnnnnnnnnnnnnnnnnnnnnnnnnnnnnnnnnnnnnnnnnnnnnnnnnnnnnnnnnnnnnnnnnnnnnnnnnnnnnnnnnnnnnnnnnnnnnnnnnnnnnnnnnnnnnnnnnnnnnannnnnnnnnnnnnnnnnnnnnnnnnnnnnnnnnnnnnnnnnnnnnnnnnnnnnnnnnnnnnnnnnnnnnnnnnnnnnnnnnnnnnnnnnnnnnnn

SEQ ID NO: 4248 - DNA, 1337 bp, Homo sapiens
  misc_feature 6, 7, 8, 9, 10, 11, 17, 28, 29, 34, 49, 51, 53, 103, 113,127, 171, 175, 223, 312, 316, 397, 434, 456, 457, 458, 459,460, 461, 462, 463, 464, 465, 466, 467, 468, 469, 470, 471,472, 473, 474, 476, 477, 478, 479, 480, 481, 482, 483: n = A,T,C or G
  misc_feature 484, 485, 486, 489, 490, 491, 492, 494, 496, 497, 498, 499,500, 502, 503, 508, 509, 510, 511, 512, 513, 514, 515, 516,517, 518, 519, 520, 521, 522, 523, 524, 525, 526, 527, 528,529, 530, 531, 532, 533, 534, 535, 536, 537, 538, 539: n = A,T,C or G
  misc_feature 540, 541, 542, 543, 544, 545, 546, 547, 548, 549, 550, 551,552, 553, 554, 555, 556, 557, 558, 559, 560, 561, 562, 563,564, 565, 566, 567, 568, 569, 570, 571, 572, 574, 575, 576,577, 578, 579, 580, 581, 582, 583, 584, 585, 586, 587: n = A,T,C or G
  misc_feature 588, 589, 590, 591, 592, 593, 594, 595, 596, 597, 598, 599,600, 601, 602, 603, 604, 605, 606, 607, 608, 609, 610, 611,612, 613, 614, 615, 616, 617, 618, 619, 620, 621, 622, 623,624, 625, 626, 627, 628, 629, 630, 631, 632, 633, 634: n = A,T,C or G
  misc_feature 635, 636, 637, 638, 639, 640, 641, 642, 643, 644, 645, 646,647, 648, 649, 650, 651, 652, 653, 654, 655, 656, 657, 658,659, 660, 661, 662, 663, 664, 665, 666, 667, 668, 670, 674,675, 676, 677, 678, 679, 681, 682, 683, 687, 688, 689: n = A,T,C or G
  misc_feature 690, 691, 692, 693, 694, 695, 696, 697, 698, 699, 700, 701,702, 704, 706, 707, 708, 709, 710, 711, 712, 713, 714, 715,716, 717, 718, 719, 720, 721, 722, 723, 724, 725, 726, 727,728-817, 819-841, 843-850, 852-884, 886-893, 895-899, 901-935: n = A,T,C or G
  misc_feature 837-944, 947-949, 951, 956-973, 978, 981-986, 988-997,999, 1001-1003, 1008-1013, 1018-1022, 1025-1026, 1029-1032,1036, 1038-1043, 1045-1103, 1105-1143, 1145-1225, 1227-1238,1240-1241, 1243-1251, 1253-1254, 1256-1259, 1263-1267, 1269: n = A,T,C or G
  misc_feature 1271, 1273, 1275-1293, 1295-1302, 1304-1312, 1314-1317,1320, 1324: n = A,T,C or G
atgttnnnnnngaagcncccgccgttanntacgnacttcactatagtgngncnaaaattggggaagctccaccgcgggttgggccgggcccggccgggggganggcttgaccnaagagccggggganggccgtttaagccgaaaagggaaaagaagaaaaaaaacccgaangacngaaaagccaccttacaggcccccgccgttaccttcgggcccgctctangaaacttaagtgggaatccccccggggccttgcaaggggaattccgaatatcaaaagctttattccgaatttaccccgtccgaccttcngaangggggggggggcccccgggtaccccaaacttttttgtttccccctttttaaattggaagggggtttaaattttggccgccncctttgggccggtaaaattcaattgggtccaattaanccttgttttccccttgggaaannnnnnnnnnnnnnnnnnntnnnnnnnnnnnatnnnntnannnnngnnttttnnnnnnnnnnnnnnnnnnnnnnnnnnnnnnnnnnnnnnnnnnnnnnnnnnnnnnnnnnnnnnnnntnnnnnnnnnnnnnnnnnnnnnnnnnnnnnnnnnnnnnnnnnnnnnnnnnnnnnnnnnnnnnnnnnnnnnnnnnnnnnnnnnnnnnnnnnnnnnnnanaaannnnnntnnnaaannnnnnnnnnnnnnnntncnnnnnnnnnnnnnnnnnnnnnnnnnnnnnnnnnnnnnnnnnnnnnnnnnnnnnnnnnnnnnnnnnnnnnnnnnnnnnnnnnnnnnnnnnnnnnnnnnnnnnnnnnnnnnnnntnnnnnnnnnnnnnnnnnnnnnnntnnnnnnnnannnnnnnnnnnnnnnnnnnnnnnnnnnnnnnnncnnnnnnnnannnnntnnnnnnnnnnnnnnnnnnnnnnnnnnnnnnnnnnnannnnnnnnttnnnanaaaannnnnnnnnnnnnnnnnnttttnttnnnnnntnnnnnnnnnnanccccttttnnnnnnccccnnnnnggnnggnnnnaaanannnnnnannnnnnnnnnnnnnnnnnnnnnnnnnnnnnnnnnnnnnnnnnnnnnnnnnnnnnnnnnntnnnnnnnnnnnnnnnnnnnnnnnnnnnnnnnnnnnnnnntnnnnnnnnnnnnnnnnnnnnnnnnnnnnnnnnnnnnnnnnnnnnnnnnnnnnnnnnnnnnnnnnnnnnnnnnnnnnnnnnnannnnnnnnnnnncnncnnnnnnnnntnnannnntttnnnnnanananannnnnnnnnnnnnnnnnnntnnnnnnnntnnnnnnnnnannnnttntttntttttttggtgtg

SEQ ID NO: 4249 - DNA, 600 bp, Homo sapiens
  misc_feature 28, 67, 188, 190, 350, 351, 360, 361, 366, 423, 465, 468,474, 491, 493, 502, 509, 510, 522, 523, 527, 528, 532, 541,542, 566, 567, 568, 569, 571, 578, 587, 588, 589, 590, 591,595, 596, 598, 599, 600: n = A,T,C or G
acctactatagggcgaattggagctccncgcggtggcggccgagtcttctccttctaagagtgttcnccttcagcaggaggactccaggcctcttcaatcagtcgaaagacagaatcgaaataagtcagatagaactgccagtcatctgagttttttagtaagaggcgccgggaaagggcattgactntnggccacctgctcagcttcttgtcctgcccggccggccgctctagaactagtggatcccccgggctgcaggaattcgatatcaagcttatcgataccgtcgacctcgagggggggcccggtacccagcttttgttccctttagtgagggtaattgcccctnncgtatcatnntcatngtcatagctgtttcctgtgtgaaattgttatccgctcacaattccacacaacatacnagccgggagcataaagtgtaaagcctggggtgcctaatgagnganctaccncaaataattgcgttgcncncctgcccgnttccaanngggaaacctttnngccnncttnttaaaaaanngcccacccccggggaagggggttnnnntngggcccntttcctttnnnnnaaannannn

SEQ ID NO: 4250 - DNA, 488 bp, Homo sapiens
  misc_feature 316: n = A,T,C or G
cgaattggagctccacccgcggtggcggcccgcccgggcaggtacagtgagaaagacatgacatggctgagatggagagaatatgaggtggccacagcagaaaagttgagaacaatttgaaagaggaaaatctgtggccaaattcaaggcaccctaggctgtgatcctggaactgaacatctgatgagtcaatacagggcacggagtaggactttgaagtcctccattggatcttctcggaagatgagggaaatgagagagtgtggagagagattttgtaagtccggtctggaagtggtcattgttcagaatccanccacgtgggtacctcggccgctctagaactagtggatcccccggctgcaggaattcgatatcaagcttatcgatccgcgacctcgagggggggcccggtacccagcttttgttccctttaatgagggttaattgcgcgcttggcgtaatcatggtcatagctgtttcctgtg

SEQ ID NO: 4251 - DNA, 486 bp, Homo sapiens
  misc_feature 343: n = A,T,C or G
aattggagctccccgcggtggcggccgcccgggcaggtacgcggggggtgaagatatggcggcgtctgcgtctgcagctgcaggggaggaggactgggtccttccctctgaagttgaagtattggagtccatctatctagatgaactacaggtgattaaaggaaatggcagaacttcaccatgggagatctacatcactttgcatcctgccactgcagaggaccaggattcacagtatgtctgcttcactctggtgcttcaggtcccagcagagtatccccatgaggtgccacagatctctatccgaaatccccgaggactttcagatgaacagatccacacnatcttacaggtgctgggccacgtggccaaggctgggctgggcactgccatgctgtatgaactcattgagaaagggaaggaaattctcacagataacaacatccctcatggccagtgtgtcatctgcctctatggtttccagaa

SEQ ID NO: 4252 - DNA, 553 bp, Homo sapiens
  misc_feature 1, 3, 4, 5, 7, 9, 11, 12, 17, 19, 20, 21, 22, 24, 27, 33,35, 36, 37, 38, 41, 42, 46, 48, 49, 50, 52, 53, 54, 61,63, 66, 72, 74, 79, 80, 84, 90, 93, 96, 97, 98, 99, 114,213, 218, 219, 221, 230, 380, 394, 445, 450, 451, 460, 467: n = A,T,C or G
  misc_feature 469, 471, 475, 476, 481, 485, 486, 492, 499, 502: n = A,T,C or G
ntnnnanananngttgntnnnnanttnttttcntnnnntanngaantnnnannncttagtntnatngctatncnatatnntgtnttaganctntcnnnnggcggcgagtacatnaaatggggaggtcacatctattagtgatcagctgtcataatcagaagaggccatacagcattcattgaatattggaggaacaggactcagatacagacntacannanctcactttnctgcagagaaaaaaatgggaacacatatgatgacccttcaacgtgatgagtacctgcccgggcggccgctctagaactagtggatcccccgggctgcaggaattcgatatcaagcttatcgataccgtcgacctcgagggggggcccggnacccaacttttgcnccctttagtgagggttaattgcgcgcttggcgtaatcatggacatagctgnggtcnngttgtgacncttgtantnantcannatttncacnnatcatnctagccnggnagcataaagtgtaaagcctgggggtgcctaaatgaagtgagctaacttcat

SEQ ID NO: 4253 - DNA, 499 bp, Homo sapiens
  misc_feature 16, 17, 21, 22, 23, 24, 31, 40, 68, 79, 80: n = A,T,C or G
gtttaaccctttgaanncccnnnnattttgnaaagggccnattggagctccccgttgtggcggccgcncgggcaggttnncgggggggtctgaagctgaaaactgtaaccatgatgaaggcaaaggaaagagcagagagctcggtagacagaggaaggagcctgtcctcagacaggcccaaaaccagagaacctcttgtcatcaatgaactaatgacatagacagatccaaatgactgccagatctgccaggaatcagtatttttcaggcttcagtgatctcctctgtcctggagaacaattcctgtatattatgaggactctgacatcttctctgaccaccagtttattttcttctcttaatacagaatcaactgcattaaggtcatggtagaaaccaaagctaaaacagttattttaaaacatcatgatgtaagtgctgtaaaccttcttagaatttaaacatgctcagggcatgaaagagaaatgattataacatt

SEQ ID NO: 4254 - DNA, 802 bp, Homo sapiens
  misc_feature 69, 625, 777, 799: n = A,T,C or G
ggagctccaccgcggtggcggccgaggtactataagcccaggtgcacgaattcagctttaaacatctantttagtggtaactgatcaatcttggtgagctctaaaatactgcaattgcctcaacattacccttttatggacagttccaaattaacttatttttctatgggaataccactttgcttagatatcagaaaaagcttctgattcaacactctaccttctgcatcctgttgaacaccatatacatcagtttgagtattaccgactgctgtaacaaacaagaccctcaatttcagggagtttacaaattagaaattaaatttgcgaaagtaaaatgtggatgttgccggacagctggtagatatgctccacatagtgattcagtggcaatatcaccttccttcttgtagttttgacattgctttgagtctcagaactttctgtgacagccattattcacccgcgtacctgcccgggcggccgctctagaactagtggatcccccgggctgcaggaattcgatatcaagcttatcgatacccgtcgacctcgagggggggcccggtacccagcttttgttccctttagtgagggttaattgcgcgcttggcgtaatcatggncatagctgtttcctggtgtgaaattgttatccgctcacaattccacacaacatacgagccgggggagcataaaggtgtaaagcctgggggtggcctaatgaggtgagctaactccattaaattggcgttggcgcctcactggcccgcttttncagtcgggaaaacctggtcgtngcc

SEQ ID NO: 4255 - DNA, 1271 bp, Homo sapiens
  misc_feature 3, 5, 13, 14, 16, 17, 18, 19, 24, 30, 32, 34, 35, 37, 44,48, 49, 51, 53, 55, 56, 64, 68, 70, 73, 74, 79, 81, 88,91, 92, 93, 94, 99, 101, 110, 112, 113, 114, 115, 117, 118,129, 136, 143, 144, 149, 172, 173, 188, 214, 218, 236, 241: n = A,T,C or G
  misc_feature 244, 245, 248, 342, 418, 448, 467, 474, 476, 495, 543, 548,577, 582, 586, 588, 595, 598, 605, 609, 611, 615, 624, 696,707, 768, 769, 785, 788, 845, 866, 901, 919, 930, 941, 943,947, 951, 975, 998, 1024, 1025, 1048, 1088, 1099, 1101: n = A,T,C or G
  misc_feature 1102, 1104, 1107, 1115, 1129, 1151, 1161, 1168, 1170, 1171,1172, 1175, 1183, 1184, 1193, 1209, 1210, 1220, 1233, 1238,1251, 1262, 1263, 1265, 1268, 1271: n = A,T,C or G
ccncntatatttnngnnnnttttntttatntntnncnaattatnggtnntntnanntatttttnttcntnctnntcgtntntcctacnatnnnnttagntngagagttantnnnngnntataatacatnttaactntatagtnnattgnaagcttcaccgcggtggcggccnnggcaccttgccgcangaggggaaggatgggcttcctgcaangaangggttgccccacggcttnccatnctnnccncggccgctctagaactagtggatcccccgggctgcaggaattcgatatcaagcttatcgataccgtcgacctcgagggggggcccggtacccancttttgttccctttaagtgaggggttaattgcgcgcttggccgttaatcattggtcataagcttggtttcctgtgntgaaattgttattcccgctcaacaattccnacaaccaaccattaccgangcccggngnaggcattaaaagtgtaaangccctggggggtgcccttaaatgaagtgaagcctaacctttaaccaantttanattttggcggttgtcgccgccttttaacntgggncccngnttttttnccnaagttcntggngnatanaacccttgnttccggctgccacattgctttgccaattttaaattggaaaattccggggccccaaaaccgccgtccgggggnggaaggaaagngcccgggtcttttggccggtttaattttggggggccggcctttcattttcccgcctttttnnctttcggccttcaacnttnggaccttccggctttggccgcctccggggtaccggttttcgggcctttgccgggccngaaggccggggttattcaagncttccaccttccaaaaagggccgcgtttaattacnggtttaattcccaccaangaatttccaanggggggaattnanccgnccanggaaaaaggaaaccaattggttgngaggccaaaaaaaggccccaagncaaaaaaggggccccggggaaacccnnttaaaaaaaaggggccccgccgnttgcctgggccgtttttttttcccataaaggcctcccgcncccccccttgncnnangcntttaacanaaaaattcggaccnccttcaaatttcaaggaggttnggccggaaanccccggncnnnganctttttanngatttcccnggcctttttccccccnngggaaaggcnttcccttcggtgncgccntcttccttggttnccgaccccttnncnggnttn

SEQ ID NO: 4256 - DNA, 1132 bp, Homo sapiens
  misc_feature 2, 5, 6, 7, 12, 13, 14, 15, 16, 22, 23, 24, 25, 26, 27, 29,32, 33, 35, 37, 39, 40, 44, 45, 46, 48, 49, 50, 51, 52,53, 55, 56, 61, 65, 67, 74, 75, 79, 80, 81, 82, 83, 84,86, 87, 89, 95, 100, 101, 106, 111, 112, 113, 115, 118,119: n = A,T,C or G
  misc_feature 121, 438, 442, 462, 470, 481, 500, 503, 536, 562, 580, 632,657, 672, 694, 701, 704, 711, 759, 767, 769, 835, 840, 845,848, 851, 857, 864, 869, 872, 876, 881, 888, 901, 910, 911,926, 929, 946, 949, 952, 953, 960, 968, 969, 974, 975: n = A,T,C or G
  misc_feature 977, 984, 986, 1002, 1003, 1006, 1013, 1032, 1033, 1044,1051, 1065, 1068, 1082, 1083, 1084, 1085, 1086, 1096, 1098,1105, 1107, 1132: n = A,T,C or G
cnacnnncttgnnnnntcatannnnnntnttnntnantnnttgnnntnnnnnntnnttctnggtnantatctanntctnnnnnngnngngggggntggtnngggtnacatnnntnctnnantccaattggagctccaccgcggtggcggccgcccgggcaggtaccgctagccagtgccgcatttatccatctgtaagaaggccctggtggagaggatgggatgagaacaagaggctacctccagttaaccaggacataaagtccccagcggttcctgtcacacctgctcctccctccccagggtgcatccatgatcgtggatgtttgcccaggggtgaccatgtttggctggcttggaatgctgtgcattctcagagctctgttaagtgtcccctcttgggggtcaagaagatgaaggtgtggccaggggtcttagnaggnaatgagtgtccaaggcaagnagttcaanaaggttaaggnaatgtccctcttggatagnggnctgaaattcaaaggggatttcctgggctttaanaaaaaggggtcttgcttattcttttncaaaaaaatgttgccaangtattcttgtagcccaggtgtaaattgaaaattcactttcccaaaatccaanccctgtttaccctggacctttttgntcaattggttttttnccccaaaaaaattttggaaggntattcanttngaaaacnagggtcaatttttaaaaccaaaatccttatttaaccgggaatttcctncaaggggntntggggaaaattaaatttcgaattgaatttggcttttaaatcccctttcccccccacccccttaagnaacanccccnaanccncaattnttgaaangattngangccnccctnttccctnggggttaaccctncgggcccgnntttttagaaacctangtngggatcccccccggggnctngcnnggggaantttcccanntttcnnancctttanancgaattccccttccannacnttccaanggggggggggccccgggtnnccccaaacctnttttggnttcccttttaaaanggngggggtttaaaatnnnnncccctttgcngntaattancnccccccccccccccccccccccccn

SEQ ID NO: 4257 - DNA, 1194 bp, Homo sapiens
  misc_feature 3, 4, 5, 9, 10, 11, 15, 16, 20, 25, 28, 30, 32, 33, 34, 40,57, 62, 70, 72, 78, 79, 81, 82, 87, 89, 90, 92, 93, 96,98, 99, 104, 108, 109, 111, 112, 113, 115, 117, 132, 141,196, 301, 428, 436, 466, 486, 491, 507, 511, 541, 548, 571: n = A,T,C or G
  misc_feature 578, 583, 604, 623, 650, 662, 666, 676, 702, 715, 720, 723,725, 733, 736, 740, 750, 751, 771, 779, 788, 808, 813, 815,820, 821, 838, 842, 854, 871, 873, 880, 885, 886, 895, 902,905, 906, 907, 922, 934, 944, 953, 967, 968, 975, 976: n = A,T,C or G
  misc_feature 984, 985, 987, 988, 989, 992, 994, 996, 999, 1000, 1001,1011, 1016, 1024, 1030, 1031, 1032, 1039, 1047, 1048, 1061,1066, 1068, 1070, 1072, 1082, 1094, 1097, 1113, 1114, 1119,1122, 1124, 1139, 1140, 1148, 1157, 1167, 1171, 1173: n = A,T,C or G
  misc_feature 1177, 1178, 1179, 1183, 1184, 1186, 1187: n = A,T,C or G
ccnnnatcnnntctnncctnggtcnctntnannntgtatnttaatctagtttacccntcttncttaagtntnattctnnannaaagntnntnnttntnnggcantccnntnnncnanttgtagctccaccgnggtggcggncgcccgggcaggtacgcgggtgagtgtgtgtgggagtttgtgctaatgttcagtnggtggaagctcagggatttccactgtattcttaaggtgaagtcagagatttgagagaggatacccacttgaaccatacagcttgccattttgggctgcaacaacnaggccagttgtataaggagaataaagaaactggtgcattttggagtcagacaaaaaagttcattcatggctctttcagtctggaagattctgaaacctttggtaacatatgtaattcctaaaataangaataagngcaaagtggatttttaaataaaaggggcanataccagttgattttcaaangaaangaggaaaaattacttnccanagggtgcctgccatttcattgaaaaaaagnccagttnccccattgtaaaagaaaaaaaangaattcntgttncaaggaagccaattccctttnatttcaaaaaaccccaggntccgttaaattttgcccccatttttcncctttgttaaanaaancaaaaaaagnggccccctggaccttaaaaggccccnctttaaaaaaacnaggantgngnatttttcnaancaangaggcctccnnctttaaaccttccttctccnttggtcantgaaaattncattgggggggggggaaaangggantnaattnnttttttttttaaaaaanttcnttccccttggtntttttttttttttcctntntaaatantttcnntttcttccnatttggnggnnnttttttaaacccccngttccattttanaaccaaaaanttccaaaantccctggggttttnnggttccnnaacccaannannntgncncnttnnnctaataaaanatggntccccttngggccnnnttcttanaaaactanngggggttcccccnggggntngnanggaattttcnaattttccaccnttntttgaattccccttcnntcccntcngngggggggggccccannaaccccanctttttgtnttcccccttntaangnaagnnntaanntnncgccccc

SEQ ID NO: 4258 - DNA, 1187 bp, Homo sapiens
  misc_feature 3, 7, 12, 13, 16, 18, 20, 24, 25, 27, 30, 35, 37, 38, 40,41, 44, 47, 48, 49, 52, 54, 56, 58, 60, 61, 62, 67, 69,70, 72, 76, 77, 79, 80, 83, 84, 92, 101, 109, 119, 126,405, 461, 534, 556, 571, 603, 617, 633, 636, 709, 750, 759,761: n = A,T,C or G
  misc_feature 787, 808, 829, 840, 851, 861, 870, 881, 896, 910, 911, 926,930, 932, 936, 945, 958, 964, 973, 975, 976, 988, 991, 1012,1024, 1025, 1026, 1045, 1054, 1061, 1066, 1072, 1085, 1094,1097, 1114, 1120, 1121, 1127, 1135, 1137, 1144, 1150: n = A,T,C or G
  misc_feature 1151, 1153, 1162, 1164, 1168, 1172, 1173, 1174, 1175, 1180,1186: n = A,T,C or G
tcnttanatatnntanangngtgnngngtnttttntnntnnaanatnnncgntntngngnnnttttntnnanaatnntnnttnngttttatnatttgttancgtctgtnttcttttttntatatgncaaattggagctccaccgcggtggcggccgtccgggcaggtacgcgggggaaggggcgggatccgaggcaagcgttggttctgtgcgcctcagagttggagcacacagctgtattaaaaaggcaaatcgaaggccgggcgcggtgactcacgcctgtcatcctagcactttgggaggccgaggcggctgaatcacttgaggttaggagtttgagatcagcccgggcaacatggtgaaaccccgtctctacaaaaatagaaaaattagcccgagccgtgnatggttggatgcctgtaatcctagctcctcggggaggctaaggaagtattaatgtntcaagggaagggcgaattattggggaaggtggggacccattatcttagttaagtgatgaaaaggtgagggaantaaaaaagcccaaaaacccagnacaagcccattctanctctttctctttctctggtgcccaggccaagngaggccatgctaanttgaggccccaagggntanccttcgggcccggcttcttaaggaaacctaagtggggattccccccccgggggcctggccaagggaaatttcngaattatttcaaaaggcttttattccgattaccccggttcngaacccttncnaaggggggggggggcccccgggttanccccaaaccttttttgttttncccctttttaattggaggggntttaaatttgncgccgcctttnggccgttaantccattggnttcaataaagncttggtttttccctngttgttggaaaaanntggtttaattcccgnttcnanaaanttttccacnaacaaaacatttnccggangccccgggngnngccattaaaaanttngtaaaaaagccctgggggggnggcccctaaatnnnaggtggaggcttaaacccntacattttnaatttgncgttngggggnttcaacttggccngcctttttnaanttcgggggaaaaacccntgtccnntgcccnaccttgcnantttaatngaaatnngngccaacccncnccgngggnnnngggcngttttnt

SEQ ID NO: 4259 - DNA, 859 bp, Homo sapiens
  misc_feature 478, 509, 581, 592, 611, 613, 623, 626, 629, 637, 638, 639,647, 650, 653, 654, 662, 666, 669, 672, 682, 687, 688, 693,710, 713, 714, 720, 726, 748, 750, 756, 757, 758, 769, 771,773, 774, 775, 776, 777, 780, 783, 785, 796, 801, 832: n = A,T,C or G
  misc_feature 833, 845, 846, 847, 851, 852, 854: n = A,T,C or G
ggagctccaccgcggtggcggccgcagtgggttctgaaagtccattccggcgtagggtggaaaccggcgggaggcgttgctgattctcgattaaacaatagtgacgagacgcgtgcggggcgcctgcgagtcccttcctccccgcgtacctgcccgggcggccgctctagaactagtggatcccccgggctgcaggaattcgatatcaagcttatcgataccgtcgacctcgagggggggcccggtacccagcttttgttccctttagtgagggttaattgcgcgcttggcgtaatcatggtcatagctgtttcctgtgtgaaattgttatccgctcacaattccacacaacatacgagccgggagcataaagtgtaaagcctggggtgcctaatgagtgagctaactcacattaattgcgttgcgcttcactgcccgcttttccagtccgggaaacctgtcgtgccagctgcattanatgaaatcggccaacgcgcgggggagaggcngtttgcgtattgggcgctcttcccgctttcctcgctcactgactcgctgcgctcggtcgttcggctgcggcnagcggtatcancttcaactcaaaaggcggnanattccggttnttnccncaaaaatnnnggggattnacnccnnggaaaaanaaanatnttnggccaaaaanggccnnccaanaagggccctggaacccnttnnaaaaanggcccncgtttgcttgggcgttttttcnantagggnnnccgcccccccntnannnnnganttnanaaaaaaattcnacccnttaaatctaaagggtgggggaaaacccccgnnggacttttaaannnacanngnttttc

SEQ ID NO: 4260 - DNA, 885 bp, Homo sapiens
  misc_feature 74, 149, 159, 221, 254, 286, 352, 396, 428, 435, 437, 441,464, 479, 480, 482, 498, 504, 516, 518, 524, 540, 547, 549,554, 557, 571, 576, 589, 612, 615, 623, 624, 629, 630, 631,635, 650, 653, 657, 661, 662, 663, 664, 669, 671, 674: n = A,T,C or G
  misc_feature 676, 677, 689, 691, 692, 702, 706, 724, 726, 727, 728, 738,742, 745, 746, 749, 750, 758, 768, 777, 798, 799, 800, 801,805, 808, 810, 814, 822, 826, 830, 835, 836, 842, 843, 844,856, 857, 860, 865, 868, 869, 878: n = A,T,C or G
ggcgaattggagctccaccgcggtggcggccgcccgggcaggtacttttttttttttttttttttttttttggnataccttttttgtccattttatgtgatttgctataacttcttttttacttacctctgaagtagaatttgattganaagataaatntagctaaattccaaataccattccctcttgttttacaacaattagaacacattaaaatgaanacttgattcatgacacagcacctaacaaacttnttgggcatttcctgatgtcctgttgtcactgnatgcctgcagcactgtttccctgtttcatcatgtggggaggtgggagtaggtaatggagcttctgntaaaaaaattagaaaactttaaaaaataagttcatttactttanactttccaaaaaacactggacttggacatggngcaggangntatnaatggatggggaggcattcctcntgaagggaatagganntncctgatggaaattacncatggntgggaaaaaaanantgaacnccaagaaactgttttnaggaaangnaaatngcnttgttaaaaaaacncaccnttttttggggagnggaaaaacattaagaaaaggttnganttttttgnntccgnnncaantcaaatcaaagtttnttngaanaaannnntttcntnggngnnccccctcgggcngnnctttaaaaancaangggggatcccccccgggncnnngggggaattnctanatnncanncttatttnataccccccncccccttangggggggggcccgggcccccnnnntttntgntncccntttaagangggnattnatatnncccccnnnggggagataaannggnataancanntattccctnggagaaa

SEQ ID NO: 4261 - DNA, 1147 bp, Homo sapiens
  misc_feature 1, 2, 3, 11, 13, 15, 19, 20, 26, 34, 35, 36, 38, 40, 41,45, 49, 50, 51, 53, 54, 55, 57, 59, 61, 63, 64, 65, 67,69, 75, 76, 77, 79, 86, 88, 89, 93, 113, 114, 118, 126,133, 136, 140, 143, 145, 152, 166, 195, 302, 313, 315, 330,482: n = A,T,C or G
  misc_feature 519, 623, 626, 631, 635, 706, 708, 722, 724, 739, 767, 777,786, 794, 805, 809, 817, 826, 829, 837, 881, 886, 908, 919,924, 925, 928, 938, 943, 945, 949, 952, 954, 955, 970, 974,977, 978, 979, 980, 981, 988, 991, 992, 993, 1004: n = A,T,C or G
  misc_feature 1007, 1011, 1012, 1013, 1017, 1019, 1020, 1021, 1022, 1023,1028, 1033, 1035, 1036, 1038, 1041, 1045, 1046, 1049, 1056,1063, 1070, 1074, 1078, 1083, 1091, 1093, 1095, 1096, 1101,1106, 1107, 1108, 1113, 1115, 1134, 1135, 1136, 1139: n = A,T,C or G
  misc_feature 1140, 1142: n = A,T,C or G
nnncttcgtangntngcanncaggcntccttcgnnngnannttantttnnntnnnangntngnnncnanggtttnnntncttgtancnnctanctatccagagagggggggcnngacngatgactntaatttnggntganttngntactccnccgtagttggctgncgcccgggcaggtactatcctaagtgctntatctgtattatctcatttaatcctaaaccctgtgcgttaggttttacccttattcttatccacggcagagttagggtccaagatcatgctgttgaactggcaaatntgggatttaancncaggtcatctgattncagagcacctcctcattaactgtctctcaaaaatgatcaggtccaacagtttttcaaattatataccactgtcagcaagatttctatattgaatttagcattaaatataaataactagaaggatctaataacaacatatatatttataggancaaatctaaataacactgaaatgattaaacaagggtnaaatttaggctcatatgatcctgatttaattctcattttggtacctcgggcccggctctagaaactagtgggatccccccggggcctgggagggaaatttcganttnttcanagcntttattccgaattcccgttcggaccccttcgaagggggggggggcccccggggtaccccaagccttttttngntttccccttttagntnggaggggggttaaantttggcggccgcctttggggccggtaanttccatgggntccaattangccttggntttccccttgntggngggaaaanttgggttantcncgccttcnaccaaatttccccccaccaaaaccttacccgaaggcccgggggngccantaaaaagtggtaaaaagggccnttggggggggngcccnnaantggagggggngcctnanaccntcncnnttttaatgtgggggngggngcnnnnncctggcnccnnntttttccaaanacngggnnnaaancnnnnncggtnccccncnntnggntttnnaangaaattnggcccanccccccngggngggnggggnggggtttngntnntttgnggggnnnctttncncatttcttgtgtttaatannnagnncngcggg

SEQ ID NO: 4262 - DNA, 558 bp, Homo sapiens
  misc_feature 1, 2, 8, 9, 11, 13, 18, 19, 22, 25, 32, 33, 34, 35, 38, 39,41, 45, 48, 50, 51, 54, 58, 64, 65, 69, 70, 71, 72, 76,83, 87, 107, 112, 390, 447, 448, 514, 536, 547: n = A,T,C or G
nntatacnntnantattnnttnatnttttttnnnntgnntntttnaantnnttntatnaagtgnngttnnnnattnttttagnctantggactccaccgagtggcgnccgangtacgcctatgccaagtggaaactctgttctgcttcagcaatatgcttcattttcatgattgcagaggccgtgggtgggcacattgctgggagtcttgctgttgtcacagatgctgcccacctcttaattgacctgaccagtttcctgctcagtctcttctccctgtggttgcatcgaagcctccctctaagcggctgacatttggatggcaccgagcagagatccttggtgccctgctctccatcctgtgcatctgggttggtgactggcgtgctantgtacctgcccgggcggccgctctagaactagtggatcccccgggctgcaggaattnnatattcaaagcttattcgattaccgtcgacctcgaggggggggcccggtacccaatcttttgatcnctttagtgagggttaatttgcncgcttggcgtnattatggtcat

SEQ ID NO: 4263 - DNA, 560 bp, Homo sapiens
  misc_feature 2, 6, 7, 14, 17, 22, 25, 28, 29, 30, 35, 36, 39, 44, 47,51, 53, 54, 57, 58, 62, 65, 68, 69, 71, 74, 77, 79, 83,85, 86, 89, 100, 113, 119, 131, 179, 238, 250, 472, 476,501, 515, 523, 531, 532, 541: n = A,T,C or G
cntctnnttctgtnatnaaacnttngtnnnttttnnatnttatntantttntnnttnntttnggnatnnantanggntntttngnnggncgaatggactncaccgcggtggcngccgangtacaaatggtnactatccaaattcatggtcgccaaggacatcggtaaagcctggagtanctttcagatgtgaggagcttccttaaagctctggaataagcaggattcaggaatagtanggataaatgcanagcgcttagaagatgaccaataagaacagatcttagtcctgcctgaacatgctgtgaaagcttgaggaacacaccagtgccagccctcaatctcctcaactgacttggggattagactacaggctatcgataaagtttccatccatccttaaaatcctatgactccaaaatttctatcacatgcaaaagtataaaggcaggaaggaactgtacctgcccggncggncgctctagaactagtggatcccccnggctgcaggaattnggatatcnagcttatnnataccgtcnacctcgagggggggccccg

SEQ ID NO: 4264 - DNA, 888 bp, Homo sapiens
  misc_feature 395, 397, 399, 400, 401, 402, 403, 405, 406, 407, 417, 418,419, 420, 424, 425, 427, 431, 432, 433, 435, 436, 437, 439,443, 444, 446, 447, 450, 451, 452, 457, 458, 459, 462, 463,464, 469, 472, 478, 479, 483, 489, 491, 493, 494, 498: n = A,T,C or G
  misc_feature 499, 502, 505, 508, 509, 510, 513, 515, 519, 531, 532, 535,536, 537, 548, 555, 556, 557, 558, 563, 564, 565, 567, 570,575, 581, 583, 591, 593, 594, 595, 596, 597, 600, 604, 607,609, 611, 614, 616, 617, 619, 620, 622, 624, 625, 626: n = A,T,C or G
  misc_feature 627, 628, 630, 641, 642, 644, 650, 654, 657, 659, 660, 662,685, 689, 692, 694, 695, 698, 699, 700, 702, 706, 708, 709,712, 715, 722, 729, 730, 744, 745, 747, 750, 751, 752, 757,759, 766, 767, 771, 774, 775, 776, 779, 780, 781, 785: n = A,T,C or G
  misc_feature 787, 789, 790, 791, 792, 794, 797, 799, 804, 806, 807, 809,813, 816, 817, 819, 824, 829, 831, 834, 835, 836, 838, 839,840, 841, 842, 848, 849, 850, 853, 854, 857, 858, 862, 867,868, 869, 873, 876, 880, 883, 884, 885, 888: n = A,T,C or G
aggtatcgactactatagggcgaattgggccctctagatgcatgctcgagcggcccgccagtgtgatggatatctgcagaattcgcccttagcgtggtcgcggccgaggtacatgcaagctactcttgctctttggatccatggctgaatctggacaccagcagtgaccagctctagagtaaaaaaatcaggaagggggctggccacactgggttggagaatcagacttggggataccatgccatgaggtgtgtggcctctgggcaacaaaacaacaccagtttagactcatctccttgaaacagaaggaaaagccaggcttgaaaacatgggttagaacaaggaatcttgggccaggcgcagtggctcaggcctgtaatctcagcactttgggngntnnnnnannntttttttttnnnnattnnanttgnnnannngnatgnntnnctnnnttacnnnccnnnaagtnatnagtttnnatgnttatgngnannaacnnaantanttnnntangntatntctttttatttnntannnttttttaaaanaaagaannnntgttnnnanaantgggntgtttntnttgttaanannnnntcnaatngtntngntantnntnngnannnnncnttttttatctnntntttacnttcnacnannanaaaattttattttccctcttttngggnaantnntgnnnantttntnntanggnggtctantcgaccnntcttatttttgtcnncnagnnnttttnanaatattnntttntannnggnnngggnanannnncntantnggttnanntnactngannanatttngtatngnagnnnannnnnttattnnnatnncannattntgtgnnngtancantatnatnnnggn

SEQ ID NO: 4265 - DNA, 863 bp, Homo sapiens
  misc_feature 299, 447, 518, 531, 544, 546, 551, 554, 571, 597, 600, 606,608, 612, 613, 618, 643, 644, 650, 669, 671, 674, 687, 693,706, 715, 718, 728, 731, 753, 760, 762, 763, 768, 774, 776,778, 779, 790, 799, 806, 813, 816, 817, 818, 825, 826: n = A,T,C or G
  misc_feature 830, 833, 857, 859: n = A,T,C or G
gggccctctagatgcatgctcgagcggcccgccagtgtgatggatatctgcagaattcgccctttcgagcggccgcccgggcaggtactcttgcctgtggacttttattatccttccaacttcattcttgtagggtctcaaatcctttccttggcttcccttcagactgcctctgtgctgtcatggtctttcttgggaagaccttcttctgctttctctctaggaacaactcggccaggtatagttgcctttcccaagattacaatttagcccaggattcagtcccatggtatctccgncaggatagagcccacgggcaagattaaattatctcattctcacagttagatctttgcagaagcttagcaatgccatctgagaaaggaggcatctgaagttatcaagcagacaggtaactccgaccaattcagcactctgccccaactncagattctgtggtaggcatctgatatggggcactccagcttccaaacaggcagctacaatgttcataagcntcactggaggtcntttggtaccctcngnccgcnaancacgcttaggggcgaanttccaagtacactggccggccgttcntangtggantnccgnnctcgnttccaagctttggcgtaaacatggnnaatagnttgtttactgggggaaaantnggnatccgagtaacanttccgnacaacattccganccccgaagntanaaaggtgtanaancctggggtgccctaatgggtgnacctaantnncaatnaatggngngnngctcactgccngttttccanttcgggnaaaccgnttnnncaactgnnattnatngaaatcgtccaacccccggggtangncggg

SEQ ID NO: 4266 - DNA, 957 bp, Homo sapiens
  misc_feature 131, 134, 147, 165, 227, 251, 279, 304, 309, 319, 325, 345,348, 350, 351, 377, 383, 384, 385, 386, 396, 404, 407, 412,420, 421, 436, 464, 472, 485, 491, 504, 512, 523, 527, 529,530, 534, 535, 536, 537, 553, 554, 559, 568, 570, 571: n = A,T,C or G
  misc_feature 572, 579, 584, 585, 592, 594, 601, 607, 611, 614, 615, 622,628, 630, 632, 633, 642, 650, 652, 657, 658, 659, 664, 665,667, 670, 672, 677, 680, 681, 686, 687, 692, 697, 707, 715,720, 721, 724, 725, 727, 730, 734, 735, 746, 748, 749: n = A,T,C or G
  misc_feature 750, 752, 763, 764, 766, 771, 774, 778, 781, 785, 786, 791,806, 814, 820, 825, 829, 830, 836, 837, 838, 840, 846, 849,852, 853, 859, 868, 871, 873, 874, 875, 876, 878, 879, 886,887, 889, 899, 903, 905, 909, 912, 924, 927, 928, 936: n = A,T,C or G
  misc_feature 938, 948, 955: n = A,T,C or G
tagactactatagggcgaaattgggccctctagatgcatgctcgagcggcccgccagtgtgatggatatctgcagaattcgcccttagcgtggtcgcggcccgaggtactttctggcttgttgagcgtgtnctnactgctggccctnttgagcctgctgagtcgngactcaaaagccaaggaaggtgaagacttataactcttcatgccggaagaggctgcaggcanaggccgcacccggtctgggccgtngccccctgctctgatggttgggttccanggcttggctgcactccgcatgcttnacttncgtggatctntctgcnaaaactctgcttcttcctgnttntnnggaagctgacgaccttaaatcaaganagtcannnnatttattttntcccgagnacntgctncgggcggnnagatcaaaagtggcngaattcccatctcaacttggccggccgntacatatngggatcccgagcntagtancaaagcttggcgnagatcatnggacataatcntagntnncctnnnntgaaaattagatattnngtatnacaaatatncnnnatcaatnttacnnagtcctngnaatcatntaagtngtanaannctagggngtagcntnanntagatgagntttacttngncatgnnnttagnntntgnanctcanctnncccgnntttcnatttncggggatacnttttctanctcanncanntntanatannaatatgatcancnnncntgttatgaagnngnttatnatntatntgngctnntcttntcaacatttacttanttcaactnacattnatttnttcnnggtacnnntncaggcngcnganntcggtnttttaattnttntnnnntnngcgcgannanggtgtttgtncttntnaatntcnggggttacctcnatnntagtaatntntttttccacngaggctncg

SEQ ID NO: 4267 - DNA, 894 bp, Homo sapiens
  misc_feature 2, 3, 9, 36, 510, 660, 673, 675, 698, 708, 710, 714, 720,735, 736, 742, 762, 770, 782, 785, 809, 826, 836, 847, 852,860: n = A,T,C or G
tnnatagantgactacgactcactatagggcgaatngggccctctagatgcatgctcgagcggccgccagtgtgatggatatctgcagaattcgccctttcgagcggccgcccgggcaggtactgtggttatgccgggaaaaagacacaagtccttttctttgaaagataaacaatgaaatatttatgggtgaaatagtgtctgggatttgttttaaaatatattaacacaaaaagtgtgaggaataaataaaatatgaagctgatggtttgctgacagatacattgggttccccgtactattcattcctttgccttaaaaataaaaacactcaaacaaaattagaaaaaaaaaaaagaaaaagaaaaaagtacctcggcccgcgaccacgctaagggcgaattccagcacactggcggccgttactagtggatccgagctcggtaccaagcttggcgtaatcatggtcatagctgtttcctgtgtgaaattgttatccgctcacaattncacacaacatacgagcccggaaagcataaagtgtaaagcctggggtgcctaatgagtgagctaactcacattaattgcgttgcgctcactgcccgcttttcagtcggggaaacctgtcggccagctgcattaatgaatcggccaaccccnccggggagaagcngntttgcgttattgggccctctttncgcttacttngnttanttgacntcgcttgcgctcggnncgttcnggttgcgggccaagcgggtntcaagctnacttcaaaggcngtnataccggtttttccacagaattanggggaataaccccaggnaaagaacatntggagccaaanggccnaccaaaanggccaggaacccgtaaaaaaggcccgtttggctg

SEQ ID NO: 4268 - DNA, 868 bp, Homo sapiens
  misc_feature 2, 3, 35, 620, 706, 748, 753, 779, 782, 787, 789, 805, 829,846, 868: n = A,T,C or G
tnntagattgaatacgactcactatagggcgaatngggccctctagatgcatgctcgagcggcccgccagtgtgatggatatctgcagaattcgccctttcgagcggccgcccgggcaggtacctccatgcatggctaatttttgcttttctgtttttgtagagactgggtttcgtcatgttgctcaggctggtcttgaacccccgagctcaagcaatcctcccacctcagcctcccaaagtgctgggactacaggcatgagccaccacgcctggcctttatatgtatatttttgatcatagtaacatcagtatgcaattaaagagtaataatatgtatgtaaaataaagacacgaatatttattcaactctagacaacgtttgatgccataatgggtttaaaataactctgggagcctgggaatctagtctctagattggaaaccactgaactgggtattttattattaaaaacaataatcattattattttttccattgtaataacatgtaaaaaaacatatttcccatatgctcaagtggagaaaatttggaaataaggaaagtagcaagaagaagtggggggaaagaagcacccataattctattacccagagtcnaaaacatcttttaacactttttctgtgcattaaaaaaaaaaaaaaaaaaaaaagtccttgggcgggaacacgcttaaggcgaattncacacactgggcggccgttactagtggatcccagctcggganccaancttgggggaaacatgggcataactgnttnccggngngaaaatggttttccgntcccaatttcccacaacataccancccggaagcataaaggngtaaaaacccggggggcctaan

SEQ ID NO: 4269 - DNA, 883 bp, Homo sapiens
  misc_feature 1, 30, 35, 37, 494, 609, 614, 641, 652, 696, 737, 747, 755,761, 767, 791, 792, 793, 825, 836, 866, 874: n = A,T,C or G
naacgtacttagggcgaatagggccctctngaccntnctatgcatgctcgagcggcccgccagtgtgatggatatctgcagaattcgcccttagcgtggtcgcggccgaggtacggacaacagtgtatgtgcaaccatgctcgctctgccctgggaggggcagtggaggcagaaatggatgaggaaatagtgaaagatatcaaagataccccatactctcggggcatcagctactggccttatttggttttataaaacataaacgttcctcccaaacccttccagtattttgaggggctttcacatttccaaatacaaagttttacaaacaagcctattataaaaattgcattgtcatgtggctaaattacaaaaatgacttcagctttgtataagtcatttaaaacagtgtatacactaaggctattttaatcttccaaagaactattgtggatagcacagttttcctcacagctaatgctttatcaatcatntatctcaaattcctgttttaaccattttggatcaaaagcctttaaaatatgtattacataactcaatgccttcttaaataggtagtctggttttactgtgttagaacaaagaaangaaangaaaggatatttatttttacagataanaatattactgnggcctattattataattagattttggtattacatgtctctaccnatatgcctatattcttttaagaataaaaaaattctcaatgntttccaaatnttaacctnccaaangggtanaatcttatgttaaaattttaaggnnntgaaaaaaccttgggctgaaaactttcctaangtattttagcnctgggtttttaaaaacaggaccccaccggnccccttcnttgggaatt

SEQ ID NO: 4270 - DNA, 870 bp, Homo sapiens
  misc_feature 2, 3, 36, 675, 679, 680, 723, 825, 827: n = A,T,C or G
tnnatagattgaatacgactcactatagggcgaatngggccctctagatgcatgctcgagcggcccgccagtgtgatggatatctgcagaattcgcccttcgagcggccgcccgggcaggtactcttgcctgtggacttttattatccttccaacttcattcttgtagggtctcaaatcctttccttggcttcccttcagactgcctctgtgctgtcatggtctttcttgggaagaccttcttctgctttctctctaggaacaactcggccaggtatagttgcctttcccaagattgcaatttagcccaggattcagtcccatggtatctccgccaggatagagcccacgggcaagattaaattatctcatcctcacagttagatctttgcagagcttagcaatgccatctgagaaaggaggcatctgaagttatcaagcagacaggtaactccgaccaattcagcactctgccccaactccagattctgtggtaggcatctgatatggggcttccagcttcaaacagcaagctacatgttcataagcatcactggaggtctttggtacctcggccgcgaccacgctaagggcgaattccagcacactggcgggccgttactagtggatccgagctcggtaccaagcttggcgtaatcatggtcatagctggttnctgnngtgaaattgttattccgctcacaatttcacacaacataccaanccggaagcctaaagtggtaaagcctggggtgcctaatgaggggagctactacattaaatggcgttgccctactggccgcttttcaatcgggaaaacctggcngngccaactggatttatgaaatcgggccaacgccccggggaagag

SEQ ID NO: 4271 - DNA, 848 bp, Homo sapiens
  misc_feature 21, 607, 615, 618, 640, 645, 648, 651, 653, 654, 655, 658,659, 661, 662, 663, 664, 667, 669, 670, 672, 673, 675, 676,677, 678, 679, 680, 682, 683, 684, 685, 686, 689, 692, 693,694, 695, 697, 699, 701, 702, 703, 704, 706, 707, 708: n = A,T,C or G
  misc_feature 709, 710, 711, 712, 713, 714, 715, 716, 717, 718, 719, 720,721, 722, 723, 724, 725, 726, 727, 728, 729, 730, 731, 732,733, 734, 735, 736, 737, 738, 739, 740, 741, 742, 743, 744,745, 746, 747, 748, 749, 750, 751, 752, 753, 754, 755: n = A,T,C or G
  misc_feature 756, 757, 758, 759, 760, 761, 762, 763, 764, 765, 766, 767,768, 769, 770, 771, 772, 773, 774, 775, 776, 777, 778, 779,780, 781, 782, 783, 784, 785, 786, 787, 788, 789, 790, 791,792, 793, 794, 795, 796, 797, 798, 799, 800, 801, 802: n = A,T,C or G
  misc_feature 803, 804, 805, 806, 807, 808, 809, 810, 811, 812, 813, 814,815, 816, 817, 818, 819, 820, 821, 822, 823, 824, 825, 826,827, 828, 829, 830, 831, 832, 833, 834, 835, 836, 837, 838,839, 840, 841, 842, 843, 844, 845, 846, 847, 848: n = A,T,C or G
atcactactatagggcgaatngggccctctagatgcatgctcgagcggccgccagtgtgatgggatatctgcagaattcgcccttagcgtggtcgcggcccgaggtacttttttttttttttttttttagacagagtctcactctgttgcccaggctgcgtgatctcagctcactgcaacctccacttcccgcttcaagcgattctcctgccttagcctcctgagtagctgggattacaggtgcgcaccaccacgcccggctaatttttgtatttttagtaaagacggggtttcaccatgttggtgaggctggtctcgaactcctgacctcatgatccacccacgttggcctcccaaatgcagtagcgtcttaaagaccatcttaaaggctggtaagagtctggactttattctaaggactagaagagaagccatttggttttatgcagggggatgacaggatgtgattttcactttaagaagacaactagtgctacagtatggagactagattgtagaggatgagagtggtgattgggaaggccgttcaaaaggctgtcacagggagccaagggcagaaaactaggtggtggagcctggactggantggtaganacntgggtggatttggggtatattntgganganggncnnnggnncnnnntgntnnanngnnnnnnannnnnaanggnnnngngntnnnngnnnnnnnnnnnnnnnnnnnnnnnnnnnnnnnnnnnnnnnnnnnnnnnnnnnnnnnnnnnnnnnnnnnnnnnnnnnnnnnnnnnnnnnnnnnnnnnnnnnnnnnnnnnnnnnnnnnnnnnnnnnnnnnnnnnnnnnnnnnnnnn

SEQ ID NO: 4272 - DNA, 865 bp, Homo sapiens
  misc_feature 12, 20, 85, 87, 89, 95, 96, 664, 709, 729, 737, 782, 795,799, 821, 845, 863, 865: n = A,T,C or G
atatctccttanggcgaatngggccctctagatgcatgctcgagcggccgccagtgtgatggatatctgcagaattcgcccttancngnggccgnnccgacgggccctttgccttttgaattcttgattgttttcattgaagaaatgtggaaatctgaaacaaactatattctcaatcatgttagaaaaagtatatgtaatatgtatttttttaaagtccagtggctaagaacttagactgggttttgaaataataatttcctaacacagtttctcagtatgtttcctctagacaagagaaaactctgtaattatgattcttaatttaccctggtaatttcataagaaaaatgattaattactttgagcaatcagttatacagataatcatggttctttatttaaaccacaaaaaatagaaagaaagcagagaagcttaagcataaaatataaagacaaattcagtcatttagtaaaaatgaaatcagtgttaaaatatttcttttgacacagtcagctaacatctttctatttttgctgagtaactattaattatattttaagttcaactaactcttgacacagcaatgggaatttgaagtgaatatactactttgaaaaataaatggtgtatttagagtggtgacatttagaaaatggtagntttgtgaaatttgcaatgtgttttaaaattataaatgctaaagtnaggtgaatgcattgattatntttaattngaataaaaaccgaagaattttttaagtcttggacacccaaggcangggttctgttttnagtntttccccttcaatcaaacgttncagcttttcctaacttaaaaactnggttcaacttataatggngn

SEQ ID NO: 4273 - DNA, 847 bp, Homo sapiens
  misc_feature 10, 659, 662, 666, 706, 780, 795, 796, 798, 799, 805, 834: n = A,T,C or G
atgtacttanggcgaatagggccctctagatgcatgctcgagcggccgccagtgtgatggatatctgcagaattcgcccttagcgtggtcgcggccgaggtacatgtcattcctcctgacagcaactttaaagccccaggatcagctttctgccctgcagttgctggtctacctgatgccaccctgccacagtgataccctggagcgtctgctgaaggccctgcataaaatcactgagaactgcgaggactcaattggcattgatggacagttggtcccaggcaaccgtatggcttccactaacttggccttggtgtttggatctgctctcctgaaaaaaggaaagtttggcaagagagagtccaggaaaacaaagctggggattgatcactatgttgcttctgtcaatgtggtccgtgccatgattgataactgggatgtcctcttccaggtgcctccccatattcagaggcaggttgctaagcgcgggtggaagtccagcccggaagcacttgattttatcagacgcaggaacttgaggaagatccagagtgcacgcataaagatggaagaagatgcactactttctgatccagtggaaacctctgctgaacccgggctgctgtccttgctcaaagcaagccttctgatgaaaggtnctntgangagccagctgtacctttccggacttgccgttcccttgacnatgaggaaggagcgggtaaccttccatttccggacaagaaccgcccattgcttcgtgtgccccgggagaagganggcaaaaactggggnnanntccttntttccttaatgttttccctttataagggnccaaaaggggaat

SEQ ID NO: 4274 - DNA, 868 bp, Homo sapiens
  misc_feature 2, 3, 4, 5, 59, 623, 645, 661, 665, 702, 725, 733, 761, 769,781, 789, 792, 806, 810, 844, 851, 858, 865, 868: n = A,T,C or G
tnnnntatgtacatagggcgaatagggccctctagatgcatgctcgagcggccgccagngtgatggatatctgcagaattcgcccttagcgtggtcgcggccgaggtacctatgaccatcttacattatttttatgggtggggggcattgactgtggaatgtgggcagtaacttgcacagtcagtaaccgtttgagtaacttcttgttggcatccccattctggcactcctcctctaggtctccacctcacacgctggtttgtgggcggaggggcaggttggtgcgtggggtgtccgggcactggctgtgcatgccttcttcctcttctgtctcttggccaccttttccaaaaagtcaccagtgaccaattctcccagtgtttctttgggactcaatgccttgggcttggcattgggtaaagccaactggccagtttcattctgacgagctctatagtagtccggtgtggacctctgccctccctgctctgcggaagcttcctcagcctttgcttctcactatttactatttgcgggtcctgggggtacctgcccgggcgggcgctcgaaagggcgaattccaacacactggcgggccggtactaatggatccgagctcggtnccaaacttggcgtaatcatggncatagctggttcctgngggnaaatggtattcccttacaatttcccacaacataccancccggaagcataaaagggtaaancctggggngctaatgaagtgagctactcacatttantgcgttgngcttacttgccnttttcaantcngggaaaaccgtcgngccnactggattaatgaatcggcccaccccccgggagnaagcggnttgggtnttgggcnctn

SEQ ID NO: 4275 - DNA, 904 bp, Homo sapiens
  misc_feature 6, 7, 8, 17, 250, 261, 273, 281, 282, 297, 299, 310, 321,329, 333, 336, 351, 362, 370, 378, 395, 398, 407, 410, 413,418, 429, 437, 442, 466, 469, 484, 486, 487, 492, 502, 511,514, 520, 521, 525, 534, 539, 540, 541, 542, 556, 558: n = A,T,C or G
  misc_feature 559, 560, 571, 573, 587, 589, 592, 594, 602, 610, 618, 631,632, 633, 634, 637, 640, 646, 647, 656, 659, 660, 661, 663,665, 671, 673, 674, 679, 681, 684, 688, 694, 702, 703, 705,706, 710, 711, 720, 726, 731, 734, 740, 741, 743, 744: n = A,T,C or G
  misc_feature 754, 759, 763, 764, 773, 777, 781, 782, 788, 794, 801, 806,808, 812, 816, 818, 820, 821, 823, 826, 842, 847, 850, 854,855, 856, 857, 885, 886, 897, 899, 903: n = A,T,C or G
ggtgannntagtatacnactactatagggcgaattgggccctctagatgcatgctcgagcggccgccagtgtgatggatatctgcagaattcgcccttagcgtggtcgcggccgaggtacttcctggcttgttgagcgtgtcctcactgctggccctcttgagcctgctgagtcgggactcaaaagccaaggaagttgaagacttagaactcttcatgccggaagaggctgcaggcataggccgcacccngtctgggccgnggccccctgctntgatggtnngggttccaagggctngnctgcactccgnatgcttgactncgtgggtntgtntgnaaaaactatgctttntactgcttctngggaagcngcccgacntcaatcaacaagtcagncantctattctnccncgngtacnttgcccgggcngtcgcttnaaaanggcgaatttcagcacactggcggnccnttactagctggaacncnnacttngttctataanctttggacnaantttatnnacanacctgtttntctgnnnnaaaattgggttaanannntcacaatttcnanacaaaaatacgaancncgntnggaataantgtgtaantaacttgnggtggcctaaatnnnntanacntaaatnnaacatttanttnnnangncgcttnanntagcncnganttcnagttangaaaaacnntnntcanntccaaattnttatanaaaanganttcaanntnngggaaaaagntggtntggnnaattttagntttntagnntaactngtttanttaaatnaatgncnactnttanananntnaangctaaatttttacatnactcnttncttnnnnggtgaattgatttttgtcaaaaatttanngataatttctntngaang

SEQ ID NO: 4276 - DNA, 867 bp, Homo sapiens
  misc_feature 298, 305, 325, 408, 410, 439, 448, 480, 485, 498, 501, 533,562, 565, 567, 575, 578, 579, 595, 607, 619, 630, 637, 640,665, 666, 673, 692, 693, 703, 710, 715, 721, 726, 734, 735,738, 739, 772, 776, 778, 782, 803, 804, 805, 809, 818: n = A,T,C or G
  misc_feature 830, 836, 843, 844, 845, 850, 855, 858, 860, 861, 866, 867: n = A,T,C or G
gggccctctagatgcatgctcgagcggccgccagtgtgatggatatctgcagaattcgccctttcgagcggccgcccgggcaggtacttttttttttgttttttgttttttgttttttccttaactacgcgtgctttaaaatctcagttaaattcttccttgagcattactttcttagagtggcctttcccactgtgttcatcagaacattagttttgttggctaaatggcactatgtgacataaagccaaatgagattgggaaatttcagtctagattggacacacgtcaccctctncaatccntaggacttcttagagctgtnaacgctaatggacattgtggatctctgggaggggatatggattatacagttttcattaaaccttaatcctggaccaaaggaantntcctttcattttcttttttttggaagctnatattattngggaagagtttagagacaaggctttggggttncttgncatcttatgcttnaancagttaccgggtttaaaaattcccaggccgangcttaatcttaaaccttgcaggtggagcnttngnaaaaatgnttnntgaaaaaaccactaantatttttttcanaaaaaagggttnttaaaaggttngaaagcnttnttaaagcccggttacttttttccanntcctaanttttaaacggggttattanntttacttttntttggcnatttntaaaanctttntatttctnnaanntcagggaaaaaagttttttaattttttttttanaaantngggntttcagttttattttttttannnacantttttttgnaaaatttttccnctttanaaaaggnnngaaangcccnttngnngtggnn

SEQ ID NO: 4277 - DNA, 1021 bp, Homo sapiens
  misc_feature 2, 5, 7, 9, 12, 15, 17, 20, 21, 23, 25, 26, 27, 29, 35, 36,37, 39, 41, 42, 43, 45, 52, 57, 59, 60, 69, 80, 81, 82,83, 85, 86, 88, 90, 108, 219, 362, 372, 386, 401, 423, 451,474, 476, 481, 519, 523, 528, 562, 573, 574, 589, 630: n = A,T,C or G
  misc_feature 631, 639, 643, 652, 655, 665, 687, 696, 715, 734, 752, 758,770, 782, 788, 789, 792, 794, 800, 808, 817, 821, 824, 829,830, 846, 851, 856, 859, 865, 867, 878, 879, 898, 900, 905,906, 908, 909, 914, 921, 922, 934, 936, 942, 950, 958: n = A,T,C or G
  misc_feature 963, 965, 967, 974, 986, 999, 1000, 1002, 1004, 1006, 1011,1012, 1017: n = A,T,C or G
cntcnantntantcnanatnntncnnncnataatnnntnannntnctttagnattgncnngatatttcnaatacctctcnnnntnnananatcaattcattacgcgantgggccctctagagcatgctcgacggccgccagtgtgatggatatctgcagaattcgcccttagcgtggtcgcggccgaggtactcattggaggatcagctcacctgcttngctctcgatgtagcctaactgggtttagagccttcccttgaatgaagaaccctccccagctggaaaggggatgctcttgaaaagctcagctgacaacacacatgggcatcaaagtcattggccacatacatgcctcaagtgtnctaaaacccnaatatgatcaaaanaaaactgctgttcancaagtggagactggcatgcaanattcccctgggcctgcaagcctagttgnaaaaaagatacccaaaatactgntnggaanaatgaaaagggattgaaaaggatggtcatccaaagttngtgnttttncacttggatgggaaaaggacttaaaaccgcaaangcatgtttcanngatccaaaccacaancacccaccaggggattcccttttgatgagaaggtgaacctnnaagaccantganaatgctggntgnatgaattttnaacccaaccagcctttcttttnattttggangaaggccacaaggcccttnccccctccaattgtggatnaactattgatcagtaccntgcccngggccgggccgnttcaaaagggcnaaattnncancncatatngcgggccntttcttaantggnatnccaanntcgggtcccaaacctngggcntatcncanggcacntngtcttttttcnngggtaaaagggttaaccgntnaaatnncnnaaatngttacannccccggaagcantngagtanttaagccntgtggggngcctnantnagggaanctaacctctcanttaattggcgatnngncncnaccannccccntcca

SEQ ID NO: 4278 - DNA, 887 bp, Homo sapiens
  misc_feature 3, 4, 7, 636, 682, 701, 772, 800, 809, 849, 858, 867: n = A,T,C or G
agnntgntacgactcactatagggcgaattgggccctctagatgcatgctcgagcggcccgccagtgtgatggatatctgcagaattcgccctttcgagcggccgcccgggcaggtactccaatctggggccagagcaagaccctatctcagtcaatcaatcaagattttgtgtaaatataatcattattccacaattttaaaaaatcagcttcaaacacagaaatatgaaaatcagaattaggaaggctggtggtcagtcttcacttaaaaataagtttataaagagtccattatctgttagagatatgtattgaagcattttccaataaagtgaatactgggatttgctttaaaatcatctgaggtagggggagcctagaattaactgttaaagctaagtgatgggagttcactaaattattctatttttctgtttgaaatcctccatcatgaaatgtttcattttgtttttaagtaagtttccaaagatctttatcattaatatactctgtagataaaatgacaggctgcccttaagctgtcaaactctggtggctcaaccaggtatgctccacactgagcccaacagtgtagactcactcaatgcaggccccttcacagaaggccacaaaangcccctcagaaaacaatcagagccccagtcagaccaccagccacantgcagggagctggtgcggnctaatctctctcacattaggtatcccgaatgtgaaaatccaaaatccaaatgttccaaaatcaaaaacttnttggcagcagcaacatgataccacaggngggaaactnccacctgctttatgccaacggggcacaattccgcgtcctngggcgggancacccttanggcgaattccacacactggg

SEQ ID NO: 4279 - DNA, 910 bp, Homo sapiens
  misc_feature 569, 615, 627, 672, 690, 699, 757, 759, 783, 806, 823, 843,845, 865, 891, 893, 894, 899, 900, 903, 906, 908, 909: n = A,T,C or G
tatgactactatagggcgaattgggccctctagatgcatgctcgagcggcccgccagtgtgatggatatctgcagaattcgccctttcgagcggccgcccgggcaggtactagcacttgtgaccaacagctagtcttgctttcaacagctagtcttgctttccctgatcgtagatccctactaaaagctcttgaaagtgtgcatatgcaggctacctaatgatttaacggaggatcaagatggttacactgcagagaaacaggagggatagggcatatgccctttgtccagcaaggcagacaaaaactaggaacttgaattctcttctctggattcctgtatctggagccaaggccaaggatcagttcttctagaaagttccctcctgtgtgtgtgtgtgtaaatgtgtgtgaatgcagccataacttccctgccaaaattcattgccaaaaattttgtgatttgaagcaggccttacctgttaatgcaaatttgattctcaaatcctaagagtttccaaaggttgagtgaagtgagatgagactcttaattgaagatccagatgcttncctggtgctatctaaatgctaccaaaacttccagcacaacaaagtntatgaaagagangctctagggtcatgaaatggtaaaagttggaaaaatgggcccttnggggtctttttattctancctcctcantttaaaagaaatgccagtgggaaaatgggatgcctcaaaagttgccttgccttgaaangngaaaaggcttagtggaaaaacccnaacccccggattcctaatctagngccttttcccttccggngggaacaacctttttgtttntncccctttttttgggcctggnccccggaatggggggttggagtccancnnggggnntcnggntnnt

SEQ ID NO: 4280 - DNA, 894 bp, Homo sapiens
  misc_feature 509, 512, 516, 563, 607, 645, 655, 658, 670, 676, 680, 688,692, 693, 695, 698, 706, 728, 730, 734, 738, 745, 758, 774,777, 778, 779, 782, 785, 786, 787, 788, 794, 796, 797, 799,800, 808, 811, 813, 821, 822, 826, 830, 831, 834, 839: n = A,T,C or G
  misc_feature 840, 843, 847, 850, 852, 853, 858, 859, 861, 862, 863, 864,865, 873, 874, 876, 880, 881, 885, 886, 890, 893: n = A,T,C or G
atatactacttagggcgaattgggccctctagatgcatgctcgagcggccgccagtgtgatggatatctgcagaattcgcccttagcgtggtcgcggcccgaggtactaagacctccaggtggtagatgtagatggataccggctataatggtagcagtagcctaagtggagccatcctcaagctcccaggagaagtgcacagatgccaacaatggtggatggcgggagcaatatccagattcctggaaattgtgtttagtcactgaggaacagggggagtgccagaccagatagacccatccttgggtcccctagtggtgcacacatgcacaggctgtggtaggcaagatggtcttatttcgaggttccccaatggaatgcttgggtggcaagtagcaacagctgcagtgaacaaggagaccccacctcagggcacaggcaagtgcactatggccttgctgctggggaaacagggttgctaccagtggcagcagccacaggcaagcancantcangctctggggagggcatgcttcacccccaataatggtagcctttgatngtggcaatggtagcttcaaggaaaaccggccttaatgtgccttncagtgtggcacattccttcttgttgggggtaaaagggnttcttgccanttntcccaccttttnccccancaanaacaatgntaannanttntaaggttnaaaaactttttcttaaaacatntnccanggcncttgaanctttttttgtggngaggactgggttcctnttnnnggnaannnnccccangnnannggattttnggntnttaaaaanncatntttnnccnaaggnnaantttnccnanncattnnannnnncctttttnnangaannaatnnattnttng

SEQ ID NO: 4281 - DNA, 886 bp, Homo sapiens
  misc_feature 670, 766, 777, 787, 790, 795, 816, 830, 844, 862, 872, 877,878: n = A,T,C or G
atatgactactatagggcgaattgggccctctagatgcatgctcgagcggcccgccagtgtgatggatatctgcagaattcgccctttcgagcggcccgcccgggcaggtactttttttttttttttttttttaagaaacacggtctcactctttcacccgggttagagtgcagtagtgtgattgagctcactgcagcctcgaactcctgggctcaggtgatcctcccatatcagcctcctgagtagttgggactacaggcatgtgccaccatgctcagctaatttaaaaaaaaaaattgtagacatgcagtctcgctatattgcccaggctgatactatactcctggcttcaaacaatcttcctatcgcagcctcacaaagtgttggcattacaggtgtgagccactgcacctggccagtttttttacaattataaaaataatctatgttcattttctacaataaacattgtagaaaatgaaaaatagagaaaaaagctgtcccataaagcttttttaaaatcactgattgagtttaatattttattactgcatatattgcttcatttctcatgataataaatgagatcacttgcttgttatgaaaacagaagtgcaagtaggatttaacagtcttctgaagacccattttagacagatccaaatgtgnaaaaattcccacatttaaatttttatcatgtccccaaaaagaaagtaaatctattttgatctaagaccccatatgagcctttacttgaaacttggncttcctggcanaaatcaagtnagnggccngtttttttgggctggaccacncaaacatgattggntttggtcacgtggnccctgaaaacccaaacanccggaacaanccaanntttggttt

SEQ ID NO: 4282 - DNA, 882 bp, Homo sapiens
  misc_feature 4, 5, 8, 13, 30, 655, 724, 749, 760, 763, 779, 807, 873,876, 879, 880: n = A,T,C or G
tagnntantacgnctcacttagggcgaatnggccctctagatgcatgctcgagcggcccgccagtgtgatggatatctgcagaattcgcccttagcgtggtcgcggccgaggtactagtgggtgttattttgttgaatgaatgttttacccaaacttatatgcatattagattgtttaaaagctcaattaaaaagtgaaaaatagacactgaaaattttttgagtgatttcacatgtgttcatgaaacaatatatctattacaaatcattgaatattttaaaagtaatgtcatgtattcattttcttattttatctcctcagtagactgagatcagtgtgtaggggtgaagcaaggagtcctaccctgtttgactaaggtaaaaattaagaatcagtgagaaatggaatttgcaaaagtgcctgccagataatgttagaactggaccagaaaataggagttggtataaaactagaccagcgagcttttttttccttcaagatgcagttcagtttattgcttttgtaaattagagattgtgtttcttgatctttattaaagtagaatacaatgttaacctacttcaaattttaaaaaatatcacacatgtatatgtatgtgtgtgtggtatatacacacaggattttaaggacagntttttgtgtgtgtgtgcatgcgcacccatgccaaaggaaattggtaatcttctaatacctgccccggcnggcggtcgaagggcgaaattccaanacactggcggncgntactagtggatccganctcggtccaagcttggcgtaatcatggncatactgtttccggggtgaaattgttttccctcacaattccaaccacatccaaccggaagctaaangtnaanncc

SEQ ID NO: 4283 - DNA, 916 bp, Homo sapiens
  misc_feature 2, 3, 4, 18, 20, 40, 399, 437, 445, 622, 641, 681, 696, 703,747, 781, 784, 785, 788, 796, 801, 802, 806, 810, 811, 814,818, 823, 843, 848, 854, 858, 867, 873, 874, 878, 879, 881,882, 883, 892, 894, 895, 898, 900, 902, 903, 904: n = A,T,C or G
  misc_feature 907, 908, 909, 911, 912: n = A,T,C or G
tnnnatagctactaaagncntatggggcgaataggccctntagatgcatgctcgagcggccgccagtgtgatggatatctgcagaattcgccctttcgagcggccgcccgggcaggtaccacaatcacaaatgcagcactgtttactgacaggaccattactctgtcaaaatcagcacatcaaaaatattatcctggaatctaaaatagtagtcaactgggttgttaaagcaagggattgctatagatctacaggacaaagttccatagtgaaacacaaactcctgggttagtcctaggccaggcaggtgaccataaatgttcacattctggtagaatcccattttctaaaaattatacaaacacatcgaaatcactagattttatatatatatatacncacacacacacacacttatgtgtatatatacatatacntattttgngtgtgtgtgttgggtttccagcagctaatagcagctaacatttattgagcacttaccacatgccaggaactgtgctaagtacctcgggccgcgaacacgctaagggcgaattccaacacactgggcggccgttcttagtggatccgagctcggtacccaagcttggcgtaaatcatnggcaatactggtttcctgngtgaaaattggttattcccctcacaatttcacacaacatnccgaacccggaagcnttaaagngttaaagcccgggggtggcctaattgagtggacctaacttacanttaattggggtggggcttactggccccttttccngtnnggnaaaacttntcctnnccanttgnnttnattnaattnggccaacccccccggggaanaggcnggtttngttnttgggcggnttttcnntttnntnnnttaattgantnnttngncnnnggnnntnnggtg

SEQ ID NO: 4284 - DNA, 906 bp, Homo sapiens
  misc_feature 3, 668, 682, 720, 733, 768, 826, 829, 842, 845, 850, 857,898, 905: n = A,T,C or G
aangctccttgggcgaattggccctctagatgctgctcgagcggccgccagtgtgatggatatctgcagaattcgcccttagcgtggtcgcggccgaggtacataacttataaatctcaactaaatacatagcttactgtaggaatatgttgccaattgacaagaaaaatagtaaatatgaataagctaagaattagaaaagaaaaaattttaattatcaaacaattaccttaccaaatggctcagatgagtccaaacagtgagctcttccaacttttccattattcctaagccatatcaatttcagaatattaaaaatgatgaaatgctatccagttaaccttataaagaagagctctgatagcaaagtccaacaaagggaaaaaaaaatacactacacagatatttcacccatgagtatatatttaaaattaaaaataaaatatggcctaacagaattcaacataatatttaacaataatacactatgaacaagtaatccaagaaatgcaaagatatttcaatattaacattctaaacacgtagtatcaacagggtaaatatgaacaagacttcatccatgccttggttgcaggaaagctaggagataaattggtgaccccatttcaagcaacagcatacatggactgaattcttcatattaatcntaccttggctttantatgctattactcatggtatggttttccccccatttcnttacctttttggnttaaccctttctggaatatggggtttcataaaccngctaccacgctggggcaaataaaatattccggatggcccttaaaaattattttcccgnccngggcggcggttcnaanggggnatttccnccccctgggggccgttctaatggttccgacccgggcccaanttggggnt

SEQ ID NO: 4285 - DNA, 929 bp, Homo sapiens
  misc_feature 3, 7, 551, 609, 682, 708, 734, 742, 763, 769, 802, 803, 804,811, 822, 830, 839, 849, 856, 883, 885, 886, 893, 898, 903,911, 920: n = A,T,C or G
agnggantgtatacgactactatagggcgaattgggccctctagatgcatgctcgagcggcccgccagtgtgatggatatctgcagaattcgccctttcgagcggccgcccgggcaggtacctgagggtcaccagatgcagcagctcacggctgatgaagatccctctgaggaagtctgtattctctatggccttccacaagtccgagctcaggaggactccagggcttgtctgaaccttctggaaaacatgctggtagtgaacaaggcgcttccacagtcgcgcaaactcctcttggtctagccgcccatccactttcagttccatcagagccaccaagctgcggcactcatctaaggagaacatgtcccctggaggtcctgttagaagctcctggttgagaaggccctgaagctgggtggcatcaatgtccagcctctgctgagcatatctgttgaaaatgctttgttgggagccatgttctgaagggcttccttcattctgaggttgaaatggctgctcaagtgcctgtcactgtctggcattttcangaagattcggagcaaagacttccgtgattttcttcgtgtctgtgcaaccacaacatantttccaaggcttaaaatggtaagtcatggtgaaattgccgcggaatttaatatttgagctttggacatggttntgaacgaggaaaaaaacaccggtggnaaattcttcccggaaccgttgtgaanccacccanaattaacttggaaatcgagtnggaaantttgcattcttttggttttaaaatttgaatggnnnggacaanaactggggacncacaccanaacattggnggcctttcantgggctnttgccccaaaaaagttgaattgggccntnntttccanggccntccgnaagggttnctaaaaaanacttgcttc

SEQ ID NO: 4286 - DNA, 897 bp, Homo sapiens
  misc_feature 3, 452, 568, 591, 609, 640, 656, 679, 707, 710, 713, 727,760, 775, 805, 809, 822, 849, 854, 883: n = A,T,C or G
tancactcactatagggcgaattgggccctctagatgcatgctcgagcggccgccagtgtgatggatatctgcagaattcgccctttcgagcggccgcccgggcaggtacgcgggatgaggaaagggatgcctggagactggaagaaccactttactgtggctatgaatgagaactttgataagcattatgaaaagaagatggcagggtccacactgaacttctgcctggagatctgagaggaacaacaacaaactaggtgacagagactatgccaactatttcgccttttattctgttgagcaaggaactgtgactgaatgtggagcttatgagcttcagtccatctcctatagtgtggctagtttgctataatattaaaacatgatttaaaatatcaacaaaccagttactccagcaaataaaataagagaattagagaggaaaaaaaanaaaaaaaaaaaaaaaaaaagtacctcggccgcgaccacgctaagggcgaattccagcacactggcggccgttactagtggatccgagctcggtaccaagcttggcgtaatcatggncatagctggttcctgtgtgaaantggtatccgctccaattnccacaacatacgagccggaacataaagtgtnaaacctggggtgcctnatgagtgagctactcacattaantgcgttgggcttactggccccttttcantcnggnaacctgtcgtgccnacttgattaatgaatcggccaccccccgggaanagcggtttgcttttnggcgcttttccgttcttggttaatgactcnttgnctcggcgttcggntgggggaacggtttaacttacttaaanggggnatccggtttcccaaattaggggtaccccnggaaaaaattgact

SEQ ID NO: 4287 - DNA, 646 bp, Homo sapiens
  misc_feature 416, 448, 498, 518, 526, 550, 551, 565, 572, 581, 610, 631,639, 644, 645: n = A,T,C or G
gattgaatacgactcctatagggcgaattgggccctctagatgcatgctcgagcggccgccagtgtgatggatatctgcagaattcgccctttcgagcggccgcccgggcaggtacaaaaattagctgggcatagtggcacatgcctgtagtcccagctactcgggaggctgatgaacaagaatcacttgaacctgggaggaggaggttgcagtgagctgagatcgtgccactgcactccagcctgagccgacagagcaagactgtctcaaaaaaataaaaaagaaaaaaataataaaaaggaaaacaaagcctttagaaaaacaaagcctttgaaaaaggatgtaaaattgaatatatagatacaattatttttaaaaagttttatagaaaaatatcctggattgttgatgttgntttaatatattttaatcatttttgtataatgnccgtgtataattatgttataatgaaagtaaaaaaaaaaaggtcttagcanaagcaggcagaaaaatgccnaaactcantgccttttagttattttgatatgnngggaagatcatgcntaagggntccttttanctcattgcttgagctaggaaaggttaatncccctgaaggtcacctttggnaaagggtnccctnng

SEQ ID NO: 4288 - DNA, 640 bp, Homo sapiens
  misc_feature 147, 149, 278, 303, 454, 474, 504, 508, 511, 532, 549, 608,625: n = A,T,C or G
gattgtatacgactcactatagggcgaattgggccctctagatgcatgctcgagcggccgccagtgtgatggatatctgcagaattcgcccttagcgtggtcgcggccgaggtactttttttttttttttttttttttttttattananatggggtttcaccatattggccaggctggtctcaaactcctgacctcaagtgatccactcgcctcggcctcccaaagtgctgggattacaggcgtgactcactgtgcccggccagcaaacaagttttanatttaactttatttgaatgcaatanaaaaaaaattaggcattaaattgaaggggctgctgaacttcaaataaatgtttcttcattggttcctaaaagggataaataagccagttattctcaaactcaagtatgtgccaaaatcccctggaggacttgttaaatcacagattgcttnggccccacccccagggtttntgattcaggaggtcttggggtggggccaanaatntgnattttcaacaagttctcaagngatgcttgatgttgctngtctggggaccacactttgagaaccacttgtattaagggcaaggaaaaaaaagaattgngggaaaaacttaagggntggtcactaaccgtt

SEQ ID NO: 4289 - DNA, 659 bp, Homo sapiens
  misc_feature 42, 484, 538, 607, 625, 629: n = A,T,C or G
gattgaatacgactcactatagggcgaattgggccctctagntgcatgctcgagcggccgccagtgtgatggatatctgcagaattcgccctttcgagcggccgcccgggcctcccaagtagctgggaccacaggcacatgccaggatgcctggctaatttttgttattttttgtggagacagagtcttactatgttgcccacgctggtctcgaactcctgagctcaagcgatctactcaccttggcctcccaaagtgctgggattacaggcatgtgccaccatgccccgccactttttttgttaatgttttagacatatcccatgtatatataaatatagatcattgtcattaataataatgacggtttaatactatgtgatgtgttgcaatttattaaattccctattttttgaaatttaagttgtatatctggttaactcttgccataatattgcttgcgtaacaactacaaaaataaggnaagatagaaataagcacttccttcttgctcgtgagtttttcaaccgtggctgangggggattgggtacctcggcccgcgaccaccgctaaggggcgaattccagcacactgggcggccgtacnagtggatccgagctcggnaccnaagcttgggcgtaatcatgggtaataggct

SEQ ID NO: 4290 - DNA, 881 bp, Homo sapiens
  misc_feature 1, 4, 5, 9, 11, 14, 16, 19, 21, 523, 536, 653, 698, 707,718, 740, 763, 771, 796, 799, 808, 825, 845, 848, 851, 862,867, 879, 880, 881: n = A,T,C or G
nagnnttangnctnangantnactatagggcgaattgggccctctagatgcatgctcgagcggcccgccagtgtgatggatatctgcagaattcgcccttagcgtggtcgcggcccgaggcactaacactttccacactctgtctcactgcccccctcccaggaagtaagacctgtatcatccttatttgttgggcggggaaattgaggctcagaggttgagtgactttttttggggtctcagctggtcactcgggagctgggttggagcccagttgtgcctgagtccactgaataaaagcattattgggaactggcttcattaacaatgagccccagtggaaacgtagtatggaatggaaatggaaatggaaatgcagtggaaatgtagagtggatatggtgtaaagacacctggaaagcttaaggagtgggagctagagagacagagagagagaccgggagacagagagagagagagagagaaatccccaatttcctgggtaacagacacacacccttctntaccctggctcanggctggccatggctgtccgtggcttgctttctggccagcagaaaggaataaccttgtcacccgggagcaacggtgggtgatggcactccatgaagaaacctttgccctctggctggnaataaaataaagaaagcttcaagtaaggtgcacagaacagaagtnagaatagcngcaaggttttntgaaaaaaggcaaaaaaggttntcctcggctgtgggaagatggantcctggcncttgctaactgcccgggccggccgntcnaaaagggcnaattcaacacactggcnggccgtactagtggaaccanctnggnccaaacttggngtaanaatgggtattannn

SEQ ID NO: 4291 - DNA, 883 bp, Homo sapiens
  misc_feature 608, 647, 651, 678, 683, 686, 695, 696, 698, 708, 718, 722,726, 738, 741, 743, 744, 751, 759, 760, 777, 778, 790, 794,797, 799, 801, 802, 805, 807, 810, 817, 819, 824, 826, 827,830, 832, 835, 837, 840, 841, 842, 848, 851, 852, 853: n = A,T,C or G
  misc_feature 855, 858, 863, 864, 869, 870, 874, 876, 880, 881: n = A,T,C or G
tgtgtatacgactactatagggcgaattgggccctctagatgcatgctcgagcggccgccagtgtgatggatatctgcagaattcgccctttcgagcggcccgcccgggcaggtaccataatttattcaaccattctcctatgataaacaagcactttttttccactctattgccacatagactatgctgcaatagacatctttgcacacatatccttatatgctgatgcttttatttgtatggaaagattccagaaatgtgagttctgctttcagcagtatgtgtttttaatagatgttgccaaattgctttcccaataggctatagcaattcatatttctatcagcaactgttatttttgttctttctgatttttgacagttcaatgggatgtaaagcaatctctcattattacttttaaaaagtcatcaagtgttattatcccaattttgcagataactgaggctcagaaagtttgaatagctggatcagtttcccaaaagctagaaccagaatttggaagccaaatctgtctgaacccaaagcccatgcattttctatccaccatgctgcctcccgtatcatgaatttggagcagaggactttntttgcctgagtgggtaggatgcaggtgtgtctagagaangcanagggtgtcatgggaaccctgcaacctntgcanggngagcagggnntnggaccacggnaccagggganggcngttnggagctagctgnttngnncaacctnatgacctnnccctaacctaggaactnnatgaattgagtncttnggncngnnacncnctnagggcgnanttcanannctngnggncngtnnnagtganccnnntnggnccaannttggnntatnangggnnaa

SEQ ID NO: 4292 - DNA, 884 bp, Homo sapiens
  misc_feature 19, 395, 463, 545, 557, 586, 591, 605, 621, 626, 629, 652,668, 681, 689, 702, 710, 712, 715, 722, 723, 726, 727, 728,729, 730, 736, 739, 751, 755, 760, 761, 767, 775, 776, 782,783, 785, 789, 790, 795, 814, 816, 819, 821, 824, 831: n = A,T,C or G
  misc_feature 833, 835, 838, 842, 851, 856, 861, 863, 864, 865, 867, 873,876, 877, 878, 883: n = A,T,C or G
actcactatagggcgaatnggccctctagatgcatgctcgagcggccgccagtgtgatggatatctgcagaattcgccctttcgagcggccgcccgggcaggtaccataatttattcaaccattctcctatgataaacaagcactttttttccactctattgccacatagactatgctgcaatagacatctttgcacacatatccttatatgctgatgcttttatttgtatggaaagattccagaaatgtgagttctgctttcagcagtatgtgtttttaatagatgttgccaaattgctttcccaataggctatagcaattcatatttctatcagcaactggtatttttgttctttctgatttttgacagttcaatggatgtaaaagcaatctntcattattactttttaaaaagtcatcagtgttatttatcccaatttttgcagataactgaggctcaanaaagtttgaatagctggatcagttttcccaaaagctagaaccaggaatttggaagccaaatctgtctgaacccaaagcccangcattttctatncaccatgctgcctcccgtatcatggaatntgggncaagaggacctttntttgcctgagtggggnaggangcnaggtgtttctagaagaaggcaangggtgtcaatgggaanccctgccaacttntgcaaggngagcagggatttnggaaccancnggnacagggnnggnnnnntggganctnggtttttttggncccncttannaccttngcccttanntgggannanatgnnaatgnggtccttggcccgggaccncnctnanggnggatttnancnccntggngggcggtanctaangggancnnncncggaancannnttggng

SEQ ID NO: 4293 - DNA, 881 bp, Homo sapiens
  misc_feature 616, 629, 659, 682, 715, 786, 831, 832, 834, 846, 848, 856,861, 874, 876: n = A,T,C or G
gtaatacgactcactatagggcgaattgggccctctagatgcatgctcgagcggcccgccagtgtgatggatatctgcagaattcgccctttcgagcggccgcccgggcaggtacatgaatggtcaaacaccagtctagagcatcttattgtcaacagcaaaataatattttgcccaccctgtttgtgacattgagttgtgacttctatattcaatagatttttgtaaatgttaaaacatctatatttaaatgttaaaacactaaatatagagaggggctttatttcaatcatagagcaacaacaaaaataatgcttatagctaaactgcctgttctagaaagcatctgctttttcatgttattcctaaatcctcttgtcatacttttgtcattgaacaatgctctccctctcgtcttccatcctcattcagaatttttagaagaccacaatcgtggagatacactacccagtattgtttgatacatttttatttgataaacattcagtgcaggaaactgtgatttgctatatgtttatgtatataatcttattctgtagtcatcagaatgttaatgtaaggtacctcggccgcgaccacgctaaggggcgaattncagcacactggcngccgttactaggtggaatcccgagctcggnaccaaacttggcgtaatcatggncatagctggttctggtggtgaaatgttatccgntcacaatttcccacaacataccagcccggaagcataaagtggtaaaagcctggggtgcctaatggagtgancttactcacattaattgcggtggcgctcacttggccgcttttcanncngggaaactggcngnccacttgnttaangaattggccaccncncgggg

SEQ ID NO: 4294 - DNA, 878 bp, Homo sapiens
  misc_feature 610, 708, 713, 739, 802, 824, 828, 843, 866, 867, 877: n = A,T,C or G
gaatgtaatacgactcactatagggcgaattgggccctctagatgcatgctcgagcggcccgccagtgtgatgggatatctgcagaattcgccctttcgagcggcccgcccgggcaggtacacatacgcatttcttcctcccttcatgtaagtctcccatatgaagtttgccataaagtcctgtaagttcaccccaaagcttcattcaattgtttttaatccattatcaagggatgaaaatgtcaccactctaattcaggcccttgtaatctctgtgatataccatagaagattctttctatttttcagggttttaatcttcaagttaacttccatagtgtcaccgtatgtatcttagcaatcagaagcgtcctcataaacgggagatgaaacgtcagagtcacattaggaatcctgaggctggaaacagaggttcgagtgatgggaggaagccactaggaggcagggaatgcaggctccctagaaggagaaaaggcaaggaagcaaattttaccatcaagagccccagaagaaaccagccctgtccacacccatatccccaagatttaactttatttcataagatcagttttaggttactgaccctcanaactataaaaaattaaatttctggtggtttaaactgcaaagcttgtatttatttggtaaagaagcaatagaaaagtaatccggaccttgggccgcgancaccnctaagggcgaattcaacacactggcnggcgttactagtggatcccagctcggtccaacttggcgtaatcatggcatagctggtttctgngtggaaaatggtatcccttacnattncccacaacatacaanccggaagcattaaagtaaagccnngggtgcctang

SEQ ID NO: 4295 - DNA, 907 bp, Homo sapiens
  misc_feature 1, 4, 6, 7, 447, 507, 513, 547, 560, 585, 589, 604, 605,607, 608, 645, 649, 670, 681, 692, 705, 738, 758, 762, 768,776, 777, 781, 783, 785, 790, 794, 797, 805, 808, 810, 817,819, 821, 825, 839, 844, 848, 849, 851, 854, 856, 868: n = A,T,C or G
  misc_feature 869, 880, 890, 891, 895, 902, 903: n = A,T,C or G
ntgngnngattgtatcgactcctatagggcgaattgggccctctagatgcatgctcgagcggcccgccagtgtgatggatatctgcagaattcgcccttagcggccgcccgggcaggtacaaaagtttgtttttgggcaaaaatggtgaaagtaagtctaatactttatatacaaaactgattaaactgaatcttaaaggttcctgatttaagtgatttgactaagatcaactctatttttttaggcagtatagtctattagaacttaaataaatggatataatagtatatttcaaaagaaatatttttactatgctacatataactaactctttttaaaaagtggaaatggtttatttcacattttgaagaatatagtctaagagattttcacatattggttgacagcacaaactttggagtgagatagtcgtaggttcaaattgnggctctactgcaagctgctacgtgaccctaggcaaatcatttaactctctagttttcaanttctgnatggtgtgaaacagtgggttcactgttggaaggngaaactggtgtanggtggtaggcaaaaacaaaaacttnatanccactggtttattannannaattatggggaattacctattttccccattcattcanaaantaattttttatcctgaaaaanaaagaccgtanccttgggccgngacccccccttanggccgaaattcaacaccacttggcggcccgttnctaaggggaatcccagcctnggtncccaanctttgggnnaaancnangggcnatanccngtttcccnggngngaaaatngntntccnctcacaattccccncaacnttcnnanccngnagcttaaatggnnaagcctggggnggccttatgnngggnctactcnnttat

SEQ ID NO: 4296 - DNA, 903 bp, Homo sapiens
  misc_feature 8, 12, 531, 552, 681, 733, 738, 751, 793, 800, 839, 842,857, 874, 876, 880, 901, 902: n = A,T,C or G
tttttctntttnggagtcgccccgcgtccgccccatccagaagctgcttcccttcagacctacctacggcatgacccctcaaagtcagatatgggacaagagcctccttgaacaaactctggtatccctgcagcaagcaaggatacattgcagaggtgcccggagtggagtcagatgggctagctcagccacccctgcatctcccaaaccctgggagacatgtggcccatgggagtaaatccaggacattgactcaactctcagaagtgttattcagtcaaggaggctctcccttcactgaaggaaggaaagtcagctctctcctgaaaggccagatcactggctgagtagatgagacaagggtatgaaaggcctttgccatcttctttgcccagtcctgaaagcactgacgtaagagaccagtcaagttctaatgtaaggtgtatattttaagtgtcagggtattgcaattgtcacccctgtggtcaatatcattaaacaggtatgagaaattcgcttggcatagacttnctggtctgcttaataagaatncaactaaggatgtcacatgacaagtttcccagaaaatgtgaacaagtgtccatcttgacacaccgcaccaatgacaaaccaaagaaagttattctggctgagtcttaagttgctgaactaataaattanctgcggttctttgcaaaaaaaaaaaaaaaaaaaaaaaaagggcgggcccttnactantctaaaaaaaaanctccacacctcccctgacctgaacataaaatgaatgcaatgntgtggtnacttgttattgagctttaaatggttccaataaacaatanctncaaattccaaataancatttttactgatttantngggntggccaaccctcatgtttttnnt

SEQ ID NO: 4297 - DNA, 872 bp, Homo sapiens
  misc_feature 612, 663, 671, 705, 721, 731, 738, 747, 753, 760, 767, 778,792, 799, 812, 814, 841, 851, 861: n = A,T,C or G
gactcctatagggcgaattgggccctctagatgcatgctcgagccggcccgccagtgtgatggatatctgcagaattcgcccttagcgtggtcgcggccgaggtacgcgggtaatcaaaatataaaggctggagagaaacatgaaaaagaaaatgaagaattcacagggcaactaaaagtggctaaagatgttgaaaaactcatcggacaagtggaaatctgggaggcagaagccaaatctgttttggatcaagatgatgtggacacctcaatggaagaatctttgaagcatcttattgccaaaggctctatgtttgatgagcttatggcaagaagtgaagatatgttacaaatggatatacaaaatatttcaagccaggagtcctttcaacatgttctcacaactgggcttcaggcaaagattcaagaagctaaagagaaagtccaggtcaatgtggtaaaactcattgcagcgttgaagaacttaactgaccgtttcaccagatttggacatcaggctgaagatggaagaatccccaaagggaccttgaatcatatatgatgagggctcagcagttactgggggcaaagagagagccccggtggactcantttcaaacaccagggaagcccctaataatttctaatacaaaaggctggccnagtatttnaaaagctgttgaagaacttaaaaataatggtacntgaggacataaaaatntctttagaanaaaagangttgagatntctgtnccaaatngggagtnttttcattatngaactggctttatntttccancaccttaaaaatngntttggaaaaaggaaaccttagtggcanattttaaaanttgaaaggcnaaaaaaaaaat

SEQ ID NO: 4298 - DNA, 896 bp, Homo sapiens
  misc_feature 432, 529, 545, 554, 572, 576, 577, 580, 607, 621, 622, 672,675, 682, 684, 688, 700, 709, 710, 714, 719, 721, 722, 725,727, 737, 747, 750, 753, 755, 756, 770, 777, 780, 798, 802,812, 816, 818, 821, 830, 838, 840, 845, 850, 852, 860: n = A,T,C or G
  misc_feature 866, 870, 882, 886, 890, 896: n = A,T,C or G
tacgactcactatagggcgaattgggccctctagatgcatgctcgagcggcccgccagtgtgatggatatctgcagaattcgcccttagcgtggtcgcggccgaggtacctagcttttattcattttattattcatctttattgctttcattgcacatgctgttaacttcttatgaactctttgttctaataaataagcatatccaggtttttcataaataaatgaggagtctataaattcttactagttttaatagaaacattgccactaaaatggtgtattctagctgtgtgagcttttggaaaatgttttcatttcctttatgtttgaatgttccttccaggtctttgaaaatatacattctgagttgaaaagctttataataggtaaaactcattaacccatatactttccatgctgggcacaagcangtgtggtaggtagaaaatataaagatgactccccaagatttttgcaccctggcatacaccatatgcttttccagtttgttgaaacactaattttaanggtgctgcttgtgaangggaatttntgtagatgtgaataaatngtannaanatcagtttgggccttaagaatagaaangatgaaccttgganngggccagaatcttatccagttgagtccttaaaagggaacagcaccccttnctngcaaagnanattnaaagccatgaanggaataaannttgngaganannttntntatttggcangctcttgaanaanaananngacacgatggtaangacgtgnaangtgccttttagttgctanaaancacgtccctngtanangcnaccatgganataatgcntncaggngaagnanttggcccnatttgnatcnttggaaaggaantttngagncacatn

SEQ ID NO: 4299 - DNA, 893 bp, Homo sapiens
  misc_feature 700, 789, 798, 802, 806, 815, 828, 842, 851, 865, 891: n = A,T,C or G
cgactcactatagggcgaattgggccctctagatgcatgctcgagcggcccgccagtgtgatggatatctgcagaattcgcccttagcgtggtcgcggccgaggacagtatattatttacactgaaggggcttgtgtgtggacaagaaagcgctgacagctcaaatggatcccatggaactgagaaatgtcaacatcgaaccagatgatgagagcagcagtggagaaagtgctccagatagctacatcgggataggaaattcagaaaaggcagcaatgagcagtcaatttgctaatgaagacactgaaagtcagaaattcctgacaaatggatttttggggaaaaagaagctggcagattatgctgatgaacaccatcccggaaccacttcctttggaatgtcttcatttaacctgagtaatgccatcatgggcagtgggatcctgggcttgtcctatgccatggccaacacagggatcatactttttgtaatcatgctgcttgctgtggcaatattatcactgtattcaagttcaccttttattaaaaacagccaaggaaggaggggcttttgatttaatgaaaaattaggaaaaaagggcattttggatgggccgggaaaaaattggagctttttggtttccattacaatggcagaaacatttggagccaaatgtcaagcttccctcttttatcattnaaatatggaacctacctggaagtattcagagcatttcattgggaccttggaaaaaaaatacttggaaaaaggtaccttgcccgggcggncgttgaaanggcnaaanttccacccnctggcggccgttnttagtggatcccancctccgganccaagcttggcgtnaaaaattgggccatagtgtttccttngg

SEQ ID NO: 4300 - DNA, 898 bp, Homo sapiens
  misc_feature 437, 486, 513, 573, 604, 641, 644, 666, 674, 682, 693, 714,728, 730, 740, 742, 749, 753, 761, 786, 792, 794, 810, 811,829, 836, 837, 850, 870, 883, 889, 894, 897: n = A,T,C or G
gactcctatagggcgaattgggccctctagatgcatgctcgagcggcccgccagtgtgatggatatctgcagaattcgcccttagcgtggtcgcggccgaggtacatatacttaatataagtggtgtatgctcaaaaaattttcactgttagagcacaggatcattacagtttagtcagcactgtcctaacgtaaacctaaataataccatgctctgatgagtggtattgtggcaggtcatgaggtgttgtgggaacacaaatctggccaagtttgccagaaaatgagaggcatttcatgaaaagcagatgatatagtcaaggtgatcttttttatcattgaacatttgtcagctaatcataaacttttatttattgtgattattaaataagtttggtaatgattattgagagtaaagttcaatttctggtgtgcangattgctttccctgacatgaatacattgtatcatttgttatgaatgtanccatcccgttagggggaggattttatnacagactttgacatagacttccacttaacatgattactcagtagcctccttaaacatcangactaaaaggaataaccttacaatcttagantacctttttgaaatccaataacccatttggttggttnaanaaccaccctttaaaaatttttnaatctttngttccagntaatggcttgnagtaataaaaaaatgtgcccnaacctttgttttgncnttttaaaagncnatttttntctnaaaaaagnaccggtttatgttttaactggcatntttaantnaagcttggtaaaaaanngaaaagggcttaagggtnaactttnntaaaccccacatnggcagggccccttgttgtantaatgggcttttnccacgnggggngang

SEQ ID NO: 4301 - DNA, 895 bp, Homo sapiens
  misc_feature 406, 565, 573, 638, 643, 691, 700, 733, 738, 783, 793, 800,822, 823, 825, 827, 833, 836, 837, 851, 852, 854, 856, 859,863, 869, 875, 877, 878, 886, 889, 890: n = A,T,C or G
gggatcactcctatagggcgaattggccctctagatgcatgctcgagcggccgcagtgtgatggatatctgcagaattcgcccttagcgtggtcgcggcccgaggtacttgttactcttacagatgtctcaattaattttaacctctatccctaatggtgtttaaattttggtaaagaaaaattcattttttctttattttccaagaaatggtaagctatctttgtccctatgggagatgtggacagagaaaactttctgtctctgatgtcttttgtgtgagacaagattttaggaaataaataagtggtgcagggaattgtgagattacatttcacctccttttctgtctcctctctcttttatataatctttatctctgcttctaacaatctccttatcagaantttctaacatatgtaatggatgagagagagaaaaactgccaccacaggatcaaatttcatttctaatctggagaaacaggagtctagttttcaaacattttattctaaaaaaagaaaaggttaagctattaaaagggtaagtatattcttcaaaaagtnaaattatntctcagggctcctattaaaaaaatctgtaaggggtaattcaggtttgtgggcaagaaaaaatggntgtanctggcccgggcgggccgcttgaaagggcgaatcccacccactggcggncggtactangggggatccgagccccggacccaagcttggcgntaaancatgggcataacttgtttcccgtggggaaaattgttttccgttcncaaattcccnacaaccntaccgagccgggaagccattanngngntaaaanccnnggggggcctaatgnngngnccnactncacatnaaattngnntggccccnctnncccct

SEQ ID NO: 4302 - DNA, 858 bp, Homo sapiens
  misc_feature 607, 626, 656, 700, 712, 718, 722, 723, 758, 762, 771, 777,784, 785, 788, 804, 812, 824, 829, 840, 857: n = A,T,C or G
cgaattggccctctagatgcatgctcgagcggccgccagtgtgatgggatatctgcagaattcgccctttcgagcggcccgcccgggcaggtacgcatagctatgctatgtgacctaaatgccaagttttcattttgttttatattaatattagggcttctcatatttcatctctgtttatgtttacataaattacattatatcaaatccagatttgaagcatctcggaatacttgagtagttcttgctaatattttcatagttcaacttttatttttaatgttagtctgggaaataatgtttgtgtgtataaatttaattcaatcacattactatgctcctacattatgttttcatcatttgcacaacaaagtttgctgtttatctaatatatatacatatgttttatgtccatctagaaatatgtattttcctgttttataacagccaaataatgctaggtatatatattaaacacaaaagcctgcaagaaaactttttcctttataatattcatatttacgtgttaagggggcataaattatttttaacttatatggttaaatgattaaaagttctataaatcacaaaatagctgagtgaaacngaaaaattaagagctgggncaatctattttccactggtaaggaagaagntggagggagaaaaagttaattttacattgacgctgcataatttncctttagctgcngttcantcanngaccaaaacacattgggttgggaaaatccctttgncaanaggaccctnggccgngaacacnntangggcgaaatttcaagncacctggnggccgtacttgnggganccagcccgganccagccttgggggaatnt

SEQ ID NO: 4303 - DNA, 892 bp, Homo sapiens
  misc_feature 599, 672, 673, 686, 725, 734, 751, 761, 767, 770, 771, 772,802, 824, 828, 837, 843, 860, 874, 879, 890: n = A,T,C or G
gactcactatagggcgaaattgggccctctagatgcatgctcgagcggccgccagtgtgatggatatctgcagaattcgcccttagcgtggtcgcggccgaggtaccgatactcaagacaccttttttagttttgatttagaaggactttaggaattagttcattcccttcattcactaagcatgaatacctaccattttcagccctgtatgcatgagcagtgcaaaataaatatatttcctgccttcaaatcactcactgtttggagatattagaatctcctagcttaatctgttggatttttcatagttttatgatttttagattattttcctgcttgtttcttgatctgtattgaccccttaaaagatcaccatactgttgtttttttgagttttaagtagaacatttctttcatagtgggaaaaatggttggtttcaaatataaatcttttgtgggttaaatattacttagtgggaacccttaagcaaagggtcaaaaagtcactatattggttgcctgagggggcctgttcccaagagacaggaatacccatattgaggccctaccgtgtcaaagtttacagctcttgattcantccttcttacaagcatggaaataaatggctaagaaggtgaatatgccctaaaaaaattgggattttagaggtnnggaatggccaatngaaggtggctaaaaaaacccatttttcaaaaggaatggncctcaatanttaagaaattttttcantttttgaccncagagnttnnnttttaatcctttttttttttttgagaaggngttttcttccttgttgcagggngctnagaaacacncatttnctcaaaccctgggcganaagagcgaaacttntgttnaaaaaaatganat

SEQ ID NO: 4304 - DNA, 891 bp, Homo sapiens
  misc_feature 585, 594, 603, 610, 666, 667, 688, 700, 715, 717, 718, 723,726, 741, 746, 748, 750, 765, 766, 770, 771, 772, 786, 808,810, 820, 821, 823, 825, 833, 836, 844, 847, 850, 852, 853,856, 862, 867, 869, 873, 881, 884, 888, 890: n = A,T,C or G
cgaattggccctctagatgcatgctcgagcggccgcagtgtgatggatatctgcagaattcgcccttagcgtggtcgcggccgaggtacacaatattccaacaccattgtcaatacttagcgttataaaaaggtttcagttactaacatgaactgagagatcagcaaatattaaagatgattgaacatatgaaactgaaaaactataaaaaggtagaagctattgtaaaaatgaagaaaactgaaaaactgaaaagataagaagttactgtaaaaagaaaacggttataccatttgaagcagaacaaaatgttccaataaactttttttacttaataatagaaatattgaaaatgcaaaactctgaagggtattacaaggggctagacaaattttgaattgttttggcataagcagggagaggatttatttgaatattattaatatgaagacaaaattctgcttattgagatatctcacctattatcattttaatagaagaagtcttggaaaagtttggttggtaattctcttttggttagtattggctcaaaccactggtgtcatatagctagtggccagaacntatgaaatngaaaaattncagccangcctggggtgccggtggcttattgtctggtaatccccacccctttggggaggcttnnggctggaaggatcactttganctctggaggttnaaaacccaacctaangnnacatnagnggaggaccctttttnttccnanangataacctcgtgctnncgtnnntgggttccttgccngggccggggccctccaaaaggncnaatttccaanncntnggcggccnggncataaggngtnccnannctngtaacnagccntngggnaaacaatnggngatnang

SEQ ID NO: 4305 - DNA, 889 bp, Homo sapiens
  misc_feature 2, 487, 493, 587, 595, 608, 636, 642, 659, 664, 671, 678,688, 697, 698, 704, 723, 730, 754, 755, 761, 775, 777, 791,823, 838, 854, 860, 864, 872, 873, 883, 884: n = A,T,C or G
tnctatagggcgaattgggccctctagatgcatgctcgagcggccgccagtgtgatggatatctgcagaattcgccctttcgagcggcccgcccgggcaggtacgcgggtatcttaaacaaattgattgataaagatagttgttcatcttattatcataatagataaaatatttctattgatatgtatataaatgtatgcatgacaattaaatagataatagggcagcttgtttcattataaaggtaaagacattttgggaaggaaagcctttgttattcaatttttttgtgaaaagaaatattattaaaattttaaaactacattgtgataattttaaacatagaaagcatagttatagttgacttaaacccgattttccatggctccctctttcctttcagtagtagcagaaagatctgaatggcaagggatggaatgactccttgaagtagtagccagctgggggctgtgtttgagtgccatanggctgncttgttgggtaggttccaaattactttctaggtctggctcttgctggtagaatacctgaagcattgctcttctttagaaaaacctctgctcaanaatgtctncttgggatttttntttttttttttttgtgagattaaaggancagtantcccttctttggaaacnatgcnaaatttntaagaanccctgggaanatctactgnnagacanaagcccaacaagtttatcnatccctngcccgggaagttggaataataagnnaattcnggggaattaacctntnttttaaacctttgntaaggacccttttatttctttagggttaattncaaaagagaaaaaanagccaccttttctganctttanttgntttaaaannagtttttacnngggtt

SEQ ID NO: 4306 - DNA, 916 bp, Homo sapiens
  misc_feature 2, 3, 5, 409, 669, 704, 720, 788, 813, 822, 844, 877, 882,883, 890, 894, 898, 912: n = A,T,C or G
anntntgggagtcgccccgcgtccgcggacgcgtgggaagcaatgcttgaactctgtaacacacagcagaacttgatttggagccatgctcattcttgaatcagaaatgtgtgagaactcttctgaccaccttaattggccatgtcaggtgctttggggatgaggtgtgaaatcagaaggaacagccaaagtaggagagtgagggcagggatacgtgggagaggagctgagtgagaagaagccagaatgccatttgcacatgaagatggacagtccaagacaatgagcctaagaagaaaacaactaccaataaaagaaatattctcaaaagtgtcattaagaggagaaataagtttaattattaatttatttgcatcttaaaaatcaaaacagtctctttggttattgnagtatgtataagatggatcgttctccctttacctgttgtgcgctctgttaaccatttagcacctctccaggagtttggacagaggaaaaatgcataacattaacaaatttgctgccattcaatattagatcatatatgttagcatacatctaccatagcccctgaccaccttcatcccaaggaaaatgaagatcaagtctcaattataaattctgtggaaatttcaacccaaaatgactggagaagtcatagcctgtggncataatgctttcccttggggaacctttagtaggangagtgaaaatgggttncaaaaccccatacacttaggcttccaacacagaaaacattccgtagggtcacccccttcactggggangatgctgtgtaacaggaaggctgcnggtagatanaaaaatgcttaaaaaaagggcnagtggaaaggaagacccaccgccattaacttgnaggcnngttgganaaanaaanaaattcaactgggngact

SEQ ID NO: 4307 - DNA, 930 bp, Homo sapiens
  misc_feature 3, 5, 7, 13, 23, 319, 342, 385, 388, 391, 393, 394, 399,401, 402, 403, 404, 407, 408, 410, 422, 512, 543, 586, 590,597, 599, 616, 633, 649, 674, 682, 691, 719, 726, 729, 742,748, 754, 763, 784, 798, 811, 818, 847, 848, 866, 895: n = A,T,C or G
  misc_feature 905, 911, 914, 916, 929: n = A,T,C or G
atntntnctatangggagtcgcncccgcgtccgggtgaagaacacctgtgtcttgtagaggccccagtgctcagaaccgggagtgacaacttgtgctgtttaaaaagagagcaactgcttgcgtctgagatcattaggggtttggtctttgtttcccagtgctgttgggctgcttagggcctcctcttgaccctgtcctcccacagctcccctgcccttccccatcgcctgtctcctctaacatcactaggaaggagccccattcttgtagcggcactgtttgtttgatttatgtgggtttttttttttttttaagtanataaaggttttttaaaaaatcangattctgaaagaatgtgtttaataaagtgggccttttaaactnccngantnnaacantnnnntgnnancgggcggcccgntaactagtctagagaaaaaacctcccacctccccctgaacctgaaacataaaatgaatgcaatttgttgttggtaacttgtttattgcancttataaatggtttcaaataaagcaataccntcacaaaatttcccaaataaagcatttttttcctgcattctanttgnggggttngnccaaactcatcaaaggnatcttatcatgtctggnaccccgggtacccganctcgaaataaatccttttccgcttncttgcttnactgactcnttgcgctcgggcgttccggcttgcggcnagccggnatnagctcactcaaangggggnaatacnggttttccnaagaatcagggggataccccngggaaaaacatttnagccaaaaggccnccaaaanggccaggaacccgaaaaaaggcccggttnnttgcgttttttcataagnttcgccccccggcgaagatttcaaaaatnggggctcaancaaagnggngnaaacccccaggcnt

SEQ ID NO: 4308 - DNA, 866 bp, Homo sapiens
  misc_feature 11, 363, 365, 366, 368, 371, 375, 379, 380, 383, 384, 386,387, 390, 391, 394, 395, 398, 400, 401, 403, 404, 405, 406,407, 408, 409, 410, 412, 413, 414, 415, 417, 418, 420, 424,425, 426, 428, 430, 431, 432, 433, 434, 435, 437, 444: n = A,T,C or G
  misc_feature 445, 446, 448, 452, 453, 456, 458, 460, 466, 468, 470, 473,475, 476, 478, 479, 480, 481, 482, 483, 485, 486, 487, 488,489, 490, 491, 492, 494, 495, 496, 497, 512, 514, 515, 517,518, 519, 520, 523, 526, 527, 529, 530, 533, 536, 537: n = A,T,C or G
  misc_feature 538, 539, 542, 544, 545, 546, 549, 550, 551, 552, 553, 554,555, 557, 559, 561, 562, 563, 564, 565, 567, 568, 570, 571,573, 574, 575, 576, 578, 579, 580, 581, 582, 583, 584, 585,587, 588, 589, 590, 591, 592, 593, 594, 595, 596, 598: n = A,T,C or G
  misc_feature 599, 600, 601, 602, 603, 604, 605, 606, 607, 608, 609, 610,611, 612, 613, 614, 615, 616, 617, 618, 619, 621, 622, 624,625, 626, 628, 629, 630, 632, 633, 634, 635, 636, 637, 639,640, 642, 643, 644, 648, 649, 651, 652, 653, 654, 656: n = A,T,C or G
  misc_feature 657, 658, 659, 661, 662, 663, 664, 665, 667, 668, 669, 670,671, 672, 675, 676, 680, 681, 683, 684, 685, 686, 687, 688,689, 690, 691, 693, 694, 698, 700, 701, 702, 703, 705, 706,707, 709, 710, 712, 714, 715, 716, 721, 723, 724, 726: n = A,T,C or G
  misc_feature 728, 730-732, 734, 735, 737-739, 741-747, 750, 752, 753,754-763, 766, 768, 770, 771, 777, 778, 780, 781, 783-793, 795-800,802-806, 808-822, 824-829, 831-833, 835-846, 849-857, 860-861,863-864, 866: n = A,T,C or G
tatcatcgtancgccacgcgtccggtaagtggggcaggcctttattgggcccatcattagtaagaggacacagccttccaagaggaggttcttgtgagccgggcaggacaaggcgggagggcagggggagcgggggttgtggggaacgggtcccagatccctttgggagaagttgacccgaggttttcctctgctccagccctcccccctcctgcacagagccctgcctgcccggcctgtgggttaaccccagggctaatccaacagaggtgggtctcaaatcacttgtgagactgggcacctgggtgggggtgggggaaaggtgggcaaaagaaggagtgagtgttggagggggtggttggnanncnctncctntggnnccnntnngcnntgnngtntnnannnnnnnntnnnnannangatnnncncnnnnnntnggtttcnnnancccnntangntntgggtntnanaangnntnnnnnnannnnnnnncnnnnaaaaaagggatcttntnntnnnnaancanncnnggnttnnnnttnannnggnnnnnnntntntnnnnntnntnnannnntnnnnnnnntnnnnnnnnnntnnnnnnnnnnnnnnnnnnnnnngnngnnntnnntnnnnnntnnannntaanntnnnncnnnntnnnnntnnnnnnttnntttnnannnnnnnnntnntttnannnntnnntnntngnnnttttntnnantntnnngnntnnntnnnnnnnatncnnnnnnnnnnnnttnantnnttcttnntnntnnnnnnnnnnntnnnnnntnnnnntnnnnnnnnnnnnnnntnnnnnntnnnannnnnnnnnnnnttnnnnnnnnngtnncnncn

SEQ ID NO: 4309 - DNA, 878 bp, Homo sapiens
  misc_feature 7, 9, 14, 19, 23, 31, 33, 37, 46, 96, 115, 121, 127, 179,182, 188, 390, 403, 460, 538, 591, 595, 640, 642, 650, 669,687, 712, 726, 732, 740, 741, 751, 764, 775, 786, 788, 789,792, 796, 797, 814, 820, 825, 833, 839, 845, 851, 852: n = A,T,C or G
  misc_feature 853, 854, 855, 856, 857, 858, 859, 860, 862, 866, 867, 868,869, 870, 871, 873, 874: n = A,T,C or G
ttttcgnantcgcnccgcnccgngtccgacngnttcntggttcatngtcgaaatgtgcccacttaaataagctctgtatgacatgaaattctgttnaaacattgtaattcatggngacttntaactnataaaaatactacttgcatgggttacttgatttatggatatatgaaaacttncangacgantgatcttctttctctagaactattcttctgtcggtcatgcagaatgctgttattctgaaaagtgtccctgttgcatatgatggtcactttatttggggggattcttcataagatgtgagatgttgatgccagtctttcccaagtaagtgctcgtaaaaaaggactactaactagcctgcatctgtctctaactgggaccaangggtctgctgaangaaactgaagagctctaacattttcacagcttggagaagatagaatctttaaaagtncaactgaagcttgatctattttacaagtgcattgatggcccctgtccttctctgggtcctgtcatttgaaaccaactnctgttgtaaataggaagaatatgggcattcatatttaagaaaatttgatgtcnttangtgactaagttgaaggcttagaaaaatgtattcatttgcacgaantnggcacaanaaattttccactggaatantaagccaaagctaagtgnttaattggaatctaaggcagttaanaaaacctggaaaanataacnggtctaannaggataatcnattgattggcaanggaggtatttntggatacgcanannttnttgnncctaatattttaaagtntttgtnggagnttggattntaaccngaccanttaaannnnnnnnnncncccnnnnnnannaaat

SEQ ID NO: 4310 - DNA, 896 bp, Homo sapiens
  misc_feature 29, 241, 316, 354, 370, 424, 544, 579, 612, 700, 708, 711,717, 734, 772, 782, 796, 801, 814, 826, 832, 833, 836, 837,838, 839, 840, 841, 842, 843, 844, 845, 846, 847, 848, 849,850, 851, 852, 853, 854, 855, 856, 857, 858, 859, 860: n = A,T,C or G
  misc_feature 861, 862, 863, 864, 865, 866, 867, 868, 869, 870, 871, 872,873, 874, 875, 890, 893, 896: n = A,T,C or G
tcttagggagtcgccccgcgtccggattngcaaagtggaaggaagaagcccattttaatgttgggtgggaaaaataggacttaatagaaatgtttaaaacaggttgtatggatagatctggaaacagccctaatcttaatttgggcaaagcatgaaccaagggtctgcaagggctggaggttggttcaagtctcatcgtggggctgaatgttttggagaattttttagctaagatttgcangggaacagaagcagtgtggcataattagacaaatagaaaggtctatgagtagactctgattacagagaccaagcnttcctcaccatttgcctttggcacactggaaacccaanaaagcctgtggtatantacataccccgagaactggagaatattgacatttccaccttgcctctgtcttanatttctatttctgtgatgaaacaccatgacccaaaagcaagtttgggaaaggaatgattttatttgcttgtgtagaaactcaaactgaacaggaatctagagtcaggagctgatgaagangccatggagggggtgctggttgctggcttgctctncatggcgtatttaatctgctttcttatagaatncaggatccccacccagtggtggcccatcacaatggactggcccccccatcaatcagtaagacaatctgctggagtgatgatgggtcangctcacanggncattgnggcatcttatttactgnccattggggtgctgtgtggaagggaaaaaacaggactntcctttggcntttaaattgccttnaccantattttaaaattnaaagggtttaanccaccnnccnnnnnnnnnnnnnnnnnnnnnnnnnnnnnnnnnnnnnnnnaaaaaaggggggccnttnacn

SEQ ID NO: 4311 - DNA, 929 bp, Homo sapiens
  misc_feature 380, 381, 384, 387, 392, 400, 405, 406, 407, 408, 409, 412,413, 414, 417, 418, 419, 420, 421, 422, 423, 424, 426, 427,430, 433, 434, 435, 442, 455, 461, 465, 467, 508, 551, 613,616, 641, 646, 654, 658, 663, 676, 677, 707, 720, 724: n = A,T,C or G
  misc_feature 733, 735, 736, 746, 759, 770, 777, 779, 785, 788, 790, 791,815, 840, 863, 872, 874, 881, 894, 900, 906, 913, 915, 916,922, 923, 927: n = A,T,C or G
tattatcggagtcgcccacgcgtccgatcccaacagttccctcgcctctgttacccacaaatcaccaacacttccctcacctctgttacccgaccaggcatcaaaacttcccccgcctctgttaccccacaggctagcatgggcaccaaagcttccttcacctcctctatcttcggcagccttcttttctgaagctgctgttctgaggttcctgggctctgctccatccagtatcccatgggtgtcaacacctttctcttcatataccttccagttagactgtccagtgggttggaagtcacaggactccaggcaatgctagcagccacagtatctcctttattaaagtgttgcttgaggtctaaaaaacaaaaaaaaannttnaanaaatnaaaaaagnatttnnnnnaannnaannnnnnnnannaanaannnaaaaaangggcggccgttanactagnctananaaaaaacctccccacctccccctgaacctgaaacataaaangaatgcaattgttggtgttaacttggttattgcagcttataangggtccaaaaaaagcaattgcctcccaaatttcacaaataaaagcatttttttcctgcattntantggggggttggccaaacccattaanggttnttaatatngttnggganccccgggacccgnnctcgaaaaaaatccttttccgctttcttgntcaatgaactcgnttgnctcgggccntnnggttgggggnaagcgggtttaanttcacttaaanggggggnanccggtnttncnnaaaatcaggggaaaccccggaaanaactttgaccaaaaggcccccaaanggcccggaaccccaaaaaggccnggttgtggngnttttcanaggctcccccccntggganggttanaaaaatngnncttaanncaangg

SEQ ID NO: 4312 - DNA, 902 bp, Homo sapiens
  misc_feature 3, 465, 512, 596, 622, 657, 658, 659, 661, 662, 663, 665,666, 668, 670, 672, 673, 677, 678, 682, 684, 685, 686, 687,688, 690, 691, 692, 694, 699, 700, 703, 705, 706, 708, 709,711, 712, 713, 714, 715, 716, 721, 722, 735, 753, 765: n = A,T,C or G
  misc_feature 781, 797, 826, 830, 838, 843, 847, 848, 864, 873, 880, 881,902: n = A,T,C or G
atnttagggagtcgcccacgcgtccggttgcaggagccccgtggtatgtgtacccagtgtgaggataagccgaggttaacacaagcagtgggaattccccaggccagtgtaagctgcttatgctgttatcctgggcagccttgaggcaggagagtaacgtacaaaggattatttatgaatttgccagttattttgaaagaattagcatcacagtgaaagtgacataaaataattttagtagaaacagtttggtgaaataaaggccatttgggagtatttgaacagcaccatagtgcattctgggttctggcatgttcacagcaggaggaaaggcattttttagcatctggtttttgtttttgagactggggctcatatatcccagaccagcttcaaacatgtaactggggaccttgatcagatcttgatcctcctgtctctacctcctaactactggccgtctangtctgcaccttggcactctgtcttatgtggggtcttgtgtctgccangcaagcattccactgactgagccatatccttccctcatctgtcatttttggtttggtttttggtttaaagaaatgtatcaattncttgggctggagggtattctcatcanaatggccccaatgtatatacaacagtaacccctgnnnannnanntntnannaggnnaaanannnnntnnnangaacnnggngnncnnannnnnnggggnnggcccttaacttntttaaaaaaaaaaacctnccacccttcccnttgaccttgaaacatnaaatgaatgcaattgntgttgtaactttgtttttgcacttttaanggtncaaataancattncttnnaaattccaaataagcntttttcctnatttaannggggttggccaactataaagn

SEQ ID NO: 4313 - DNA, 903 bp, Homo sapiens
  misc_feature 3, 453, 573, 608, 609, 610, 611, 612, 613, 615, 616, 617,618, 619, 620, 621, 622, 623, 624, 625, 626, 627, 628, 629,630, 631, 632, 633, 634, 635, 636, 637, 638, 639, 640, 641,642, 643, 644, 645, 646, 647, 648, 649, 650, 670, 753: n = A,T,C or G
  misc_feature 766, 781, 786, 791, 823, 844, 847, 869, 870, 897: n = A,T,C or G
atnttagggagtcgaccacgcgtccgtccaggtcctgcgctgtgcagcctggtgggagctggccacgtgtggatgggtccatgtccccagcaagtccatcagctcagacatgcaagtcttccaggacactgccctctgccccagcagtggcttctggactggcatctgtcctctacctcaccaaccaggctctggactccatgacagatctgcctgcagggagcccagcacacatgctgcatgtcaccgaggcagaggccacagtccccacactctgggatagaactcgggagccacggccacccacacttgcatgggaaagggtgtctgctgcaggatgacaagcagggacagctgggtggtcctcctagagctctggggatgggggcaggggacatcccctaggcaccctgtctaaccagaatggatagttagaggagcgctggggcctanccacctgcttctgccattggatttgacaagccattttatattgggtgtccaagcagtcctttcacctcttgggtagtcggaggtgctccgcgaggtcccgctcgagggccctggctttangttgtcaggggattaaaacagcttttcatactccnnnnnnannnnnnnnnnnnnnnnnnnnnnnnnnnnnnnnnnnnaaagggcggccgttaactantctaaaaaaaaaacttccacaccttcccctgaacctgaaacataaaatgaatgcaattggtgttggtaactttgttattgcancttataatgggtncaaataaagcaatancttcncaaanttcacaaataaagcattttttactggatttanttggggttggccaaactcatnatngatttatatgttggaccccggnnccaacccaataatcttttcccttcctntcatga

SEQ ID NO: 4314 - DNA, 921 bp, Homo sapiens
  misc_feature 3, 15, 16, 37, 468, 469, 585, 591, 596, 599, 606, 643, 644,646, 659, 662, 671, 672, 717, 719, 721, 729, 730, 741, 746,767, 775, 780, 800, 803, 813, 823, 832, 850, 874, 884, 890,899, 908, 910, 916: n = A,T,C or G
atntcgtattcgcanncgcgtccgcgcacaagagatntcttggcggaacgctgggaagcacacatctatgccagcgaggatgaaaactgagactggaagcagggggccattctcctgcctcactgcagtcctgtggaggccgctagacctgcccccagtctctgctgtccctatttaaacatacagcccaggctgatgtttgtggcctgcaagttgatttggttttccctggggtgggcgagtgattcgtgcttaggggtgttctcagctaaggctgaaatgataatccaccgatccccctcacatccctcagccctccgcacagcccagagcttggatctgtcactgcagaaagaaggctctgtttggggacctgcattccactcttgccaaccccaaacgtatgcctgttgctatgaaataaacctgtcctgaactgccaaaaaaaaaaaaaaagggcggccgctnnactagtctagagaaaaaaccttccacaccttcccctgaacctgaaacataaaatgaatgcaattggtggtggtaacttggttattgcagcttataatgggtaccaataaagcaatngcattncaaanttnacaaatnaagcatttttttcacttgcattctaattgggggttgnncnaactcatcaatgnatnttattatgnntgggaacccgggtacccagctcgaattaattcctttttcgttctngntnattaaatnnttggcttcggncgttngggtggggggagcgggataancttacttnaaggngggaataccggttttcccanaantagggggttncccccggaanaacatttgnccaaaagggcccccaaangcccggacccttaaaaggccccgnggttgggggnttttcnaagggtcgnccccctganangattanaaaat

SEQ ID NO: 4315 - DNA, 761 bp, Homo sapiens
  misc_feature 203, 470, 477, 486, 499, 500, 501, 506, 511, 522, 547, 562,563, 568, 571, 572, 578, 586, 587, 591, 592, 593, 597, 601,608, 610, 614, 616, 621, 627, 628, 632, 633, 636, 640, 641,652, 660, 664, 667, 668, 669, 673, 677, 678, 688, 697: n = A,T,C or G
  misc_feature 699, 700, 702, 703, 704, 705, 707, 708, 714, 716, 718, 721,722, 723, 724, 725, 728, 729, 731, 732, 733, 735, 743, 745,749, 751, 753, 754, 758, 761: n = A,T,C or G
gactactatagggcgaattgggccctctagatgcatgctcgagcggccgccagtgtgatggatatctgcagaattcgccctttcgagcggccgcccgggcaggtacttttttctttttttttttttttgaaatgcagtccagcctgggcgacagagtgagactctgtctcaaaatttaaaaaaaaaaaaaaaaaaaaaatttntatgggactggaagaggaggtccagtccattgtaacctgtggataataccagctccatgtcagggtggttctttcaattcattcaccaagcaagcatgcttttgaggcacgctctgtcctacacataaggaaatcagacatagggggtcccactcccctgaactcataatccaagaggtggggagacagacagaaaatgagtaggtgataaggatgggagggaaatgaagggaggatgatgggatagaaggggccttgagtgataanaaagganccgaagganggatagttccctnnncccgntaccnccctaagggcngaatttcagcacacttggcggccgntactagtggaatccnnagctnagnncccaancttggcgnnaatnnntggntaanaacttgntncctngngtganaaattnnatcnnttnacannttccacacaanattagtancccnggnnncatnaaannttaaagcctnggtgggccntnngnnnntnnctaatntnanttnnnnnggnntnnncnacatttcncncttncnanntagngan

SEQ ID NO: 4316 - DNA, 734 bp, Homo sapiens
  misc_feature 2, 457, 618, 620, 621, 628, 629, 630, 636, 710, 733: n = A,T,C or G
cnactcctatagggcgaattgggccctctagatgcatgctcgagcggcccgccagtgtgatggatatctgcagaattcgcccttagcgtggtcgcggccgaggtacccaagcatcatgtgaacactgtgcaaatgctatacagagagtcacggcagcttaaccagatggagaacaaaaacacagcagcgcacaacgaatgagtaagtaaaatccctatgaatcaattcactcaggcataatactctaaatccttaaaaaggggggaaaaaaagaatgtaacagaaatctatttccacaatacacccaagggtaactaatgtaactaactgactaatgacaatacaagattaaaataaacaccaaaacccactatacctggattcatattacttagatgagaagctaagttaagatattgtagggaagctcacttaattacactggtgatgaaattgncttttctcttttcttgagtttaagcagttatgccttgggcccaactttcctgaccttgtgagtaaagttgagccacatgttcagcagaagatatcacagtagctgtatttttataaagaaaattcctttttaattataaaactaaagcccgaggaaaaccnannaaaaaannnaaaaangggaagaaaaatttttctaatccacccccttcagatcccaaaacgggtaaatctacatccacgacttcttttanaatgaaaaggatgagggttcctnt

SEQ ID NO: 4317 - DNA, 784 bp, Homo sapiens
  misc_feature 366, 425, 451, 485, 544, 549, 552, 565, 566, 567, 571, 575,576, 577, 601, 609, 621, 646, 647, 649, 652, 653, 657, 663,671, 673, 679, 683, 686, 687, 693, 695, 700, 705, 711, 714,723, 728, 731, 732, 737, 747, 753, 754, 756, 762, 763: n = A,T,C or G
  misc_feature 767, 772, 779, 780: n = A,T,C or G
ctactatagggcgaattgggccctctagatgcatgctcgagcggccgccagtgtgatggatatctgcagaattcgcccttagcgtggtcgcggccgaggtaccaggctatgtgctaagtatgttattccacttaaccagccctcagtctaacagagcagatgctattattatcccctttaaacagtgaagaagcgaggcttagggggaactgtgtcatgccccagggccacatggccgggtaaggggtccagcagctttaagccagggaggtgggcccaacgtccataccctcagccatcttcatcctacttcatcacagggtcggggaagataccaagtgatgaaggcattgtggtaccagactnttgtgattggccgagggatgagtgaggcctttgaaggtgcctttaatcaactgtgggangaacatgcccaaatgcttctaagggngacatacacctaaccactccgatttagcaagaangaggtctttttttggtggaaagcagggccccaccaatggcaaccagaataagggaggtnagganaantactacaaaaggnnngctntaannnatccccagcacttaacgggggaanaaagaaanggaagaagctcngctagtttcaagggaaaaatttatnntnganngganaaggantttttttntnttaagncatntannaaattnangtacnttttnccaaanggnctcttgaanaatcnacnnttccntatcccgggntgtccnngnctgaanngtcnaatantcatccnnaccc

SEQ ID NO: 4318 - DNA, 742 bp, Homo sapiens
  misc_feature 533, 576, 592, 593, 594, 596, 597, 600, 602, 603, 604, 605,606, 607, 608, 609, 610, 611, 612, 618, 625, 636, 665, 670,697, 703, 722, 723, 726, 741: n = A,T,C or G
ctcactatagggcgaattgggccctctagatgcatgctcgagcggccgccagtgtgatggatatctgcagaattcgcccttagcgtggtcgcggccgaggtacgcgggtcttctctcctccttatgccttttcttcttcctcctcaccctcatggctccaggtccatgcccagggagcatgttagcatgttgtcaggtctcaaagtatctgaaaagattgtcttctctgtggccaggctgcttagaggcagcctgatataaactgtaaaaagggggagagtgtttctctgtgtcctctgcatccactcttcatgcatttgctccaaaccaaatctgctcttaggaagggatcagacgaacctgtttagagtgaggtagcaatgataggttagcagtggggtaaaccacataaatgaaactttaaaatgaggaattccaccttgttaaagaagtaaggtgggccaaggcacagtggctcacgcctgtaattccagcactttggggggccaaggcaggcggatcatgaaggtcangagatcgaagaccattctggctaacgtcctgaaaccctgtctntactaaatatccaaannnannaanannnnnnnnnnnagtacntgccccnggcgggcccgntaaagggcgaaattccaagcacactggcngcccnttactaagtggatccccagccttcggnaccaanctttggcgtaaatcatggnnaanagcctgtttccctgng

SEQ ID NO: 4319 - DNA, 736 bp, Homo sapiens
  misc_feature 607, 691: n = A,T,C or G
acgactcctatagggcgaattgggccctctagatgcatgctcgagcggccgccagtgtgatggatatctgcagaattcgcccttagcgtggtcgcggccgaggtactagatccaggatccagggaatccctgtcttttaaaaagccaaaagaggatggggaagacaatgggaaccatgggtgaaattgcatttaaggaaagagcaaagtaaattatgggacttagatattcacaagtaagtctgttgaacattctgtcttatgtaaggtatagccttagcaattagagtttttgttaagtgtgttactactattaataaaaattgcatggagatgggaaaactattttttacttgtatgaaattccagttattgttttgtctaattatcaacatttcttctgccttctaagacaaagtaaaatatagtaattggtagagtaaggggcttaattcaatttagttttatatgttaatggccagaaactaggtgcttgcttccagtcagctttatttcgttcctactatctctctaaataatttaggatataaaattgactgaataaaaaccagtaagccaaggttttcacccttcgatttttataccanggcaagatgggagaaatatctggaaagggactgtcccaggattactagcagaaagaagccaaatactcttatccccatagcccntatcatcaagcttgaaaaaataaagaaccaaaagcaccaggtaat

SEQ ID NO: 4320 - DNA, 780 bp, Homo sapiens
  misc_feature 2, 3, 6, 14, 28, 33, 41, 45, 518, 521, 523, 527, 529, 534,535, 562, 583, 643, 648, 649, 661, 727, 737, 776: n = A,T,C or G
gnnatnggattgantcgactactatagngcganatgggccntcgngccctttagatgcatgctcgagcggccgccagtgtgatggatatctgcagaattcgcccttagcgtggtcgcggccgaggtaccggcgcgcgccaccacactcggctaatttttgtatttgtagtaaagacggggtttcatcatgttggccaggctggtcttgaactcctggcctcaagtgattcgtccacgtcggcctctcaaagtgctggaattacaggcatccaccgcgcccgcccagttttgttgtatttgattagtagtttggtcactgcacatacaaaagctaaaaaaggctgtgtgtagaaatcattcaaatattgagatatttaaatgaaaggttaacgctttgggaactcctttgtggttcccttttccttcccagctttggaaagtctggggactaagtctgttattttcatcggattcagtaccatgatcctaatttgtgccacttcattcttggaaaaaanaananaaananaaaannaaaaagtacctgccccgggccggccgntcgaaagggcgaaattccaanccactgggcgggccgtttactagtgggatccgagctcgggtccaaagcttggcgtaatcntgggnnatagcttgtttnctggggtggaaaattgttatcccgtttacaatttcccacacaacataccgaagcccgggaaagccntaaaggggtnaagccctgggggtgcctaatgagggggggctaacttcanattt

SEQ ID NO: 4321 - DNA, 754 bp, Homo sapiens
  misc_feature 528, 547, 561, 563, 571, 575, 576, 585, 587, 601, 605, 606,610, 615, 620, 623, 624, 626, 633, 634, 637, 646, 656, 657,662, 667, 671, 672, 676, 683, 684, 685, 686, 688, 692, 700,703, 706, 708, 715, 716, 721, 722, 723, 724, 727, 728: n = A,T,C or G
  misc_feature 732, 735, 737, 740, 745, 746, 748, 749, 750, 752, 754: n = A,T,C or G
cgactcctatagggcgaattgggccctctagatgcatgctcgagcggcccgccagtgtgatggatatctgcagaattcgccctttcgagcggccgcccgggcaggtactagcaaataaaacataaagaacaagaaaaaacagaaagtgaatatcaaatcttcatacatttagtattatgactgaaactcaaatgatggggaaaattaaaatctctggcaaaaaaatatgggtttcttctgcaaatttcatgctgtcatgaggaaccgatggacttgaaagatcagggtgcagacaagagagtaaggagaagtcatgtcgccagccaagaaaatcatgtcttctttgttctctgatctggcaacaaagaattgaaggtctcatgttgccctggtaacacccgggaggacactcccagactgctgaaagggctctacccagccccacacaaagtgtcacaggtccaaactctggccaaggactcttctggagccagaaacataactgggtttggacactcctttagcttntttagggcgacttaagggncaggaaggtttttnangttttgcnttcnnaaggaaccnancctcaaccattgantatnnattnctggngccangtnncntcttttnnaantttcctttnttggttgccnngcttnaattnttgnncccnccctggnnnncngtcntaattggnggnccntnccctttnntaaannnngcnncaanttntntgnctttnnannnancn

SEQ ID NO: 4322 - DNA, 938 bp, Homo sapiens
  misc_feature 1, 4, 5, 488, 529, 585, 590, 606, 624, 637, 640, 654, 685,693, 720, 734, 747, 750, 753, 779, 786, 814, 815, 826, 827,849, 850, 862, 892, 906, 921, 927, 931, 934: n = A,T,C or G
nggnnacgctactatagggcgaattgggccctctagatgcatgctcgagcggccgccagtgtgatggatatctgcagaattcgccctttcgagcggcccgcccgggcaggtacagacaatgtgaagttaggacttaagtaaaggtagtatttatttactaagaataaactttcttttaagaagtatatagaaagtaaaataaatatttgttgctttatattcagccatacttttctactcaccctgggctgcaaggcaaacaactattttattattattattattactttatagagacggggtctccttatgttgtccaggctgttctcgaactcctgggctcaggggatcttcctgtctcagcctcccaaagtacctcggcccgcgaccacgctaaggggcgaattccagcacactggcggccgttactagtggatccgagctcgggaccaaagcttggcgtaatcatgggcatagctggttcctgngtgaaaatggtatccgctcacaatttcacacaacatacgancccgaagcataaagtggaaaagctggggtgcctaatgagttgaccaacttacattnattgngttggggcttactggnccggttttcaggccgggnaaacttgtcgtgnccncctgcaataaatgnaatcggcccacccccccggggaaaaggccgnttgccgtnttggggccgcttttttccctttctttncttaactgactttnttgggcttcgggncgntcngggttggggggagccggtattaagcntacttcnaaaggcgggaattccggttattccaaannaatcagggggnntaaccccagggaaaaactttgnnccaaaaggcccnaaaaggcccggaaccctaaaaaaggcccgnttgtggcgtttttnatttggtccgccccntgacangaantanaaaa

SEQ ID NO: 4323 - DNA, 907 bp, Homo sapiens
  misc_feature 532, 567, 591, 601, 602, 603, 604, 605, 606, 607, 608, 609,610, 611, 612, 613, 614, 615, 616, 617, 618, 619, 628, 634,641, 740, 743, 749, 763, 768, 772, 777, 803, 804, 809, 821,823, 832, 835, 843, 876, 883, 885, 887, 895, 896, 905: n = A,T,C or G
gactcactatagggcgaattgggccctctagatgcatgctcgagcggccgccagtgtgatggatatctgcagaattcgccctttcgagcggccgcccgggcaggtacattcacggtgttgtgcagctatcactgctaactagttccaagatattccatcaccccggaaggaaaccctgtacccagataagtagttattttgatccttatttacatttactctctaatttctctttgaaaaagaataaaagaacctaagtttaaattacagcataagaacttgatgtgttttcatttcttctgcaacttgttgattcacaaaaattggtaaagatttgaagctgaaatgaggcgagtcttagcaaaatgaaaccaggattgaaaagtcctggaaggaagaaacccaaaaagagatttgaggaaaaaatcaaaataattcacaattctgtccaggccccatccttgtcaagaaagccagattctacttcaatgactgatagtgctgaatcttttttggaaagaaaaaaaaaaangaattggaaattgaatgctttggatctccaagtangaaattttggaagaccgggaactnttaaatcccnnnnnnnnnnnnnnnnnnngggtccctnggccgngaccccnctaagggcgaattcagcacctggcggccgttctagtgggatcccagcttggtccaagcttggggtaatcatgggccatagctggtttcccgggggaaantgnttttcngttacaaattcccnccaanaatnccaancccggaagcctaaaagggtaaagccnnggggngcctaatggagngngcttacctncantaaattgnggtggcgcccccttgccccttttccaatcgggnaacctgntngnccacctcnnttaaatgancg

SEQ ID NO: 4324 - DNA, 919 bp, Homo sapiens
  misc_feature 506, 516, 519, 550, 562, 589, 603, 618, 648, 652, 654, 665,666, 696, 723, 725, 744, 745, 748, 756, 765, 770, 771, 772,778, 780, 783, 785, 787, 788, 791, 792, 805, 809, 811, 821,822, 827, 830, 838, 845, 858, 859, 873, 880, 885, 886: n = A,T,C or G
  misc_feature 887, 896, 897, 899, 904, 910, 914, 915, 918: n = A,T,C or G
tgatccactactatagggcgaattgggccctctagatgcatgctcgagcggccgccagtgtgatggatatctgcagaattcgccctttcgagcggccgcccgggcaggtacgcggggtcacctgctgtgctcttgcttgcacagtgtcctggagctggacctggctctgggtttccaggaagcagtttgctaaaggcagcaagctgcttcctctgctgcctgagataccagattcccaatggcgaagattgagaaaaacgctcccacgatggaaaaaaagccagaactgtttaacatcatggaagtagatggagtccctacgttgatattatcaaaagaatggtgggaaaaagtatgtaatttcaagccaagcctgatgatcttattctggcaacttacccaaagtcaggtacctcggccgcgaccacgctaagggcgaattccagcacactggcggccggtactagtggatccgagctcggtaccaagcttggcgtaatcatggncataagctgnttnctgtgtgaaattggtattccgcttacaattnccacaacatacnagcccgaagcataaaatggaaaacctngggtgcctaatgantgagctaacttacantaattggcgttgcgctcactggccgttttncaantngggaaaccttnncgtgcccacttgcatttaattgaattcggnccaacccccggggaagaggccggtttncntatttgggccgctttttcnnttntttggttnaattaactncttgnnnttgggncnttngntnnggnnagccgggattaanttantnaaaaggcggnnaatancgntttttccnaaaaatnaggggttaacccnngaaaaaaaattttngcaaaanggccnnnaaaaggccnngnacctnaaaaangccnnttnt

SEQ ID NO: 4325 - DNA, 916 bp, Homo sapiens
  misc_feature 439, 451, 525, 571, 596, 627, 636, 642, 668, 686, 689, 706,711, 715, 740, 759, 779, 782, 783, 789, 790, 796, 798, 802,812, 816, 817, 826, 828, 831, 835, 836, 837, 841, 842, 846,850, 856, 871, 872, 873, 876, 879, 880, 882, 883, 889: n = A,T,C or G
  misc_feature 890, 895, 896, 897, 898, 900, 901, 903, 904, 909, 910, 911,914: n = A,T,C or G
agtcactacttagggcgaattggccctctagatgcatgctcgagcggccgccagtgtgatggatatctgcagaattcgcccttagcgtggtcgcggccgaggtaccacacccagattatcatggcatattattaattctttccatgcacaaaggtcttgcagaaggacctcaatggtttattacatcagagcacgcatagtagtgcagattcatatgttctgtctccaaatagtagattaccattgccttccagtgatggcactgtgtccttgagtattggaagaaaaagggaagtagcccaagttcctcctttgtggatgacctggagatctctcctgagtttgactgtaaggtgaatcaagaatatagacaggcatccttcattgttggtcttaatgcatgagatggatgactttataacatgtaatgatgacctanggtgaagctcangtagattcagaggaagacacagaccacagaagtttgcaaactggtggtccacaaacatgcttgggttggcttgnatagtgtttgaggcaaccagttaaaactgaaaaaatctttaactgntggatcatgcccttccccatgccanttccgggtgagctgaaatgaccaaatatttnctttaaggngggggnggggggcttttttggtctggccgaancccccaccatgccctggntgncccccttccccatgaanaccantggncagtttttttgctttgcactttgcnctggtggtttttcccaacnaaggggagaaaaattttttngtnnttgggnnctattngnaagnaaaacctgcnaaannaaaaacccngnccncttnnncccnngttntttncctggntaaaaaatttttttnnnttnccnnanntttttnnttccnnnntnngnnaaatnnnggntt

SEQ ID NO: 4326 - DNA, 897 bp, Homo sapiens
  misc_feature 404, 519, 532, 582, 589, 634, 658, 661, 732, 753, 765, 791,802, 805, 817, 820, 829, 830, 834, 837, 853, 855: n = A,T,C or G
cgactactatagggcgaattgggccctctagatgcatgctcgagcggcccgccagtgtgatggatatctgcagaattcgcccttagcgtggtcgcggcccgaggtacgcggggacctgctgtgctcttgcttgcacagtgtcctggagctggacccggctctgggtttcaggaagcagtttgactaaaggcagcaagctgcttcctctgctgcctgagataccagattcccaatggcgaagattgagaaaaacgctccacgatggaaaaaaagccagaactgtttaacatcatggaagtagatggagtccctacgttgatattatcaaaagaatggtgggaaaaagtatgtaatttccaagccaagcctgatgatcttattctggcaacttacccaaaagtcangtccttgcccgggccgggccgctcgaaagggcgaattccaacacactggccggccgttactagtggatcccagctcggtaccaagcttggcgtaaatcatggtcatagctgtttnctgtgtgaaaatngtattcccttcacaatttcacacaacataccagcccgaagcataaaagtntaaaagnctggggtgcctaatgaagtgagctaacttacatttaattgcgttncgcttactggccccttttcagtcnggnaaaccggccgtgccagctggatttaattgaatccggcccaccccccggggagaaggcggtttgcggttttnggggctttttcgctttcttgnttacttaacttnttggctccggccgttcgggttgcggngaaccggtttnacntcactcaaaggnggnaattccggnnttcncanaatcagggggtaaccncngaaaaaactttgaccaaaggcccccaaaggccggaaccttat

SEQ ID NO: 4327 - DNA, 435 bp, Homo sapiens
ctatagggcgaattgggccctctagatgcatgctcgagcggccgccagtgtgatggatatctgcagaattcgcccttagcgtggtcgcggccgaggtacaaaatacaaaatttggtttagctaccaccctatttagtgccaactccttattttaacctaattagcatcatttttccctctgacaaaaacaaattacacacacacacacacaggagtcattttctctcttttgttaagtatggagaaatgttccaaagaaaactgatcttaaaatatatatatatacttgaaagcaacttctcataataaaattaaataactttttcctgacttctagggatatgaaaagctttatatatgggcaaaaaagtaaacatataatccgttcataatttggagttggataagtaacaggcttagaaaggcttcaactat

SEQ ID NO: 4328 - DNA, 901 bp, Homo sapiens
  misc_feature 4, 5, 6, 7, 8, 10, 601, 611, 649, 700, 717, 733, 747, 751,773, 790, 835, 843, 855, 856, 865, 877, 878, 879, 880, 884,885, 886, 887, 888, 898, 899: n = A,T,C or G
gtgnnnnncnactactatagggcgaattgggccctctagatgcatgctcgagcggccgccagtgtgatggatatctgcagaattcgccctttcgagcggccgcccgggcaggtacctagcaccaaaacgtgttttgccacattatgaggagaaattaagacacatgcaaatggcccagagtttggtggtttgcagtcacaaggaggaaagaaatgtgtgactccaataagagtccctctatactcatttggttccctcggcccagaaagacaaaggggagtttattcagagtgacataaaagaagggtcgcacaagcaaatcagtgacggggcaaagcattgatggtttgaaggaaaacatgcattatcttttcttaacggtgttcaatgaatttcctttattattcattacattggccaaccagcctctaaggactttgggcagcccaatggaaggctctcaaaggcctttgagtttagcttttgggcttacgatggttttaattagccacagggagaaaaaaagccatcctgatgtgggactcctgaagtgtgtcctactgaaagccaaatggagaactgaggagtggtcattcctttncaccagtcantgtaccttgggccgcgaccaccgcttaagggcgaattncaacacacttggccggccgttctaagtggatcccaacctcggtaccaaacntgggcgtaatcattggncataacttgtttcctnggtgaaaatggtantccnttacaatttccccccaaattcnaaccggaaaccttaaantgtaaagcctggggtgcctaatggagtgaacctaactacattaantgggttgncctacttgcccnntttccaatngggaaacctttnnnncccnnnnnttaaagaatnngg

SEQ ID NO: 4329 - DNA, 910 bp, Homo sapiens
  misc_feature 104, 133, 135, 141, 145, 147, 148, 375, 451, 471, 492, 510,522, 528, 539, 546, 549, 564, 565, 573, 579, 587, 599, 600,603, 604, 620, 624, 627, 634, 642, 644, 651, 658, 664, 677,686, 694, 702, 704, 705, 723, 728, 729, 732, 734, 744: n = A,T,C or G
  misc_feature 745, 748, 751, 755, 769, 771, 773, 779, 783, 804, 806, 831,841, 842, 850, 853, 856, 869, 894, 906, 908: n = A,T,C or G
gggcgaattgggccctctagatgcatgctcgagcggccgccagtgtgatggatatctgcagaattcgccctttcgagcggccgcccgggcaggtactcttgccngtggactgagatgatccttccaactaaananaaaaanggtntnnaatcctttccttggcttcccttcagactgcctctgtgctgtcatggtctttcttgggaagaccttcttctgctttctctctaggaacaactcggccaggtatagttgcctttcccaagattacaatttagcccaggattcagtcccatggtatctccgccaggatagaacccacgggcaagattaaattatctcatcctcacagttaagatctttgcagagcttaancaatgccatctgagaaaggagggcatctgaagttatcaagcagacagggtaactccgaccaatttaagcactctgncccaacttcaagattcttgngggtagggcatttgaataatnggggctttccagctttcnaaacaagcaggntcatgnttcataaagcnttaactngangtcttttgggacctnnggccgcgnaccccnctaagggncgaaaattccanncanncctggcgggccgtttnctanatngaatccngagccccngnacccaanccttggncgtaantcaatgggccatnggttgtttncctggggngaaaattntnntcccttcaaaatttcccncaacnntancnaacccggaanncanaangggnaaagccctgggggngncnaatggngggngcctaactccaattaaattgngnttgggccccctgccccctttccagntgggaaaccnntgtggccnctnccnttaatgaaattgncccccccccggggaagggggttggntttgggggcccntncg

SEQ ID NO: 4330 - DNA, 887 bp, Homo sapiens
  misc_feature 8, 117, 122, 134, 151, 152, 476, 560, 621, 626, 682, 693,694, 747, 748, 749, 755, 766, 768, 807, 809, 813, 819, 833,843, 857, 871, 878, 885: n = A,T,C or G
cgaattgngccctctagatgcatgctcgagcggccgccagtgtgatggatatctgcagaattcgccctttcgagcggccgcccgggcaggtacggtgtgagaaaaagtgggcctgcnatggnagactgcacctnaatgggcaaaatatgcnntcccctttctgttccttcttcctgatggctggaagggaatatggaccatcttggatcatgtggataagactaacactcctataggtggcagagcaacagaataaagggagtccaatgtcacagagcagaactagcacactgcctcagattgacaatgatagaaaaataagctcttgtcttgtatttaagccactgttatttggaatctatcccatgaaacagccccatgctctaattaatatgtaacggagatgcttctttttctaaggatttttggttctgaaaaatgcccgcttaaaagaaaagaaccaaaattgaatagtntaagcaaagaaaaggtttaattttctaactttttcatggaaaaataacacctttattattgacaatcaatcttataaataaccnaatagagattttaattaaaaatcttgtaaattctcagaaaaggaataattttaaggtaatncattngggggggccttaagtttaaaaaattaaaattatttaacccccctgctggaacttanttttaaaattnngaaaaacttaaaactaaagattaaacctattttttaaaacttaagggttaaannnattttncaaaaccaggngngagttgggaaccaaatgggccctttcaaaatccaggaangnttangaaaantaccggggaatgtncttaaaatcnaaacaaaggcattngggggaaacttttntttttgnaagaagnct

SEQ ID NO: 4331 - DNA, 864 bp, Homo sapiens
  misc_feature 153, 154, 155, 163, 581, 605, 641, 656, 677, 686, 690, 715,733, 756, 771, 814, 830, 833, 840, 855, 862, 863: n = A,T,C or G
cgctactatagggcgaattgggccctctagatgcatgctcgagcggccgccagtgtgatggatatctgcagaattcgcccttagcgtggtcgcggccgaggtacccaagcatcatgtgaacactgtgcaaatgctatacagagagtcacggcnnnttaaccanatggagaacaaaaacacagcagcgcacaacgaatgagtaagtaaaatccctatgaatcaattcactcaggcataatactctaaatccttaaaaaggggggaaaaaaagaatgtaacagaaatctatttccacaatacacccaagggtaactaatgtaactaactggctaatgacaatacaagattaaaataaacaccaaaacccactatcctggattcatattacttaaatgagaagctaagttaaagatattgtagggaaagctcacttaattacactggtgatgaaattggcttttctcttttcttggagtttaagcagttatgccttgggcccaacttttctgaccttgtgagtaagttgagccccatgttcagcagaagatttacagtagctgttttttataagaaaaattccnttttaatttttaaacttaagccgngaaaaccaaaaaaaaaaaaaaaagggagaaaaattnttcctaatcccaccnccttaaatcccaaaaccggtnaattacatncccnacttcctttaaaatgaaaggatganggtcctccaaactttggncggcaaaataaaaataggctttntttttaggcggcttnttaaaggcctcaaaaccttttactaacatttaccctttccttnaaataaaaacccaaanaangctttgntttttccctttttantggcaannt

SEQ ID NO: 4332 - DNA, 896 bp, Homo sapiens
  misc_feature 1, 5, 525, 565, 623, 634, 679, 756, 759, 776, 784, 809, 831,832, 846, 848, 855, 856, 866, 867, 871, 873, 874, 877, 878,881, 884, 887, 891: n = A,T,C or G
ngggntacgactactatagggcgaattgggccctctagatgcatgctcgagcggccgccagtgtgatggatatctgcagaattcgccctttcgagcggccgcccgggcaggtacttccaaccccatgtcatctggaagaggactcagctggttgatcgtctatcacagtttgttggagagacctattttttttttacattcagatgcttctcagagttctgtttataaacattgtcaggagcagagagtgttagggatcttccacttgaaagaaaaatgacaaaaagaataaaatcactacttgacttgcctgcggttttgtgttcagcctttcgtcttaatgctattgaggattactcttgctcactagagagcacagaatgatgttgtgtcaagcaaatcgaaaacagtataaaatgctatgtgcgcctctcatttctgattaactacttgagaccttttcacattaaagtttaattgtgttcaactctttcgacaccagaagttcaaagaccatgtaccttnggccgggaccacgcttagggcgaattccagcacactggcngccgtactaagtggatcccagctcggtaccaacttggcgtaatcatgggcatagctgnttcctgggtgnaaatggtattcggttacaatttcacacaacatccaacccggagcntaaaagggtaaagcctggggtgccctaatgagtgagccaactccattaattggcgttgggcctactggccggttttncanttcgggaaaacctgtcntgcccacntggatttaatgaattgggccacccnccggggagaggcggtttggggnnttgggggccttttncntttcttnnttacttaatnnttgncnnggnnttnggnttngggnaacgg

SEQ ID NO: 4333 - DNA, 874 bp, Homo sapiens
  misc_feature 2, 3, 4, 5, 6, 9, 614, 632, 706, 756, 766, 768, 783, 817,822: n = A,T,C or G
annnnnacnactactatagggcgaattgggccctctagatgcatgctcgagcggccgccagtgtgatgggatatctgcagaattcgccctttcgagcggccgcccgggcaggtacggtggcgcaatcttggctcactacaacctccacctcccaggttcaagcgattctcctgcctcagctgcctgagtagctgagattacaggcgcccgccactacgcccagcaaattttttgtatttttagtagaaacggggtttcaccatgttggctaggctggtcttgaacccctgaactcgtggtttgcccacattggcctcccaaagtgctgggattacaggcgtgagacattgcacctggccggtatttctgctttttaaaattatttatgaatttggttgtctcattcccatgcaggcttttctactttttacttgggaaaattatttaacttctgtgtaactgaacttattcatatataaaatggggcactaataatacccacttcagaagtgttgagtattatatgaggtaataacatgtaacggacttagttaatggtaagcgctatatatgtggtagctatggtgattatgattatctacaaataatattgntctataagtgtttcttanttcttttgaaagaaggcttttcctattattggaattaaagtggaacgttttgatgcaaacagtgttggttgtangtaaaccatttggtatgacttactgaagtgctagcaaaaatgatgttganggctgagtanantaaaaaaaacctgtnccacttttgatggggaagggtacacatctcattnttagngaatatttaaaaaaaactttgtttttgctatgaaattgtagtaaagaaacct

SEQ ID NO: 4334 - DNA, 869 bp, Homo sapiens
  misc_feature 2, 3, 4, 659, 747, 759, 803, 810, 860, 862, 869: n = A,T,C or G
gnnngtatacgactactatagggcgaattgggccctctagatgcatgctcgagcggcccgccagtgtgatggatatctgcagaattcgccctttcgagcggcccgcccgggcaggtacggtggcgcaatcttggctcactacaacctccacctcccaggttcaagcgattctcctgcctcagctgcctgagtagctgagattacaggcgcccgccactacgcccagcaaattttttgtatttttagtagaaacggggtttcaccatgttggctaggctggtcttgaacccctgaactcgtggtttgcccacattggcctcccaaagtgctgggattacaggcgtgagacattgcacctggccggtatttctgctttttaaaattatttatgaatttggttgtctcattcccatgcaggcttttctactttttacttgggaaaattatttaacttctgtgtaactgaacttattcatatataaaatggggcactaataatacccacttcaaaagtgttgagtattatatgaggtaataacatgtaacggacttaagttaatggtaagcgctatatatgtggtagctatggtgattatgattatctacaaataatattggtctataagtggttcttaagttcttttgaaagaaggcttttnctattattggaattaaagtggaacgttttgatgcaaacagtgttgtttgtaggtaaaccatttggatgacttactgaagtgctaccanaatgatgttganggctgataaaagaaaaaaaacctgtccactttgatgggaagggnacacatntcatttttaagtgaatatttaaaaagactttgtttttgctatgaaattgnantaaagan

SEQ ID NO: 4335 - DNA, 880 bp, Homo sapiens
  misc_feature 6, 15, 26, 435, 447, 459, 473, 512, 534, 554, 566, 600, 602,627, 640, 650, 653, 671, 689, 697, 728, 731, 746, 752, 761,766, 799, 804, 805, 817, 821, 825, 829, 831, 854, 870, 879: n = A,T,C or G
ataggncgcctctanatgcatgctcnagcggccgccagtgtgatggatatctgcagaattcgccctttcttagcggccgcccgggcaggtactgccctagtccacagctgagtggggctggaactaagctacagggttgcttcagggcctacagtcaagacttaggtcttaggcctaaggtgtcacaaacctgcatgtctcccttcaggtccttaagttagcgggcctgctgtattgagaggggctggagccacttttcaggggtgtttcagggactgatgagggacctaggtcaggtggcctgtttgcagggctatggacagccccatctccctccaggatgctgggtaggcagaactgctctctgaccacagcttgagaggggcttatgccaagattcatggttgtttcaggacctgctgtgggactgaaatntgcctgcctgtnctgaggacacanaaggatgtatcttnctgactacagggaggatttctgtgcaggatttctgtaanactgtggctgaagtggaagctnaattccccgattcaaagctnttttcagcatangctatgggacaaaaattggcaagtctgtacctcngnccgcgaccacctaagggccgaattncaacacactggcnggccgttacntantggatcccagctcgggtnccaagcttggccggaatnaatgggantaaatggtttcctgtgagaaatgataatccnttncatttcccacaacantatcangcccggaanattanaatgttaaaacctggggttcctaatgagtgacnttacnnacatttaattgngttncccntcantngccgttttccaattggaaaaccntttcgtgccctcttcntttaatgant

SEQ ID NO: 4336 - DNA, 866 bp, Homo sapiens
  misc_feature 3, 615, 631, 640, 699, 807, 828, 841, 854, 866: n = A,T,C or G
acnactcactatagggcgaattgggccctctagatgcatgctcgagcggcccgccagtgtgatggatatctgcagaattcgccctttcgagcggccgcccgggcaggtacctagcaccaaaacgtgttttgccacattatgaggagaaattaagacacatgcaaatggcccagagtttggtggttggcagtcacaaggaggaaagaaatgtgtgactccaataagagtccctctatagtcatttggttccctcggcccagaaagacaaaggggagtttattcagagtgacataaaagaagggtcgcacaagcaaatcagtgacggggcaaagcattgatggtttgaaggaaaacatgcattatcttttcttaacggtgttcaatgaatttcctttattattcattacattggccaaccagcctctaaggactttgggcagcccaatggaaggctctcaaaggcctttgagtttagcttttgggcttacgatggttttaattagccacagggagaaaaaaagccatcctgatgtgggactcctgaagtgtgtcctactgaaagccaaatggagaactgaggaatgtcatcctctccacccagtcatgtacctcggnccgcgaccacgctaanggcgaattncagccactggcggccgtactagtggatccgactcggtaccaacttggcgtaatcatggncatagctgtttcctgtgtgaaattggtattccgtccaatttcacacaacatacgagccggaacataaagtgtaaagcctggggtgcctaatgagtgagctaactccantaatgcgttgcgcctcactgncccttttcagtcngggaaacctgtcntgccaacttgcn

SEQ ID NO: 4337 - DNA, 899 bp, Homo sapiens
  misc_feature 2, 6, 7, 8, 9, 486, 550, 639, 653, 718, 736, 798, 848, 849,853, 866, 872, 885, 888, 895: n = A,T,C or G
anaggnnnnacgactactatagggcgaattgggccctctagatgcatgctcgagcggccgccagtgtgatggatatctgcagaattcgccctttcgagcggccgcccgggcaggtactgccctagtccacagctgagtggggctggaactaagctacagggttgcttcagggcctacagtcaagacttaggtcttaggcctaaggtgtcacaaacctgcatgtctcccttcaggtccttaagttagcgggcctgctgtattgagaggggctggagccacttttcaggggtgtttcagggactgatgagggacctaggtcaggtggcctgtttgcagggctatggacagccccatctccctccaggatgctgggtaggcagaactgctctctgaccacagcttgaaaaggggcttatgccaagattcaagggttgtttcaggacctgctgtgggactgaaatctgcctgcctgtcctgaggacacanaaggatgtatctcctgactacaggaggatttctgtgcaggatttctgtaagacttgtggctgantggagctgaatccccgattcaaagctttttcaacatatgctatgggacaaaaaatggccaagtcttgtacctcggccgcgaccacgctnagggcgaattccangcacactggcggcccgttactaatggatcccaacctcggtaccaagcttggcgtaaatcattggncataacttgttccttgtntgaaaattggtattccgttcacaaattccacacaaacaatacgaacccggaagcataaaatntaaagcctgggggggccctaatgaagtgacctaacccacaattaattgcnnttgncctaacttgcccntttcantcgggaaacctgnctnccacttnattt

SEQ ID NO: 4338 - DNA, 852 bp, Homo sapiens
  misc_feature 4, 6, 10, 11, 18, 525, 553, 559, 596, 599, 620, 635, 697,701, 734, 751, 812, 820, 821, 824, 831, 832, 842, 843, 849,851: n = A,T,C or G
tgangnccanntttatangactcactatagggcgaattgggccctctagatgcatgctcgagcggcccgccagtgtgatggatatctgcagaattcgccctttcgagcggccgcccgggcaggtacgcgggatgtccctgaagtcctccaggcccacacctccacccgccttctgtcctgtatctgcggaaatatttattttctgtaatgaactttcttggggctccagacaccctctcagcctcttcccacacagaactttgcctacacattcctactacccctggaattctaactcagatgtgggtagcagcttcctcaaagagaaactttttcccagctgggtgctgtggctcacacctgtaatcccagccctttgggaggctggagtgggcagatcgcttgagcccaggagtttgagatcagcctgggcaacatggtgaaactccatctctgtgaaaaatacaaaaattagccaggtgtggtgggtgcgcgcctgtaatcccagctactaaggaggctgangtgggaaggattgcttgagcccaaggangttgangctgcaatgagctgcgatcacaccactgtaccttggncgngaccacgctaagggcgaattncaacacactggcggncgttactagtggatccgactcggtaccaagcttggcgtaatcatgggcatagctgttcctgngtgnaaatggtatccgttacaattccaacaacatacnaccggagcataaagtgnaagcctggggggcctaatgagggagctaacctcacatttaattgggttgggctactgcccntttccatnnggnaaacttnnggccacttgnnttaatnant

SEQ ID NO: 4339 - DNA, 924 bp, Homo sapiens
  misc_feature 1, 9, 131, 308, 311, 385, 390, 392, 394, 399, 408, 434, 469,471, 472, 483, 490, 511, 514, 533, 540, 542, 543, 548, 551,555, 568, 579, 584, 587, 590, 593, 602, 603, 611, 619, 643,652, 654, 660, 661, 662, 663, 667, 669, 672, 674: n = A,T,C or G
  misc_feature 678, 690, 692, 695, 696, 700, 705, 716, 717, 723, 725, 731,733, 737, 741, 745, 755, 762, 768, 769, 770, 774, 775, 793,795, 796, 800, 802, 806, 808, 812, 813, 817, 823, 825, 831,844, 851, 855, 857, 861, 863, 865, 872, 878, 888, 896: n = A,T,C or G
  misc_feature 898, 902, 903, 904, 907, 909, 914, 916, 919, 923: n = A,T,C or G
ngatggtgnatacgactactatagggcgaattgggccctctagatgcatgctcgagcggccgccagtgtgatggatatctgcagaattcgcccttagcgtggtcgcggccgaggtacgcgggtcttctctnctacttatgccttttcttcttcctcctcaccctcatggctccaggtccatgcccagggagcatgttagcatgttgtcaggtctcaaagtatctgaaaagattgtcttctctgtggccaggctgcttagaggcagcctgatataaactgtaaaaagggggagagtgtttctctgtgtnctntgcatccactcttcatgcatttgctccaaaccaaatctgctcttaagaagggatcaaaccaacctgtttaagantgaangnanccatngataggttngcagtgggtaaaccacataaatgaanctctaaatgaggaattccaccttgttaaagaagtnanngtggggccaangcaacantggcttcacgcctgtaaattncancactttgggggggcccaangcacgcngnntcatngangtcngggaagaatcganaccattcctgngcttncgnccnggnaaaacctgnntctacctnaatattcnaaaagatacataaaaagttccctngcccgggcngnccgctnnnnaagncnaantnctanaacaattgggcngnccnntatntttangggaattcaanngtttgngncccaancnttgnggtnaatnctaggacaanaagcttnttcccnnngtannaaaattgtttttccgttnannattncnaccnantgtnncaancctggncnttttantgtgaaatacccntggttgncctnangaantntngtataanatcacnataaattcgngttagagntntacnnnccngnttcananacnggang

SEQ ID NO: 4340 - DNA, 859 bp, Homo sapiens
  misc_feature 539, 557, 560, 592, 596, 616, 633, 641, 646, 647, 666, 679,680, 689, 696, 720, 722, 729, 742, 747, 749, 758, 760, 765,770, 775, 778, 796, 806, 816, 839, 843, 845, 846, 848: n = A,T,C or G
gggccctctagatgcatgctcgagcggccgccagtgtgatggatatctgcagaattcgcccttagcgtggtcgcggccgaggtacaaaggttcagtggtgagaagagggagcaaggcctttggaataatgaactccagttgttcctcataggtgcagcagaaatagcgagaggtcaggattatggagattggtaaggcgagatcatccaagggccttttgcttggtaagccattttactttaatcttgagtgccatagggattcattgacggattgatacagggaaatgaaatgattttttttttttttggttgggggaggcaagagtcttgctctgttgcccaggctggagtgcagtggcacaacgttcggttcactgcagtgtctgcctcccaggttcaagcaattctcatgcctcagcctaccttgtagctgggattacaggtgcacaccaccacacccagctattttttatatttttggtaagagaccgggtttttgccattttgtccagccctggtctcgaactcctggccctnaagtgatctgcccacctnaancttccaaaatgcttgggatcacaggccttganccanccgtccccaaagcccaattnatttcattttttagaantgaaatgnccctnntcccttgggggtggaaatnggaccttgaaggnngggccaatncttgganggcttgaaggccgggttttaaccntnggggaangtgatccagaatngagantngtgaactcnanggggntattngccanaanggggaatgaaaaataaancgggtttttnaggaaagggnctggcctttttaaggggaagggngggngnncnccccaggtttt

SEQ ID NO: 4341 - DNA, 1013 bp, Homo sapiens
  misc_feature 234, 241, 254, 257, 262, 265, 267, 268, 271, 272, 277, 278,279, 280, 281, 284, 286, 289, 293, 294, 297, 298, 299, 305,312, 315, 316, 318, 321, 322, 323, 326, 328, 329, 332, 348,349, 353, 355, 357, 363, 365, 366, 367, 369, 372, 373: n = A,T,C or G
  misc_feature 376, 379, 383, 385, 387, 388, 392, 394, 395, 399, 401, 402,405, 412, 413, 416, 421, 423, 424, 428, 430, 431, 434, 445,450, 454, 455, 456, 459, 467, 476, 477, 478, 479, 483, 485,488, 490, 491, 493, 495, 506, 515, 517, 519, 522, 524: n = A,T,C or G
  misc_feature 526, 533, 535, 538, 543, 546, 547, 551, 553, 556, 559, 562,563, 565, 566, 567, 570, 574, 576, 579, 585, 589, 590, 592,600, 605, 606, 607, 611, 615, 618, 619, 620, 622, 625, 629,632, 633, 644, 649, 650, 657, 658, 659, 663, 664, 669: n = A,T,C or G
  misc_feature 673, 677, 683, 686, 688, 695, 698, 699, 705, 709, 716, 719,720, 728, 731, 733, 736, 737, 739, 745, 756, 757, 761, 765,778, 793, 795, 796, 808, 809, 812, 815, 816, 817, 820, 823,824, 833, 834, 836, 837, 838, 845, 846, 854, 858, 859: n = A,T,C or G
  misc_feature 865, 876, 879, 880, 888, 889, 893, 896, 903, 905, 907, 909,912, 915, 916, 917, 921, 929, 931, 932, 933, 937, 938, 942,944, 948, 951, 954, 956, 958, 965, 966, 975, 978, 980, 989,991, 992, 994, 996, 997, 1012: n = A,T,C or G
ggcgaattgggccctctagatgcatgctcgagcggccgccagtgtgatggatatctgcagaattcgccctttcgagcggccgcccgggcaggtacctgactgtggctcagatctgcgtcgcagcagcgagagaagaaatcactccatatccgatgagaggaagagtggcacagagatggtgtctacaattagagacatttctgactccaccttagcctaagcaaactttatatnctgagtnacatttgaaggtntgnctttnaananncannggggnnnnnctntnttnttanntannncaagtnttatttntannanttnnnttnannttnatatattttcctttanngttntntntgtatntnnntnttnnccntgnttcncnanntaanannttcncnnttnctttaannttncatcnannttcntnnccngatattattantaaanaggnnnctncggtttgnttataaatnnnntttntnttntnntnantttattcatanattcatccncncncantntntatatcnantantacantgnntgcnantgntangtnntnnntanaaantnttngtactntccnntncctttttnataannntatnaatncgnnntncgncctnttnnttttaacttantctanncgttctnnngtannccttncttntaanttaaanacntnattactngtnngtctanttcnattatanatnnaattctcnctntntcnntntattanattataactannactnttantgcatttcctatncttaatatatctatntnnggatgatcgtanntcnacnnngtnttnntttatttcnncnnnttaaggnntgtatttntatnntctaantaatcaataancannttcggttnngacnctntttttcntnananttnatnnntttntcactcantnnntatnnttananctcntcntgntntntatgtcnntttcataantantnaatcacttncnntncnntctttaatatttatnc

SEQ ID NO: 4342 - DNA, 827 bp, Homo sapiens
  misc_feature 184, 230, 243, 351, 383, 431, 519, 539, 540, 545, 628, 658,686, 691, 712, 736, 746, 750, 756, 757, 775, 778, 788, 789,793, 794, 795, 798, 799, 802, 807, 816, 818, 823: n = A,T,C or G
atagggcgaattgggccctctagatgcatgctcgagcggccgccagtgtgatggatatctgcagaattcgcccttagcgtggtcgcggccgaggaacttttttttttttttttttttttttttgcaacagggtcctactatattgccctggctacacttcaactcctggactcaagcaattctntcatctcagtctcctgagtagttgggacaccactgtgcccaatttntattttttagaanaaattatgttcattctccacagtatacactcttatctgtagcttgcattattcacttaattaaggatcttggaaattacacagtttatcagatctttcactcctttanagtatacacgctgtatactctagtcaaccagnccccaataatttctaatcttttgctatttattataaacaaggactgcntgccatacacatacacataagagtaaaaagacaggatatagagttaggaacaaatgtggtaaggatattgtatgtcaaatattttatngggctatgcatattttatgnnatttnaggcacccccccccccccaaaaaaaacccttcagcaggaaatctacccatttacagatcagaaagattaaatttacctggccnaagtcagaatgctggttcccgggtacctgncccgggcgggcgttcgaagggcgaattncaacncactgggcggggcgttactanggggatccgagcctcggtcccaangcttgggggnaatnatgggnnataacctggtttcctggnggngaaaatgttnntccnnntcnnaanttccncaccaacanancgagncggg

SEQ ID NO: 4343 - DNA, 839 bp, Homo sapiens
  misc_feature 550, 553, 563, 565, 594, 616, 623, 625, 627, 636, 650, 652,655, 686, 696, 739, 742, 743, 744, 761, 771, 796, 798, 799,801, 802, 803, 806, 807, 808, 809, 817, 831: n = A,T,C or G
cgaattgggccctctagatgcatgctcgagcggccgccagtgtgatggatatctgcagaattcgcccttagcgtggtcgcggccgaggtactgagcctgtgtgtcaggtaatgtggttaacttaacattcattacagcatgtcatcaccacaaaggcctcttgtggctggtgctattttttttccattttgccgacaaggtttagagagattgaatcacctgcttagacccacacacccagtaagtgttggaatctggattgatgctgtaatgaccattatccagatccttatcaccgtttggggaaattgtctgaaaatccctctgggttatttagagtcaagctttcatctgggtcttcagaaagttgtagtggagccatctgcaccaccacacacctgaagacatttcaggactaacctggatgaaaagggaattgacttttagctaggataggacaaaagggcataatcataaaattaattcactttccttcctttcttttgaaaatttttctaaactgtgtattctccagattttcctggcaaanaanacccccatgnanccctggttttggagaaactggactgtgtngggcaaggtgaaaggtggtctnggggatnananaaaaatggngggtgcctgaaatngnggngtaatttccagcttctcaaggaattgggganggatgtttgnaacctgggagtgtgaggcccccctggggcaacatggccaaggnctnnnttttttaaaaaaaaaanacaatggggngaaggggcctggcttttggcttttnanncnnnttnnnngcaaaatnaaaaaaaaccgggnaaaggggc

SEQ ID NO: 4344 - DNA, 879 bp, Homo sapiens
  misc_feature 468, 469, 470, 471, 486, 559, 565, 571, 577, 589, 600, 609,610, 612, 619, 629, 640, 641, 651, 684, 686, 688, 708, 711,722, 739, 767, 772, 779, 780, 781, 782, 784, 807, 812, 826,827, 831, 833, 837, 859, 873, 874, 878, 879: n = A,T,C or G
atagggcgaattgggccctctagatgcatgctcgagcggccgccagtgtgatggatatctgcagaattcgccctttcgagcggccgcccgggcaggtacctgctcacatattcaatcactccatctcaaaatttatgaggaaagggatgcctggagactggaagaaccactttactgtggctatgaatgagaactttgataagcattatgaaaagaagatggcagggtccacactgaacttctgcctggagatctgagaggaacaacaacaaactaggtgacagagactatgccaactatttcgccttttattctgttgagcaaggaactgtgactgaatgtggagcttatgagcttcagtccatctcctatagtgtggctagtttgctataatattaaaacatgatttaaaatatcaacaaaccagttactccagcaaataaaataagaagaattagagagattaannnnaaaaaaaaaaaaaanaagtacctcggccgcgaccccccttagggcgaattcaagcccactggcgggccggtacctagtggatcccganctcggntccaangccttnggcgtaatcatnggccatagctngttccctgnngngaaattnggtattccgntcacaatttcnncaccaacatnaccaacccgggaaagccattaaagtgtaaaaancntngggggggccctaatggagtngancctaacctcanaatttaattgggggttngggcctcacttggcccgttttccaagtncgggnaaacctnnnncnggcccacttctttatggaattcnggccnccccccccgggganngggngntttnggtttttgggggcccttttccntttcctgggttaanngaann

SEQ ID NO: 4345 - DNA, 849 bp, Homo sapiens
  misc_feature 576, 606, 703, 709, 720, 741, 746, 749, 762, 765, 766, 772,777, 788, 792, 798, 830, 846, 848, 849: n = A,T,C or G
tatagggcgaattgggccctctagatgcatgctcgagcggccgccagtgtgatggatatctgcagaattcgcccttagcgtggtcgcggccgaggtacgcgggacaggcttcatggtgaggggctagaaagcaacgtcagggccgttgcccagggagcctgagggcagaagtcagaggaggaagttacccacttcaggactcaacttggaaggcaagtagacaggtctattctgctgtcagaaaaaatctgcacacttgagcttgggcactcaccaccgggtgcttagttttgttcttagagtagcttcctcacactgatctcaaagagtaagtggacttttggggaaggacttcctggtgggtttggaacagaactggggagaagtggctcaaaggcccccaggcagttgtgggggcagagaaagctttgggctgccagagaggagcagtcatctgtgtctccgaggggaagagcagggagcaggcctggttacagtggaaagggatcacacacagggtgcctgcccccaaaatgctgcggaaacgtggtttggggcttggttgccaagtttgtnccaggcttcctctccactgggtgtcttttnaggcccccagcaacaaggcttcctttcccaagaagccctgtgccttttaatcgcccattttcctaatcttttacccccccttagggtaggggttgcnttccgncttggcattcncttgagtggggaaactttcantttancangggaaaagggtanccnnacctgnggaanaaactttattnggancaaggngaccccttgttccaccccggggaaagggcctnaaggttaacccttaangnn

SEQ ID NO: 4346 - DNA, 825 bp, Homo sapiens
  misc_feature 345, 581, 587, 630, 647, 653, 666, 667, 681, 683, 747, 759,763, 764, 774, 801, 803, 806, 808, 816, 817, 818, 820, 823: n = A,T,C or G
atgctcgagcggccgccagtgtgatggatatctgcagaattcgcccttagcgtggtcgcggccgaggtactagtgggtgttattttgttgaatgaatgttttacccaaacttatatgcatattagattgtttaaaagctcaattaaaaagtgaaaaatagacactgaaaattttttgagtgatttcacatgtgttcatgaaacaatatatctattacaaatcattgaatattttaaaagtaatgtcatgtattcattttcttattttatctcctcagtagactgagatcagtgtgtaggggtgaagcaaggagtcctaccctgtttgactaaggtaaaaattaanaatcagctgagaaaatggaatttgcaaaagtgcctgccagataatgttagaactggaccagaaaataggagttggtataaaactagaccagcgagcttttttttccttcaagatgcaggtcagttttattgcttttggtaaattaagagattgtgtttcttgatctttattaaagtagaatacaatgttaacctacttcaaattttaaaaaatataccacacatgtatatgtatgngtgtgngtatatacacacagggattttaagggcaggttttttggggggngggggggccatgccccncgcatncccaagggaattnnttaatctttttaantnccttgccccgggccgggccggttctgaaagggccgaaattccaacacacttggcgggcccggtncttaggtgggantccnngctccggganccaaagctttggcggaaatcaatggtnantancntggtttcnnngnggnaa

SEQ ID NO: 4347 - DNA, 848 bp, Homo sapiens
  misc_feature 574, 597, 673, 682, 683, 695, 705, 707, 715, 730, 733, 734,740, 751, 753, 781, 817, 839, 842, 844, 847: n = A,T,C or G
ggcgaattgggccctctagatgcatgctcgagcggccgccagtgtgatggatatctgcagaattcgcccttagcgtggtcgcggccgaggtaccaatttattatatgctgccttcagttatttatttatatatttgtctcttaaactaattgtaaagtgttcattaatactggcttataatccacatgtaagcaaattaaaagtatatcttaaacatttactttaatattttaaatattataatttcaaatgagttccaattttcccaacctgctcttaaccagtatttttttttaaccagttctctacttctttaatgaaattaaagaaactaaaataatttcaccacctttaataacaaataaacatcagggaaattatatgtgaacatgtaataacaaaattaaagctactgatctgtaaaaggacagtaagaaaaattagtattcaaaatgacagggagatatttaaataccgacactgcagcagcataaacatgataaatctcattttgatataaatggggaatttccaagatccagcttttatgctttgctattctaaaaattacttnataattctcttatcacatttcangagtcccagtaacccccaatgaagcgttgaaagatctaaacttgaaggccagggtgcaggggactcacggtctggnaatccccannccctttgggganggccgacgcnanggccagantaccttggagggcangannttcaangaccagccctngncaacatggggggaaacccctgacctctncctaaaaaatccaaaaaattaacccccggccgtggngggcaggggccttggaatcccnagntnccng

SEQ ID NO: 4348 - DNA, 872 bp, Homo sapiens
  misc_feature 370, 386, 388, 392, 425, 446, 461, 500, 503, 564, 580, 604,605, 616, 636, 638, 666, 667, 668, 684, 687, 694, 697, 699,705, 707, 709, 722, 731, 732, 744, 751, 759, 765, 766, 773,779, 780, 783, 785, 799, 808, 818, 819, 826, 856, 862: n = A,T,C or G
  misc_feature 867, 868, 871: n = A,T,C or G
atagggcgaattgggccctctagatgcatgctcgagcggccgccagtgtgatggatatctgcagaattcgcccttagcgtggtcgcggccgaggtacttataggcaataaggcgagtctaagacctaaactagataatttgagaacagggaaaaaagattccatttcgattcctgaaggttacccccatacctattataacagaataaaataaaataattcgaaactgcacaacctctaacttatcaaatcctatatatgcctcattttctcaaatgactcctaatttgtgtaaagaaaaggcaaaaagagaaaggacagaaagtatgtcaaggggggctaaagctatgaatacccttttatgtaaaccnagaaaaaaatagatcncncccnttttttaaaaggggaacttttttgaaaccttgncccgcaaagagggaaaaattnctggctaaattggcnccactcaaggacaacttgaattaccgggctttaaatttnttntccaacccatttttttcaaggatttttacagaatccataccttttgccaagctggccttangaccttttaaaccaangcaacctaacctttaaccaacagnntatgaatcttnttcctacctctttttggcananaaaaggccctggacccttaaacttttcnnnttggacctccgaaaanggnggccaanggncnaaagcnantncaaaccccggganaacttcccnnaagggggggttntcagggnaaccaccngggttnnaaatttnattttnnggngngagtttaacttttncccacctangggcccaagnnggggccnttggcccggggggtaaaaaaaaaattttgntttttnttttnnggng

SEQ ID NO: 4349 - DNA, 835 bp, Homo sapiens
  misc_feature 595, 629, 630, 631, 632, 633, 635, 636, 637, 638, 639, 640,642, 643, 644, 645, 646, 647, 648, 649, 650, 657, 658, 690,733, 766, 779, 783, 794, 802, 813, 821: n = A,T,C or G
cgaattgggccctctagatgcatgctcgagcggccgccagtgtgatggatatctgcagaattcgccctttcgagcggccgcccgggcaggtacgcgggaaccagcattctgacttcggccaggttaatttaatctttctgatctgtaaatgggtagatttcctgctgatagtggttttttttgtgtggggggggggtgcctaaaataacataaaatatgcatagcccaataaaatatttgacatacaatatccttaccacatttgttcctaactctatatcctgtctttttactcttatgtgtatgtgtatggcatgcagtccttgtttataataaatagcaaaagattagaaattattggggactggttgactagagtatacagcgtgtatactctaaaggagtgaaagatctgataaactgtgtaatttccaagatccttaattaagtgaataatgcaagctacagataagagtgtatactgtggagaatgaacataatttcttctaaaaaatagaaattgggcacagtggtgtcccaactactcaggagactgagatgagagaattgcttgagtccaggagttgaagtgtancccagggcaatatagtaggacccttgttgcaaannnnntnnnnnnannnnnnnnngtccctnnggcccgcgaacacgctaaggggcgaattccancacacctggcggcccgttactaagtgggatcccgaacctcggnaccaaaccttgggcgtaatccatggggccatangctggttccctgngggngaaaatggttntcccctcnaaattcccccncaaaatanccgaacccggaaag

SEQ ID NO: 4350 - DNA, 1259 bp, Homo sapiens
  misc_feature 2, 4, 5, 12, 15, 22, 25, 30, 32, 34, 41, 42, 43, 45, 46,51, 60, 63, 64, 65, 71, 72, 73, 81, 84, 87, 90, 93, 94,95, 101, 108, 111, 113, 114, 119, 128, 129, 131, 133, 134,140, 144, 149, 162, 166, 179, 180, 182, 189, 197, 207, 238: n = A,T,C or G
  misc_feature 241, 243, 244, 354, 403, 408, 451, 481, 525, 535, 538, 546,554, 588, 609, 634, 647, 648, 665, 675, 709, 750, 751, 836,885, 891, 905, 928, 933, 953, 976, 987, 988, 999, 1001,1028, 1043, 1053, 1061, 1063, 1071, 1088, 1091, 1096, 1101: n = A,T,C or G
  misc_feature 1129, 1131, 1140, 1144, 1153, 1167, 1181, 1185, 1186, 1190,1195, 1207, 1219, 1220, 1226, 1227, 1235, 1240, 1242, 1243,1252, 1253, 1258: n = A,T,C or G
gnanncttctantcntttctcntanggaantntnctaacgnnncnncctgnctcaaattnctnnntatgtnnntaagtctngtnttntcnttnnntatctnagagagntgntnnagatngtcctacgnntntnngtctgntctntttcnttctttaacatgncatngctctagcaggcnngnctagtgngatggatntctgcagaantcgccctttcgagcggggcgcccgggcaggnacncnngtaaatggagaaggcttccatttacttcagaaagctacactgactctactaaaaggcccctttcctgctggcttttagggaaaagagagaattccctcatcagtctcaanaatcacaagcaacaggaaatgggggaaaatcgttttactacagaatganaatgntgtctgattcaagtaatacctccttgcatcttcccctttagcncaaagaaaccccacttaggcctcttcaagnaatattcttgaggtagccttgtcagaagggtggtccctttacangaccaggcanaantttgcctnaaaataancagttttggtttggaaataattttaccttaaagnccgcccaagagcaacttgggngcctaaaagggggcctccctttgtnggaaaatttgtgnncaactttggatccctcnacccacaagncccctccgttcacccttcccatttttggaccagnatggaggaaaaaaccttgaagaacctcaccttaaagggccnngaaggccttccaacaccaagccttaggtggaccaggggccaaaaagccccaggacctttggggggaccccttgggctttcccagntccttgcttggaagccagttcttggcccttcccaggaaacccctattanctcttntaaaaatcccccgnaaaaaaccaggaggctaataagnatggncttttttccctggcccttcnctttaaaacctttttgccttttnccccccttaannaaaagggtttngngggtttttaaccctttctttcttccanaaccaatttaagggngcccccctcntccaaggnangggaaaantggccaaaaaaacaaangtngcccnaaaanaacctttttaaattcagggcttaaaacnancttttcttnttgnccaaaaaancaaggggaaaatgntggaaatttttacnttanntttnaaagnaccttgggaaantttcaatgggtnnaaaatnnccaggggnatggncnntcaattttnntttang

SEQ ID NO: 4351 - DNA, 1323 bp, Homo sapiens
  misc_feature 4, 5, 6, 8, 10, 13, 16, 18, 21, 22, 25, 29, 31, 32, 33, 35,39, 43, 48, 49, 51, 52, 54, 60, 62, 63, 65, 66, 69, 71,72, 73, 74, 77, 81, 88, 92, 96, 97, 99, 100, 101, 110, 111,112, 115, 117, 118, 122, 123, 132, 139, 145, 146, 177: n = A,T,C or G
  misc_feature 194, 202, 216, 219, 225, 239, 324, 334, 387, 407, 422, 429,434, 436, 468, 474, 504, 514, 516, 522, 525, 536, 538, 545,550, 574, 576, 580, 581, 585, 588, 590, 595, 613, 634, 635,701, 707, 710, 712, 713, 731, 738, 740, 742, 757, 780: n = A,T,C or G
  misc_feature 781, 789, 825, 830, 836, 871, 882, 900, 913, 922, 929, 937,938, 939, 945, 946, 957, 958, 962, 963, 964, 966, 974, 980,982, 992, 995, 998, 1002, 1006, 1011, 1016, 1021, 1022,1027, 1031, 1033, 1047, 1051, 1052, 1053, 1054, 1063, 1075: n = A,T,C or G
  misc_feature 1077, 1082, 1083, 1087, 1091, 1093, 1096, 1097, 1102, 1104,1105, 1113, 1114, 1115, 1117, 1129, 1135, 1148, 1156, 1158,1159, 1160, 1161, 1162, 1171, 1173, 1178, 1185, 1187, 1189,1191, 1219, 1227, 1233, 1234, 1237, 1239, 1241, 1243: n = A,T,C or G
  misc_feature 1244, 1246, 1252, 1254, 1258, 1266, 1267, 1268, 1274, 1275,1278, 1279, 1282, 1284, 1289, 1290, 1292, 1294, 1296, 1301,1311, 1315, 1317, 1318, 1319, 1320, 1321: n = A,T,C or G
aagnnntntnctnttncnccnnacntttntnnnantctntttntctanntnntntaattnannanncanannnntcncttnataactntatngatnntnnnagtcagagnnntgnanngagnngagctcctntctagcngtattnntaccctcttgatgcatgctcctccgagccgncagtctgagtggatganatatctgnagaattcgcccttncgngcgggngcgcccgggcaggnacccgttttcatctctgccttgataacatccgtggatacaatactatccatactccaagccgttattgatatttgaacatgtcgnggcttgcctnacctgcctgcgggtttggatttcccatagatgggctttggctccctctggggnctacactgtgccccacatanacaaggggaagctanacaattnttgcncncagtagggccaaatcaccagggccccaaaggngttgcnaggccaagtgggcttggaataattggaaantctctagccntncttcanccnactggtggggnantttcaanaccgnacctggttggccccccttggaagngntttnnttanaancnccagngtgggggtaatttttttnggggaaaaaaacaaggataanngggaggcccaactttttttccttaatttaattcaaccaattggtgggaaaaaataatccttttttnattttnaananncttaatataaaaaaaagntctcgangngntaattaaccaaattngttttaattaaaaaaaaaaaaannaaaaaaanggggattgttttgggcggtttgttggaaagggggtntgttnttgaanaaaattcaaccttggggaatcctaattatttaatnaaaggccacangtttggcttggccaacanggaaaaaaaaacnatagctttnataaggncaataaannntccccnntgggggccggnnaaannnanccccttangggggngnaaattttctnaanatnaccncttngtgcngggtnccggnntaaantaangngggggatcccggancctnnnngggtaccanaaacctttgggngntaaannaatngggncnacnnaacantnntattcccnnngngggaaaaaaatngggttnaacccccttcccntaaattcncnnnnnacaacaatntntaaanccccggnanancntaaaaaaggagtaaaaactcctgggggnggggcccnaaaagnnggngngncnnanactccncnacanttaaaatnnngggttnntcnntcncnttgtnncncngntttgntgctgcaggnaaanannnnncg

SEQ ID NO: 4352 - DNA, 868 bp, Homo sapiens
  misc_feature 3, 6, 11, 18, 83, 89, 286, 406, 434, 437, 488, 500, 507,518, 522, 547, 550, 554, 555, 571, 588, 605, 606, 615, 630,638, 674, 679, 690, 699, 703, 708, 716, 718, 720, 723, 729,733, 736, 739, 748, 757, 767, 776, 783, 789, 805, 808: n = A,T,C or G
  misc_feature 809, 818, 825, 830, 832, 838, 849, 850, 851, 855, 856, 857,859, 861, 862, 863, 864: n = A,T,C or G
ggngcnctggnccctctngatgcatgctcgagcggccgccagtgtgatggatatctgcagaattcgcccttagcgtggtcgcngccgangtacgcgggggctcacagtgggatcctgttaggtgtgggtggatgagagtcagggtccatcagtgtattcatttaactgttcatttgtataaccccgtttaagaatactgtcctccaagtgccaagaatggtgctcaggggattaccacctaattgctgactcaagttgctggtttgcaatgggcacagaacttctnttagtaggtggcatgagttgagaaggttctggatcagagataggggcccctctgatcacctccactcctataggtatgaagacagagctggccatgcgccagtctgtggagaacgacatncatgggctccgcaaggtcattgatgacnccnatatcacacgactgcagctggagacagagatcgaggctctcaagggagggngcttttctttantgaaaancaacccccccncagntatttaaaaggcctaccaacccccncanttgnncagctcttgggttttnacccgtgggaaggtaanatttcccccccaaaatnnttcaagganccttcgcccaaggantcattggncaagaccattcccgggggccccaattattgaccaanctttnccttcgggaanaaacccccnaaanggagncttttaananantanccctgngccnggnccnggcccgtanaaaaagggngcgaaatttnccaaacacnccttggncggggngttacttaattggaanacnnaacccccgnttccaangcttngntttaanaaattggcccnnncccnnntncnnnnggaa

SEQ ID NO: 4353 - DNA, 895 bp, Homo sapiens
  misc_feature 52, 281, 349, 415, 419, 431, 468, 474, 479, 516, 520, 527,528, 529, 530, 533, 537, 552, 553, 559, 572, 573, 578, 586,589, 591, 601, 608, 614, 616, 620, 626, 632, 644, 663, 667,678, 680, 686, 689, 690, 693, 694, 703, 704, 709, 710: n = A,T,C or G
  misc_feature 713, 720, 732, 734, 738, 741, 742, 743, 746, 748, 749, 760,763, 765, 766, 786, 788, 789, 793, 796, 800, 801, 802, 807,813, 814, 815, 818, 821, 834, 835, 841, 846, 852, 855, 861,871, 874, 877, 882, 884, 887, 888, 894, 895: n = A,T,C or G
gggccctctagatgcatgctcgagcggccgccagtgtgatggatatctgcanaattcgcccttagcgtggtcgcggccgaggtacacaaaaggggttcatccactgttagaataatggattaggccatttccttggggagccacaatgccagcttctttggtcttttattcctcttagactagtcagataccacagagaaaattccagttgctgcttagagataaacatctggctgctattgtgtgggagacaagtccgaaagagaaagcagggagtcttnaattaaatacatgaacctatgtcttaaccccactgtttgcacactgtcctgagtccagagacactcantttcacactacccaaaggataattgtctagctcagggagagggatggtgccttgccccgggccggnccgntcgaaaggggcnaaatttctcagcacactggcggtccgttactaagtgngatccngatcntctggtaaccaaagctttgggccgttaagtcattggntcantagcctnnnnttnctgnggtggaaattggtanncctggnttacaaatttccnncacanacaatacnttngnccgggaaagncattaanaagtgntnaaangccctngggggntgcccttaaatngaagttggaggcttaactncccnttcaaattggngnttggcngcnncanntggccccgnntttannaantctgggnaaaaccttgtcncntggncannntgncnnttaaatgaaantcngnnccaacatctccgggggaagnanncccngcnttgnnntattngtggcnnnttnttnccgcttttctttnnttatantaganttcttntgntttcgntgatttttangtntanactantntgnnattaann

SEQ ID NO: 4354 - DNA, 819 bp, Homo sapiens
  misc_feature 73, 85, 87, 91, 241, 638, 661, 676, 687, 689, 704, 706, 714,729, 750, 759, 770, 787, 796, 811: n = A,T,C or G
gggcgaattgggccctctagatgcatgctcgagcggccgccagtgtgatggatatctgcagaattcgcccttnccagcggccgcncnggcnggcacctgactttgggtaagttgccagaataagatcatcaggcttggcttggaaattacatactttttcccaccattcttttgataatatcaacgtagggactccatctacttccatgatgttaaacagttctggctttttttccatcgngggagcgtttttctcaatcttcgccattgggaatctggtatctcaggcagcagaggaagcagcttgctgcctttagtcaaactgcttcctggaaacccagagccaggtccagctccaggacactgtgcaagcaagagcacagcaggtccccgcgtacctcggccgcgaccacgctaagggcgaattccagcacactggcggccgttactagtggatccgagctcggtaccaagcttggcgtaatcatggtcatagctgtttcctgtgtgaaattgttatccgctcacaattccacacaacatacgagccggaagcataaagtgtaaaagcctggggggcctaatgagtgagctaactcacattaattgcgtttgcgctccttgcccgcttttccagnccggggaaaccctgtcggcccanctgcatttaatgaantcggcccaacncnccggggaagagggcngnttgcgtanttgggcgcctttttncgcttttccttggttaaattnacttcgttngggcttcgggncgtttcgggttgtgggnggaaccggntattcaaactttacnttaaaagg

SEQ ID NO: 4355 - DNA, 379 bp, Homo sapiens
ggcaattgggccctctagatgcatgctcgagcggccgccagtgtgatggatatctgcagaattcgccctttcgagcggccgcccgggcaggtacactcggccactgttctctgacctactgccagccctagtgctgcctgcaccccaggagctagctgtaagacctggggcaggtatgcagccgctgcaagccttggttccacaccacgcctgtgaaaggaaggaaggatacaaggcaatgagccacacagctccttccagcgccaacagccactgcgaaattaggctcttttgctttggccatacttgtataccggcattcgggctcagctgggcactggaaagcagctgttccgtgcttgttaaggtaattaagcaa

SEQ ID NO: 4356 - DNA, 395 bp, Homo sapiens
  misc_feature 4, 205, 208, 218, 235, 236, 237, 239, 254, 257, 258, 259,266, 269, 276, 281, 283, 284, 287, 290, 293, 296, 298, 301,303, 304, 311, 315, 316, 320, 322, 325, 327, 328, 331, 333,339, 343, 350, 353, 354, 358, 368, 372, 373, 377, 378: n = A,T,C or G
  misc_feature 379, 380, 381, 382, 383, 385, 386, 389, 390, 391: n = A,T,C or G
ggcnattgggccctctagatgcatgctcgagcggccgccagtgtgatggatatctgcagaattcgcccttagcgtggtcgcggccgaggtacagggaaaaacagtagttaagggttgcatttccaggcctctgcctccatcaagtattatttaccaagctaaagaagctgaggggtgtgggggaaatatatttggggcagaacgnggnatactcaatnaatgggcttgctgaatnnnanacatgaaagaggcantgnnnaaaatgnatntgagctnttttncnngantanctntgncncangnnctgggcngcanntatngnagntnnttnantggttncaanatgcttntcnncgtntaatgttggntganncttnnnnnnntnnctnnnggtt

SEQ ID NO: 4357 - DNA, 396 bp, Homo sapiens
  misc_feature 4, 11, 174, 180, 185, 187, 192, 194, 201, 202, 216, 217,218, 223, 228, 229, 236, 244, 252, 253, 254, 255, 257, 261,262, 267, 268, 269, 279, 280, 284, 285, 289, 294, 296, 298,311, 317, 323, 331, 350, 352, 354, 356, 367, 373, 375: n = A,T,C or G
  misc_feature 385, 388, 389, 391: n = A,T,C or G
tacntagggcnaattgggccctctagatgcatgctcgagcggccgccagtgtgatggatatctgcagaattcgccctttcgagcggccgcccgggcaggtacttttttttttttttttttttttatttttttttttttttttttttttttttttttttttttttttttttttangacaancaaananaaaananacaaaanntttaaaaaaaaaannnaaaanttaannaaaattnttgaaaanttttttgnnnnanaatnnggcannncttaaaaaanntggnntgantaaanananaaaaaaaaaacantaaaantgggangggaaaanaaccaaaaaaaaaaaaaananananaaaaaaaaggnaaaaantnttgaaaaaanatnnanaaaaa

SEQ ID NO: 4358 - DNA, 381 bp, Homo sapiens
  misc_feature 371, 372, 373, 374, 375, 376, 377, 378, 379, 380: n = A,T,C or G
ttgggccctctagatgcatgctcgagcggccgccagtgtgatggatatctgcagaattcgcccttagcgtggtcgcggccgaggtacatgcaagctactcttgctctttggatccatggctgaatctggacaccagcagtgaccagctctagagtaaaaaaatcaggaagggggctggccacactgggttggagaatcagacttggggataccatgccatgaggtgtgtggcctctgggcaacaaaacaacaccagtttagactcatctccttgaaacagaaggaaaagccaggcttgaaaacatgggttagaacaaggaatcttgggccaggcgcagtggctcaggcctgtaatctcagcactttgggannnnnnnnnnt

SEQ ID NO: 4359 - DNA, 395 bp, Homo sapiens
  misc_feature 2: n = A,T,C or G
tncttagggcgaattgggccctctagatgcatgctcgagcggccgccagtgtgatggatatctgcagaattcgcccttagcgtggtcgcggccgaggtaccaggatgcaaaagcaagaatgttcacagcagtatttttgataacaaccacatttggaaattattcaaatgtccacccacagtaaaacaaacttatacaatggaatcagtggactacagcatgtagctgttaaaatgcaattaaaaatgacaaacatatataagcaagtcacaaaagtgcatacttttaaacttttaacattggcaaacaatattgtttgcagatatatatactggtagtaaaaactgtaaataaaagtaaggaaaggattactataaaaaggcaatggtggtcat

SEQ ID NO: 4360 - DNA, 830 bp, Homo sapiens
  misc_feature 87, 95, 658, 665, 673, 677, 687, 719, 721, 765, 774, 784,786, 787, 790, 792, 801, 809, 824, 827, 830: n = A,T,C or G
ggagctccaccgcggtggcggtggcaagcagggcggccacgcgataaccggacatatagctggcggcgagcgcggcctgctggctgncgtcagcnatttccaggcggtaggcgtctaccgcgatatcctgggtggcggaagcgaaggcgacgataaccgcgatagcgatcagccaggacaggtgtttttgcggatcgcagaaccccatgccgatcaatccgaggataaccagcgtctgggacaagactaaccaggatcgacgacgtccgagcttgccgagcagtggcaggcgccattggtcgagcaagggcgaccagacccacttgaaggcataggccaggccgatcaggctcgcgtacccgatggtttcgcgggccacaccggcctcacgcaaccacaccgagagcgtcgagaacaccaacatgtaaggcaagccggcagcaaagccgagcaacagcagcactaacgtcgaggggctggcattaggccggcgagcgcggcgcgccaggttttacggggcatgggctggagtctgccttcaaaattacgcaaataaagcgcgcactctaaccgttgtgcttttaccgggcgccagccattgacgcttgaaatatcaacacgattgttcaaggattgcttgacacctttcaagcgcgtnaaacgcncgccgttncttngttcccttgnggcacttgcccacccggcagaacttttttcgnancaccgggggacccaacacgccggtggccaggggcaaattttggngtttcttcngggcaagctngnnttnanggtaccggncccacccnaccgttgggggacgnaanccn

SEQ ID NO: 4361 - DNA, 963 bp, Homo sapiens
  misc_feature 3, 4, 5, 6, 15, 17, 25, 26, 28, 30, 31, 40, 88, 106, 136,331, 434, 595, 603, 667, 674, 680, 682, 693, 699, 702, 711,728, 732, 750, 764, 771, 775, 777, 781, 783, 790, 796, 798,801, 804, 812, 815, 817, 820, 830, 838, 847, 858, 861: n = A,T,C or G
  misc_feature 874, 890, 895, 899, 907, 908, 925, 927, 928, 931, 941, 946,949, 950, 956: n = A,T,C or G
ggnnnnaggtgttgntncctttaanncntnnggcttttgnagctccccgcggtggcggccgtggaagcggcgcgggccggcgagtttnggacgcggctttgccgtngtcgccaccgaggtgcgcaccctggcgcancgctcgacggccgccgcgaaagacatcaaggatttgatccaggcgtccgccggcacggtggacctgggccacgcccaagtgagccaggccagcgccaccatggataccgtggtggccagcgtgcagcaactgagcaccatcatggccgagatcgcgcaggccagcgacgagcagcgcagcggcatcgagcaagtnaaccaaggccatcgcccagatggaccaggtgacccagcagaacgcagccttggttggaagaagcggccgcagccggcagacgcctttgcaggagcaggcgcangagcttgaaccaggtggtggggcgtgttcaagcttgtaacaagcaattcccgggtgcttaagattgggggaacgaaattccaccctttgccaagggaggcacccattgccattgaacgacttaccgtttttttaaattttgcccccgggcttgattgaatnccccaacngggattggccgccaccgttcatttccgccggggttgccctgggccccgccggcccggcatttcnaactttnctttgntngaccgggaccnaaccangcnacatttgcnagggcccgaaaattgcnttgnttgggcggggccggccantttgggcggggggncccccgngttnantggntnccgccgnaaccancnaanatngggccccnccncnaanttgaaatttntttggccngctttttangcggggggggnatntttgggccttttncccaaaattttcccanttttngggncccccccnncccccctttttttttcngnnttnttttttctangtttnaanncccccnccccccc

SEQ ID NO: 4362 - DNA, 767 bp, Homo sapiens
  misc_feature 502, 573, 601, 610, 627, 634, 660, 674, 675, 711, 747, 748,751, 754, 766, 767: n = A,T,C or G
ggagctccaccgcggtggcggccgaggtacgtggtggagccaggatctgtcggactctggagtccaggtttgcagagagcccccggctcatcctggcctctccggcatctcacttcctccctgcaggcacgtaggaccggcctcagctctgtcaagatctgcactgtaggaccccagagatttttttctttctttgggtagtcagacccatctgcaaaagttttgcaatcatgaaatcagatagcgtatgaaatgctaggaataagcgcaggtctagcataccacgcggccagcggtagcgtgacctgacaggaggagtgcgtcttcagagacattgggaaactggcgtgcctgtcgcccgtcccagggtcagagtcttcgaaaccaggctttctgggaacccaacaaggagtttctgatcgaagaaccgcactgaggacagttagtctttttttccacactgggcattttcagcattggaagtcaatgggagccctgcgtntgcaggtttttgagatgtggcactcacagcagggtcactagaatggagacatccatgggaccaggttacangcgctccggcagttgggaaaaagcgttnccaaagcanccttccctaggctcatncacttgnctgcccaagacagaaaacgtcataanaaggtttacaggannaaatcttggggacttcctagttcaacttgcccctangtagatggcaaaaaccctcaatggaaagctgtttannttnttnacaaaaaacttnn

SEQ ID NO: 4363 - DNA, 755 bp, Homo sapiens
  misc_feature 623, 662, 665, 738, 754: n = A,T,C or G
ggagctccaccgcggtggcggccgcccgggcaggtacgcggggagaatagagtggctgacttgctgattgaggtcggcagctcccgagaagcaggagaagcagagtttttgcagacagacccacgaagtcaagcatgcggagtgcagccaagccctggaacccaaccatcagagcagggggccacggcccagaccgggtgcggcctctgcctgcagcctcttccggcatgaagagttctaagtcttcaacttccttggcttttgagtcccgactcagcaggctcaagagggccagcagtgaggacacgctcaacaagccaggaagtacctcggccgctctagaactagtggatcccccgggctgcaggaattcgatatcaagcttatcgataccgtcgacctcgagggggggcccggtacccagcttttgttccctttagtgagggttaattgcgcgcttggcgtaatcatggtcatagctgtttcctgtgtgaaattgttatccgctcacaattccacacaacatacgagccgggagcataaagtgtaaagcctggggtgcctaatgagtgagctaactcacattaattgcgttgcgctcactgcccgctttccagtcgggnaaacctgtcgtgccagctgcattaatgaatcggccaacnccncggggagaggcggtttgcgtattgggcgctttttccgttcctcgctcactgactcctgcgctcgtcgttcggntgcggcgaaccgtatnt

SEQ ID NO: 4364 - DNA, 771 bp, Homo sapiens
  misc_feature 68, 415, 522, 677, 711, 721, 769, 771: n = A,T,C or G
ggagctccaccgcggtggcggccgcccgggcagggtacctgactttgggtaagttgccagaataagancatcaggcttggcttggaaattacagactttttcccaccattcttttgataatatcaacgtagggactccatctacttccatgatgttaaacagttctggctttttttccatcgtgggagcgtttttctcaatcttcgccattgggaatctggtatttcaggcagcagaggaagcagcttgctgcctttagtcaaactgcttcctggaaacccagagccaggtccagctccaggacactgtgcaagcaagagcacagcaggtgaggtccccgcgtacctcggccgctctagaactagtggatcccccgggctgcaggaattcgatatcaagcttatcgataccgtcnacctcgagggggggcccggtacccagcttttgttccctttagtgagggttaattgcgcgcttggcgtaattcatggacatagctgtttcctgtgtgaaattgatatncgctcacaattccacacaacatacgagccgggagcataaagtgtaaagcctggggtgcctaatgagtgagctaactcacattaattgcgtttgcgctcactgcccgcttttccagtccgggaaaacctgtcctgccagcttgcattaatgaatcnggccaacccccggggagaggcggtttgcgtattnggggcgctcnttcccctttctcggttcacttgactcgcttgcgcttcggtcggtttcngn

SEQ ID NO: 4365 - DNA, 784 bp, Homo sapiens
  misc_feature 650, 670, 673, 703, 725, 759, 777: n = A,T,C or G
ttggcgaattggagctccccgcggtggcggccgaggtacaggcacttgaggtagcttatctcatttattcttcacgatgaacctttctccaccatctaatggcttcttcctctgcagcatctggttctgtatattctggccaccaaaagcgaagttcctaaatgttggactgaaatcctagctcactgtaggaagccagctaagagctgaaaagattttggaaataggatttctggagcagcccagagtcaggcaccaactatcctgtccatagtcatgtcctccccgcgtacctgcccgggcggccgctctagaactagtggatcccccgggctgcaggaattcgatatcaagcttatcgataccgtcgacctcgagggggggcccggtacccagcttttgttccctttagtgagggttaattgcgcgcttggcgtaatcatggtcatagctgtttcctgtgtgaaattgttatccgctcacaattccacacaacatacgagccgggagcataaagtgtaaagcctggggtgcctaatgagtgagctaactccattaattgcgttgcgctcactgcccgctttccagtccgggaaacctgtcgtgccaagctgcattaatgaaatcggccaacgcgcgggggagaggcngttttgcgtattgggcgctnttncgcttttcttgcttcactgacttcgcttgngcttcggtcggttcggctgcgnggaagcggtattcaggctcacttcaaaaggcggnaaataccggttattccancagaaat

SEQ ID NO: 4366 - DNA, 778 bp, Homo sapiens
  misc_feature 474, 504, 511, 608, 659, 672, 675, 681, 711, 756, 769, 777,778: n = A,T,C or G
gggcgaattggagctccaccgcggtggcggccgaggtggccgaggtacgcggggggccaaataagcactatgtaagtttttttaattttcccaaacacatgcacagaattaatattgccttaaattttgttagcacaagtttgagagagctctttagttcataaaaaaatgttttatggaccaggtgccgtggctcacacctgcaatctcaacaccctgggaggcccaggtgggaggatcgcctgagcctaggaatttgagaccatcctggccaacatggtgaagccccgtctctactaaaaatacaaaaaattatctggacatgctggcgtgcgcctgtagtctcagctactagggagactgaggtgggagaatcacctgagcctgggaggtggaggttgcagtgggttgagatcatgtcactgtacctgcccgggcggccgctctagaactagtggatcccccgggctgcangaattcgatatcaagcttatcgataccgtngacctcnagggggggcccggtacccagcttttgttccctttagtgagggttaattgcgcgcttggcgtaatcatggtcatagctgtttcctgtgtgaaaattgntatccgctcacaattccacaccaacatacgagcccgggagcataaagtggnaagcctggggtgnctnatgagngagctaactcacatttaattgcgtgcgctnaactggcccgcttttcaattcggggaaacctgtgtgccacttgcntttaaatgaaatngggccaann

SEQ ID NO: 4367 - DNA, 774 bp, Homo sapiens
  misc_feature 32, 48, 49, 619, 644, 655, 726, 728, 730, 734, 738, 773: n = A,T,C or G
ggcgaattggagcttcccgcggtggcgggcgngggccaaaaagcctannatcaggccagggtggctcacacctgtaatctcagcactttgcgaggccgaggtgggaggacagcttgaggccaggagtttgagaccaacctgggcagcatagcaagaccctgtctctacaaaaagttaaaaaattagtcgagcggccgcccgggcaggtacaaataatagctgcgcccacacacactaatgcccccccacagcccacagccttggggcgctccaaggagagtgagttcaataccagcagtaagggcgactcgctcctggacgtgaatctagcatgcaagatcattttcattaaacacgtaactgcacagcgacgatttacatctcctcttatttcctttgaatgagaagcagacgcataacagcaatctggaatagaaagtggagcttttacaggctgttgtatgtgcaccaaggccgggagaggctgacgtccgtcagcatcatgtggcaggaaaaccgcaaatagttcgaaaggccacactctccagcaccgactgagtagctgctgcaggaagggggacaaatggtcctcagcaaggacccttttcagaaggaacanggagaccgcgtggagggcccatganaatgaatttgngggttgcactggtttggcatgtctcaaaataagtaaaatccagtatgtgtgactggtttaagaaaagcagntnanggcnggtngagtctttttttgggtaaattaagtgatttttcant

SEQ ID NO: 4368 - DNA, 1153 bp, Homo sapiens
  misc_feature 2, 4, 6, 8, 9, 10, 11, 12, 15, 19, 20, 25, 27, 28, 30, 33,34, 36, 37, 40, 43, 44, 45, 46, 47, 48, 49, 50, 52, 53,56, 57, 58, 65, 66, 67, 70, 71, 72, 74, 76, 77, 80, 81,82, 83, 84, 85, 87, 88, 89, 90, 91, 92, 93, 94, 108, 111,116: n = A,T,C or G
  misc_feature 119, 120, 122, 128, 133, 420, 486, 519, 622, 635, 669, 679,684, 728, 743, 749, 775, 781, 794, 828, 844, 855, 882, 903,913, 947, 956, 1044, 1045, 1053, 1070, 1082, 1090, 1094,1100, 1101, 1109, 1123, 1129, 1138, 1147, 1150: n = A,T,C or G
antntngnnnnnttngggnnaattntnnanatnntnnggnaannnnnnnntnnttnnnaaaattnnnttnnntntnnggnnnnnngnnnnnnnnaggggggatgttgnganctttntannantcactnttatngcgaattggagctccaccgcggtggcggccgaggtacctgactttgggtaagttgccagaaataagatcatcaggcttggcttggaaattacatactttttcccaccattcttttgataatatcaacgtagggactccatctacttccatgatgttaaacagttctggctttttttccatcgtgggagccgtttttctcaatcttcgccattgggaatctggtatctcaggcagcagaggaaagcagcttgctgcctttaagtcaaactgcttcctgggaaacccangagccagggtccaagctccaggaacactggtgcaaggccaaagaagtacagcaaggtccccgcgtnccctgccccgggccggccgctccgagaatatcnaagctttattcgatacccgtcgacctccgagggggggggccccgggtacccagcttttttgttccccttttagtgaggggtttaaatttgcgccgctttgggncgttaaattccantgggtccaataagcctggtttttccctggtggtngaaaaaattngtttnattcccgccttccaaccaattttcccaccaccaaaccattaacngaagccccggggggnagccantaaaaaagttggtaaaaaggcccctngggggntggcccttaaatngaagttggaggcttaaaccttcaaccatttaaantttggcggtttggccngccttccaacntgggcccggcttttttccaaagttccnggggaaaaacccctggtcccnttggccccanccttggcaatttaaaattggaaaattcggggccnaaacccccncccggggggaaagaagggcccgggttttttggcggttaatttgggggcggcctctttcccggctttcctttgggttcaacttgaactnngatttggngcttcgggtccgttttngggcttggcggnccgaaagncggntttttnnaaactttnctttaaaagggggngggaanttacccggnttatttccnccnaag

SEQ ID NO: 4369 - DNA, 888 bp, Homo sapiens
  misc_feature 1, 10, 11, 19, 23, 25, 26, 27, 35, 36, 56, 78, 523, 631,650, 651, 664, 682, 694, 697, 705, 713, 735, 751, 755, 756,765, 776, 793, 801, 805, 810, 812, 818, 823, 826, 834, 842,845, 857, 861, 865, 873, 874, 877, 881, 882: n = A,T,C or G
ngccccttannccttgaanaccncnnntttggaannggagctccccgcggtggcgntcgaggtactttgggaggctgntgcaggaagatcccctgagcccaggagttcgagaacagcctggacaacataaggagaccccgtctctataaagtaataataataataaaatagttgtttgccttgcagcccagggtgagtagaaaagtatggctgaatataaagcaacaaatatttattttactttctatatacttcttaaaagaaagtttattcttagtaaataaatactacctttacttaagtcctaacttcacattgtctgtacctgcccgggcggccgctctagaactagtggatcccccgggctgcaggaattcgatatcaagcttatcgataccgtcgacctcgagggggggcccggtacccagcttttgttcccttttagtgagggttaattgcgcgcttggccgtaatcatggtcattagctgtttcctgtgtgaaattgttatccgctcacaattncacacaacatacgagccgggagcataaagtgtaaagcctgggggggccctaatgagtgaagctaacttcacatttaattggcggttgcgctcactggcccgctttttncaagttccgggaaaccctnntcgtgcccaaccnggcaattaaatgaaattnggggccaaaccnccnccgggggngaagggcnggttttggcgtttttgggggcngcctctttcccgtttncctnngctttcaanttgacttccgnttgccgcctcgggtccntttcgggnttgnggggncnaagccnggttnttnaacttcanctcaaaanggnggggtaaaaacncggnttantccaccannaancccnncgcccg

SEQ ID NO: 4370 - DNA, 805 bp, Homo sapiens
  misc_feature 593, 624, 640, 651, 686, 705, 722, 731, 761, 784, 790, 793,794, 798, 800: n = A,T,C or G
tccaccgcggtggcggccgaggtaccaaagacctccagtgatgcttatgaacatgtagctgctgtttggaagctggaagccccatatcagatgcctaccacagaatctggagttggggcagagtgctgaattggtcggagttacctgtctgcttgataacttcagatgcctcctttctcagatggcattgctaagctctgcaaagatctaactgtgaggatgagataatttaatcttgcccgtgggctctatcctggcggagataccatgggactgaatcctgggctaaattgtaatcttgggaaaggcaactatacctggccgagttgttcctagagagaaagcagaagaaggtcttcccaagaaagaccatgacagcacagaggcagtctgaagggaagccaaggaaaggatttgagaccctacaagaatgaagttggaaggataataaaagtccacaggcaagagtacctgcccgggcggccgctctagaactagtggatcccccgggctgcaggaattcgatatcaagcttatcgatccgtcgacctcgagggggggcccggtacccagcttttgttccctttagtganggttaattgcgcgcttggcgtaatcatgggncatagctggtttctgngggaaaattgnttttccgctcacaatttccccacaacattacgaanccggggagccttaaagtgntaaaagccctggggggngccttaatngaggtgagctaaccttcccatttaattggngttggcgcctttacttggcccgntttttncanntccncnaacct

SEQ ID NO: 4371 - DNA, 853 bp, Homo sapiens
  misc_feature 63, 275, 328, 363, 432, 443, 445, 474, 518, 530, 533, 534,550, 556, 585, 590, 602, 603, 606, 610, 612, 615, 623, 643,646, 666, 681, 683, 685, 691, 707, 709, 710, 726, 727, 728,729, 737, 744, 745, 748, 753, 755, 758, 759, 766, 777: n = A,T,C or G
  misc_feature 778, 792, 795, 799, 801, 805, 812, 813, 819, 820, 831, 834,837, 840, 841, 842, 843, 844, 850: n = A,T,C or G
gaattggagctccccgcggtggcggccgcccgggcaggtactttttttttttttttttttttngagacaaagtctcactcttgcccaggctggaatgcagtgagccgagattgcaccactgcactctagcctgggcaacagagcaagactccatctcaaaaaaaaaattttttttagtaaaaaaatcccgtagttttttaatgctacgaagatggcaaaaaagaagacatagacaaagcagaaactgatggcctctgctatttcatgccctgtgngactacttcatcatttgttggtttgggggttttataatttttttttctgtaanatgcgtgtttttctttctctctatttttatttganagggtggctgcctatgggacagcaaagctaatatttagagtttgaactgcagacattgttgcaggcttnttataaaggtngnccgattctttaaagtctataataaaggtncatagaccacagctttacaacttttaaatcaaaaagtattaagnaggctggggcancanntgggctcaccccctgntaattnccaaaaacgatggggaggcccgaggcaangggangatttggttggnnggnccangnaantttcaaanacccagcccctggggtgaanaanaagggaagatcccctgcctnaaaaaaaaaaaaaantnantttaanttaaaaggaacccaantnnaaccccgggcaagggnnnngtggcccncccttgnnggnccccnanctnnctttttngaaaggcttgnngggggaagaggganccncttngngccncccaagnngggttnnaggcccccccnganccntgnnnnncccccnccg

SEQ ID NO: 4372 - DNA, 1090 bp, Homo sapiens
  misc_feature 1, 5, 7, 8, 10, 13, 14, 15, 16, 17, 18, 20, 21, 22, 23, 25,29, 30, 31, 33, 37, 38, 40, 42, 43, 44, 45, 46, 47, 48,50, 51, 54, 55, 58, 63, 64, 65, 66, 68, 69, 74, 75, 76,77, 78, 79, 80, 81, 82, 83, 85, 87, 89, 90, 98, 99, 109,435: n = A,T,C or G
  misc_feature 501, 628, 631, 720, 728, 734, 750, 784, 795, 797, 807, 808,824, 828, 833, 841, 846, 849, 859, 863, 878, 883, 900, 909,916, 932, 949, 951, 961, 972, 987, 989, 995, 996, 1000,1011, 1018, 1021, 1026, 1040, 1059, 1083: n = A,T,C or G
ntgantnntngannnnnntnnnnanttannntnattnnanannnnnnntnnttnnttnaattnnnntnntgttnnnnnnnnnngngngnnagggtctnntacgctcatntagggcgaattggagctccaccgcggtggcggccggccatgctctcctcctctgccagtctcctccaccactctctaacctgagagcctgtggaacctgcccgtctcccctcctccatcagacacacctgcctaggaaacaggaaaggacctcggaagtcttctaaggagagtcatggcgtattaccaggagccttcagtggagacctccatcatcaagttcaaagaccaggactttaccaccttgcgggatcactgcctgagcatgggcccggacgtttaaggatggaggacattccctgcagcaagattcttccataggccagnaagctgctccagggaaaaaacgcctctccaatgtgatattgggaaagccggccacagggatctacncagggggggtccctcctcacttcatcctgggattgatataaagccagatttggacatccaacaagggagggcgccagcttgactgctgggtttcctgggcaagcacctgggggaatccttggacttnaanaaacccacaagtaccctcgggcccgcttctaagaaacctaggtgggatccccccccggggctgcaagggaaatttcgattattccaagnctttattngattanccggttcgaacccttnggagggggggggggggccccgggttaccccccancttttttggtntnccctttttanntggaagggggttaaantttngccgncgcctttnggccngtnaaatcaatgnggtnccattaaggccttgnttttnccttggtggtggaaaanttgggttanttcccgncttcacaaattttccnccaccaaacattaccgngncccggggganccattaaaagntggttaaaaagcccntngggggnngccntaaatggaagnggaagcnttnaaccncaccaattttaaantgggcgttttggcggcctncaccttggccccggctttttccangtcgggg

SEQ ID NO: 4373 - DNA, 810 bp, Homo sapiens
  misc_feature 154, 272, 274, 323, 361, 397, 419, 429, 471, 526, 546, 554,567, 582, 587, 592, 617, 630, 649, 652, 697, 700, 709, 718,730, 740, 743, 744, 751, 753, 786, 792, 794, 796, 805: n = A,T,C or G
ggagctccaccgcggtggcggccgcccgggcaggtactttttttttttttttttttttttttgagacaaagtctcactcttgcccaggctggaatgcagtgagccgagattgcaccactgcactctagcctgggcaacagagcaagactccatntcaaaaaaaaaattttttttagtaaaaaaatcccgtagttttttaatgctacgaagatggcaaaaaagaagacatagacaaagcagaaactgatggcctctgctatttcatgccctgngngactacttcatcatttgttggtttgggggttttataattttttttctgnagatgcgggtttttctttctctctatttttatttgatngtgtggctgcctatggacagcaaagctaatatttanagtttgaactgcaacacattgntgcaggcttnttataaaggtagtcgattctttaaagtctataataaagtacntagaccacagctttacaactttaaatcaaaaagtattaagaggctgggcaccagnggctcacgcctgtaatcccnaaacgatnggaggccgaggcnggagggattggttgnggccnggaantcaagaccagcctgggggaccagantgagatcctgccntcaaaaaaaaaaaatttanttntttttaaaggaacgaatggaacccaggcccaggcagtgcccaccntgnggtccccancttcttctngaggctggaggnggaaaagggnccnnctttgancnccaaggaagggttgaaggccccaaatggagccnttgatncncnccacttccncttcg

SEQ ID NO: 4374 - DNA, 859 bp, Homo sapiens
  misc_feature 407, 436, 437, 443, 459, 475, 483, 484, 506, 510, 574, 602,607, 612, 613, 618, 619, 621, 622, 625, 627, 638, 641, 647,652, 660, 661, 679, 682, 685, 686, 693, 697, 698, 707, 708,716, 735, 736, 745, 746, 747, 750, 753, 758, 759, 763: n = A,T,C or G
  misc_feature 769, 784, 795, 800, 806, 807, 816, 822, 823, 824, 826, 828,830, 831, 836, 838, 839, 840, 849, 855: n = A,T,C or G
ggcgaattggagctccaccgcggtggcctccattggatctggtaggtctggtagtaggcaatgtcactcagcagggcgccgagaaacagcgggacggtaccggccagcaaggtcgcatgaagcgggccaggcgtgcagcggtaggtgagggtggtggtgtcggtcacgggcggctccttatcgttgagcggccctgatgaggctcatcagggccgcgctgactgcgcttaaggaaggagcgtgctgcttgcgcgttagttcacccgcgattcgtttccaaatatgttgcgtcagttgatgcgtggatgttgctgcaccaggttttcacgcttggcttccagctcggcgatttgcgcgtcgatatcttcgatcttctgctcgatattgtcttcgtgctcctgcagcanctccttggcttcctcgatatccgacgccnncggtgncgccgccgcgcatggngtttgatggccggatnccttcatnntcaaggcggtgaaaagccccantacngcgaataccaatccaggtaataagccggcattgtacaggttgtttggttgtctccaccaaacantctattggccgtttgcctttaaaggaangcaantcaannatccnngnngantngaaaggttttngtnattggnccccntttttccnnattttttttaatggaaanaanttnncctgggngtgnnggggaactnncttttttnccctataacaggaaatttnntttacctcnnntanggnggggnntttncgggtnttttcaaaaaaaaanaaagggggaantttcncccggnnaaaaaacantttttnnnanananngcccntnnnaaagggccnaaaaanccct

SEQ ID NO: 4375 - DNA, 804 bp, Homo sapiens
  misc_feature 414, 623, 626, 660, 663, 667, 672, 677, 687, 699, 735, 738,740, 780, 784, 790, 792, 802, 803: n = A,T,C or G
atagggcgaattggagctccaccgcggtggcggccgaggtacttttttttctcttttttttttttttttttttgtattttcggtagggacagggtttctccatgttggccaggctggtctcgaactcctgacctcaggtcatctgcccacctcggcctcctaaagtgctgggattacaggcatgagccaccgcaccaggcctgccttccttttttttcttacaagggagaaagcattttccagctgtagatagtggtttgaaagagttagtgtttactattttgagctctttgaaatatgtctcttatacaggggagtttctttcaaacacattcttgtaattaggatcaggcattagcatctgagaggaatgagtaatcaccattttctactctgccttttcacctgaggacngtcacgtgtgggaatgtagcgttacctttgctcttcctttttgctgcttattatcgggatatcatcctaggaactgagccgcccagccttcaccacctttacctcctgcatcctgcgttcccctccatccttctggatctggccaacaccaccggcacagtgacggcttcagagggtgagtcccagtgcccagcgggagtctgtgtccncanatggtgggagaagatgtgttggctgtgggtaatnganaacnattgnccccnccccgggganggatgtggtgcntttttcaaaaccacaagcaggggcacttttcccctnggngngcccctgggggccccctttgggtgggaaaggcttcccctngggngggaangnccccggcccnnt

SEQ ID NO: 4376 - DNA, 827 bp, Homo sapiens
  misc_feature 159, 186, 358, 398, 442, 552, 561, 573, 623, 627, 646, 648,652, 667, 675, 677, 679, 685, 688, 689, 702, 708, 712, 715,718, 721, 726, 730, 740, 750, 753, 756, 757, 765, 770, 775,779, 784, 790, 793, 799, 823, 824, 826, 827: n = A,T,C or G
ggcgaattggagctccccgcggtggcggccgaggtactttttttttttttttttttttttttttttggattcttagtagagatgggatttcaccatgttagccaggctggtctcgaactcctggcctcaagtgatctgcatacctcggcctcccaaagngctggaattacaggcatgagccaccgngctaggcctaggtttcactacttaactgtatgtattaatcattgctgagccatactgggtagtcaagttctttccttataccgggttttgcttttctgaatttaaaatagcttaattttcagttaccaatcattatttcagcttgaaattctagagaactaacaatatcctntggataaagatagatcaaagattttgtctgttttgagcancttcttttcttttttttggaaggacctttctggagcactatgtnttccagcttcaatctgggcttgggccctctgatattactgcctggctttctaactttgctgggggatgttaagacacaaaaattggatctacagattcaacacaatctcngtttgcaanaaactggatganctggattctaaaattttatttaaagaaaaggattttagccccaaaccaantttngaaaaaaaaaacaaaaagntngaanggactccacttaccntgattttngngnattacntannaaaagcctaaaangtagtnaaanaanaanggngggtnattnataccaaaanaaaaaggccnttnttnnaaccaatnggggnacccnaaanatgangcccanaanaaccanaatttttcaaaaatttggggccanngnn

SEQ ID NO: 4377 - DNA, 1015 bp, Homo sapiens
  misc_feature 5, 7, 11, 14, 15, 16, 18, 19, 20, 22, 23, 27, 29, 31, 32,33, 34, 35, 39, 41, 43, 49, 50, 53, 54, 55, 56, 57, 59,61, 62, 63, 65, 67, 69, 73, 75, 81, 82, 83, 84, 85, 86,87, 89, 90, 93, 94, 96, 97, 98, 99, 103, 106, 108, 109,110: n = A,T,C or G
  misc_feature 111, 113, 121, 124, 130, 139, 143, 155, 175, 186, 188, 191,193, 212, 256, 292, 298, 308, 334, 374, 399, 401, 442, 459,462, 472, 495, 497, 498, 502, 512, 515, 516, 569, 585, 602,618, 641, 655, 656, 695, 715, 731, 744, 755, 758, 775: n = A,T,C or G
  misc_feature 808, 809, 810, 842, 847, 854, 866, 880, 905, 907, 908, 921,924, 925, 926, 933, 934, 937, 939, 940, 951, 957, 958, 963,969, 994, 996, 1013: n = A,T,C or G
ccctncnaatnttnnntnnntnntctntntnnnnnattntntnattctnnatnnnnnantnnnanananattntnattatnnnnnnntnntanntnnnntagnagngnnnngncgcgcgcntangactcnctttatggngacnatgtgctctccncgtgggcgggcccgcccggncaggtactacngnttntntttttcttttttggagcantaaaaacgttttaatacaggaaattattttgctgtacaatatangcagacagtttgccttcagaaattcagaaatgcagnttttgngggaggtcancatcattggtctcagctactaaagtngaggatgattcagccacttttattccagccactccatttntagcatacactacaggagaagtgtntntttaaagaggccattttcctgcaggatgtttattaaatagntcctggcaaaggaggtngcncgtatagggncctacaaggtaacgctaggtggnannattntccttccagngtnngggtcttaagcccaccaaggttcttccttcccatctacccccggagtacctcnggcccgctctagaacnaggtggatccccccggngcttgcaaggaattcncatattcaagctttatcgatacncgtcgacctttganngggggggcccggtaccccaaccttttgggtcccttttanaagaggggtttaattcgccncgccttgggcggtaanaattggtcataancttgtttcctntgncgaaaattgttattcgntcacaaatttccacacaacataccgagccgggnnnacattaaaggtgtaaaagcccttggggtgccnaatgnggtgagnctaactccccantaaattgcgttggngcttcactgggcccgcttttccagntnngggaaaaccttgntcnnntgccaannttntnnttttattaaanttgggnnaaacncccccnggggaagaaggccgggtttggcggntnttggggccccttttttncc

SEQ ID NO: 4378 - DNA, 1122 bp, Homo sapiens
  misc_feature 5, 8, 9, 10, 11, 13, 17, 18, 19, 21, 23, 25, 27, 29, 34,38, 46, 47, 48, 49, 51, 52, 58, 62, 69, 75, 77, 86, 87,89, 90, 93, 95, 97, 99, 101, 102, 106, 107, 111, 112, 123,129, 138, 154, 172, 324, 503, 521, 540, 544, 561, 562, 617: n = A,T,C or G
  misc_feature 658, 660, 678, 695, 735, 744, 759, 766, 773, 775, 780, 784,787, 790, 797, 799, 809, 828, 841, 854, 873, 875, 878, 881,892, 895, 906, 908, 925, 927, 932, 935, 937, 939, 946, 951,968, 974, 975, 976, 982, 984, 990, 992, 1000, 1008: n = A,T,C or G
  misc_feature 1010, 1026, 1027, 1030, 1031, 1032, 1035, 1047, 1049, 1051,1052, 1054, 1055, 1057, 1059, 1068, 1071, 1072, 1073, 1085,1090, 1100, 1101, 1108, 1121: n = A,T,C or G
ccccnccnnnntntttnnntntntncntnctcantttnttatactnnnncnncttaancgtnaatattntatctnanttaacatanntnntgntnantnanncccnnttannctctctctatngggcgnattggagcnccaccgcggtggcggncgcccgggcaggtacaangtcatggtgagcaggtgttctgagggaagacaaaggaaaagcagagggagtgtttgacaattctgagcttccatatggcagacattcggggcccgttggcatggtcctcagagcagcaacaacagcatcaattgaggttcattaaaatgcanaatcgcaggttcatgtggacctactgaatcagaacctgcattctaacaacagttttcagttggttcttcccgcacattaaagattggaaaagcactggtctggaggaggcaggctctacaaaaaggggttttgggtattgagtgagcccgaaaaagacaacctgggaacttgaggattncagggattgtaccctganaaaacaaaagcattttcanaaangcctcagtaaaaggcanngaatttttaaacttactctcattttatatttatcgcaactacatggttccaaggnattttaccaaaaattagtctttcaggtttttcaaaaccacntnttgtttccctttttgcangattccatggtatttantgggaattgggtcttgggggccaaaccaagggggattagnacccccatngggggtaattttggngggaaantgaagtnantggcnaagnagnggnttaaggnanttaccttggnaaattggtttattttattntgggggtaattgnggaaggacccggngctttagctttatgcccantnganagnggacccttgcnttnaaggatgtttnangggtgggggtcccgggncntggancantntnggaaacnacctngtaaaaaaaatttaaanctttgnnnatttcnanaagganangggatccnttggttgnanttttagggaagaaacnnaannncanatctttttttgntngnnannanangggaaaatngtnnntaactttctacnctggnaaccaatcanngggttcncccccctactccnt

SEQ ID NO: 4379 - DNA, 830 bp, Homo sapiens
  misc_feature 11, 346, 355, 360, 367, 372, 388, 390, 391, 392, 397, 402,403, 404, 418, 419, 431, 436, 441, 444, 451, 461, 465, 472,475, 476, 477, 479, 485, 493, 494, 503, 509, 524, 530, 531,532, 534, 535, 538, 539, 546, 553, 559, 561, 564, 568: n = A,T,C or G
  misc_feature 569, 577, 579, 580, 582, 586, 590, 591, 594, 597, 603, 604,605, 607, 609, 615, 616, 619, 620, 621, 624, 625, 626, 627,628, 629, 630, 638, 643, 644, 646, 648, 651, 653, 659, 660,661, 668, 669, 672, 673, 681, 691, 692, 696, 700, 701: n = A,T,C or G
  misc_feature 704, 707, 708, 718, 719, 721, 725, 728, 729, 730, 735, 737,746, 747, 750, 751, 753, 754, 758, 759, 760, 773, 782, 790,793, 797, 798, 810, 811, 813, 818, 824, 825, 828: n = A,T,C or G
ctatagggcgnaattggagctccccgcggtggcggccgaggtacctgactttgggtaagttgccagaataagatcatcaggcttggcttggaaattacatactttttcccaccattcttttgataatatcaacgtagggactccatctacttccatgatgttaaacagttctggctttttttccatcgtgggagcgtttttctcaatcttcgccattgggaatctggtatctcaggcagcagaggaagcagcttgctgcctttagtcaaactgcttcctggaaacccagagccaggtccagctccaggacactgtgcaagcaagagcacagcaggtcccccgcgtncatttgtgncccanccactgnggaancctttgtggaaagagncnnnctccnttttnnncatctgtgatgatnnatgcccatgtgnaacangggtnttntccattnttaatgccantggnactgccncannngnccaganactggaannctgttcccntggaancccttgtgatgggcncgggcnnntnntannaaaaatnatggaanttactngnggnattnntctccttngnngnaaangggnnaantanttgaannngnangcaaannatnnnccnnnnnnncacccccnccccnntntnttnangggggnnngctttgnnttnnacctcccnggggggcccnntttnaaannaanggnncccccggctnngnggantcnnnttacngnttttggggnnccnncnncccnnngggggggggcccngccccaagntttttttnccntttnngggggggttaanngnccccntggggnnttntg

SEQ ID NO: 4380 - DNA, 811 bp, Homo sapiens
  misc_feature 85, 452, 457, 458, 542, 551, 553, 554, 567, 589, 594, 605,613, 630, 637, 639, 642, 643, 648, 650, 653, 654, 657, 658,659, 660, 661, 662, 665, 666, 667, 674, 675, 676, 679, 680,681, 683, 684, 685, 686, 687, 688, 690, 691, 692, 693: n = A,T,C or G
  misc_feature 694, 695, 698, 699, 701, 702, 704, 705, 706, 707, 709, 710,711, 712, 713, 714, 717, 718, 719, 722, 723, 725, 727, 728,731, 733, 734, 735, 736, 739, 740, 744, 747, 748, 749, 750,751, 752, 753, 754, 755, 756, 757, 758, 759, 762, 763: n = A,T,C or G
  misc_feature 767, 768, 769, 770, 771, 772, 774, 775, 776, 777, 778, 779,780, 781, 782, 783, 784, 785, 786, 787, 789, 790, 791, 793,798, 799, 800, 801, 802, 803, 805, 806, 808: n = A,T,C or G
ggagctccaccgcggtggcggccgaggtactagtgggtgttattttgttgaatgaatgttttacccaaacttatatgcatattanattgtttaaaagctcaattaaaaagtgaaaaatagacactgaaaattttttgagtgatttcacatgtgttcatgaaacaatatatctattacaaatcattgaatattttaaaagtaatgtcatgtattcattttcttattttatctcctcagtagactgagatcagtgtgtaggggtgaagcaaggagtcctaccctgtttgactaaggtaaaaattaagaatcagtgagaaatggaatttgcaaaagtgcctgccagataatgttagaactggaccagaaaataggagttggtataaaactaagaccagcgagcttttttttccttcaagatgcagttcagtttattgcttttgtaaattaaagantgggnntcttgatctttattaaaggagaatacaatgttaacctacttcaaattttaaaaaatattcccacatgtatatggtatggggggnggatatacncnncagggattttaanggacaggttttttggggggggngtggngcatgcgcccncatggccnaggggaaatttggttantccttcntnggnnccctncnggnncannnnnnttnnnggggggnnntcnnngnnnnnncnnnnnnatnngnngnnnnannnnnnggnnnagnncncnnttntnnnnggnntctnacnnnnnnnnnnnnncgnngaannnnnnannnnnnnnnnnnnntnnncntttannnnnncnntnctc

SEQ ID NO: 4381 - DNA, 834 bp, Homo sapiens
  misc_feature 566, 609, 616, 627, 646, 662, 668, 687, 714, 716, 740, 772,794, 823, 829, 832, 833: n = A,T,C or G
gactcactatagggcgaattggagctccccgcggtggcggccgaggtactgagcctgtgtgtcaggtaatgtggttaacttaacattcattacagcatgtcatcaccacaaaggcctcttgtggctggtgctattttttttccattttgccgacaaggtttagagagattgaatcacctgcttagacccacacacccagtaagtgttggaatctggattgatgctgtaatgaccattatccagatccttatcaccgtttggggaaattgtctgaaaatccctctgggttatttagagtcaagctttcatctgggtcttcagaaagttgtagtggagccatctgcaccaccacacacctgaagacatttcaggactaacctggatgaaaagggaattgacttttagctaggataggacaaaagggcataatcataaaattaattcactttccttcctttcttttgaaaatttttctaaactgtgtatcctcccagatattccctggcaaagaagaccccagtgaagccttggtttggagaaactgggactgtgtggggcaagtgaangtggtctgggggataaaagaatatggtggttgctgagtgtggngtaattncagcttctcangagttgggaggatggttgnacccgggagtgggganggccgncctgggcacatggcaaggnctcatctcttaaaaaaaaaaaacatgngngaagggcctttcttttggcttttnaactcttttcggcaaatggaaaaaaacggggnaagggggccattgatgccaaanattcgcccaattggactgggcctattttntatganaanna

SEQ ID NO: 4382 - DNA, 1193 bp, Homo sapiens
  misc_feature 2, 3, 4, 6, 7, 8, 9, 10, 11, 12, 13, 14, 15, 16, 17, 18,19, 20, 21, 22, 23, 24, 25, 27, 28, 29, 30, 31, 32, 33,34, 35, 36, 37, 39, 40, 41, 42, 43, 44, 45, 46, 47, 48,49, 50, 51, 52, 54, 55, 56, 57, 58, 59, 61, 62, 64, 65,66, 67: n = A,T,C or G
  misc_feature 68, 69, 70, 72, 73, 74, 75, 76, 77, 78, 80, 82, 86, 89, 90,91, 93, 94, 97, 99, 100, 105, 114, 117, 413, 434, 478, 557,562, 599, 633, 646, 653, 675, 685, 699, 720, 724, 725, 775,779, 786, 796, 818, 863, 879, 892, 897, 898, 907, 933: n = A,T,C or G
  misc_feature 934, 935, 936, 952, 975, 979, 985, 986, 1007, 1015, 1026,1027, 1038, 1040, 1047, 1051, 1053, 1063, 1066, 1069, 1078,1086, 1093, 1094, 1099, 1110, 1117, 1118, 1119, 1140, 1142,1152, 1159, 1165, 1179, 1180: n = A,T,C or G
tnnngnnnnnnnnnnnnnnnnnnnntnnnnnnnnnnntnnnnnnnnnnnnnntnnnnnntnntnnnnnnntnnnnnnntnanaggnggnnnannggntnncgatnctatgggcnggnctccaccgcggtggcggccggccatgctctcctcctctgccagtctcctccaccactctctaacctgagagcctgtggaacctgcccgtctcccctcctccatcagacacacctgcctaggaaacaggaaaggacctcggaagtcttctaaggagagtcatggcgtattaccaggagccttcagtggagacctccatcatcaagttcaaagaccaggactttaccaccttgcgggatcactggcctgaagcatggggccgggacgtttaagggatgaggacattccctgcaagcangattctttccataaggcccanaagctgctccaaggaaaaaccgccctcttcccaaatggtggatnttgggaaagccgggcccaccagggaatcttacccagggggggtccttccttcacttttcatcccttgggaatggattantaaangcccggatttttgaccaattcccaaaccaaagggaanggcggccaagccttggaccttggcttggggtttnccttgggccaagncaacctngggggaattccctttggacctnccaaaaaaancccccccagggttnccccttccggggccgggttcntaannaaacctaagggggggattcccccccgggggccttgggaaagggaaatttncgantatttanaaggcccttntttgggattccccgggcggaanccttccgaaggggggggggccccgggttccccccaacctttttgngttcccccttttaganggggggggtttantttgnngcccccctnggggggggaaaaacattggggccaannnnccctgttttccccctngggggggaaaaaattggtttttncccngtttcnnaatttttcccccccaaaaatnatctaaancccggggggannctataaaaagngnttaaaangccncngggggggggnccnttnatggggggnggccctanccccccnnatttnttttgggggtnggggggnnnaacgggccccggtttttccananggggaaaaanccttttnggcccnctttttttttaaannaaattcgccccct

SEQ ID NO: 4383 - DNA, 833 bp, Homo sapiens
  misc_feature 473, 499, 524, 534, 537, 553, 576, 577, 598, 599, 600, 603,623, 644, 665, 677, 689, 696, 698, 719, 722, 724, 727, 731,732, 736, 741, 746, 766, 768, 780, 793, 810, 811, 813, 818,829, 830: n = A,T,C or G
ggagctccaccgcggtggccgagcggccgcccgggcaggtaccgtgagtgcagtggagtgggagggctgcatgatgtctgtgttaccatactctgctggttgtccttttacctgactgctcctcagtctccttttcagacatatttgttctgcctgtgccttacatgtttgtgcttctcatggttaccctaggctctgctttaatttctccctactttctcctgaaattgttatctgtatcctcattattcttaacaatatcttcagcccagttcttgtgccagagcttcacattcatatagctcaattcctacttaacattgccacctacatgtctcaaattcagcaagcccaaaattgagtataccacgttctgccccaaatatatttcccccacacccctcagcttctttagcttggtaaataatacttgatggaggcagaggcctggaaatgcaacccttaactactgnttttccctgtacctcggccgctctanaactagtgggatcccccggctgcangaattcgatnttnagcttatcgaacccgncgacctcgaagggggggcccggnnccccacttttggtccctttannnganggggtaaattggccgccttnggggtaatcatggggcataancttggtttcctggggggaaanttggtattccgntcacaaatttcncaacaananaccaaagcccggggagcattnaangngtnaaanncctnggggnggccntatggagggggggctaaccncncaattaattggnggttggggccccncttggcccgcttttcanngnggggnaaaaccgggcnnggg

SEQ ID NO: 4384 - DNA, 638 bp, Homo sapiens
  misc_feature 567, 577, 638: n = A,T,C or G
ggagctccaccgcggtggcggccgcgccgctgaccagccccgcgccgaactgctgctgggcaagctctactacgaaggcaagtgggtcccggcagatgccaaggccgccgaagagcacttccagaaagccgtcggccgcgaagtggctgccgactactacctcggccagatctaccgccgtggctacctgggcaaggtctattcgcaaaaggccctggaccacttgctgacggctgcgcgcaacggccagaacagcgccgacttcgcgatcgcccaactgttttcccaaggcaagggcaccaagcccgacccgcttaacgcctatgttttcagccagttggccaaggcccaggacacgccggaagccaacgacctggcgacccagctcgaagctgcgctgcccccggaacaacgcgccgaaggccaacgcctggtgcaacaggagctggccgtgcgcggcaccctggcccaaagcacgctgaaattgcacgccctgcaagaagaagacggcgaggaatcctatgaagcttaacccattcgtcaaggccgggcatcggcctgaccttngccctgttgnggtcgggcccgaccctggcggggcttgactgaagcaaagaacttcggctggaagtcaaagn

SEQ ID NO: 4385 - DNA, 807 bp, Homo sapiens
  misc_feature 500, 544, 578, 600, 615, 654, 656, 673, 675, 684, 688, 695,725, 731, 738, 747, 751, 755, 770, 771, 772, 803, 805: n = A,T,C or G
ggagctccaccgcggtggcggccggctccttgcattgcaggcacagtggcttctcctgagtcccacggcacattcttctactgggctcaagctgccttgcctgaagggctttgtgctactgtccctgtccttaaggtcttcatgactcgtgggggtgataagactcaagccagcaactgagaaaggatgaatattcaaaggaagggaggaacacatctggctggagtgatcaggaacatttttaaaggagaaggtgacaactgagcagaggagcttggtcttgaagaaatggagagatgggataatattccagaagaagcaatggagtaaagttgtgaaggtggttccagagcagtgaaaggtctagtttccctggagccttgtctttgggtaaaactgcaactgcatgccagcctactgatacctgagtgctgataaacaaaggccgtttttgtgggttgaaacagccataggccagggtgcaaggactttgtcagganaaaaggaattgggtttttgttccccatttggtctctctgcccanatgccttaacattttaaaagtcttttctttccantttctttttctttttttctaanaattcttattcttcntcaccacttttattccgaaccattttcttatttaaaatngnattttgggacccctctntnatccctaancctnttgaaantagaactcaccccccaccccaaaaaggaancagggnccaaagnctcaaattncttntttnaagaagggaatggannncccggccttgctgggggttgaccttaaaaanangg

SEQ ID NO: 4386 - DNA, 1035 bp, Homo sapiens
  misc_feature 1, 2, 4, 5, 7, 9, 10, 11, 12, 13, 16, 17, 19, 20, 21, 23,24, 25, 26, 27, 28, 30, 31, 32, 34, 35, 36, 37, 39, 41,43, 44, 46, 47, 48, 49, 50, 51, 52, 53, 56, 57, 60, 61,62, 64, 67, 68, 70, 71, 72, 73, 74, 76, 79, 80, 81, 82,85, 86: n = A,T,C or G
  misc_feature 89, 91, 95, 98, 99, 101, 102, 103, 105, 121, 216, 333, 350,353, 355, 405, 419, 445, 450, 459, 489, 525, 534, 537, 547,551, 554, 575, 580, 581, 602, 718, 794, 818, 826, 842, 844,845, 847, 854, 868, 870, 883, 893, 896, 924, 935, 936: n = A,T,C or G
  misc_feature 943, 954, 955, 964, 971, 976, 991, 993, 1000, 1015, 1023,1027: n = A,T,C or G
nngnntncnnnnnatnntnnntnnnnnntnnntnnnnanananntnnnnnnnntannatnnnanttnntnnnnnanaannnntannagngnaagnatnngnnntnaatataggcgaattgnagctccaccgcggtggcggccgaggtactttttttttttttttttttttttttttgggacggagtcttgctctgtcgcccaggctggagtgcagnggcacgatctcggctcactgcaagctccgcctcccgagttcacaccattctcctgcctcagtctcccaagtagctgggactacaggcgcctgccaccacgcccagctaatttcttgnattttttttttttttangananacagggtttcaccatgttagccagggatggtcttgatcttctgacctagngatccgcctgcctnggcctcccaaaatgctggggattacngggcntggattacncaccccaggcccttattaagcttgcatttntaaggaaagttttttgaaaacctggaaatggttaanaaacaaccnggntacctttaanattnagnattaaacctagtaagtggtantgacnncaaaagtctgccattttaccncaaaggaattttcaagtctgggattttcagtctggaattcccattgattaggaaaaaggaaaaaaaaaaatgcaaagttcttacttgctttggggaggggagggaactaaaaaacnaattagcaaatttgggagacaaggtgggaaaaaagcaattcattttcgggccccacaccttaaattttaccaaaangctctaaataggaattttaaaaangaagaacnatgggaacctataccntnntnttttttngaaaaaatcaagangnccccaaaaaagtnggacctttanaangcccaaccaggaaaaggaaagccccacnaaaacattttnncaaattnccacaccttgnncaagaatgnttaaacnaattnttaatttggaacctngnccccccngaaaaaatggaggantttaagcncgtncccctgct

SEQ ID NO: 4387 - DNA, 816 bp, Homo sapiens
  misc_feature 443, 554, 565, 590, 633, 634, 663, 690, 691, 692, 709, 726,740, 769, 779, 780, 789, 796, 807: n = A,T,C or G
ggagctccaccgcggtggcggccgcccgggcaaggtactccacctgcctaggcctcccaaagtgctggaattacaagcgttagtcactgtgcccagcctctctctaccaatttccacctgtccttcaaggcccagccgcagtgctgcttcaactgtaaagccttccctagctccccagctagagttatatattgtaacacctagcataatgtttcgtgtttagtggaaactatggaattgccttttaaaaatttatttatttatttattttttgagctggggtctcactgtcacccacgctggagtgcagtggtgtgatcttggctctctgcaacctccgcctctcaggctcaagcgatcctccccccgcgtacctcggccgctctagaactagtgggatcccccgggctgcaggaattcgatatcaagcttatcgataccgncgacctcgaagggggggcccggtacccagcttttgttccctttagtgagggttaattgcgcgcttggcgtaatcatggtcatagctggttccctgtgtgaaaatggttatncgttcacaatnccacacaaacatacgagccggggangccattaaaagtgtaaaagccctgggggtgccctaaatggagnngaagctaaaccttcacatttaattggcgnttgcgctcactggccccgcttttcagnnnggggaaaccctggtcgngccaagctgcattaaanggaaatcgggcccnacccccccggggaaaagggcggttttgcntttttgggcnncttttcccntttcttnggttactggantcggctggc

SEQ ID NO: 4388 - DNA, 785 bp, Homo sapiens
  misc_feature 563, 566, 676, 677, 723, 770, 774: n = A,T,C or G
gaattggagctccaccgcggtggcggccgaggtaccaaagacctccagtgatgcttatgaacatgtagctgctgtttggaagctggaagccccatatcagatgcctaccacagaatctggagttggggcagagtgctgaattggtcggagttacctgtctgcttgataacttcagatgccccctttctcagatggcattgctaagctctgcaaagatctaactgtgaggatgagataatttaatcttgcccgtgggctctatcctggcggagataccatgggactgaatcctgggctaaattgtaatcttgggaaaggcaactatacctggccgagttgttcctagagagaaagcagaagaaggtcttcccaagaaagaccatgacagcacagaggcagtctgaagggaagccaaggaaaggatttgagaccctacaagaatgaagttggaaggataataaaagtccacaggcaagagtacctgcccgggcggccgctctagaactagtggatcccccgggctgcaggaattcgatatcaagcttatcgataccgtcgacctnganggggggcccggtcccagcttttgttccctttaatgagggttaaattgcgcccttggccgtaatcatggtcatagctgtttcctgtgtggaaattggtatcccctccaatnncacacacatacgagcccggagcctaaagtgtaaagcctgggggtgncttatggagtgagctaactcacattaaattgcgttgcgctcacttgncccnttttccaggcg

SEQ ID NO: 4389 - DNA, 1160 bp, Homo sapiens
  misc_feature 1, 4, 6, 7, 8, 9, 11, 12, 15, 17, 21, 22, 24, 27, 29, 31,33, 34, 36, 40, 42, 43, 45, 46, 48, 50, 51, 52, 54, 57,60, 64, 65, 66, 67, 68, 73, 77, 79, 80, 84, 87, 89, 90,91, 92, 94, 95, 96, 98, 99, 100, 102, 107, 108, 112, 115,126: n = A,T,C or G
  misc_feature 127, 128, 132, 135, 137, 142, 145, 173, 206, 228, 230, 263,288, 448, 452, 455, 457, 465, 484, 493, 494, 498, 502, 518,521, 565, 610, 644, 647, 658, 664, 685, 693, 696, 697, 708,716, 717, 721, 723, 730, 735, 738, 755, 759, 777, 787: n = A,T,C or G
  misc_feature 798, 807, 815, 823, 830, 841, 843, 861, 863, 866, 879, 881,883, 885, 899, 904, 906, 908, 922, 925, 927, 932, 937, 938,949, 955, 959, 962, 973, 974, 979, 984, 988, 991, 995, 998,1005, 1023, 1029, 1030, 1032, 1033, 1040, 1041, 1050: n = A,T,C or G
  misc_feature 1062, 1068, 1069, 1071, 1072, 1078, 1081, 1084, 1086, 1090,1092, 1093, 1096, 1097, 1098, 1103, 1104, 1107, 1120, 1123,1124, 1129, 1134, 1142, 1143, 1144, 1147, 1154, 1157: n = A,T,C or G
naanannnnannaantntatnngnttntnantnntnttananntnnanannnanatnatngaannnnnttttntttnannattntangnnnntnnntnnngntaggnnggcntanacgatcatatnnntatnttncnatttnaanctccaccgtggtggcggctcggaccgtngtggctcacgcctgtaatcccagcactctgggnggccaaggcgggtggatcacanangtcaggagatcaagaccatcctggctaacatgnctctactaaaaatacaaaaaattanccgggcatggtgacaggcttctgtagtcccagctactcgaacaggctgaggcaggcagaatggcgtgaacccgggaggcaggagcttgcagtgaagcccgagatagcgccactgcactccagcctgggtggacaggagcgaggactctgtcttcaaaacnaaancgntnagaacctntaaaggggggcctccggcncgctcttannaacntagngggaatcccccccggngcntgcaagggaaattccgattatcaaagctttatcggatacccgtnccgacccttcggagggggggggccccggttaccccagcctttttnggtttccctttaagtggaggggtttaaatttgcnccnctttggggggntaaatnaatggggtccataagcctgtnttccttgntgnnggaaaaattgntttaattnncggntntcaccanatttnccnacaaccaagcaattacnttantccccggggaagccattnaaaaggtggntaaaagccccntgggggggntgcccttnaatgggangtggganccctaaaaccntnccccaatttaaatttggncngtntggggggctccancntngngccccgcctttttnccaantncnggggaaaaaccctnggntngtggnccaannttgggtatttnaattgnaaantcngggcccaaacnnccccnggggngaanaanggcnggntttttcntttatttgggggcccttntttttnngnntttcctnngcttataanttggaatttggnttgggnncnnccggancanttntngggntnntgnnnggaannccngggtttttccccntcnnttttnaaaanggggcggnnnatnccccggnttntct

SEQ ID NO: 4390 - DNA, 842 bp, Homo sapiens
  misc_feature 623, 649, 675, 683, 690, 697, 699, 707, 722, 741, 743, 748,754, 757, 764, 782, 788, 789, 790, 829, 834, 839: n = A,T,C or G
agggcgaattggagctccaccgcggtggcggccgaggtacgtggtggagccaggatctgtcggactctggagtccaggtttgcagagagcccccggctcatcctggcctctccggcatctcacttcctccctgcaggcacgtaggaccggcctcagctctgtcaagatctgcactgtaggaccccagagatttttttctttctttgggtagtcagacccatctgcaaaagttttgcaatcatgaaatcagatagcgtatgaaatgctaggaataagcgcaggtctagcataccacgcggccagcggtagcgtgacctgacaggaggagtgcgtcttcagagacattgggaaactggcgtgcctgtcgcccgtcccagggtcagagtcttcgaaaccaggctttctgggaacccaacaaggagtttctgatcgaagaaccgcactgaggacagttagtctttttttccacactgggcattttcagcattggaagtcaatgggagccctgcgtctgtaggttttgagatgtggcactcacagcagggccactagaatggagacatccatgggaccaggttacaggcgctccggcagtttgggagaagcgtcgcccaagcagcctncccttaggcttccattccagctttgnctggcccaagaacagaaaaaccgttnattaaaangggttancagaaananaaactttnggggactttcctaanttcaactggcccctaaggngnggaangggagnaanccctcanttgggaaggctgttttancttttnnnccaaaaactcccgggccacctaaaaaaacaagcgggggnggacntaaanaaa

SEQ ID NO: 4391 - DNA, 1073 bp, Homo sapiens
  misc_feature 1, 2, 3, 4, 8, 9, 11, 12, 13, 17, 18, 19, 20, 21, 22, 23,24, 25, 26, 28, 30, 31, 34, 35, 37, 38, 40, 41, 43, 44,45, 47, 50, 51, 52, 53, 57, 61, 66, 67, 68, 72, 73, 74,75, 76, 78, 80, 81, 82, 83, 85, 86, 87, 90, 94, 96, 97,99, 100: n = A,T,C or G
  misc_feature 101, 107, 108, 112, 114, 120, 121, 122, 386, 605, 728, 742,745, 762, 765, 773, 852, 854, 903, 914, 919, 921, 922, 924,925, 929, 949, 967, 976, 983, 990, 998, 1005, 1007, 1019,1024, 1028, 1036, 1043, 1052, 1062, 1072, 1073: n = A,T,C or G
nnnngccnncnnngttnnnnnnnnnnantnnccnntnnanntnnntnaannnngctntggntatannngttnnnnnantnnnntnnngtntggngnngnnnttggtnnatcntnacttannncgaattggagctccaccgcggtggcggccgcccgggcaggtacagttttgacagaaggcacacattttatttctaaatttctgttaaaacaggatcctccagtttgagtccgtttactttttgcaaatggtggagttggagacagtagagaaagttttgcagcgttaagtatgatgtcacaattaaaggttataaaaagcaaatgtgaaggtcctttgtaaaagaagtggttcactgggcgtgagtttgaatttacaaattaancttttgaaattaatgctaaatatcaacttataaacatttttccctggaaaggaaaaaaaaaaaagtattattcttacttctggcaagccatatttcttttttatccaccagtaatgcctctggaaccttgtcccattcaaggtgaaacccccagttggaaaggtggaaactggaatcaatctggtaaaggtgccatcccagggggtcctccccttgagncacctgctttgtcctgaggagtcatcaaacttccacgtttgaaaagccatgacccattgttgagggatcctcaggggaaaggttgcctttggatcataggggaaaccagaccagggggccttnaagggaaaggggtncantactttgggctgttatngangttgtccnattgtccaacaagggggggacttgggccgcctcttccctttggggccaaatggggggaaaaggtcccctttatgccccngnggcttcaagggtcccggttgggggttttggcccgtacccttcgggggcnggcttctttanaaacntnngnngggnttccccccccggggcttggnaaggaaaattcctatttntttcaaagnctttatnggattanccgttcgnaccctcntnaggggggggggnccccngtanccccaaanctttttngtttccccntttaatgganggggttaaann

SEQ ID NO: 4392 - DNA, 820 bp, Homo sapiens
  misc_feature 665, 820: n = A,T,C or G
tcactatagggcgaattggagctccaccgcggtggccggccgcccgggcaggtactgccctagtccacagctgagtggggctggaactaagctacagggttgcttcaaggcctacagtcaagacttaggtcttcgggcctaaggtgtcacaaacctgcatgtctcccttcaggtccttaagttagcgggcctgctgtattgagaggggctggagccacttttcaggggtgtttcagggactgatgagggacctaggtcaggtggcctgtttgcagggctatggacagccccatctccctccaggatgctgggtaggcagaactgctctctgaccacagctgagaggggcttatgccaagattcagggttgtttcaggacctgctgtgggactgaaatctgcctgcctgtcctgaggacacagaaggatgtatctcctgactacaggaggatttctgtgcaggatttctgtaagactgtggcttgagtggagctgaatccccgattcagagctttttcagcatatgctatgagacagagattggcaagtctgtacctcggccgctctagaactagtggatcccccgggctgcaggaattcgatatcaagcttatcgataccgtcgacctcgagggggggcccggtcccagcttttgttccctttangtgagggttaattgcgcgcttgcgtaatcatggtcatagctgtttcctggtgtgaaattggtatcccgctcacaattccacacaacattacgaacccgggaaccataaaagtgtaaagcctggggggccctaatgagtgacctaacttcacattn

SEQ ID NO: 4393 - DNA, 830 bp, Homo sapiens
  misc_feature 202, 660, 686, 764, 767, 776, 803, 809, 810, 823: n = A,T,C or G
acgactactatagggcgaattggagctccaccgcggtggcggccgcccgggcaggtacttttttttttttttttttttcgggcctgcctatttccgactgtctctctctgttactcgatgtctccttttcctgtctacatcctaaacctcctgaaccccaccagtaacattcattgctaagcagttgctaacacctgttcanaatctccttcaaatatctgcaggttccaagatttccaaaaacttacccttattcacaatacaccagctaccacaaccactggccactagggaggcaaaatagcatagcagtcatggatgtgagagttgtactgtttggagtcaggctgcctgggctcaaatcccacctttcatcagctatgtgacctttgggcaagctacctaactttgctatggcttagttcatcttttgtactccaggaacaacagtagcaactacttcctaagtgctatgaactgaatgtttgtgtccctgaaaaaatgtatatgttgtacccctaaattccactgtgatggtatttggagatagggcctcttggaggaaattcagtcatgagggtggagccctcatagatgggattagtgtccttataagaagaaacaagagagagcttgcttctcgcttagtcttcaccttgngaggctacaacaaaaaggcaactatntgcaagccagggaaagagaacccctcatggggacactcaaatctccccatgccttggatctcagactttcccagcctncanaaatggganaaaataaatgttttggtggtttaagcnccccannctatgggggtttngctatgg

SEQ ID NO: 4394 - DNA, 881 bp, Homo sapiens
  misc_feature 280, 368, 414, 419, 451, 462, 489, 502, 537, 540, 544, 553,580, 583, 585, 589, 609, 616, 617, 618, 657, 662, 678, 685,687, 691, 696, 704, 707, 708, 709, 710, 717, 720, 722, 724,725, 732, 743, 749, 752, 754, 763, 768, 785, 802, 806: n = A,T,C or G
  misc_feature 808, 809, 816, 817, 818, 819, 820, 823, 831, 833, 849, 855,861, 862, 865, 867, 876, 877, 878, 880: n = A,T,C or G
tcactatagggcgaattggagctccaccgcggtggcggccgaggtacaatgtgggactttggtggaactgcctgggagaacttcataattactaccctgtatgtcatgccccttgcaggtaaaacagaagtggcagagcagaggtcaaaggcacagatcagcaaagggaatcctactggatcctgagactagcctggaaggggtgtcatttgtcactgggaatagaggtgcacggcctggtggaccctccgagagagcttaagattcatttttaaaacanaggatttaaaagacacaataggcattggaatcgggtagtaagaagagaaaaccagagccccaagtgaggaagtgggtgatctgtcctnacacagttggtgggggagctgggcctccccactgactggactcttnaggtncttaagaggtgctctgacctggcacaccccanatgaccccctnaaattcatgcctgaagcagttaagaantaccttcccgggncagcccgcttctagaactagtggatccccccgggnctngganggaaatttngaattttaaaccttattcggtaccggncanancctnccaaggggggggccccgggncccccannnttttttggttccctttttagaggagggggttaaattgcnccgcntttgggcggtaattcnctggttnantaancttgnttttcctngcnnnnaaattgntantncnncttcaanaatttccccanaacaanccnancccgggganccatnaaggggggtcaaggccntgggggggcctttaatngagntnngcctaannnnncantttaattngnggtttggcctaaattngccggnttttcnnatncnggaaaactnnnant

SEQ ID NO: 4395 - DNA, 849 bp, Homo sapiens
  misc_feature 11, 26, 530, 581, 593, 671, 684, 704, 705, 716, 717, 728,735, 738, 791, 794, 809, 812, 822, 826, 829: n = A,T,C or G
tagggcgaatngaattggagctccgnggcggccgcccgggcaggtacaggtcatggtgagcaggtgttctgagggaagacaaaggaaaagcagagggagtgttgacaattctgagcttccatatggcagacattcggggcccgttggcatggtcctcagagcagcaacaacagcatcaattgaggttcattaaaatgcagaatcgcaggttcatgtggacctactgaatcagaacctgcattctaacaacagttttcagtggttcttccgcacattaaagtttgaaaagcattggtctggaggaggaggctctacaaaagggttgggtattgaggagccgaaaagacaacctggaactgagattccagggatgacctgaaaacaagcatttcaaaagctcagaaaaagcaagattttaactactctcattttattattatcgcaactacatgttcaaagattttacaaaatagtctcaagtttcaaaacactctgttcccttttgcagatcattgtatttatgggatggnctgggggccaccagggataggacccatgggtattgggggaatgagtatgcnaagggtaagaantactgaaaattgttattatgtgggtattgggagacgggctaatttagcattgaaagactgctgagtgtttgggtgggnccggctgatcatnttgacactgaaaaaattaannttgaagtccgnnaaaggatcatngttaagnttngggaaaccaagaaaacttttttggggatgaatggaaatgtttttttttttacnctnggccacatggggggnccnctatttcatnttgnggntttttcaacacctaaaaaat

SEQ ID NO: 4396 - DNA, 821 bp, Homo sapiens
  misc_feature 482, 611, 627, 638, 641, 647, 655, 662, 665, 689, 707, 738,741, 763, 772, 781, 792, 799, 802, 805, 809, 814: n = A,T,C or G
gggcgaattggagctccaccgcggtggcggccgaggtacatgttattagctttagcaggtagttctaataaaagagttcagtatgctctttaaatttttttttagaattttctgtgtttattcaaatttattgaacttaattatttaatataagagaaccaaggaaccactgaactttgagaacacaaccgaaatgctaactttagtgttttatttgaactagtgactaaaatttctatggcaatatatgaatattttgagaggttagcccaaattgtaagaaattaatggtaagctggcatgtttttgtagaaaaaaaatttgactacacataattatatttagcaattttaaaacttttacctagattctgtttacttgctgaagtggcagtattttaccatgtatatcaatcttttaaaatttcttaaacagttcttccatttaagaagtaaccaagccaggtgcaggtggctcacatntggtaatcccagctactcaggaggctgaggcagaagaattgcttggagccccaggaggcggaggttacaagtgagcagagatcgcgccattgcactccagcctggggcaacaagagcgaaaactccttntcaaaaaaaaaaaacnggaaaaccacnaancaaatnccggaatnttttatnttntaatattgaaaaaaacctcagttnataccaagagactttttnaaaaaattatctgggggcccaaggtgccggnggntcacacctataattcctagccnctttggganggccaaggncggccggaccnccttggnggncanggantttcnaaacccg

SEQ ID NO: 4397 - DNA, 1201 bp, Homo sapiens
  misc_feature 6, 7, 8, 13, 14, 15, 18, 20, 21, 23, 24, 29, 32, 34, 37,39, 41, 44, 45, 47, 48, 50, 53, 54, 55, 59, 61, 65, 70,71, 72, 77, 78, 80, 83, 93, 97, 98, 100, 103, 104, 105,108, 110, 111, 113, 114, 115, 117, 118, 119, 125, 140, 203,204: n = A,T,C or G
  misc_feature 232, 435, 437, 440, 441, 442, 444, 445, 448, 449, 452, 454,456, 460, 496, 507, 533, 534, 541, 543, 577, 582, 595, 602,607, 609, 613, 616, 623, 652, 656, 659, 669, 674, 681, 689,701, 702, 713, 725, 736, 738, 739, 744, 760, 763, 774: n = A,T,C or G
  misc_feature 776, 778, 793, 797, 805, 806, 824, 830, 847, 849, 852, 855,865, 868, 869, 878, 895, 899, 912, 913, 923, 924, 927, 928,929, 934, 940, 942, 946, 960, 963, 966, 976, 983, 987, 988,996, 1000, 1004, 1006, 1012, 1026, 1040, 1042, 1044: n = A,T,C or G
  misc_feature 1053, 1058, 1063, 1066, 1067, 1069, 1071, 1074, 1075, 1079,1082, 1083, 1085, 1088, 1089, 1091, 1109, 1112, 1119, 1129,1140, 1143, 1144, 1146, 1148, 1168, 1175, 1176, 1184, 1192,1195, 1200: n = A,T,C or G
cctctnnntattnnnttnanntnngtacntgntnttncntncannanntngtnnngtcntntctnttatnnntcatnncngtntactatattntttnncngtnnnggngnngnnnannnatgttnctccactcactatanggcgaattggagctccaccgcggtggcggccgacttttttctttacatttataatgtggctgnnaaaaaatctttaattatgtggctgtgtnacactggtgactcatattatgctgctttcagacagcactgactagagtgtgagccccgtcctcaagttgcttagagcttaacacaggagacacaagtggaaaccgctgtatataagctgtttgacagggagctgcatggtgcagaaaagaggaaactacctctctggcagtggaattgcttgtttgctgagaaataaagggananctnnnannagnntcnantnattnaaaaaatgtgtacccttcggccgcttcttagaaacntaagtgggatncccccggggccttgcaggaaatttcnnattttcncnggcttttattctgataacccgttccgaccctttnaaggnggggggggccccnggtaacnccaantntttntangtttccnctttttaggttggagggggtttaaatttngccnccncctttggggnggtanattcaantggggccnataaagcttggnntttcccctggnggttgaaaaatnggttttaatancnngcttnaacaaaatttcccacnaanaaaccatttancngnagccccggggggagnccantaaaaaanntggttaaaaaggcccttngggggntggcccttataatggangnggnagncttaaacctntcnnattttaaantttgcggttttggcggncttnaacttgcccccgnnctttttcccnnttnnnggggnaaaaancntttnctttgcccaaattnggnttntttatttggnaatccgnaccnnaacccccntttntggnanaaaggnccggctttttggcngtttatttgggggncncntcttttccnctttnccttnggnntnancannaaanttnngnttnngncttacgggggtctatttnggnttttgcnggggcgtaangcggggttttnaanncntnaactttcaaaatgggccggngaatttnncggggttntttccacnaanaattng

SEQ ID NO: 4398 - DNA, 1261 bp, Homo sapiens
  misc_feature 4, 6, 7, 9, 10, 12, 15, 22, 24, 25, 26, 27, 29, 31, 37, 41,44, 45, 48, 57, 60, 62, 64, 77, 78, 80, 83, 86, 90, 92,101, 105, 106, 109, 110, 112, 119, 210, 218, 232, 371, 388,412, 450, 452, 473, 500, 505, 520, 522, 523, 529, 530: n = A,T,C or G
  misc_feature 533, 537, 542, 558, 573, 576, 612, 629, 638, 639, 649, 650,658, 662, 670, 674, 693, 702, 708, 711, 719, 732, 742, 743,746, 748, 751, 757, 777, 791, 806, 807, 811, 816, 817, 818,823, 831, 836, 841, 846, 877, 895, 900, 902, 904, 907: n = A,T,C or G
  misc_feature 910, 914, 916, 918, 919, 935, 946, 950, 951, 985, 987, 995,1000, 1002, 1004, 1007, 1014, 1022, 1025, 1034, 1036, 1038,1042, 1043, 1045, 1046, 1053, 1064, 1075, 1080, 1090, 1096,1102, 1103, 1106, 1109, 1119, 1123, 1125, 1135, 1136: n = A,T,C or G
  misc_feature 1141, 1142, 1144, 1147, 1148, 1151, 1152, 1155, 1158, 1168,1173, 1179, 1182, 1188, 1192, 1208, 1210, 1235, 1255, 1258,1259, 1260: n = A,T,C or G
ctcncnncnntnttnattgttncnnnntntnttctcncatnttnnatncttctatcntcnanancttcaccttgttnnanttnctncaantntagttcagnggtnntanncncgtaatncgactcactatagggcgaattggagctccacccgcggcggcttacaggcatcagccatcacacccatccataaacattatattaatgtgcncatgacanaactgagacctaanttgcttatgataaaatgaaattggaagactagctaacatgaaaatttatattttggctttttcatgttttttgataaaaccagtgtatttgaatgattctttttgatgtttagtaatggttttttatgtttgttttttnggttcttttttttttgnagacgggagtctcactctggtcgnccagtcttggagtgcttaagtggcgcccgaatctttgngnctttaacttggccaagccttntcaactttttcccaaaggtttccaaangccgnattttcttcacttgncnnttcaannccnttcncccgnaggttaagccttgggngaaccttaccaaggnggncggccaattggcccaaactcaaccgccccccggggnttaaattttttttggtnaattttttnntaagttaagnnagtaaccnggangtttttcnaccntggtggttttgggcccatnggaatgggnttcttncgnaaacttcngaacccctacggntggaatcaannccnanccnttttgnggcccttcttccaaaaagtnggccttgggggaantttaccaagaggccnnttgnagccnnnccccncctccccntgggnccctnattgnttttaaaataaaatggttttgcaaaattagngggattggggaaattaanttttntngnttnaanaatntnanncacttttttaaaaaantttttgaaacntacnncctgtgtttttaaaatttttttaaaaaacccccntnccctcccntcttncnanttntaaaccnaaaaaaantanaatttctcnancnttcnngnnggagganaaaacctttanaaaataccccnttggnattctcaaanaatggnaaaacnnatnatntttgaaaagngatngnatttattacnnaaccnngnaannttnnccnggntaaaaagaanaaaanggttgntanaggtgntacnttaaccctttttggcncnttattgtgggatggcgttcttttantcccaactccctcttttagnttnnng

SEQ ID NO: 4399 - DNA, 1149 bp, Homo sapiens
  misc_feature 3, 5, 7, 8, 9, 10, 11, 12, 15, 16, 17, 20, 21, 22, 23, 24,25, 26, 27, 28, 30, 31, 32, 33, 34, 37, 38, 39, 40, 41,42, 43, 44, 46, 51, 52, 56, 57, 58, 60, 61, 63, 66, 69,70, 76, 77, 78, 79, 80, 81, 82, 83, 84, 85, 86, 88, 89,90: n = A,T,C or G
  misc_feature 91, 92, 95, 100, 101, 103, 106, 121, 123, 124, 131, 132,135, 141, 325, 328, 361, 383, 403, 434, 438, 450, 478, 483,515, 523, 536, 543, 581, 591, 596, 603, 623, 653, 657, 678,681, 692, 713, 721, 743, 746, 759, 761, 770, 777, 784: n = A,T,C or G
  misc_feature 801, 808, 820, 828, 840, 849, 877, 883, 909, 911, 913, 920,935, 944, 948, 968, 983, 988, 990, 993, 999, 1009, 1010,1027, 1029, 1034, 1037, 1044, 1046, 1069, 1080, 1088, 1100,1102, 1106, 1109, 1115, 1118, 1119, 1126, 1127, 1135: n = A,T,C or G
  misc_feature 1145: n = A,T,C or G
acncncnnnnnnatnnnttnnnnnnnnntnnnnnttnnnnnnnntntttanntaannntnnanttnatnnttttgnnnnnnnnnnnannnnnggngttanncnttncgatcatatagggtnanngaatttnnctncaccgnggtggcggccgggcgtggtggctcacgcctgtaatcccagcactctgggaggccaaggcgggtggatcacgaggtcaggagatcaagaccatcctggctaacatgtctctactaaaaatacaaaaaattagccgggcatggtgacaggcttctgtagtcccagctactcgggaggctgaggcanganaatggcgtgaacccgggaggcagaagcttgcantgagccgagatagcgccactgnactccaagcctgggtgacanaagccgagactcttgtctcaaaaaaggaaantttnataattaaaggngttaccctttgggcccgctcttagaacntaggngggaatccccccggggcttgccagggaattcnatatcaangctttatcggaanacccggnccgacctttcaaaggggggggggccccggttaccccanccttttttgnttccnttttagnggagggggtttaaatttggngccgcctttgggcggtaaatacaaaggggnccantaagccttgtttttcccttgnggntgaaaaaattnggtttattccccgcctttcancaaatttnccccccaccaaaccattacccnaangccccggggaagncnattaaaaangttgttnaaaaggnccttggggggtggcccntaaaatnaaggtggaggcnttaaaccntcaaccattttnaatttgggnggtttggccccttcaaccttgccccggntttttnccaaggtccgggggaaaaaccctggncngnggcccanccctggcatttaaantgaaaatcngggnccaacccccccccggggganaaaggccgttttttnccgtnanttngggccnctttttcccnnttttttttgggttttantnggaanttngcgttgngncctccgggacaattccggggttntgcggccaaancggtattntaaactttcttntnaaanggngggggnaannaccgggnnttttccanaaaaaaatanaagg

SEQ ID NO: 4400 - DNA, 837 bp, Homo sapiens
  misc_feature 155, 156, 486, 506, 530, 546, 562, 572, 601, 670, 681, 686,692, 693, 695, 703, 704, 709, 719, 738, 744, 755, 759, 761,762, 766, 788, 789, 790, 814, 821, 823, 836: n = A,T,C or G
ggagctccaccgcggtggcggccgcccgggcaggtactccacctgcctaggcctcccaaagtgctggaattacaagcgttagtcactgtgcccagcctctctctaccaatttccacctgtccttcaaggcccagctgcagtgctgcttcaactgnnaagccttccctagctccccagctagagttatatattgtaacacctagcataatgtttcgtgtttagtggaaactatggaattgccttttaaaaatttatttatttatttattttttgagctggggtctcaccgtcacccacgctggagtgcagtggtgtgatcttggctctctgcaacctccgcctctcaggctcaagcgatcctccccccgcgtacctcggccgcgaccatcgagcggccgcccgggcaggtactggatcaagtttctcctgcgtgaggtatgggtggcactcaacctggttaagtcactgggttatatttcagtccangtttgttcaagaacctctcnatctggaagtgggtgaaatttganaccccaagggcttttnaaccagccccctcgtncaccaacttncttcatgggcctccccaggcattccaaanaacgtttcctttttccactgaatcatattaccctttatcaatcttttgggggaaaaaagtcattcccangctttgaaatncctgngggccnngnggaataannaaaanaccgtcccanaataagctcaaactttcanggtccnttggaggggtntttntnnaaanggctttttcctcacaaaggggnnntttcaaaaaaaaggggggccccancccttgntngccaatgaaacang

SEQ ID NO: 4401 - DNA, 862 bp, Homo sapiens
  misc_feature 519, 543, 586, 600, 628, 639, 659, 707, 726, 735, 751, 753,778, 792, 808, 828, 832, 838, 843, 853, 856, 858: n = A,T,C or G
ggcgaattggagctccaccgcggtggcggccgcccgggcaggtaccacaactggtgaacccagcaggaaggtggagaaaaatttcatgagcaccgagaccgtaagatcaggaaaggggaaatccaagggggggtcccgggctgaccatcacatttatgtggtgcccaaaagccactatccttgatggatgggacccaatgtatgagtacctcggccgctctagaactagtggatcccccgggctgcaggaattcgatatcaagcttatcgataccgtcgacctcgagggggggcccggtacccagcttttgttccctttagtgagggttaattgcgcgcttggcgtaatcatggtcatagctgtttcctgtgtgaaattgttatccgctcacaattccacacaacatacgagcccgggagcataaagtgtaaagcctggggtgcctaatgagtgagctaactcacatttaatttgcgttgcgctcactgcccgcttttccagtccgggaaacctgtcgngccaacctgcattaatgaatcggncaaccccccggggaaaagccggttgcgtatttggggccccttntttccgctttcctngcttaattgaacttgcttcgcctccggnccgtttccggnttgccggcgaagccgggtanttaagccttcacttcaaaaaggcgggtaaataccgggtttttcccccnaaaaaatcaaggggggatnaaccccccnggaaaaaaaaacattntngaaccaaaaagggccacccaaaaangggccaggaaaccngtaaaaaaaagggccncgtttgcttggccgtttttncatnaagggntcccnccccccctgnaanangcaa

SEQ ID NO: 4402 - DNA, 832 bp, Homo sapiens
  misc_feature 566, 592, 613, 637, 667, 680, 688, 734, 757, 766, 776, 789,806, 811: n = A,T,C or G
gggcgaattggagctccaccgcggtggcggccgcctgggcgaagccgccatggtcgaccacggcttgcagggtgcgccattgatcaagggtaacgcggggcgctttcaagatgagctcctcttgtcctaagctggcggtccttattggagactgccgaatgagaaaattctgttgtgtgctgctgacgctgctgccgttgagtgcgtttgcattcagtaccgatgtgacgaaagacattcagggcgtgaagatcgattacagcgcgtcggacgtcgacagcaacatcagttcgatccaactcaccaactacggccccaatgacgcggagtgcaaggtacgctttaccaatggtccggaagcgccgcgtacccgcaaggtcacggtcgcagcagggaaaactaccaacaccacggtcaatttcagccgtgccattatcaagatgcgtatccaactgacctgcgcaccgaaataaggcaaaagcggaggacgcctacagcaatactccgcttataaacaaatttctagatgggttattagcaattttttacgcttttttaatcgaacnggcttctgattaacctttaatttcantcggctttacaagcattttanccgatggggcttacataattcatnggcccgtggttctgaatcattcgaaaagcnagcgccccgttancaaggaantcaattttcccgccaacttgacccaaaaaatttaattagttccatngggaaagtcgcttcacccccggnttgatccanaatcaaccgnacgttgaaccttngccaattaaaccccgtngccgnaaccttggaccccaaccttgg

SEQ ID NO: 4403 - DNA, 1128 bp, Homo sapiens
  misc_feature 3, 7, 10, 14, 15, 16, 20, 22, 23, 25, 28, 31, 32, 34, 36,37, 41, 43, 53, 54, 56, 63, 66, 70, 72, 74, 80, 81, 90,94, 97, 99, 100, 101, 102, 104, 107, 108, 109, 111, 112,113, 114, 115, 126, 127, 129, 137, 139, 161, 172, 201, 258: n = A,T,C or G
  misc_feature 345, 371, 409, 442, 464, 466, 479, 503, 544, 601, 614, 668,682, 715, 723, 742, 746, 766, 770, 779, 781, 783, 792, 812,831, 841, 842, 849, 850, 856, 858, 869, 898, 903, 913, 915,920, 922, 925, 926, 927, 929, 938, 944, 954, 956, 966: n = A,T,C or G
  misc_feature 986, 997, 998, 1002, 1006, 1016, 1027, 1028, 1030, 1042,1047, 1048, 1051, 1058, 1059, 1064, 1065, 1067, 1073, 1075,1077, 1087, 1090, 1095, 1100, 1103, 1108, 1112, 1114, 1115,1118, 1120, 1124, 1127: n = A,T,C or G
ccncccnctncccnnncttntnntntgntgnncnanngttntntatgtgtaanntntcaaaanctntacnantnagatannttcttcccncgtnagngnnnngnagnnnannnnnataaattacgnngngcgaatgnanctccaccgcggtggcggccgangtacgcggggncaggccatctcgctataggaaaggaaagnggaacagcattcatcctcaacatttttacgaagacaaaatgaaggactggagtagancactgatcagtgcaggtgtagcataaaagtgtaatcctggaagatgtggtgtgagaaggtagcacaagtgaagcagagatacagganatagggaagggaagctggaagcagangtcactggagggagagggagatggacacattcagggcntacaaagcaagttctatgtgattttgctcactntctcaattgtgggggacccctntnaaaatgttgtacnctgcccggggccggcccgctctangaactagttggaatccccccggggcttgccatgggaattcngataatccaagccttattcgatacccgtcgaccctccgagggggggggcccccgggntccccaacctttntgtttcccttttaagtggaggggttaaattggcgccgccttgggcgttaaatcnatgggtccataagnctggtttccctggtggtggaaaaatttggtttnattcccgnttcaccaaatttcccccgncaancaattaaccgaagccccggngganccattaaanangnggtcaaaangccctgggggggtggccctnaaattggagttggaagccnttaacctccnncatttanntttgcngnttggcggcctncaccttggcccccgcttttttccaatttnggggnaaaaccctgntncgatngnccnnncntggccaatnttaaantgaaaattcngntcccaaacanccccccggggggaaagaagncccgggttttnncccngatnttggggcggnctttttttccnncntttcctttgtcntcaanntgnaacttcnntttgnncntttggntncngatttctggnatngtcgnggctnaanccggnattnanngcntncctntang

SEQ ID NO: 4404 - DNA, 771 bp, Homo sapiens
  misc_feature 589, 674, 685, 712, 728, 759: n = A,T,C or G
ggagctccaccgcggtggcggccgaggtacagacttgccaatctctgtcccatagcatatgctgaaaaagctctgaatcggggattcagctccactcagccacagtcttacagaaatcctgcacagaaatcctcctgtagtcaggagatacatccttctgtgtcctcaggacaggcaggcagatttcagtcccacagcaggtcctgaaacaaccctgaatcttggcataagcccctctcagctgtggtcagagagcagttctgcctacccagcatcctggagggagatggggctgtccatagccctgcaaacaggccacctgacctaggtccctcatcagtccctgaaacacccctgaaaagtggctccagcccctctcaatacagcaggcccgctaacttaaggacctgaagggagacatgcaggtttgtgacaccttaggcctgaagacctaagtcttgactgtaggccctgaagcaaccctgtagcttagttccagccccactcagctgtggactagggcagtacctgcccgggccggccgctcgagtcgcgcccacagctggaaggcctggttcatgagcttganggtgcacccgtgcgcaccggccaaaatcttggcgctgctgtcctgaacgtgcgctgctcctgctggatgcgcctggcccatgctntggatcaccgnggcatttctttgccggctctaaactantggattccccgggctngaaggaattcgattcaagccttattcgattnccgttcaacctt

SEQ ID NO: 4405 - DNA, 786 bp, Homo sapiens
  misc_feature 362, 363, 364, 365, 366, 367, 368, 369, 370, 371, 372, 373,374, 375, 376, 377, 378, 379, 380, 381, 382, 383, 384, 385,386, 387, 388, 389, 390, 391, 392, 393, 394, 395, 396, 397,398, 399, 400, 401, 402, 403, 404, 406, 407, 408, 409: n = A,T,C or G
  misc_feature 410, 411, 412, 413, 414, 415, 416, 417, 418, 419, 420, 421,422, 423, 424, 425, 426, 427, 428, 429, 430, 431, 432, 433,434, 435, 436, 437, 438, 439, 440, 441, 442, 443, 444, 445,446, 447, 448, 449, 450, 452, 453, 454, 455, 456, 457: n = A,T,C or G
  misc_feature 458, 459, 460, 461, 462, 463, 464, 465, 466, 467, 468, 469,470, 471, 472, 473, 474, 475, 476, 477, 478, 479, 480, 481,482, 483, 484, 485, 486, 487, 488, 489, 490, 491, 492, 493,494, 495, 496, 497, 498, 499, 500, 501, 502, 503, 504: n = A,T,C or G
  misc_feature 505, 506, 507, 508, 509, 510, 511, 512, 513, 514, 515, 516,517, 518, 519, 520, 521, 522, 523, 524, 525, 526, 527, 528,529, 530, 531, 532, 533, 534, 535, 536, 537, 538, 539, 540,541, 542, 543, 544, 545, 546, 547, 548, 549, 550, 551: n = A,T,C or G
  misc_feature 552, 553, 555, 556, 557, 558, 559, 560, 561, 562, 563, 564,565, 566, 567, 568, 569, 570, 571, 572, 573, 574, 575, 576,577, 578, 579, 580, 581, 582, 583, 584, 585, 586, 587, 588,589, 590, 591, 592, 593, 594, 595, 596, 597, 598, 599: n = A,T,C or G
  misc_feature 600, 601, 602, 603, 604, 605, 606, 607, 608, 609, 610, 611,612, 613, 614, 615, 616, 617, 618, 619, 620, 621, 622, 623,624-645, 647-651,653-654, 656-659, 661-674, 676-715, 718, 720,721-723, 725-729, 731-743, 745-747, 749, 751-778, 780-785: n = A,T,C or G
gactactatagggcgaattggagctccaccgcggtggcggccgaggtacctgactttgggtaagttgccagaataagatcatcaggcttggcttggaaattacatactttttcccaccattcttttgataatatcaacgtagggactccatctacttccatgatgttaaacagttctggctttttttccatcgtgggagcgtttttctcaatcttcgccattgggaatctggtatctcaggcagcagaggaagcagcttgctgcctttagtcaaactgcttcctggaaacccagagccaggtccagctccaggacactgtgcaagcaagagcacagcaggtcccccgcgcacctgcccgggnnnnnnnnnnnnnnnnnnnnnnnnnnnnnnnnnnnnnnnnnnntnnnnnnnnnnnnnnnnnnnnnnnnnnnnnnnnnnnnnnnnnnnnngnnnnnnnnnnnnnnnnnnnnnnnnnnnnnnnnnnnnnnnnnnnnnnnnnnnnnnnnnnnnnnnnnnnnnnnnnnnnnnnnnnnnnnnnnnnnnnnnnnnnnntnnnnnnnnnnnnnnnnnnnnnnnnnnnnnnnnnnnnnnnnnnnnnnnnnnnnnnnnnnnnnnnnnnnnnnnnnnnnnnnnnnnnnnnnnnngnnnnnannannnngnnnnnnnnnnnnnngnnnnnnnnnnnnnnnnnnnnnnnnnnnnnnnnnnnnnnnnggngnnnngnnnnnannnnnnnnnnnnnannngngnnnnnnnnnnnnnnnnnnnnnnnnnnnnannnnnnc

SEQ ID NO: 4406 - DNA, 782 bp, Homo sapiens
  misc_feature 499, 554, 594, 609, 616, 635, 649, 664, 665, 687, 695, 711,725, 731, 745, 748, 752, 756, 760, 763, 780, 781: n = A,T,C or G
tccaccgcggtggcggccgaggtactcaagaaacccaggccagagttactggagcccttcctcacaattggccttggctccctctccacttgtgtgttttcacattgacttgatcttcagtggagtaactctgagcagtggctgtagctcagcaggtagaaaaactctctaacccttgaagaggggaatacagtagcaccattgaaaaaagaggttgtgtatagagtttcattcttaaatttgctttgccaaggagaaagcctgtgagagtgaaagcaaggtggaactggggtccaaagagagggagtaaactagatgccatattaatttgtatttctggagaatatgactgcagtttatatataacttggtttaaacatttttgtaacctgcttaagaaatttgggtttgggtggtccgattttcatttggaagaaaagattaggaagacagtatagttttggggacacaagcatggctacctacaggagacaggtcngaaaggaaaataagtgatgcagccagctgagtacctgcccgggcggccgctctanaactagtggatcccccgggctgcaggaattcgatatcaancttatcgatccgtcncctcganggggggcccggttccccangcttttggttcccntttagtgaggggttnnttgcgccccttgggcgtaattnatgggccntaagcttgtttcctgngtggaaatttgttntcccgnttcacaaatttccncanaaanatancganccngggagcctttaaagggnng

SEQ ID NO: 4407 - DNA, 781 bp, Homo sapiens
  misc_feature 719, 768, 776: n = A,T,C or G
ggcgaattggagctccaccgcggtggcggccgaggtacttttttttttttgtttttttttaagaaaaatacctggaaaagccttgcttctaatgtaggaatttttccttacagtgagatctatgtaactgacaatgtttgtgggtttcacttcagctgccaggaaatttggtattacatgagcatttcaaataaagcaacagtgtataattttaaggcccacattagttttcatttttcactacttttgacaccctattctaaatttttgtttcactttatcttttgcttttaatttgtgttttatgtaaaatacttatacaatctttatggaatgagatggggcagaatggaggagtatatccatgtaacttgattttattccactttccaactatatcttctttctgtcttaaaccgctctagaactagtggatcccccgggctgcaggaattcgatatcaagcttatcgataccgtcgacctcgagggggggcccggtacccagcttttgttccctttagtgagggttaattgcgcgcttggcgtaatcatggtcatagctgtttcctgtgtgaaattgttatccgctcacaattccacacaacatacgagccggggagcataaagtgtaaagcctggggtgcctaatgagtgagctaactcacattaattgcgttgcgctcactgcccgctttccagtcgggaaaaccctgccgnccagctgcattaattgaatccggccaacgccccgggggaagaaggcggnttggcgtnttggc

SEQ ID NO: 4408 - DNA, 824 bp, Homo sapiens
  misc_feature 62, 113, 116, 119, 122, 170, 187, 200, 222, 243, 323, 348,415, 445, 452, 464, 467, 468, 471, 490, 499, 509, 563, 567,568, 583, 585, 589, 590, 634, 642, 660, 674, 676, 689, 690,700, 710, 725, 729, 747, 750, 751, 760, 761, 764, 766: n = A,T,C or G
  misc_feature 772, 789, 797, 819, 820: n = A,T,C or G
tccaccgcggtggcgagcggccgcccgggcaggtacgcggggtctgtcctggtatcaaagtnatattggcttcatagaatgagggaaatgtttatccttctaaaaatatttantanagnggnctaagatgagagtgtaagtgagtaaactttctcaatcaaatattttgngatatgtttcaggaatntcattacatgttnggttcaatttttaaagcatttntttttattatttaaaactttnagcattggtgaccatccatgtgctgcttttattgccagcttaacttgtttttatgacatcttcaggaagaaaacctctgntgtctatttaatggagatgaattgntaaacttttaccatttgcaactatacctctctatgagtcagacttttattgatcgtgtacaactaantgaaacccggaaatgaaggaaatgtaacangcgaccntatgtattcttngtnngcncaaattgcctttataaaanagattgatnctctataatnagcaaatgttgtggatttggaaattttccaaatttgaggcttacctaaataatngtgnnccaattccaatcccnanggtnnattttggggtttcttaataaaaatgtaaattttgctcaaagaangaattttngcttgcccctttaaccanaacaaaaaatacgnanccccgggagccannaaaagggttncctgggggcngggtcttaaaaactnagtnggatcccccccggggctngcnngggaaattnntanantcaaanctttatccgatttcccntccaaccnttaaagggggggggccccgggnnccct

SEQ ID NO: 4409 - DNA, 969 bp, Homo sapiens
  misc_feature 2, 3, 6, 7, 12, 14, 20, 22, 24, 43, 44, 55, 63, 136, 368,402, 418, 431, 458, 498, 508, 546, 551, 590, 614, 630, 633,667, 676, 703, 711, 712, 737, 756, 759, 790, 799, 815, 827,835, 856, 858, 874, 876, 886, 903, 904, 915, 917, 924: n = A,T,C or G
  misc_feature 941, 944, 953, 958, 962, 963: n = A,T,C or G
gnngtnntgtcntntatttnancnattacttagggcgaattgnngctccaccgcngtggcggncgaggtaccaaagacctccagtgatgcttatgaacatgtagctgctgtttggaagctggaagccccatatcanatgcctaccacagaatctggagttggggcagagtgctgaattggtcggagttacctgtctgcttgataacttcagatgcctcctttctcagatggcattgctaagctctgcaaagatctaactgtgaggatgagataatttaatcttgcccgtgggctctatcctggcggagataccatgggacttgaatcctgggctaaattgtaatcttggggaaaggcaactatacctngcccgagtttgttcctaggagagcaaagcataangaaggtctttcccaantaaaggaccatgncaggcaccaagagggcagtcttgaaangggaagccaagggaaaagggattttgagaaccctaccaangaattgaaangttggtaaggaataattaaaaagtccacaaggcaaagnagttncctggcccccggggccggcccgcttcttagaaacttagntgggaatccccccccggggcttgncaaggggaaatttccnatnattcaaaggccttttattcggattaacccgttcngaacccttncaaagggggggggggccccccgggttnacccccannccttttttggtttcccctttttaantggaggggggtttaaattngcncccccctttgggccgttaaattcattggggnccattaagncttgtttttccctggntggtggaaaaanttggtttnttcccgccttcacaaattttncncaaccaaacaattacncnagccccgggngaggcctttaaaagttnntaaaaaacccntnggggggnggcccttaaatggagtngangcttaaccntcacntttnnaattgg

SEQ ID NO: 4410 - DNA, 822 bp, Homo sapiens
  misc_feature 5, 6, 7, 8, 9, 10, 11, 15, 439, 518, 520, 534, 546, 624,681, 687, 690, 698, 699, 717, 722, 724, 727, 730, 733, 735,736, 738, 741, 782, 798, 805, 808, 814: n = A,T,C or G
gaagnnnnnnngccncgtaatacgactactatagggcgaattggagctccaccgcggtggcggccgaggtacttttttttttttttttaaaccatttcaagagagtctctggatttcttgatccttgatttgtggttttcatgttgtctgtgagctccagcagggcctcatcagccctgtccgtggtgctgctccagctctgtgctccccgataggtggccctgcgctctatgcacatccttcttaacataggaaagatgtatgcccttcaaagaaaggcattcaagacagatcagcaccaagtggaggctctacccacagatgttaatgtgcattaagaaacagcgttactgagaaatctgagccatcattccagagtctctctcctggggagaagtttgtttttactgctgggtttttttgtttggttttaattcanaatttggaactagaattatttgtaataaacctatcaaagcctagcctaagggctgccatcttcttgtcaaaattctagntngtttataccagtanaaaaaaagacanttttaaagctcttcaaaagctgaatcctcctcaatagtaaggggactgtgtgaaaagttttttttatgctgggcttanccaaccctttcttttttttcccccagcttaccagtggaaaaaaagcaaaactttttngccccnganctttttannaactatttaaaaatagangtttntnatngtnttnanntnaantggaggggtttaaaaaattgtttctttttttaaaaaaaagnaaaacctttggaaaanttccaanaanggggcnatcccact

SEQ ID NO: 4411 - DNA, 797 bp, Homo sapiens
  misc_feature 569, 586, 652, 670, 686, 750, 756, 762, 765, 768, 778, 780: n = A,T,C or G
tagggcgaattggagctccccgcggtggcggccgcccgggcaggtactagcacttgtgaccaacagctagtcttgctttcaacagctagtcttgctttccctgatcgtagatccctactaaaagctcttgaaagtgtgcatatgcaggctacctaatgatttaacggaggatcaagatggttacactgcagagaaacaggagggatagggcatatgccctttgtccagcaagacagacaaaaactaggaacttgaattctcttctctggattcctgtatctggagccaaggccaaggatcagttcttctagaaagttccctcctgtgtgtgtgtgtgtaaatgtgtgtgaatgcagtcataacttccctgccaaaattcattgccaaaaattttgtgatttgaagcaggccttacctgttaatgcaaatttgattctcaaatcctaagagtttccaaaggttgagtgaagtgagatgagactcttagttgaagatccagatgcttcactgttgctatctagatgctaccaaaactcccagcacacaaagtatatgaagagaggctctangttcatgaaatgttaanagtttggaaaaatgggcctttggggttcttcttattctacctcctcttttaaaagaaaatgccagntgggaaatggatgctcanaactgacttggctganaaggtgaaaagggctagtggagaaaccagaaccccctgattcctagtctagggctttttccctncccggnggggancanctnttttggtttntnccccttttttttgggcg

SEQ ID NO: 4412 - DNA, 810 bp, Homo sapiens
  misc_feature 3, 4, 7, 8, 9, 10, 11, 12, 13, 14, 15, 16, 650, 685, 690,704, 707, 709, 719, 732, 758, 774, 806: n = A,T,C or G
agnnagnnnnnnnnnntaatacgactactatagggcgaattggagctccaccgcggtggcggccgaggtacacattttgaggggtcccacaattgagaggtgagcaaatcacatagaacttgctttgtagccctgaatgtgtccatctccctctccctccagtgacctctgcttccagcttcccttccctatctcctgtatctctgcttcacttgtgctaccttctcacaccacatcttccaggattacacttttatgctacacctgcactgatcagtcttctactccagtcttcattttgtcttcgtaaaaatgttgaggatgaatgctgttccactttcctttcctatagcgagatggcctcccgcgtacctgcccgggcggccgctctagaactagtggatcccccgggctgcaggaattcgatatcaagcttatcgataccgtcgacctcgagggggggcccggtacccagcttttgttccctttagtgagggttaattgcgcgcttggcgtaatcatggtcatagctgtttctgtggtgaaattgttatccgctcacaatttccacacaacatacgagcccgggagccataaagtgtaaagccctgggggtgcctaaatgaggggagctaacttcacattaattncgtttgcgctcaacttggcccgctttttcccaggncgggnaaacctgtccgtgnccnancctggaattnaattgaaatcggnccaaccccccccggggaaaaaaggcnggttttgccgtaattnggggcgcttttttccgctttactttgctttanatga

SEQ ID NO: 4413 - DNA, 788 bp, Homo sapiens
  misc_feature 740, 745, 751, 762, 778: n = A,T,C or G
actcctatagggcgaattggagctccaccgcggtggcggccgaggtacttttagtggagatggggtttcaccgtgttagccaggacagtctcgatctcctgaccttgtgatctgcccgcctcggcctcccaaagtgctgggattacaggtgtgagccaccgtgccctcttttattctcagtaatacactctactccgagaaaaatattggatttaaattgcaattgatctggctaaaaattttatcatcactgaaattcctagaatgtgaaaaaagaaggtttatttttctgtaatgtgagtttcactgtagcctatcaaagcacatggatgaaatcggaaatgcctaaaattctgaggttggcagaaatacacacactcaaaggacatgcaatcacataaacagaactactttatcttgacagcatccaggctgcctccatacaaatgtagcttcatgttggtggctagtccgcattgcattttcagagatagaaagaagaaattccagaaagggaaaacattggcattttgttttacagtaactctttacctcgcctttaaaaagacattgtgcatgctttacatgatacagccaatttcaaaggacttattctggattcttatgattagcatattgatattgacattactaagactattatcatttcaaaaggggctgagtttaacttaaaagttaattataataagccagtcacaaaccacaagggtaaaattaanattgnctttanacttctctggnggcttactggatgccngccagacagt

SEQ ID NO: 4414 - DNA, 1006 bp, Homo sapiens
  misc_feature 2, 3, 11, 12, 19, 24, 37, 58, 141, 247, 324, 338, 361, 381,402, 408, 411, 413, 414, 432, 434, 437, 443, 461, 462, 466,483, 484, 486, 516, 528, 553, 558, 561, 591, 592, 595, 596,597, 602, 605, 606, 607, 614, 616, 617, 618, 619, 629: n = A,T,C or G
  misc_feature 630, 638, 655, 658, 672, 703, 713, 730, 745, 746, 755, 757,760, 762, 769, 790, 793, 798, 806, 808, 810, 811, 820, 822,826, 827, 832, 840, 844, 858, 872, 874, 876, 879, 893, 908,910, 911, 929, 938, 942, 945, 951, 952, 953, 955, 958: n = A,T,C or G
  misc_feature 959, 960, 970, 971, 976, 986, 991, 996, 1006: n = A,T,C or G
gnnagatgttnntataatntacgnctcactatagggngaattggagctccaccgcggnggcggccgaggtacgcggggtgaagaagagtattcctttcctctgagaagtacacttgaaaaaatcctgtaactctagcgtanactaccagttattgacttccaacatttactctgctttcctttttctaaaattgataaagtccaaacctctcttgtttggatttgaaattactatgttttttggccnggcgcggtggctcacgcctgtaatcccagcactttttggaggctgaggcgggcagatcatgaggtttagggaaatcnagtaccatcctggntaacattggtgaaaccccatctnctactaaaaatacaaaaaanatttagccaggccgtggttgngttggngcncnntgttaattccccaggctncntancagaanggctggagtgccagggannaaantgggccgtgaacccaannanggcgggaggcttggcagatgaagcccgaanattcacacttgnttgcacctcccaagcctgggggtgnaccangantccaaaggaacttcccattctttcaaaagnnaannnttgantannnacaaganannnnatttgggttnncccttgcncccgggggccgggcacnggnttcttaaaaaaacnaatgatgggaaacccccccccgggggcttgnaaaggggaanttttcgaattttccaangcctttattccgaannacccggtcngnaancnttcgaanggggggggggccccggggaanccncaaancttttttngntnnccccttttnantggnnggggnttaaattngccncccctttgggcccnaaaatacatggggncnanaanccttggttttcccntgggggtgaaaaaantnngttttaattcccggattnacaaatttnccanacnaaaaannnanacnnncccggggggnnccatnaaaaaggggnaaaanggccntgggggtggn

SEQ ID NO: 4415 - DNA, 922 bp, Homo sapiens
  misc_feature 444, 458, 481, 516, 545, 580, 596, 678, 679, 692, 695, 698,699, 744, 747, 755, 769, 778, 779, 784, 792, 800, 801, 806,815, 817, 823, 825, 834, 840, 842, 847, 849, 850, 861, 864,867, 868, 869, 874, 879, 883, 888, 897, 917, 919, 921: n = A,T,C or G
ttgggcgaattggagctccaccgcggtggcggccgaggtacacattgaaatctgcaacatgctgggactgcagagagcctgggctgggagtcgtgagctccacccggctgtttttatgacagctggcaaaacacgctaaggcacattgaggactcagtgaggcaggttcctgggcctctgttaggctaagtttgaagttgttccatcactgcctccctctgccttctttgccatttccatccatgatagcactaccctaactagtgatgagaagcagtctttggagttcctcttctctcctgtccctcatggctaatttccctgctcagacttctgcctctggctctctttccttctgtgcacactgacttttttccctctcctgtgccgagctggagtcgagcggccgcccgggcaggtacactgcccaggcaaaggcgtccngggcagcgtaggcnggcgactcagatcccagccagtngacttaagcccctggtttgctcctccgaataactngggggtgaccttggttaaatattcaccangcagccttcccccgttgcccccttctgggatccantgcttttaaaaaaccnggaacgaaggaccagggggccctgtttttctttaagctttcaggggcacccaaccacttgacctgggggacaggtggaaatnngaacaaatggccngtnttnntgtcttcgggtggggggcaatcctccttgctttggcaaggccctntgnttggcctnggtccctgttttcnccttggctnnagganccccccangggagatnncctgncccaaaagnanagaaancnttcccaccnttggancngggantnnccccaaccttnaanaannnataanccccnaacnctggnttgtagttngccctttaagacataaaccngncng

SEQ ID NO: 4416 - DNA, 816 bp, Homo sapiens
  misc_feature 81, 193, 212, 386, 390, 416, 418, 447, 549, 563, 566, 575,580, 582, 584, 589, 590, 592, 607, 611, 620, 625, 633, 657,665, 666, 675, 678, 679, 686, 687, 689, 692, 707, 712, 715,720, 721, 722, 723, 730, 731, 732, 739, 740, 742, 743: n = A,T,C or G
  misc_feature 748, 749, 753, 754, 756, 759, 762, 763, 766, 767, 768, 769,770, 771, 772, 774, 776, 777, 778, 779, 781, 783, 789, 791,792, 793, 794, 795, 796, 797, 798, 800, 801, 802, 807, 811,815, 816: n = A,T,C or G
tatagggcgaattggagctccaccgcggtggcggccgcccgggcaggtacttttttttttttttttttttttttttttggnccagggaaggattaaagaagaatttaacatagggaataaatgctaaagaaaaccctcaacaatatacatgtatagttagaaagaaatacaaaactattggtttttgtttganacaattcttcctccatggnggtttcatacccatgatctacagttgcctattggatagtccaaggtttctcatcatttatgctagcaaattatgattgcctggaagtgcattttaaattctttttatttgagatgtatagaatcttgctcaaatggtattttccaaactgttgaaaaatagggcattttttaanaaanaacacttttacttttttttgaaaaananaagttttctctgcagattggtctataggngcgggtcttctggaaaattgttttttctgtagagagtgaacatatgtttggtatgtgtgtgtctgagtgtgtttgggggtgtctctgggtttctgggggtgngtggggtctgctgnggngtttggggnttggngncngggannantggggagccgggggngaantggggcctnggggncctggggnctgggggcctttgccctggcctgnccatgttnngggccatgnccnnaaagggnngnggnggtttgggggggaanggggnacnggggnnnnggggggnnngcaatgnngnntgggnngggnngnaanggnnggnnnnnnngngnnnngngngaaatngnnnnnnnntnnnggggnaccnaaann

SEQ ID NO: 4417 - DNA, 792 bp, Homo sapiens
  misc_feature 360, 361, 362, 363, 364, 365, 366, 367, 368, 369, 370, 371,372, 373, 374, 376, 377, 378, 380, 381, 382, 383, 384, 385,387, 388, 389, 390, 391, 392, 394, 395, 396, 397, 398, 399,400, 402, 403, 404, 405, 406, 407, 408, 409, 410, 412: n = A,T,C or G
  misc_feature 414, 415, 416, 417, 418, 419, 420, 421, 422, 423, 424, 425,426, 427, 428, 429, 430, 431, 432, 433, 434, 435, 436, 437,438, 439, 440, 441, 442, 443, 444, 445, 446, 447, 448, 449,451, 452, 453, 454, 455, 456, 457, 458, 460, 462, 463: n = A,T,C or G
  misc_feature 464, 465, 466, 469, 470, 471, 472, 473, 474, 476, 478, 479,480, 481, 482, 483, 484, 485, 486, 487, 488, 489, 491, 493,494, 495, 496, 498, 499, 501, 502, 503, 504, 505, 506, 507,508, 509, 510, 512, 513, 514, 515, 516, 517, 519, 521: n = A,T,C or G
  misc_feature 522, 523, 524, 525, 526, 527, 528, 529, 530, 531, 532, 533,534, 536, 537, 538, 541, 542, 543, 544, 545, 546, 547, 548,549, 550, 551, 552, 553, 554, 556, 557, 558, 559, 560, 561,562, 563, 564, 565, 566, 567, 568, 569, 570, 571, 572: n = A,T,C or G
  misc_feature 573, 574, 575, 576, 578, 580, 582, 583, 584, 585, 586, 587,588, 589, 590, 591, 592, 593, 594, 595, 596, 597, 598, 599,601, 603, 604, 605, 606, 611, 612, 613, 614, 615, 616, 617,618, 619, 623, 624, 625, 626, 627, 633, 634, 635, 636: n = A,T,C or G
  misc_feature 638-645, 647-649, 651-655, 657-676, 677-688, 690-696,699-711, 713-719, 723-734, 736-737, 740-741, 743-766, 768-773,775, 777-782, 785-791: n = A,T,C or G
actcactatagggcgaattggagctccccgcggtggcggccgaggtacgcggggacctgctgtgctcttgcttgcacagtgtcctggagctggacctggccctgggtttccaggaagcagtttgactaaaggcagcaagctgcttcctctgctgcctgagataccagattcccaatggcgaagattgagaaaaacgctcccacgatggaaaaaaagccagaactgtttaacatcatggaagtagatggagtccctacgttgatattatcaaaagaatggtgggaaaaagtatgtaatttccaagccaagcctgatgatcttattctggcaacttacccaaagtcaggtaccttgcccggnnnnnnnnnnnnnnnannngnnnnnntnnnnnngnnnnnnntnnnnnnnnntngnnnnnnnnnnnnnnnnnnnnnnnnnnnnnnnnnnnntnnnnnnnntntnnnnnggnnnnnntntnnnnnnnnnnnngngnnnntnntnnnnnnnnnnannnnnntntnnnnnnnnnnnnnntnnnttnnnnnnnnnnnnnngnnnnnnnnnnnnnnnnnnnnngntntnnnnnnnnnnnnnnnnnncngnnnnaggcnnnnnnnnntttnnnnntttttnnnntnnnnnnnntnnnannnnntnnnnnnnnnnnnnnnnnnnnnnnnnnnnnnnntnnnnnnnttnnnnnnnnnnnnntnnnnnnngtgnnnnnnnnnnnngnnttnntnnnnnnnnnnnnnnnnnnnnnnnncnnnnnngntnnnnnnttnnnnnnnc

SEQ ID NO: 4418 - DNA, 827 bp, Homo sapiens
  misc_feature 10, 53, 78, 450, 467, 482, 489, 492, 494, 554, 564, 565,567, 578, 638, 643, 645, 661, 691, 699, 700, 713, 721, 784,803, 804, 824, 827: n = A,T,C or G
gactactatngggcgaattggagctccaccgcggtggcggccgaggtactttntttttttttttttttttttttttgngatggagtctcactctgttacccagactggagtgcagtggcatgatcttggctcactgcaacctccacctcccgggtccaagtgattctcctgcctcagcctcccgagtagctgggactacaggcatgcaccaccatgcccagctaattttatatatatttttagtagagataaggtttcaccatgtcggccagaccggtcttgaactcctgacctcaggtgatccacccgccttggcttcccaaagtgctggaattactgtgcctggcctagtcattaatattttgattaacgcctacccctgtgatcaacgacaacttattcaggaagaagggttctttctactctagtatgcttccagttatttactgngtatctagctaggttgngaaaagaaaagaatntgaagcncgnantttatgaaacctaactgggctatcatctactttaccaaatttcttttaaaaaagcaaccntcaaaccccnnanaagaattttgnagccttttaactttaaaggcccttcacattaagttgggattttttattcatatggagaanaactntnttttatgacctgtgcnctttaaagaaatgatgaggttttttaaacncctaaagnngttggaattaacnagtttttntaataaatccccaaaaaaaaaaaaacccaaaaacccaaaaacctttttccttggcccggggcngggccgctttttaaaaaanngtgggattccccccggggcntgn

SEQ ID NO: 4419 - DNA, 1039 bp, Homo sapiens
  misc_feature 2, 3, 4, 5, 6, 7, 8, 9, 11, 12, 13, 14, 15, 17, 18, 19, 20,21, 22, 23, 24, 25, 26, 29, 30, 31, 32, 33, 34, 35, 37,38, 40, 42, 43, 44, 45, 46, 47, 48, 51, 52, 53, 54, 56,57, 58, 60, 61, 62, 63, 64, 67, 68, 69, 70, 71, 72, 73,75: n = A,T,C or G
  misc_feature 76, 77, 78, 79, 82, 83, 84, 85, 86, 87, 90, 96, 97, 98, 100,103, 104, 105, 106, 108, 204, 486, 493, 497, 527, 546, 556,586, 620, 696, 699, 723, 729, 732, 751, 803, 807, 809, 811,827, 835, 836, 853, 854, 858, 867, 885, 890, 898: n = A,T,C or G
  misc_feature 908, 909, 927, 942, 946, 957, 983, 998, 1010, 1018, 1024,1029, 1033, 1034: n = A,T,C or G
tnnnnnnnntnnnnntnnnnnnnnnntgnnnnnnntnnantnnnnnnntannnntnnntnnnnntannnnnnntnnnnnttnnnnnntanctgtgnnntngtnnnnantcactatagggcgaattggagctccaccgcggtggcggccgaggtacatgttattagctttagcaggtagttctaataaaagagttcagtatgctntttaaatttttttttagaattttctgtgtttattcaaatttattgaacttaattatttaatataagagaaccaaggaaccactgaactttgagaacacaaccgaaatgctaactttagtgttttatttgaactagtgactaaaatttctatggcaatatatgaatattttgagaggttagcccaaattgtaagaaattaatggtaagcctggccatggtttttgtacgaaaaaaaaaattttgtacttacacataatttatattttagcaatttttaaaacnttttacnctanatgtctgtttactttgctggaagtggccangtatttttacccatggtantattcaatcnttttaaaaatcttcttaaaacaggttcttncccattttaaagaaggtaaacccaagcccaggtncagtggcttcacatctgtaatcccagcttaccttcaagggaggcctgagggcagaaagaatttgcttggagcccangangccggagggttacagttgagccanaggatncgngcccattggcaacttcaancccttggggccaaccaaggagccgaaaccttccttttttcaaaaaaaaaaanaaancngngaagaaccaaccaaanccaaaatnnccgggaattccttttannattnttaaatatnggaaaaaaaaccttccantttanttaccganggaggacctnntttaaaaaaaattttttnttgggggggccccanggtngccgggtgggntttcaccaccttattaaattcctaancacttttgggggaanggccaaagggcngggccggnacccantttgngggnncaagg

SEQ ID NO: 4420 - DNA, 801 bp, Homo sapiens
  misc_feature 593, 599, 600, 602, 603, 604, 605, 606, 607, 608, 609, 610,611, 612, 613, 615, 616, 617, 618, 619, 620, 621, 624, 625,626, 627, 628, 629, 630, 631, 632, 633, 634, 635, 636, 637,638, 639, 640, 641, 642, 643, 644, 645, 646, 647, 648: n = A,T,C or G
  misc_feature 649, 650, 651, 652, 653, 654, 655, 656, 657, 658, 659, 660,661, 662, 664, 665, 666, 667, 668, 669, 670, 671, 672, 673,674, 675, 676, 677, 678, 679, 680, 682, 683, 684, 685, 686,687, 688, 691, 692, 693, 694, 695, 696, 697, 698, 700: n = A,T,C or G
  misc_feature 701, 702, 703, 704, 705, 706, 707, 708, 709, 710, 711, 712,713, 714, 715, 716, 717, 718, 719, 720, 721, 723, 724, 725,726, 727, 728, 729, 730, 731, 732, 733, 734, 735, 736, 737,738, 739, 740, 741, 742, 743, 744, 746, 747, 748, 749: n = A,T,C or G
  misc_feature 750, 751, 752, 753, 754, 755, 756, 759, 760, 761, 762, 763,764, 765, 766, 767, 768, 769, 770, 771, 772, 773, 774, 775,776, 777, 778, 779, 780, 782, 783, 784, 786, 787, 788, 790,791, 792, 793, 794, 795, 796, 798, 799, 800, 801: n = A,T,C or G
gaattggagctccaccgcggtggcggccgaggtacacctacactccagtctggatgacagagccgggccctgtctcaacagcaacaataacaaaatgtcaatgtaatattttgacccactctcacgtgtccaaaagacttttaaatttttgtaaggatataataatgttattcgggctgcagaaaggtaaaccaaatttctacggatacatagaattttgggtattgatttttattaatacctgagagttttaaaaacatacctttatgcttttgagaatcctaattattatcgttattatttgcccttgaacttttgtatttatttgatcttagttatctaagaccatgctaggtctatggtatatggatgctgcactcatattggtagaatataatatgagagacagtctatagacaaacatattaatatatgatgacaatctatgatatataccatgaaggaagctaacaagcataatgttatggattaattatgaaggaaagacaaggataaagtggtcagaaaatgtatctcttgagaaatatcatttatgccaagacttgagctatgtgaagagttgagttggggtngagcgnncnnnnnnnnnnnntnnnnnnntgnnnnnnnnnnnnnnnnnnnnnnnnnnnnnnnnnnnnnnnannnnnnnnnnnnnnnnntnnnnnnntgnnnnnnnntnnnnnnnnnnnnnnnnnnnnnnannnnnnnnnnnnnnnnnnnnnnannnnnnnnnnnttnnnnnnnnnnnnnnnnnnnnnngnnngnnntnnnnnnntnnnn

SEQ ID NO: 4421 - DNA, 857 bp, Homo sapiens
  misc_feature 614, 681, 682, 691, 692, 693, 695, 696, 697, 698, 699, 703,704, 706, 707, 711, 712, 714, 715, 718, 719, 721, 722, 723,724, 725, 727, 729, 730, 731, 733, 734, 735, 736, 737, 746,747, 751, 752, 753, 754, 756, 757, 758, 759, 760, 761: n = A,T,C or G
  misc_feature 762, 764, 769, 770, 772, 773, 774, 775, 776, 778, 780, 781,782, 787, 792, 793, 795, 800, 801, 802, 803, 804, 805, 807,808, 809, 810, 814, 816, 818, 819, 821, 823, 824, 826, 827,829, 830, 831, 832, 834, 836, 838, 839, 840, 841, 843: n = A,T,C or G
  misc_feature 844, 848, 849, 853, 854: n = A,T,C or G
gaattggagctccaccgcggtggcggccgagcttggtgtacttgatgatgtaggtcagcaggcccatgccgacaaacgcggccaccaggatgaacaccttggtgtaggtcaactgcacgaagccggtgccgatgtcgactctccaggcgccggccagcagcgtcgggatgccttgttgcttggcgccctgggcgatctgcgcgtagttctgcaggatcagtgagataccgatggcgctgatcagcggtgccagtcgggtggagttgcgcagcggtttgtaggcgacacgctcgatgacccagccataaacgccagtgacgacgacggtgaagatcagggtgccaaggatgagcagcgggaaggattcgatgccgaagtaagccagcagtgccagactgatcgccgcgaggtaagcggaaatcatataaacctcgccgtgggcgaagttgatcatgccaatgatgccatagaccattgtgtagccgatggcgatcaagccatagaccgacccgagggtcagcccattgaccagtttgcttgcaggaaaataccatccataacgcaatcttcacgcagtgaggagcctgcacaccttgtgggtgtgcggatctttntaggaggaaaaagacagacccaaaagaggctggcaaccaccttcccctttgtgagagttggctttgnnggtggagtnnnannnnntatnngnntatnngnntgnntnnnnntntnnngnnnnntatgtatgnntatnnnngnnnnnnnanagtgnngnnnnntntnnntttanatttnntntgttnnnnnnannnnggtngngnntnanntnntnnnntnanannnntnnatanntatnngtg

SEQ ID NO: 4422 - DNA, 856 bp, Homo sapiens
  misc_feature 581, 685, 693, 767, 776, 795, 810, 813, 826, 827, 846, 848: n = A,T,C or G
gaattggagctccacccgcggtggcggccgcccgggcaggtactctcacctgtgggcatttgtcaaaatcagtattactgctgggggggatgagggctgaaaactcctatttcaccatctttctgacatcatttgccacagtgtgctttttttgttctggtatttccttatacccttgagtctcttccctattttagtcaacccagcagtctgtattcattcctcttaatcaggatttgagctttgcacctgctccttttggctggggttgagtctacttcagaggctagggatatagagggtccaaatacaatttaaataagaaaatgctacgaataaaagtgttgagaagaataagaattctagaaaaaaagaaaaagaaaatggaaagaaaagacttttaaaatgttaaggcatctggcagagagaccaaatgggaacaaaaacccaattcctctctcctgacaagtccttgcaccctggcctatggctgcttcaacccacaaaaacgcctttgtttatcagcactcaggtatcagtaggctggcatgcagttgcagttttacccaaagacaaggctncagggaaactagacctttcactgctctggaaccaccttcacaactttactcccattggtttcttctggaatattatcccatctctccatttcttcaagaccaancctccttntgctcaagttgtcaccttcttcctttaaaaatgttcctggatccacttccaacccagatgtggttcctcccttncctttgaanattcatccctttctcaagntggcttggccttggngtntttatcccccccnngagtcattgaaagaccttnanggccgggg

SEQ ID NO: 4423 - DNA, 1139 bp, Homo sapiens
  misc_feature 3, 4, 6, 7, 9, 12, 13, 15, 17, 19, 20, 21, 22, 23, 24, 26,29, 30, 32, 33, 35, 39, 41, 45, 46, 48, 50, 51, 54, 61,62, 65, 66, 68, 71, 73, 74, 75, 76, 78, 79, 82, 84, 86,87, 88, 89, 90, 93, 96, 99, 100, 108, 110, 114, 115, 120,128: n = A,T,C or G
  misc_feature 498, 502, 503, 509, 514, 545, 589, 595, 598, 615, 617, 646,660, 685, 707, 716, 726, 730, 736, 743, 751, 757, 764, 765,792, 799, 818, 831, 834, 837, 839, 848, 866, 873, 875, 877,890, 898, 901, 910, 920, 926, 933, 943, 945, 946, 948: n = A,T,C or G
  misc_feature 954, 967, 970, 975, 976, 980, 985, 988, 990, 992, 1013, 1020,1024, 1028, 1029, 1031, 1032, 1040, 1042, 1046, 1050, 1053,1057, 1060, 1068, 1072, 1074, 1077, 1082, 1083, 1086, 1088,1089, 1098, 1100, 1102, 1111, 1118, 1119, 1123, 1129: n = A,T,C or G
  misc_feature 1131, 1132, 1134, 1138: n = A,T,C or G
ccnncnntntcnncnantnnnnnntntanntnntnatantntttnntngnncgntaaatanntcnntnctnannnnanntanantnnnnnagntgnggnntgaatttntntacnntttantgtggggngaattggagctccacacgcggtggcggccgaggtactgaaacatgttggagggttagttttgtttaatttgaaaattctgggctggacatggtggctcacgcttatagtcagctgtagcactttgggaagctgaggtgggagaactgcttgagtccaggagttcaagaccagcctgggcaacagagtgagaccctatctctacaaaaagtttaaaaattagccaggcttggtggtgcatgcctgtagtcccagctactcaggagggcgaggcagaagaattgcttgaaccggggaggtcaaggctgcagtgagccacgttcatgccactgtactccagtctgggtgacaggaataagaccccctgtcccnaaannataaanaatantaaaaaaaaaaagtacctgcccggggccggnttctaagaactaggggatccccccggggcctgcaaggaatttcnatattnaancttaatcgaatacccgntncggacccttccgaaggggggggggccccngggttacccccaancctttttttgtttccccttttaagntggagggggtttaaaatttgcngcggctttngggcggtaantcantggggncaattanacatgggnttcccntgggggnnggaaaaattggttaatcccgcttcacnaaatttnccccacaaacattaccaangcccggggagccnttnaanangtgtaaaangcccttgggggggggccntaaatgnangngggagccttaacnttctccanttnaatttgggnttttgccccntacacntggcccnctttttttcnanntnaggggnaaaaccttgggcngangcccnngctngcatnttnananggaaatttggccccaaccccncccgggngaanaagnncnngtttttgngntttnttgnggncgcnttntttcccgntttncntgntttannttnanntaccgttgngncntggggtgcnttatggnntggngagcananncngttnt

SEQ ID NO: 4424 - DNA, 866 bp, Homo sapiens
  misc_feature 5, 670, 681, 689, 695, 719, 727, 761, 785, 800, 812, 818,819, 823, 848, 855: n = A,T,C or G
ttggntaattgcagctccaccgcggtggcggccgaggtacttaatttttttttttttttttttagtagagacagggtttcaccatgttggtcaggctggtctcgaactcctgacctcgtgatctgcccccgcttgggctcccaaagtgctgggattacaggtgtgagccactgcgcccagccacagtcagcccagattcaaggggtgcgtcaatagactctatctcttcgtggaaggagctgcaaactattgcgatcacgtttgcagtctaccacaaatgtattgctatatgttagcgctattctaatagctttatatgtgtgaactcacttaattgttacagcaacccagagaggtgagttactatttctaattatttctcagatgaggaagcagctactgagacgttgagtaacttgcccaaggttatataggtagtggcagagctgaatttgagtccaccgcagtctggttccagaggctatactcccaaataataagctataccgcctcaaaagcaaggcggaagaactttatcacttgtttggagcaaactgaataaggcttcagacttgtaaacattaaagacaatttggctcatttggcaaacttggatatattggatgcattgttttatattaaagtaaaaaattttgtaaaaggggaatgnttgaaatggancttttttnttttancccgttcagttcttcaaaactagnattttttnaaatgggatccaaagatacagcttttttcttggnctttcgtttgaaataagcaacttnaacccaaaaaaaatnttttaaattggnccgtcnntggnaattgtaaccttttcttttttgganttcaaantttaaaacttt

SEQ ID NO: 4425 - DNA, 856 bp, Homo sapiens
  misc_feature 471, 497, 521, 556, 625, 632, 644, 653, 668, 669, 679, 704,746, 755, 759, 768, 771, 782, 791, 795, 806, 810, 816, 820,827, 832, 835, 840, 854: n = A,T,C or G
ggcggccgcccgggcaggtacacattttgaggggtcccacaattgagaggtgagcaaatcacatagaacttgctttgtagccctgaatgtgtccatctccctctccctccagtgacctctgcttccagcttcccttccctatctcctgtatctctacttcacttgtgctaccttctcacaccacatcttccaggattacacttttatgctacacctgcactgatcaatcttctactccagtcttcattttgtcttcgtaaaaatgttgaggatgaatgctgttccactttcctttcctatagcgagatggcctgtccccgcgtacctcggccgctctagaactagtggatcccccgggctgcaggaattcgatatcaagcttatcgataccgtcgacctcgagggggggcccggtacccagcttttgttccctttagtgagggttaattgcgcgcttggcgtaatcatggncatagctgtttcctgtgtgaaattgntatccgctcacaattccacacaanatacgaagccggggagcataaagtgtaaaagcctngggtgccctaatgaggtgagctaactcacattaatttgcgtttgcgcttaactgccccgctttttccantccgggnaaaccctgtccntgccagctngcaattaaatgaaanncggccaaacnccccgggggagaaggcgggtttgcnttatttgggcgcctttttcccgctttccttggttcacttgantcgctttgnggcntcggttcgntcnggtttgcggcnaagccggtnttcnagcttaatttnaaangggggnaaanacgggtnttccnaanaaatnagggggaaaccccngg

SEQ ID NO: 4426 - DNA, 889 bp, Homo sapiens
  misc_feature 63, 64, 72, 73, 101, 271, 283, 345, 481, 515, 525, 528, 552,553, 557, 566, 572, 574, 581, 584, 588, 590, 591, 594, 597,624, 629, 653, 660, 667, 693, 696, 705, 709, 737, 739, 740,745, 768, 778, 783, 785, 790, 802, 807, 826, 828: n = A,T,C or G
  misc_feature 834, 838, 852, 866, 875, 877, 878, 880, 882, 886, 888: n = A,T,C or G
gaattggagctccaccgcggtggcggccgcccgggcaggtactgctattgcctccttgcctgnngctcttgnntgtgggcttgtgacctttttcaaaatcnttttagtgtcattttggtgaagtttaaatgtgtattcagtctgccattactgggaatctcagagttctcattttaatatttttcttatttttttaaagcctttgaaatcaggcatatttcacatcctgcttcttcacattattttagctgcaagaaatgagccactctgnataatctctttngttcaggaaggggacattttttccctgacaaatcaatcttccagaaaactcttcatttcagntttggaaaggcaccggaaatggccaacctaaagcaccaactgttcgcgttcccggagtttgactcattggccccaccttgtggccctgtggggaaggggcgggcaggctgaagaaaccgcctgacaatttaaattngctttttgaaaagggactaaccccgaatggttgnagaaaatatnttnaactgggaaagaaaaaacttttgnntttnaaacccaanacttantnggatccnccntttngnncangtnggtttttttagaatcaaccaacggatngtctnattttttattaaaattcccaacangaatatnatttttngccccccttcttaaaaacatttttantcnttggccttntgtnggaagggcaatccttttttttttccctncnnggcanaaccaaccccctttcctttgggnggacctcccntggcnanctttngtccttttcggnattangggggttcggattcaaatnanttttancatngcccaagggcggcnggccttttaaattnttacccccngnnantnaaantnt

SEQ ID NO: 4427 - DNA, 1067 bp, Homo sapiens
  misc_feature 3, 4, 6, 8, 9, 10, 12, 13, 16, 17, 20, 21, 22, 23, 24, 25,26, 27, 30, 31, 32, 35, 37, 42, 43, 44, 46, 48, 49, 58,60, 63, 66, 68, 70, 78, 80, 81, 82, 83, 84, 85, 86, 88,89, 91, 95, 98, 100, 107, 109, 112, 114, 121, 461, 558,560: n = A,T,C or G
  misc_feature 592, 637, 659, 672, 702, 721, 739, 740, 769, 770, 773, 831,846, 848, 849, 903, 907, 917, 920, 922, 923, 924, 951, 953,956, 958, 963, 967, 986, 998, 1000, 1010, 1012, 1023, 1034,1043, 1044, 1046, 1060: n = A,T,C or G
ctnntntnnngnnttnnttnnnnnnnnttnnnttntntgttnnngntnnatgttgtgntnttnttngntntttcaatntnnnnnnntnngngttngtnanttttttnantcnantcatatnaggcgaattggagctccaccgcggtggcggccgggcatgatggctcatgcctgtaatcccagcacttcgagaggcccaggcaggtggattgcttgggcccaggagttcaagaccagcctgggcatcatgaagaaaccctgtctctactaaaaatacaaaaaattagccaggcatggtagctcacacctgtagtcccagctactggggaggcagaggcacgagaatcacttgaaccaggaaggcagagggtgtggttgagccaagatcatgccacttgcactccagcattccagcctgggccgaacaggagccaagactcagtctcaaaaaaaaaaaaaantaaagttcccttcggcccgcttctagaaactagtgggatcccccgggcttgcagggaatttcgatatcaagccttatcggatacccgtcgacccttngnaggggggggggccccgggtaccccagcttttngtttcccttttagtggaggggttaaatttggcgccgcctttggcngtaaatcattgggtcaatagcntgtttcctgtgtngaaaattggtttattcccgctcacaatttncacacaaaccattacggangcccgggagcataaaagnngtaaaaagcctggggtgcctaaatgaagnngangctaacctcacatttaatttgcggtttgcgctcactggccccggctttttccaaatcngggaaaaccttgtcngnngcccaagcttgcatttaaatgaaattcgggcccaaccccccccgggggaagaanggcnggtttttgcnttntnnngggcgccttctttcccgcctttccttngnttnanttgancttngtttgcgccttcgggttcngtttccgggttngngggcgaagcngnttttttagctnaactctaaaanggcgggtanntntccggttattccanaaaaaat

SEQ ID NO: 4428 - DNA, 803 bp, Homo sapiens
  misc_feature 640, 642, 670, 681, 686, 700, 714, 723, 737, 739, 747, 748,762, 763, 769, 773, 774, 776, 778, 781, 784, 799, 803: n = A,T,C or G
gcccgggcaggtacagacaatgtgaagttaggacttaagtaaaggtagtatttatttactaagaataaactttcttttaagaagtatatagaaagtaaaataaatatttgttgctttatattcagccatacttttctactcaccctgggctgcaaggcaaacaactattttattattattattattactttatagagacggggtctccttatgttgtccaggctgttctcgaactcctgggctcaggggatcttcctgtctcagcctcccaaagtacctcggccgctctagaactagtggatcccccgggctgcaggaattcgatatcaagcttatcgataccgtcgacctcgagggggggcccggtacccagcttttgttccctttagtgagggttaattgcgcgcttggcgtaaatcatggtcatagctgtttcctgtgtgaaattgttatccgctcacaattccacacaacatacgagccgggagcataaagtgtaaagcctggggtgcctaatgaagtgagctaactcacattaattgcggttgcgctcaactggcccgcttttccagtccgggaaaaccctgtccgggccaactgcaattaatgaaatccgccaaaccccccggggaagaaggcngntttgcgttatttggggccgctttttccnctttccttggnttcanatggactcgcctgngccttcggtcgttncggcttgcnggcggaggcgggtntncagccttnnctcaaaaggcgggnnaatacnggtnntncnaanaantcaggggggaataangccn

SEQ ID NO: 4429 - DNA, 1178 bp, Homo sapiens
  misc_feature 1, 2, 7, 8, 9, 10, 11, 12, 14, 15, 16, 17, 18, 19, 21, 22,24, 27, 29, 30, 31, 32, 33, 35, 36, 37, 38, 41, 42, 43,45, 46, 47, 48, 49, 50, 51, 52, 54, 55, 57, 58, 59, 60,61, 62, 63, 64, 67, 69, 70, 71, 73, 74, 75, 76, 77, 78,79: n = A,T,C or G
  misc_feature 80, 81, 82, 84, 85, 89, 102, 103, 110, 112, 118, 123, 125,127, 129, 140, 147, 388, 503, 556, 587, 627, 638, 642, 643,647, 654, 659, 667, 692, 730, 741, 745, 759, 770, 776, 784,794, 801, 804, 809, 819, 828, 844, 846, 847, 858, 860: n = A,T,C or G
  misc_feature 861, 877, 888, 924, 926, 929, 937, 938, 953, 955, 962, 977,994, 998, 1001, 1015, 1024, 1025, 1028, 1032, 1051, 1054,1059, 1069, 1073, 1074, 1076, 1078, 1087, 1099, 1104, 1107,1114, 1121, 1125, 1126, 1130, 1133, 1136, 1138, 1149: n = A,T,C or G
  misc_feature 1151, 1171, 1174, 1177, 1178: n = A,T,C or G
nnccctnnnnnntnnnnnntnnanatntnnnnnannnnatnnntnnnnnnnntnntnnnnnnnnatntnnntnnnnnnnnnnanntatntgggggggttttnnggggggngngatcantattngntnanttgtccctccnggtggcngccgacttcagggccagtaccttttcggcgaggtccagcaagtggtccgcgctgaacagctcgcgaacgggtaactccacccccaactgctcgcgcacccgcaccaccacctgagtagccagcagcgagtgaccgcccagctcgaagaagttgtcatgcaggccgacgcgctcgactttcagcacttcctgccagatgccggcaagttggctttgcagtggccgtcgccggggccacgtantccgctgtgttgcctgggccgggggtcttggccgcaggccagggccttgcgggtccgagttttgcccgtttgggggggtcaagggggccaacccggggggtagtaagtacccaanaagggtccgggtttgcaatattaagtcccgggcaaggcctgggccctttgaanttttggggccgccgaaaccctctgccccaangccgccgcctttttcttgggggttggttccgaagggttcngggcgcccccnggcnnaaanccgtttngggantccgggtngggggttaccccaaagggttaacgnccccgcccaaaatttgcttttggcccgtgggggggccnccccggttttngaantggttcaaccccanccaaagcaacnttttcngcggccancctttagggnggcccanttngaaanccaaaaaacnccccttttnaaatctttcacccccnanntttcggattancnnggaaaaaacccgccgnaaattcttttngacccttgaattggggtcccgggcccccgggccccnantgntaaacttnnaaaataacccccctncnttggcanccgggaaagttgcanccaaggttcccccgggntccngantaacaaaggcaaancccccccgnnttnaatnccccccaaagggcaatttnccncccanaaaaaacccntttnngncnggtgctaanttgcccgggccnaaatnctngggttanggccacngaannccanctnaancnggaaccaaccnantttttacaaaacttcacccnganccnn

SEQ ID NO: 4430 - DNA, 813 bp, Homo sapiens
  misc_feature 2, 397, 445, 519, 527, 542, 604, 612, 620, 628, 635, 639,646, 703, 718, 732, 758, 759, 771, 775, 777, 782, 806, 809: n = A,T,C or G
gnagctccaccgcggtggcggccgactgcaccacggatgggtgggcgttgagcgccgtttccacttccagcggatacacattgaagccggagcggatgatcagttccttggtgcgacccacgatgaacaacgcgccgtccggctcctggcgcgccatgtcgcccgtattgagccagccgccgttgcgcatggtggccgccgtcatggccggttcgcggtagtagccggccatgatgtttggtccgcgtatccataattctcccggctcgccaggcgcgacatccaggccggccacgtccaccacgcgcacttccacgcccgggatcggcatgcccaccgaatcgtcgcggcgcggcgcatccaggcgcgtctggctgatggtgggagcactttccgncatgccgtagccattgtgcagcgcggtgcccagcagcttttccacgtngcgcttgagcgacggcgccagcggcgagccgcccgcatacgcaaagcgcagcccgtgtgggtagccggcgtatnggccggcncccagggttttgcancaactttggcatacatggcgggcaacgcccttgcacgaatggttaaaaccgtttatttcttnaagggccnagaagcanggccattngacgganaaancgcgggnacccaggtacaagcgcgggagcccccgcattacaggggtaaccaagggccacccganggccatgcccgtacnccttgcgaaaaatnggcaaaaacgcccgtttggcgccggnncggtttttggtnaaancnacccnaagggtggctgggaaaacgggggncantaat

SEQ ID NO: 4431 - DNA, 791 bp, Homo sapiens
  misc_feature 624, 682, 704, 708, 751, 775: n = A,T,C or G
ggcgaattggagctccccgcggtggcggccgcccgggcaggtacggtggcgcaatcttggctcactacaacctccacctcccaggttcaagcgattctcctgcctcagctgcctgagtagctgagattacaggcgcccgccactacgcccagcaaattttttgtatttttagtagaaacggggtttcaccatgttggctaggctggtcttgaacccctgaactcgtggtttgcccacattggcctcccaaagtgctgggattacaggcgtgagacattgcacctggccggtatttctgctttttaaaattatttatgaatttggttgtctcattcccatgcaagcttttctactttttacttgggaaaattatttaacttctgtgtaactgaacttattcatatataaaatggggcactaataatacccacttcagagtgttgagtattatatgaggtaataacatgtaacggacttagttaatggtaagcgctatatatgtggtagctatggtgattatgattatctacaaataatattgttctataagtgtttcttagttctttttggaaagaagggctttttcctattattggaaattaaaagtggaaccgttttgatgcnaacaggtgtttgtttggtaaggtaaaccatttggtatgacttactgaagtgctagcanaatgatgttgagggctgagtanagtnaaaaaaaacctgtccccttttgattggggaagggtaacacatntcatttttaagtgaatattttaanaaagaccttctgtttt

SEQ ID NO: 4432 - DNA, 819 bp, Homo sapiens
  misc_feature 622, 648, 700, 741, 752, 768, 769, 788, 803, 806, 811, 818: n = A,T,C or G
ggagctccaccgcggtggcggccgaggtacgcggggacctcacctgctgtgctcttgcttgcacagtgtcctggagctggacctggctctgggtttccaggaagcagtttgactaaaggcagcaagctgcttcctctgctgcctgaaataccagattcccaatggcgaagattgagaaaaacgctcccacgatggaaaaaaagccagaactgtttaacatcatggaagtagatggagtccctacgttgatattatcaaaagaatggtgggaaaaagtctgtaatttccaagccaagcctgatgatcttattctggcaacttacccaaagtcaggtacctgcccgggcggccgctctagaactagtggatcccccgggctgcaggaattcgatatcaagcttatcgataccgtcgacctcgagggggggcccggtacccagcttttgttccctttagtgagggttaatttgcgcgcttggcgtaatcatggtcatagctgtttcctgtgtgaaattgttatccgctcacaattccacacaacataccaagccggggagccataaaagttgtaaagccctgggggtgcctaatgaagtggagcctaactcacattaaattgcgnttgcgctcactggcccgctttccagntccggggaaaaccttgtcgtgccaactgcattaaattgaaatcgggccaacnccccgggggaagagggcggttttgcgtatttgggccgcttntttccgctttncctcgcttcacttganntcgcttgcgcctccgggcngttcggcttgcgggngangcggntattaang

SEQ ID NO: 4433 - DNA, 804 bp, Homo sapiens
  misc_feature 69, 214, 230, 239, 282, 283, 290, 331, 369, 405, 421, 494,529, 567, 572, 573, 585, 590, 612, 614, 627, 628, 633, 643,657, 683, 687, 691, 697, 702, 704, 706, 723, 735, 738, 749,752, 758, 760, 767, 771, 777, 778, 779, 782, 795, 796: n = A,T,C or G
  misc_feature 800, 802, 803: n = A,T,C or G
gagctccaccgcggtggcggccgaggtacgcggggacctcacctgctgtgctcttgcttgcacagtgtnctggagctggacctggctctgggtttccaggaagcagtttgactaaaggcagcaagctgcttcctctgctgcctgaaataccagattcccaatggcgaagattgagaaaaacgctcccacgatggaaaaaaagccactaactgtntaacatcatggaagtngatggagtncctacgttgatattatcaaaagaatggtgggaaaaagtctgtnntttccangccaagcctgatgatcttattctggcaacttacccaaagtnaggtacctgcccgggcggccgctctataactagtgaancccccgggctggcaggaattcgatatcaagcttatngataccgtcgaccttngagggggggcccggtacccagcttttgttccctttattgaggggttaattgcgcgcttggcgtaatcatggtnatacctttttcctgtgtgaaattggtatcccgctnacaattccacacaacatacgagccgggagcataaagtntaaannctggggtgcctnatganttgagctaactcacattatttncnttgcacttactgnnccgcntttcaagtcnggaaacctgttcgngcccacctgcattaatgaatcggccnaacncccngggganaggcngntngccgttttgggcccttntttccgcttttntcncttaaattacntcnttggcncntccggcncttnggcttnnnggngaagcggggtttnncttncnnt

SEQ ID NO: 4434 - DNA, 643 bp, Homo sapiens
  misc_feature 84, 498, 542, 549, 553, 579, 588, 608, 609, 610, 611, 617,628, 629, 643: n = A,T,C or G
ggcgaattggagctccaccgcggtggcggccgaggtacttttttcttttttttttttttttttttagcgtaatgttctcaaggnatgatatacttctggtgaaattaatattaagattaaataagatttagagtggtttctacttgtgggtcatgtttctgtttatgatgcaaaactgtaaaggatgaagataaactctagtttgagatgggagattatgtcactatttttgcctgaatcccttcgaagaacctcttcttcatcttttggtgataaagagagtatccaacctgaagggaacttctagtgtcttttgatactttattttactcttgtggatttgaataggcaaacgtggagactttttgtgttattacaacagcgtaaaacttatgatatgaaaacaaaacatcaatattcatattattaaaattccagtagaacaaaatttgatttaggtcaaaattgattcactttataatttaaatcattaataanaaatttacctttaaaaagatcagaggatattattccaggtcttnacaaatnaaanggttgatggaagtctactttttactntacctgttngcctttaagttgatgatatnnnngatgantatattaagtnntatggttttcccan

SEQ ID NO: 4435 - DNA, 504 bp, Homo sapiens
  misc_feature 2, 3, 4, 5, 6, 7, 10, 13, 14, 16, 30, 31, 471: n = A,T,C or G
gnnnnnnccnctnncncttactgtagggcnnattggagctccccgcggtggcggccgaggtacgcggggacaggccatctcgctataggaaaggaaagtggaacagcattcatcctcaacatttttacgaagacaaaatgaagactggagtagaagactgatcagtgcaggtgtagcataaaagtgtaatcctggaagatgtggtgtgagaaggtagcacaagtgaagcagagatacaggagatagggaagggaagctggaagcagaggtcactggagggagagggagatggacacattcagggctacaaagcaagttctatgtgatttgctcacctctcaattgtgggacccctcaaaatgtgtacctgcccgggcggccgctctagaactagtggatcccccgggctgcaggaattcgatatcaagcttatcgatacccgtcgacctcgagggggggcccggtacccancttttgttccctttagtgagggttaattgcgcc

SEQ ID NO: 4436 - DNA, 814 bp, Homo sapiens
  misc_feature 1, 2, 3, 4, 5, 6, 7, 8, 9, 11, 12, 13, 14, 16, 17, 18, 19,20, 21, 22, 23, 24, 25, 26, 27, 28, 29, 30, 32, 33, 34,35, 37, 38, 39, 41, 42, 43, 44, 45, 46, 47, 49, 50, 51,52, 53, 54, 55, 57, 58, 59, 60, 61, 62, 63, 64, 65, 66,67: n = A,T,C or G
  misc_feature 68, 69, 70, 71, 72, 75, 76, 77, 78, 81, 86, 94, 98, 100,102, 103, 105, 106, 107, 108, 679, 746, 755, 772, 777, 789,799, 800: n = A,T,C or G
nnnnnnnnntnnnntnnnnnnnnnnnnnnngnnnngnnntnnnnnnntnnnnnnncnnnnnnnnnnnnnnnnagnnnnagnagttnaacccttntaanancnnannnntttgattacgactcactatagggcgaattggagctccaccgcggtggcggccgcacgccgctgcgcaacctgttcctgaacacgggccacggcaccctgggctggaccatgtcctgcggttcggcgcaattgctggccgacctgatgtcgtcgaaacagccggcgattctggccgacgacctgtccgtcagccgctacagcggcgcgcagcgcggcggcaaactgcaacacgcggtggcctgagatggcggccagcatgcctgcaaaggaacgtagcggcgccatcctgacggtagacctggacgccgtgcgcgccaactaccgcttgctgcgcgacaaggcgcacccggccgcctgctcggccgctctagaactagtggatcccccgggctgcaggaattcgatatcaagcttatcgataccgtccgacctcgagggggggcccggtacccagcttttgttccctttagtgaggggttaattgcgccgccttggcgtaattcatggtcataagctggttttcctgtgtggaaattgttatccgcttcacaattcccacacaacattacgnagcccggggagcataaagtggtaaagcccttggggtggccttaatgagtgaagctaactcaacattnaatttggcngttggggcttcactggnccggnttttccaattcngggaaacccnntcgtgccaagcttc

SEQ ID NO: 4437 - DNA, 661 bp, Homo sapiens
  misc_feature 632, 638, 647, 658: n = A,T,C or G
gaattttagctccaccgcggtggcggccggcgccaagctgcagtccatcatcgacgtggtcaacaagcctgggcgcgtcgcccgacgacatcatggcaattttgcaagccctcgaccaggctggagccatcgaaggcgaactggtggtaatttgatgcttaatatcaacgacagcagcagcgccctgccctcggcgctcgatgacaagacccccgccgcggccacgccggccgatccccgctacgcggccaaggccaccgaggcggccgctctagaactagtggatcccccgggctgcaggaattcgatatcaagcttatcgataccgtcgacctcgagggggggcccggtacccagcttttgttccctttagtgagggttaattgcgcgcttggcgtaatcatggtcatagctgtttcctgtgtgaaattgttatcccgctcacaattccacacaacatacgagccgggagcataaagtgtaaagcctggggtgcctaatgagtgagctaactcacattaattgcgttgcgctcactgcccgctttccagtcgggaaacctgtcgtgccagcttgattaatgaatcggccaacgcccggggagaggcggttttgcgtattgggcgctcttncgcttnctcgcttantgactcgctgnctt

SEQ ID NO: 4438 - DNA, 644 bp, Homo sapiens
  misc_feature 35, 45, 100, 220, 544, 552, 572, 632, 641, 644: n = A,T,C or G
tccaccgcggtggcggccgaggtacttataggcantttggcgagnctaagacctaaactagataatttgagaacagggaaaaaagattccatttcgattnctgaaggttacccccatacctattataacagaataaaataaaataattcgaaactgcacaacctctaacttatcaaatcctatatatgcctcattttctcaaatgactcctaatttgtgnaaagaaaaaggcaaaaagagaaaggacagaagtatgtcaaggtgggctaaagctatgaatacccttttatgtaaactaagaaaaaaatagatacacacgcattttttaaaagggaactttttgaaaccttgagccgcaaagaggaaaaattcctggctaaattgcaccactcaaagacaactagacttacggtcataaatttcttctccaacccatttctttcagggattcttacagatccatagcattttgcaagctgacataggaccctttcaaacaatgcaacctaaccttcccaacagctatgattctcttcctactctnctgcacanagaggccctgacccttaacntgtcgcttggagctcgagatgggtggccaaggccgaaagccagtcaagcccggagaactnccgaaaggnggn

SEQ ID NO: 4439 - DNA, 665 bp, Homo sapiens
  misc_feature 571, 628, 642: n = A,T,C or G
gggcgaattggagctccaccgcggtggcggccgcccgggcaggtacctgactttgggtaagttgccagaataagatcatcaggcttggcttggaaattacatactttttcccaccattcttttgataatatcaacgtagggactccatctacttccatgatgttaaacagttctggctttttttccatcgtgggagcgtctttctcaatcttcgccattgggaatctggtatctcaggcagcagaggaagcagcttgctgcctttagtcaaactgcttcctggaaacccagagccgggtccagctccaggacactgtgcaagcaagagcacagcaggtccccgcgtacctcggcccgctctagaactagtggatcccccgggctgcaggaattcgatatcaagcttatcgataccgtcgacctcgagggggggcccggtacccagcttttgttccctttagtgagggttaattgcgcgcttggcgtaatcatggtcatagctgtttcctgtgtgaaattgttatccgctcacaattccacacaacatacgagccgggagcataaaagtgtnaagcctggggtgcctaatgagtgagctaactcacattaattgcgttgcgctcactgnccgctttccagtcnggaaacccgtcgtgccagcttgc

SEQ ID NO: 4440 - DNA, 894 bp, Homo sapiens
  misc_feature 227, 231, 247, 266, 276, 306, 381, 473, 488, 490, 491, 506,510, 522, 533, 540, 544, 550, 553, 556, 563, 568, 569, 573,579, 580, 581, 590, 591, 606, 621, 627, 632, 633, 647, 659,664, 665, 677, 680, 689, 699, 702, 704, 714, 720, 722: n = A,T,C or G
  misc_feature 734, 737, 739, 756, 757, 758, 769, 772, 775, 776, 779, 781,784, 785, 801, 802, 807, 816, 820, 830, 837, 843, 844, 845,847, 848, 852, 857, 858, 859, 861, 862, 863, 864, 865, 868,869, 870, 872, 873, 879, 880, 882, 885, 887, 890: n = A,T,C or G
cccgcgtccggatggataaagaaaaggaagagttggggttagttgagtcagagtacagtcatcttttgtcatgtccttagtctgttgcttaagattttcatttgtggtttgcaaacaaccttttaaaaagtcaatttttgattaatttagtcttttagaagcttctgcataccaataaaagaatatgtgccactgttttttgagggttttgatccccctatttaatntgtnttgaagataaaaaatnttatccaaattaaaacttntccattgcanccatctgaattctaagttttctttaatgantttaacccatttttttaaaaatgcacacacctgggcctataatttgtacacataaaattagctgaagtcccagangtgtggattcccagactctttgagttgaaatgatcccattattaaaaataaggtacctgatcagggcaatcaggcaggaaaaaaaaaaaaanggggggccgttaaantnntttaaaaaaaaaacntccnaaacctcccctngaaccggaaanttaaaangatngcaatngtngtngtaaacntgttnnttgncccctnnnaaatgggtnncaaaaaaacccaatnccctcccaaattccncaaaanaaaannattttttccccggnatttaaatttgnggttnnggcccacctcancanggggttctnaaaaaggtgnggnancccccggggnccccgnanccccaaaaaaanatncnttttcccggttttctcnnntaaatggaatngcntgnnccntnggnnttttcgggttgggggnngaagngggttcccnctcnctccaaaggnggggatnttatannngnntttnctttnnntnnnnngannngnngaatanntnccncnggngccg

SEQ ID NO: 4441 - DNA, 868 bp, Homo sapiens
  misc_feature 584, 623, 659, 679, 762, 785, 786, 793, 797, 829, 833, 864,868: n = A,T,C or G
ggagtcgaccccgcgtccgggcaaattactgaagcagttatggttcatagtagcaattgtatatgttacctaggagatggtgtcaatggccgggggcctcatcgccacgtaagggtgtcttgccaggtgacttgcaagggtgactgccaggttgaagccaaggcattcactgaacggaggcagaagcagaaacagtcccaggcaattcttggaaaactggcccattcttactgcgggacatagcaccttactgttgggtccaaaaccccatgtgtcctgccaaaaaaggcagcccagcacagatgtgttcagggccagagacaccatttgcctactgaatgacttgagcaatttggtgcatctcaccgagccttcaccttctctgttaaatggaacatctcctccctcctttgcaagattgtcattaggatttgtgaggtattggcaataacgggccctcccatccttcccattgctgttgttattactgtattcatagctttgtgtgcttcataggtaccctctagggtcctctacgtacaacatacaacagcttcgcaatagccagtgttggaagctccaanaacgaaggtcctgtgggctatgtggagagtaagcagcanagcaggactgccactcaaactagtttcacccgtgcngccgctagactagtctaganaaaaaaccttccacaccttccccttgaaacctgaaaacataaaaatgaatgccaattggtggtggttaacttggttattgcancttataatggttaccaaataaanncattacnttcncaaatttcacaaaataaaagcatttttttcanctgnatttctaatttgggggttgggccaaactcantaan

SEQ ID NO: 4442 - DNA, 862 bp, Homo sapiens
  misc_feature 80, 161, 211, 472, 473, 480, 485, 490, 492, 498, 500, 505,506, 509, 510, 511, 512, 516, 527, 534, 542, 545, 551, 559,560, 564, 575, 576, 579, 589, 590, 596, 599, 604, 606, 623,624, 630, 636, 638, 642, 643, 663, 669, 675, 694, 698: n = A,T,C or G
  misc_feature 700, 703, 704, 741, 747, 753, 759, 761, 762, 776, 779, 783,788, 789, 793, 796, 800, 806, 811, 812, 813, 814, 816, 817,818, 819, 820, 821, 822, 823, 824, 825, 828, 829, 830, 831,832, 833, 839, 844, 845, 846, 847, 851, 852, 854, 857: n = A,T,C or G
  misc_feature 859, 860, 861: n = A,T,C or G
cccgcgtccgagcaagccgagatctcaccctgcactccagcctgggcaacacagcaagactccatctcaaaaaataaatnaatgaataagattcatatggcacctagttaatttcatttactcaatacttttcagaaattgaagaagctctttttcaccanctactaaacaaaagcaatttattcaactaggttttctttgcatgagttgntctgtatgtaacaagaaagcaagaaaataaatatttttaaatgtcacacttccctgcaaaaataatcacaataataataataataataatgaataagagtttataggctaggtatagtggctcacacctgtggatcctagcattttgagaggctaaggcgggtggatcacttgaggtcaggagctcaagaccagcctggccaacatggtgaaaccccatctgtacaaatacaaaatattactctaaaaaaaaaaaagtgcnnccgttanactantctananaaaaancntcccnnacnnnncccngaacctgaaanataaaangaatgccntgnaggggnaaactggnnaatngccccttatannggntccaaataanngcaatngcntcacnantttcccaaataaaacanntttttncctgcntnctannggggggtttgtccaaaccanataaantgttcntaccaagggggggatcccngggntnccnnactccaaaaaatttcttttccccttccccccctcacngacttnctgggncctcgnannttcgggttgggggnaancggntttcnnctcnccnaaangggggnaaatnnnngnnnnnnnnnntcnnnnnnggacgnaaaannnnaaanngnggngnnng

SEQ ID NO: 4443 - DNA, 867 bp, Homo sapiens
  misc_feature 165, 230, 376, 639, 680, 710, 734, 743, 762, 772, 790, 792,819, 822, 823, 833, 858, 859, 864: n = A,T,C or G
cccgcgtccgctttcttatttggaaagaaaacaacactcaccacggcattcacaatgctggggaccttatgaatgggaatggagaggctgcactaatgtaagtggggtcaacatccctgctggagggcagatgcaagtggggtcaacatccctgctggagggcanatgcaattttggcaaactaatgacttttggaagccattttctagactgcatttttctcttctttnttagaatgcttttctcaaggggaaaaagaaagcaggaggtgtaaatggtatcttggccgttctaagagcccgtctgggagactctctgctgaccacagcactgtctctccccagggcccagtcccacagtgtcactgagtccagantcgggactccaacaagccctccgcattccagcatgactgtggtaaaaacaaaaaaaatctattttattctagtccatcacattttctatatttgctaaagaaatctcgatcactccataaatgatcggttaaaattaaaaatataggctgggtacagcagcttatgccctgtaatcccaatgctttgggacactgaggctggaagatcacttgaggccaggagttccgagaccagcctgggcaacatagaaagaccccatctnttccaaaaataaaaaataattagctggggggagcctaagtnccagctactttgggaaagctgagcctggangaatgctttgaccctgggagtganaggctacantgagctttgattggccccncttgcacttncacctttgggccaacaanantgaaacccttgtccgtaaaaattcaantcnnaatcaaatanttttaaaaaaaaaaaaaaaaaaaannccccnccc

SEQ ID NO: 4444 - DNA, 941 bp, Homo sapiens
  misc_feature 374, 385, 410, 433, 435, 443, 451, 459, 467, 472, 481, 483,484, 516, 526, 532, 542, 550, 557, 567, 568, 578, 587, 588,590, 599, 601, 612, 614, 615, 623, 627, 633, 634, 636, 638,639, 640, 650, 655, 664, 666, 667, 679, 681, 695, 717: n = A,T,C or G
  misc_feature 728, 735, 737, 738, 746, 748, 749, 755, 756, 764, 765, 767,768, 770, 779, 780, 785, 788, 794, 795, 796, 802, 812, 817,832, 836, 838, 842, 843, 861, 866, 876, 878, 882, 886, 890,891, 892, 901, 903, 910, 922, 930, 932, 936, 937, 941: n = A,T,C or G
gtccgtgcaccccaaatgggatctgtgggacatgagatgccggctgcatgtgagcatcttggtaaccaaataataggaaagaatgtaggagcaggcaatcctggggcaaaagctgacgccaacgtacctattcatcttagaattgagactctgatctgtctttcccaaggccagatctacagagaaactttctgtcttgggcagaatagctggctgagacatcatagagagagactgaggaaatatcccaggagcctgttgacacagaggccctgataactaaagagaagtcccagctgggcgtggtggctcatgcctgtaatcccagcactttgggaggctgaggcgggcggatcacttgaggtcaggagttngagaccagccnggccaacatggcgaaaccctgtctntactaaaaaatacaaattttacncngggggggnggggggcntgtgcttntattcccnctgcnccaggaggntnnaggcaggaaaaaggggtttaacccaagaaagnaaaaggtttnccttgngccaaaaatnggggccantttgaanttccaacccnngggcaaaaanaaacccccnnantttttttcnanaaaaaaaaaancnncccccccngggnaaaaanncnannnaaaaaaaaanggggnggggggggntnntatttttttttnanaaaaaaaacccccnccccccccccccccttttaacngtgaaaaaaantaaaaanannagggccantnnttgggnntgtaaaanntnntnttttgcccnnctttntangggggnnncaaaanaaacaccccntcccntccccgatttttccnaaananaaanncgttttttttccacgggnttctnaagggggggngntggnccancccnnnaaggggggntnttaaaangggtgggggganccccgggngncccnnaacn

SEQ ID NO: 4445 - DNA, 930 bp, Homo sapiens
  misc_feature 2, 3, 4, 5, 8, 9, 10, 11, 34, 123, 132, 257, 267, 328, 369,371, 372, 375, 376, 377, 382, 385, 420, 459, 481, 573, 599,610, 665, 666, 690, 719, 749, 751, 777, 781, 807, 817, 819,820, 821, 827, 839, 843, 845, 846, 847, 849, 853, 857: n = A,T,C or G
  misc_feature 864, 865, 877, 885, 890, 893, 894, 906, 911, 913, 914, 915,930: n = A,T,C or G
gnnnnagnnnnacttagggagtcgaccccgcgcnccgatccaatggtccttttccttccaaatgaatgtagaaaattcgttattatcctgatatttgcaccactcatccccatgccacttttnccacatatnaatttatttcactgcctgatctttggatatgaaattatgagttccacaaagtcaatttttatagtgccaatcaaacagcatggtgatattctttttctttttttttccccccacaaggctgttgntcagtgtganatgacatcatttcttatttctgccatgctgtggcttttttgtgttctgcttttaaactacncctgtagtacagttaatatgttttttattggtattgatttntnnaannnattantgntctctatttgggacccaagtcataagaaccaattngaggacataataaaaacacttaatgcttgtagtctgtanagatcttcaccatttcacagcncacacattattttcataataaattgccactggtgggacatgggactgacttatttgaatagagtttgaaataccacctttgtatgaagccanacaatatttgatttattttatctaanaaatctatgcntggggtattaagttaaaaatagtgggggttaaaatacaatttaataaagccttannaaatggtaccctaaactctttctnggggttaaaatgggaataagggaaatgtnttggggaaatggtggaaaaaaaactttttngnaaaaattaaaaagaactcaacccctntttnagggaaagtttgccttaaaatgggangagggtttgngnnnaaaaanaaatttaatttnttgngnnnancccnaccntttatgnnaaaaaaaaaaanggcccccncgggnccnntttaattttttnaaggnannnggtggcccaattttn

SEQ ID NO: 4446 - DNA, 849 bp, Homo sapiens
  misc_feature 2, 3, 591, 701, 742, 749, 754, 756, 769, 787, 788, 824, 829,833, 844: n = A,T,C or G
cnnagagagccttgtcatctctctggggcttgaggcagggctggggcaaagtggctattggacaggctggcatgagacaatgtccttcttctcagctctactttactcacttctgtggagacctgcctgcgttcattctcatcccacatagaaccgggaatctttctggctcaagtcactaaacagacacatcagggaggcaacagcttgaaattgaaagcagaaaaaagtgtgcgtgtacacaaacatgtacaagcatgaatgtgtgtgcgcacatacacgcatgcacacctgcacatgcacacacctgcacgtgcatgcatgcacacttggccaccagttcaggactgcaaggacaggcatctctgccagggggctagcaaacagcaaaccccacagcctagaatccgcttttgctttcttgacttttcctgccctggtctgaaagaaccaatgacagaactggctcagggaccgagcatggggtgaagcagaagatctgagtaacccatatcctggcccaccagccccagaattattgagcatttgattgtttaaaaaaaaaagtgcggccgctagactagtctaganaaaaaaccttccacaccttcccctgaacctgaaacataaaatgaatgcaattgttgttgttaacttgtttattgcagcttattatggttacaaataaagcaatagcatcncaaatttcacaaataaagcatttttttcactgcatttctanttggggnttggncnaactcatcaatgnatcttatcatgttgggannccccgggtacccagctcgaattaattcctttttccnttctngctnaatgaattggngggcg

SEQ ID NO: 4447 - DNA, 874 bp, Homo sapiens
  misc_feature 154, 217, 322, 374, 404, 477, 509, 513, 527, 530, 555, 572,583, 584, 587, 589, 601, 610, 613, 615, 620, 622, 647, 655,659, 668, 689, 699, 717, 718, 738, 739, 750, 768, 771, 777,784, 785, 824, 826, 830, 845, 849, 869: n = A,T,C or G
cccgcgtccggaaaaactgatagaaaaatagatcttgcaaccctgaaaccaaagtaaatgaaaaagtttcgagatgaagtccatcacaagggagagagttgcctccccaggacggcgtctctctagagggactgagttccaaaccccagtgcanaaaggttgttaaggaaaatcaaagaaggttctggaatttgggttgcatattaaaatcacctanggagctttaaaagggaaagacaaaactgaacccagacactaccacaggcaatttgataaggatttttactccataactttttaacattttagatagaaaattttnagaacacacaatttacagagatcaccatgatgaaccctcatgtacctcatcnaacatcagtaactcacaactacggatcaancttgtgtcaacctctgcttccacccacttccctctccaccccaaaataataattttttttttttgaaatggantttcactcttgttgcccaggctaaagtgcaanggtnaaatctcgggtcantgnaccctatgcctcccgggttaaaagngtattctcctgtttaancctcccaaggnnctngnattacaggcatntgcccccantcngntaatntngtattcctagtaaaaacaggatttnctcttttngccnggctggtcnttccactaatgaccttcgggngaaccccccncccttggaatccccaaanncctgggtattgcaggcagtnnacccccttccncctggccccaaaaatttnttntttttnaaaacannttccccaaacgcccatattaccttgaatttccagcattntntttnccttaaaaaaaaaanaacncttttaaaaaaaaaaaaagngggcg

SEQ ID NO: 4448 - DNA, 868 bp, Homo sapiens
  misc_feature 1, 478, 483, 484, 486, 489, 494, 495, 497, 501, 519, 520,521, 522, 536, 539, 540, 541, 542, 546, 547, 548, 552, 557,559, 560, 562, 563, 568, 571, 575, 576, 581, 592, 595, 604,607, 653, 666, 673, 675, 677, 680, 689, 693, 695, 697: n = A,T,C or G
  misc_feature 701, 703, 711, 731, 733, 747, 748, 749, 750, 751, 752, 756,762, 763, 764, 765, 766, 768, 772, 776, 777, 780, 783, 795,801, 802, 803, 808, 815, 821, 823, 825, 826, 827, 828, 829,830, 831, 832, 833, 834, 835, 836, 837, 838, 841, 843: n = A,T,C or G
  misc_feature 844, 845, 846, 847, 848, 849, 850, 851, 852, 853, 854, 855,856, 857, 858, 859, 860, 861, 862, 863, 864, 865, 866: n = A,T,C or G
nggagtcgaccccgcgtccgattttaggcagctttctctttttctgattggtttcagaaagataagatgcagttacaagcaaatggagaaattaagtacaaatgtctggtccgagaagcttagcaaacgtagcagtattagttctaacatccattttctgtcaatttattgaaaatatcttcaaaactgatacatcttttagaagtaatacaaattaaagagttcattgaaataaaggagatagttttatgacaccaagatttatctccacacttgttccttcatcttagatggaacaaatgcagagagtgtaaagcttaaaataactatatgctctacaatgtagataatcaaatgaaaatgctgtggtctcaaagccagaggaatgtggaccactttggtggccaaatttaaccagctgaggtctttcttgagtaccatctgagtcttcctttttaaaaaaaaaaaaaaaaaaaanggggnngnccnttaanntntttnaaaaaaaaaacttccaannnntcccctggacctgnaannnnaaannnaagncattngnngnngtaanttntttnntggcnctttttagggntcnaaaaaagcnaanccccccccaaattccccaaaaaaacctttttttccccgggtttccnaggggggggtggnccaaccncnanagnggttttttnaaangngngggnanccccgggnccccccccccaaaaaaaatncntttttccgttttcnnnnnnaaanaaaatnnnnngncccngggnnttnggntggggggaaagnggtttnnncttcnttaaagngggggntntnnnnnnnnnnnnnnttncnnnnnnnnnnnnnnnnnnnnnnnncg

SEQ ID NO: 4449 - DNA, 839 bp, Homo sapiens
  misc_feature 1, 8, 483, 486, 487, 488, 491, 493, 494, 495, 496, 497, 498,499, 500, 501, 502, 503, 504, 505, 506, 507, 508, 509, 510,511, 512, 514, 516, 517, 518, 519, 520, 521, 522, 523, 524,525, 526, 527, 528, 529, 530, 531, 532, 533, 534: n = A,T,C or G
  misc_feature 535, 536, 537, 538, 539, 540, 541, 542, 543, 544, 545, 546,547, 548, 549, 550, 551, 552, 553, 554, 555, 556, 557, 558,559, 560, 561, 562, 563, 564, 565, 566, 567, 568, 569, 570,571, 572, 573, 574, 575, 576, 577, 594, 596, 605, 606: n = A,T,C or G
  misc_feature 610, 615, 622, 624, 627, 629, 631, 639, 640, 643, 644, 645,648, 649, 650, 651, 652, 653, 656, 657, 658, 665, 667, 668,669, 670, 671, 672, 673, 674, 675, 676, 679, 682, 683, 690,691, 692, 693, 694, 695, 696, 697, 698, 699, 700, 701: n = A,T,C or G
  misc_feature 702, 703, 704, 705, 706, 707, 708, 709, 710, 711, 712, 713,714, 715, 716, 717, 718, 719, 720, 721, 722, 723, 724, 725,726, 727, 728, 729, 730, 731, 732, 733, 734, 735, 736, 737,738, 739, 740, 741, 742, 743, 744, 745, 746, 747, 748: n = A,T,C or G
  misc_feature 749, 750, 751, 752, 753, 754, 755, 756, 757, 758, 759, 760,761, 762, 763, 764, 765, 766, 767, 768, 769, 770, 771, 772,773, 774, 775, 776, 777, 778, 779, 780, 781, 782, 783, 784,785, 786, 787, 788, 789, 790, 791, 792, 793, 794, 795: n = A,T,C or G
  misc_feature 796, 797, 798, 799, 800, 801, 802, 803, 804, 805, 806, 807,808, 809, 810, 811, 812, 813, 814, 815, 816, 817, 818, 819,820, 821, 822, 823, 824, 825, 826, 827, 828, 829, 830, 831,832, 833, 834, 835, 836, 837, 838, 839: n = A,T,C or G
nggagtcnacccacgcgtccgctaggtggagacccccgtcccgctaaacactgagcccgtgcagcgtccaggcctgacacccctccggcgactcgccgcctctacacctccgcgccactgtccccggcccgaccgacccagcccttaggctagactagtctagagaaaaaacctcccacacctccccctgaacctgaaacataaaatgaatgcaattgttgttgttaacttgtttattgcagcttataatggttacaaataaagcaatagcatcacaaatttcacaaataaagcatttttttcactgcattctagttgtggtttgtccaaactcatcaatgtatcttatcatgtctggatccccgggtaccgagctcgaattaattcctcttccgcttcctcgctcactgactcgctgcgctcggtcgttcggctgcggcgagcggtatcagctcactcaaaggcggtaatacggttttcaanccnnnggngnnnnnnnnnnnnnnnnnnnngngnnnnnnnnnnnnnnnnnnnnnnnnnnnnnnnnnnnnnnnnnnnnnnnnnnnnnnnnnnnnnnaaaggggggggcgcatnanagacctttnnaggnggtgntatgggnanccnanangggggggnnccnnnaannnnnnttnnnggggggntnnnnnnnnnnccnaannggggggnnnnnnnnnnnnnnnnnnnnnnnnnnnnnnnnnnnnnnnnnnnnnnnnnnnnnnnnnnnnnnnnnnnnnnnnnnnnnnnnnnnnnnnnnnnnnnnnnnnnnnnnnnnnnnnnnnnnnnnnnnnnnnnnnnnnnnnnnnnnnnnnnnnnnn

SEQ ID NO: 4450 - DNA, 866 bp, Homo sapiens
  misc_feature 128, 201, 436, 567, 572, 594, 612, 639, 645, 648, 652, 658,676, 681, 685, 695, 700, 713, 729, 735, 737, 740, 743, 748,753, 759, 771, 778, 786, 787, 793, 794, 800, 802, 806, 809,813, 817, 818, 819, 824, 827, 834, 835, 847, 852, 860: n = A,T,C or G
ttttctaaagattttatttgaatatgtttcctctcatccttctttgagtcatgctggatactccctctgctatatccatttattcatttaatgcccatagaggaccatgccaacccacatccatccanacttccaggcctaaggttctggttgaaatgacacagaaaccatggcaatggctatggacagtcctgtttctanaaggtgaccttcacacacattcccacaaaggctgcctgtgcttgttttaaattcagggttaccaatatccttccatttcagggacttcaaccacaagagttcttctatgttatcaggaattggaggtacaccaaaataatatcaaatatgcaaggaactaaagagatgctaatctcattcctgcatctcctggttctctggctgggtaaaacacccagcatattgttacctttgngattaaaaaatccacagcatttaaaaggattatacctattgtcttcgtaaactaggctgactgaggtttaaaaaaaaaacataaagggcaagtgtttatctttaaatttcaaacattgggcaagggaaatnaaaangttctttcctacccatggaatnaacattcccagactgggnattaatttatccaatgtttccttttcnccccanccntttntttttngggcaaaaaagggggggnggganaagngaaacaaaanggggnttgggaacccctntttttttttttttggnaaaaancnttnttnaatgnaattngagctntttttcattaancattttngaagggtnngggggnntgtcgncnaacntanaaanggcnnnttgtntgnggcccannagtggggggttnaacanacaaaaanaaaaaa

SEQ ID NO: 4451 - DNA, 866 bp, Homo sapiens
  misc_feature 386, 433, 494, 560, 581, 590, 591, 593, 629, 651, 684, 692,695, 696, 705, 714, 736, 747, 792, 800, 802, 812, 830, 844,850, 859, 863: n = A,T,C or G
gtcgacttgtggggatttcctcctcctgggttcaccacctagttttccttgtgataaagttattttgtatgtagctatgagcacaggttgatgctggaaacacacatgtagtgtggattgtcattaagaatgtggagaactggctaaagaaaccacttgtacagttttgagatgagcactgcctgcctcagcatctgtggtaacggcttcacttgggtgcagagcttggcagaggtttgagtgactctatctcgatgatcgtctgtcagaggacaaggttaagtgtcaccaccgaggaccccgttgagcctctgggctggaagtaacttcccctgggccggtgaggcagcctctgggggtctttcctgacaagacccttcactganctgcagtttggccacctctgccctcgcctccctgactgcagggcctngaggtctcaccacctccagcctgagcgcccagtgcccaggggcaatttcccgccttccccnggggctcaggatgctggctcctggggcagtgcccgcaactgggcccctccttcagggctggccacngcctctgctgtgtcataccanctgctttcnngnactgcaacccacactgggccgccgctaactagttanaaaaaaaaaccttccacacctncccctgaaccttgaaacataaaatgaatgcaanttgttggnggnnaacttggcntatttgcangctttataatggttacaaaatnaaggccattancctccccaaattttcacaaaataaaagcattttttttcacttgcntttctaantnggggtttgtnccaaactcatcaaatggntcttaataatggcngggaanccccgggtncccnacc

SEQ ID NO: 4452 - DNA, 844 bp, Homo sapiens
  misc_feature 477, 481, 487, 490, 496, 499, 509, 514, 518, 536, 558, 575,578, 585, 589, 608, 639, 644, 650, 652, 670, 671, 674, 677,689, 690, 715, 731, 734, 735, 738, 740, 746, 757, 759, 760,768, 773, 783, 787, 794, 801, 802, 803, 804, 805, 806: n = A,T,C or G
  misc_feature 807, 808, 809, 810, 811, 812, 813, 814, 815, 818, 820, 821,823, 824, 825, 826, 827, 828, 829, 830, 831, 832, 833, 834,835, 836, 837, 838, 839, 840, 841, 842: n = A,T,C or G
ggagtcgaccccgcgtccgagcaagccgagatctcaccactgcactccagcctgggcaacacagcaagactccatctcaaaaaataaataaatgaataagattcatatggcacctagttaatttcatttactcaatacttttcagaaattgaagaagctctttttcaccagctactaaacaaaagcaatttattcaactaggttttctttgcatgagttgttctgtatgtaacaagaaagcaagaaaataaatatttttaaatgtcacacttccctgcaaaaataatcacaataataataataataataatgaataagagtttataggctaggtatagtggctcacacctgtaatcctagcattttgagaggctaaggcgggtggatcacttgaggtcaggagctcaagaccagcctggccaacatggtgaaaccccatctgtacaaatacaaaatattactctaaaaaaaaaaaantgcngccggnatnctagcntanaaaaaaaacntcccncacntgccccggaacctgaaanataaaaaggaatgccctgttgntggaaactggtttattnccncttatangggntacaaataaggccatagcntccaaatttcacaaataaagcatttttttcnctgcnttctantnggggttggccaaactaannagngtntcttaacatggnnggatccccggtaccaaacccgaaanaattcttttccgcttnccnnctnantgactngctgggctagncnntcggttgnggggnaacggttccnctcnctcaaanggggggnnnnnnnnnnnnnnntcntnntnnnnnnnnnnnnnnnnnnnngg

SEQ ID NO: 4453 - DNA, 933 bp, Homo sapiens
  misc_feature 1, 4, 5, 6, 12, 33, 34, 36, 37, 42, 45, 78, 109, 122, 124,136, 241, 329, 368, 520, 544, 547, 548, 655, 699, 723, 727,741, 748, 758, 775, 778, 792, 803, 839, 849, 860, 863, 879,891, 895, 910, 911, 912, 914, 926: n = A,T,C or G
ngtnnncatttngggagtcgccccgcgtgacgnngnntcgcnggncatgcgactcatggcacggagcaaaacatggtncagccgctaaaaacactgatggccgatgatncggattacagttncnatattctggaancccgctacgccattgaagccagcaccgcatggcatgcggcaatgcgcgccacacctggcgacaaagaaaagattcagctttgctttgaagcaacgctaagtgaanacccggatatcgcctcacaagcggacgttcgttttcatctggcgattgccgaagcctcacataacatcgtgctgctgcaaaccatgcncggtttcttcgatgtcctgcaatcctcagtgaagcatanccgtcagcggatgtatctggtgccaccggttttttcacaactgaccgaacaacatcaggctgtcattgacgccatttttgccggtgatgctgacggggcgcgtaaagcaatgatggcgcaccttagttttgttcacaccaccatgaaacgantcgatgaagatcaggctcgccacncanngattaccccgcctgccccggtggagcataatgagcattcgaggggagaaaaacgccatgaattattttccgcagcccagcgattatcggcgccgcaagcgcaaacgnatttttggccgccgttcctgtttccactattatggatggggggngcatattctgaaatacaccctggngccngcaaacgtgggaanaatttgntcaaaaaatnggggcttgcccccagcngtntttcttgaaaaaanatggttccganttaaagcctgggaaaaccaaccctgttttaattgangaaattggcnaatgcccgggnggnaccttggcttcccggngggggttgtggntggncatgttattcccctnnntngggccaaatttnaaggcac

SEQ ID NO: 4454 - DNA, 897 bp, Homo sapiens
  misc_feature 2, 7, 23, 416, 562, 594, 635, 677, 693, 695, 699, 710, 725,730, 741, 760, 769, 783, 789, 791, 798, 800, 802, 807, 808,812, 814, 832, 834, 840, 846, 850, 853, 865, 874, 877, 879,880, 886: n = A,T,C or G
gnccttnactcactatagggcgnattggagctccaccgcggtggcggccgcccgggcaggtacctgactttgggtaagttgccagaataagatcatcaggcttggcttggaaattacagactttttcccaccattcttttgataatatcaacgtagggactccatctacttccatgatgttaaacagttctggctttttttccatcgtgggagcgtttttctcaatcttcgccattgggaatctggtatttcaggcagcagaggaagcagcttgctgcctttagtcaaactgcttcctggaaacccagagccaggtccagctccaggacactgtgcaagcaagagcacagcaggtgaggtccccgcgtacctcggccgctctagaactagtggatcccccgggctgcaggaattcngatatcaagcttatcgataccgtcgacctcgagggggggcccggtacccagcttttggtccctttagtgagggttaattgcgcgccttggcgtaatcatggtcataagctgtttcctgtgtgaaattggttatccgctcacaattncacacaacatactaagcccgggagcataaaanttgtaaaagcctgggggtgcctaaatgagtgaagctacttncaattaaattggcgtttgcgcttactggccccttttcaagtncgggaaaaacttggtngngccnagcttccattnaatgaaattcggccncaccncccccgggggnagaaggcggattgccttanttgggcccnttttttccgctttncttggntnaattgantncntttgnncttngnccgtacgggtttaggggnancgggtntaaacnttanttnaaaggggggganatccggtanttncnnaaaatnaaggggaaaat

SEQ ID NO: 4455 - DNA, 858 bp, Homo sapiens
  misc_feature 5, 11, 13, 17, 22, 30, 31, 33, 52, 75, 433, 463, 471, 473,474, 481, 485, 494, 496, 502, 504, 506, 511, 525, 526, 527,541, 543, 544, 549, 577, 589, 592, 593, 594, 595, 596, 597,598, 599, 600, 601, 602, 603, 604, 605, 606, 607, 608: n = A,T,C or G
  misc_feature 609, 610, 611, 612, 613, 614, 615, 616, 617, 618, 619, 620,622, 623, 624, 625, 626, 627, 628, 629, 630, 631, 632, 633,635, 636, 637, 638, 639, 640, 641, 643, 644, 645, 646, 648,649, 650, 651, 654, 655, 656, 657, 658, 659, 660, 661: n = A,T,C or G
  misc_feature 662, 663, 664, 666, 668, 669, 670, 671, 672, 673, 674, 675,676, 677, 678, 679, 680, 682, 683, 684, 685, 686, 687, 688,691, 692, 693, 694, 695, 696, 697, 698, 699, 700, 701, 702,704, 706, 707, 708, 709, 710, 711, 712, 713, 714, 715: n = A,T,C or G
  misc_feature 716, 717, 718, 720, 721, 722, 723, 724, 726, 727, 729, 730,731, 732, 733, 734, 735, 736, 737, 740, 741, 742, 743, 744,745, 746, 747, 748, 749, 750, 751, 752, 753, 754, 757, 758,759, 760, 761, 762, 763, 765, 766, 767, 768, 769, 770: n = A,T,C or G
  misc_feature 771, 772, 773, 774, 775, 776, 777, 778, 779, 780, 781, 782,783, 784, 785, 786, 787, 788, 789, 790, 791, 792, 793, 794,795, 796, 797, 798, 799, 800, 801, 802, 803, 804, 805, 806,807, 808, 810, 811, 812, 813, 814, 815, 816, 817, 818: n = A,T,C or G
  misc_feature 819, 820, 821, 822, 823, 824, 825, 826, 827, 828, 829, 831,832, 833, 834, 835, 836, 837, 838, 839, 840, 841, 842, 843,845, 846, 847, 848, 849, 850, 851, 852, 853, 854, 855, 856,857: n = A,T,C or G
attantctttnanttcnaaccntttgtatnngnccaattggagctccccgtngtggcggccgatgtactgccatncaatgcaaggctgcacaccatgggggttaaaaaagaaaccttcccatgttgctcggaaagacccgaggcatgctaagatgtgcatgggtctcctgagcagttgtggaacttgctgccatgtgtctataaagggcaggcaacatatcttcaaaaacatttatttaagtctctggaagaacacaataatgatgtttgccgatagggaaaggtaaatggggacaggtgtgaggaggcttccatcctttctcatgccacttggaccacgtgaatgtggaaggtggccagggagaccctctctgcaagtccaggaatagggcggattcacccacaaattgttataaagttcaatgtccagganggagcttgatgcctccaggggaaaaccacntgtgtgtntnncccctgntaanggctctggngncaagangnanacacnccctgcggggtttnnncttctaaaaaaatntnngaacnccttttttttacaaaaaactggggcttnggaccccccccnggnnnnnnnnnnnnnnnnnnnnnnnnnnnnnannnnnnnnnnnncnnnnnnntnnnntnnnnaannnnnnnnnnntnannnnnnnnnnnnntnnnnnnnaannnnnnnnnnnntntnnnnnnnnnnnnntnnnnntnncnnnnnnnnnaannnnnnnnnnnnnnnctnnnnnnngnnnnnnnnnnnnnnnnnnnnnnnnnnnnnnnnnnnnnnnnnnnntnnnnnnnnnnnnnnnnnnnngnnnnnnnnnnnnnannnnnnnnnnnnnc

SEQ ID NO: 4456 - DNA, 883 bp, Homo sapiens
  misc_feature 4, 13, 22, 27, 35, 47, 64, 71, 74, 100, 363, 405, 437, 438,440, 443, 467, 497, 543, 577, 592, 610, 621, 648, 672, 700,703, 704, 718, 722, 734, 762, 770, 774, 776, 813, 827, 829,841, 848, 849, 862, 865, 866, 874, 880, 883: n = A,T,C or G
tacnctttgaaanccccccatnttggnaaattccngctccccgcggnggtttgattactcattnctctcanttnctaatgcctgatcctaactacaagantgtgtttgaaagaaactcccctgtataagagacatatttcaaagagctcaaaatagtaaacactaactctttcaaaccactatctacagctggaaaatgctttctcccttgtaagaaaaaaaaggaaggcaggcctggtgcggtggctcatgcctgtaatcccagcactttaggaggccgaggtgggcagatgacctgaggtcaggagttcgagaccagcctggccaacatggagaaaccctgtccctaccgaaaataccganaaaaaaaaaaaaagagaaaaaaaagtacctcggccgctctanaactagtggatcccccgggctggcaggaattnnanatnaagcttatcgataccgtcgacctntagggggggcccggtaccccagctttttgnccctttagggaggggttaattgcccgcttgggcgtaatcatggggncataggctgtttccctggggtgaaaaatggtatncggctcaacaaattncccccccaaccattaccnaagcccggggnagccataaaaaggtgtaaaaagccctnggggggtgcccttaaatggagggnggagcctaaacttcacaattaaattggnggnnggggcttcactggnccgntttttcccaaanccggggaaaaccctggtccgggccccanccttggcnattnantggaaattcgggcccaaccccgccggggggagaaggncgggtttggcgggnantttggggcgctntttccgnntttcctggggttnacnngcctccgnttgggnccn

SEQ ID NO: 4457 - DNA, 955 bp, Homo sapiens
  misc_feature 10, 16, 29, 32, 224, 234, 260, 294, 323, 324, 341, 345, 373,374, 381, 396, 398, 406, 415, 431, 435, 440, 442, 445, 447,451, 454, 455, 456, 457, 465, 466, 467, 470, 471, 477, 481,482, 485, 486, 491, 499, 501, 504, 505, 511, 515: n = A,T,C or G
  misc_feature 517, 525, 530, 531, 532, 533, 538, 540, 541, 542, 544, 555,573, 580, 587, 590, 607, 609, 610, 624, 626, 627, 628, 631,632, 646, 648, 651, 677, 691, 693, 701, 702, 726, 728, 729,730, 737, 740, 750, 753, 771, 773, 778, 780, 785, 797: n = A,T,C or G
  misc_feature 804, 805, 806, 807, 808, 810, 825, 829, 832, 833, 834, 835,841, 847, 850, 855, 860, 862, 867, 871, 873, 884, 885, 886,887, 896, 898, 902, 903, 904, 905, 907, 913, 915, 917, 923,931, 932, 933, 940, 941, 951, 954, 955: n = A,T,C or G
ggccttaacncatttnactactatagggnttnttggagctccaccgcggtggcggccggccatgctctcctcctctgccagtctcctccaccactctctaacctgagagcctgtggaacctgcccgtctcccctcctccatcagacacacctgcctaggaaacaggaaaggacctcggaagtcttctaaggagagtcatggcgtattaccaggagccttcagtnggagaccctncatcatcaagttcaaaagaccagganctttaccacctttgcgggggtcacttgccctgancatggggccggaccgtttaaaggaatgannacattccttgcagcagnattnttccatagggccaaaaagctgctccagnnaaaaacncctctccaatgttgntntggaaagncgcccacanggatttaccagggggncccnccctnanttnanttcnggnnnnaaaaaaannnccnntttttntctnnccnnaaaangggggggngnccnntttttntttntntttttttnggggnnnnccagngnnnanttttttttttnaaaaaaaaaaaaaaaaanttatatntgggggnttnaaaaaaaaaaaaaagangnnccccccccccgggngnnnaannaaatatttttttanantantttttttttacccccccccccccccngggggggggggggncncccccccnncttttttttttttttttttttagngnnngaaaaanaancccccccccnccnaaaaaaaaaaaaaaaaananttttntntgganaaaaaaaaaaanccccccnnnnncnaaacaaaaaaaaaanaaanaannnngggggngaaaanaanaaatnataangnggggnggcncntccctttatgnnnnaactccccncntctnnnntngtattncncnggcccncccccccnnnaaaaaannaaagaagggnggnn

SEQ ID NO: 4458 - DNA, 894 bp, Homo sapiens
  misc_feature 7, 15, 16, 22, 24, 27, 33, 37, 40, 80, 81, 85, 474, 484,501, 512, 527, 543, 550, 551, 553, 555, 564, 567, 584, 587,591, 592, 617, 618, 619, 623, 633, 634, 640, 642, 643, 651,655, 659, 660, 664, 666, 667, 673, 674, 683, 684, 686: n = A,T,C or G
  misc_feature 688, 689, 693, 695, 699, 700, 703, 713, 719, 724, 726, 727,728, 729, 731, 734, 745, 746, 748, 751, 752, 753, 756, 757,760, 762, 764, 766, 773, 780, 782, 783, 792, 796, 799, 800,812, 813, 814, 823, 826, 839, 847, 848, 857, 861, 869: n = A,T,C or G
  misc_feature 870, 872, 874, 881, 882, 888, 889, 890, 891: n = A,T,C or G
ccattantctttganntgccancnatnttgtanaggnccnattggagctccaccgttgtggcggccggtttgcgagggtnngcangtacgggcgtgcgcgccgctggcggggccgcagtctggcaagccgacagcaggctggcggcggcaaggacgatcatcgcgtgtctcatgcctgccagcctaccatggtttaactgaacaggcgtgccagctccacgccggggtcgggggcgcgcatgaacgcttcgcccaccaggaagctgtggatgtgcgcatcgcgcatgcgttgcacatcggccgctctagaactagtggatcccccgggctgcaggaattcgatatcaagcttatcgataccgtcgacctcgagggggggcccggtacccagcttttgttccctttagtgagggttaattgcgcgcttggcgtaatcatggcatagctgtttcctgtgtgaaattgttattccgntcacaatttncacacaacaatactaanccggggaagcntaaaaagtgtaaaangcctgggggggggccntaaatgnngngngcttaaacnttnaacaattaaattggcgnttngggnnttaaatttgccccgctttttcaaannngggnaaaaactttnngggggncnnactttggnttanaaannaaantnnccccannccccccggnnananngggngntttnnaantaaggggccntttttnccttntnnnnanaanaaaaaaaaatnngnccnnnggnnatntngngnggggggnggggggngnnttttttttntttnaannggggggtgggannnggtttttcnccnaaaaaaagggggnaaaccccnnaaaaaaaantttntttaaaanngntncaaaaanngggggnnnnccc

SEQ ID NO: 4459 - DNA, 987 bp, Homo sapiens
  misc_feature 5, 6, 7, 15, 16, 21, 40, 57, 69, 70, 381, 417, 431, 438,474, 478, 487, 491, 498, 527, 533, 550, 551, 577, 582, 584,602, 610, 653, 668, 674, 678, 683, 685, 686, 696, 700, 704,725, 737, 747, 752, 769, 784, 794, 796, 800, 803, 806: n = A,T,C or G
  misc_feature 808, 810, 815, 821, 825, 827, 828, 829, 844, 847, 848, 849,851, 855, 863, 864, 869, 872, 878, 887, 891, 896, 897, 899,905, 909, 913, 921, 922, 924, 925, 928, 936, 938, 939, 947,953, 954, 956, 957, 967, 969, 971, 973, 975, 977, 980: n = A,T,C or G
  misc_feature 981, 982, 983, 987: n = A,T,C or G
gttannnctttgaannacccncgtattttgacacactacngggcgaattggagctcnaccgcggtggcnnccgaggtacttggtctttgaactctcgtgtcgaaagagttgaacacaactaaactttaatgtgaaaaggtctcaagtagttaatcagaaatgagaggcgcacatagcattttatactgttttcgatttgctgacacaacatcattctgtgctctctagtgagcaagagtaatcctcaatagcattaagacgaaaggctgaacacaaaaccgcaggcaagtcaagtagtgattttattctttttgtcatttttctttcaagtggaagatccctaacactctctgctcctgacaatgtttataaacagaactntgagaagcatctgaatgtaaaaaaaaaataggtctntccaacaaactgtnatagacnatcaaccagctgagtcctcttccaaatgacatgggnttgnaagtacctncccnggcggcncgttcggctctagaactaagtggaatccnccgggnctgcaggaattccgatnntcaagctttaatcgatacccgtcgancctcnanggggggggggccccgggnacccaacnttttgtttcccccttttagtggaggggtttaaatttggcgccnctttggcggttaatncattgntcantagcntnngtttttcctngagngtgnaaaattgtttaatcccgtttnaccaaattttcncaaccaaacnatacngagcccggtgagccatnaaaagttgataaaanccctgggggngncccntanatngngntgggnccctanaccntnnntttaattttggcggntgnnngntcanctgccccnnttttnaanatggtngaaaaaacncttnctgtnncncacttnaatnaaangaaattgnncnnacncccccggngnngaaggccntttgannannttgggcgctntnanancntntcnnnngtcn

SEQ ID NO: 4460 - DNA, 956 bp, Homo sapiens
  misc_feature 56, 58, 74, 92, 102, 286, 379, 404, 406, 415, 425, 426, 436,445, 449, 459, 466, 467, 486, 500, 508, 511, 515, 520, 535,540, 541, 556, 563, 571, 581, 583, 589, 590, 594, 604, 612,616, 620, 622, 632, 634, 636, 638, 646, 648, 651: n = A,T,C or G
  misc_feature 654, 659, 663, 674, 682, 684, 685, 687, 693, 696, 702, 711,715, 716, 731, 741, 749, 761, 762, 763, 766, 773, 774, 775,776, 780, 781, 790, 791, 800, 806, 808, 812, 817, 819, 822,823, 825, 827, 830, 831, 836, 840, 847, 855, 858, 859: n = A,T,C or G
  misc_feature 861, 865, 866, 869, 870, 871, 873, 874, 879, 881, 882, 884,886, 887, 892, 896, 901, 902, 913, 915, 916, 920, 921, 925,928, 930, 931, 932, 938, 945, 946, 952, 953, 956: n = A,T,C or G
gtaatacgactactatagggcgaattggagctccaccgcggtggcggccgagtagncngcccgcacggcacggntttccgccacgccgccgntgatggcatnctgcatgaagttcaggtaaccggtgacggacggctcagacgtgatctgcatttccggcaccaccaggcccgccgtcgccagcgcggaattgggcggcacgtaggagggacggaagtagttgaagacggacggcgcgttcatggggttctggccgagtcccgacagcggatcgctgaggtaatangatgcggtactgcaaagcagcatccttggcgttaaacgcgcgcatccagttgcccaaacgcaccagcggttcgcgcagtttgcccgtgcgcanggtgctgccggctggcgcaagcccntngaggtccancagcacggcnnggatcacggncgctcttanaacntaaatgtatnccccggnnttgtgaggaattcgatatnaaagcttatttgantaccagtngancttngaggngggggccccagttanccaannattttttggttaccnttttaantgaagggnttaaatttgntncctccnnttgnataaatatanttggttcnaaanagantntttttcttgntntngnaaaaattngntantcntactntaanaaattctcacnacaaacantnncnatttcnggngaggcnttaaaaagntggnnaaattcttggggggntgccctaatngaattggnggtttaaccttnnnaanttatttnnnntttnngccctttanntattccccnattttnangatntgggnanatnntntnctnncgtantatnaattttnattgaatntgnncnatcnntcnnntnntagtnanngngnnttttncttntttgnntactcattttntnntttnnttanttnannnaaattnctttaanntatggnntan

SEQ ID NO: 4461 - DNA, 910 bp, Homo sapiens
  misc_feature 96, 144, 173, 365, 382, 402, 417, 431, 441, 443, 450, 451,457, 460, 474, 492, 507, 509, 555, 574, 576, 578, 580, 582,584, 589, 595, 664, 667, 688, 706, 707, 710, 738, 743, 756,758, 765, 770, 771, 790, 798, 809, 812, 816, 828, 830: n = A,T,C or G
  misc_feature 832, 841, 842, 845, 847, 850, 851, 856, 859, 865, 866, 872,874, 879, 880, 896, 898, 904, 905: n = A,T,C or G
tcgtaatacgactcactatagggcgaattggagctccaccgcggtggcggccgagtatgtcggcccgcacggcacggctttccgccacgccgccgntgatggcatcctgcatgaagttcaggtaaccggtgacggacggctcanacgtgatctgcatttccggcgccaccagncccgccgtcgccagcgcggaattgggcggcacgtaggagggacggaagtagttgaagacggacggcgccgttcatggggttctggccgagtcccgacagcggatcgctgaggtaataaatgcggtactgcaaaagcagcatccttggcgttaaacgcgcgcatccagttgcccaaacgcaccagcggttcgntgcagtttgcccgtgcncagggtgctgccggctggcncaagcgcctcggggntccaacagcacggnacggatcacngncgctctnnaactantgnatcccccgggctgnaggaattcgatatcaaanttattgataccgccnanctttgagggggggcccggtacccagctttttggtccctttagtganggttaaattgcgccgcttngncngnantnatggntcatanctgtttcctgtgtgaaatttgttattcccgattcaaaaatttccacacaaacaatactgaacccggggngcnttaaaggtgttaaaaggactngggtggcccttaatgagnnganccttaaaattaacattaaattggggttngcggnctcaactgggccnanttttttnaagtnnggggaaaaacctgtatctnggccatanttggaatttantgnaatntgggccaactcncncngtgggaggnngcngnttnngcgtnttnggggcnnttttcncngtttnnttggttaaattgaatntnctgggnntcggg

SEQ ID NO: 4462 - DNA, 967 bp, Homo sapiens
  misc_feature 1, 3, 6, 13, 58, 71, 88, 98, 103, 109, 111, 112, 116, 119,128, 455, 487, 510, 523, 526, 531, 533, 536, 545, 551, 573,576, 584, 587, 593, 594, 598, 617, 624, 631, 632, 633, 636,637, 651, 654, 663, 665, 666, 671, 690, 691, 697, 704: n = A,T,C or G
  misc_feature 705, 706, 709, 720, 729, 731, 739, 749, 751, 762, 766, 768,770, 771, 775, 793, 795, 809, 811, 812, 813, 814, 815, 816,817, 821, 822, 829, 830, 831, 841, 843, 844, 847, 849, 850,854, 858, 864, 865, 867, 871, 872, 873, 875, 877, 879: n = A,T,C or G
  misc_feature 885, 889, 891, 896, 905, 909, 910, 914, 919, 923, 931, 937,941, 943, 945, 946, 952, 953, 954, 957, 958, 959, 964, 967: n = A,T,C or G
ntnttnggcattngactcactatagggttttttgaagctccaccgcggtggcggccgnggtactttttttnttctttttttttttttngctgacctgnagttngatttncnntgtntanacttaacantctgaatttaaacacgaggcatatacacaaaatcatctggaactgatttttttcacactaaacacttctttctgatcctactttccaggaggctccttcctccaaacatacctccagatgaaaatcacttaattaaccaagaaagactcaaccgcccttaactgcttttctaaacagtcacacatactggatttacttattttgagacatgacaaaccagttgcaaaccacaaattcattctcatgggccctccacacggtctcttgttccttctgaagagggtcttgctgaggaccatttgtcccccttcctgcagcaacctactnaatcggagctggaaagtggtggcctttcgaantaatttgcgggttttcctggccncaatgattgctgnacnggacntnaangcccttttncccggnccctttgggtggccacaatacnaanaatccctntanaaaaanntccnacttttttttaatttcaanaattggntggttannngcnnttcttggttttttncanttccaaagngnnaaaanaaagaagggggaatatttnnattccnttcctgnnnccnagtaacccggnttataaaangnaaaaaganaacttttgcntncccataattcnccgncncnngggnacaaaggggcccctttancnagcgggggatatgnannnnnnncctnntttggannnccccccaaangnntgngnncccngggngggggnnantatnnngngntnggggcncccngntattnttattattncctnnccancgggngggnctttttanaaaacnatgntnanncccctnnnctnnnctatngan

SEQ ID NO: 4463 - DNA, 1061 bp, Homo sapiens
  misc_feature 13, 61, 62, 74, 79, 85, 241, 253, 302, 334, 345, 353, 363,366, 374, 376, 435, 453, 476, 477, 484, 486, 491, 503, 510,519, 523, 542, 546, 549, 550, 552, 564, 569, 570, 577, 578,587, 602, 607, 612, 614, 615, 616, 636, 637, 643, 645: n = A,T,C or G
  misc_feature 651, 652, 654, 657, 672, 680, 683, 686, 694, 695, 698, 699,700, 701, 702, 703, 706, 709, 711, 712, 713, 716, 725, 730,734, 737, 740, 749, 755, 757, 761, 762, 765, 770, 773, 783,784, 791, 794, 798, 800, 801, 803, 804, 810, 814, 818: n = A,T,C or G
  misc_feature 819, 835, 840, 848, 849, 855, 861, 863, 866, 867, 871, 872,877, 878, 880, 891, 894, 895, 896, 900, 901, 911, 914, 918,924, 928, 938, 939, 941, 942, 943, 945, 951, 952, 953, 955,963, 966, 968, 987, 990, 998, 999, 1000, 1004, 1010: n = A,T,C or G
  misc_feature 1011, 1013, 1017, 1022, 1023, 1027, 1029, 1051, 1054, 1055,1056, 1058, 1059: n = A,T,C or G
gggttaattaatncctttgaaaccccttacttttggcaaattgcagctccaccgcggtggnngccgaggtaccnggccntgcttngatgcaagactcctctccctaacgattttgaagagatatccatccagttctcctctaaaacctaattgcttacccagatgaaaagatatttgagaataatgaacccatgagttgggtgggaagtttaggatacctttttattctgatgctcatganagcaccatttanaaactacagcattgtggatatttggttctatttaatattaaaaaattanagcacaaggcatttttaatatagggaacaagnatacttttcanatcctttntaaaaagcanggntgttcttntnattgtacccaaaagaaagttagtaatccccaggttgcactttatttttggtgccaatcnttggaaataaaaatactngttttatgggctcaacaaggcgnnatttganancaggnaatttctatttnttgaacntgaaaattngggnaacctttatacccacgganggtnatnncnaatgaactttgntggannaattggnnttttacaantgaaaaaaatataanagttnttaantnnnggacttgggggaaaaaaaannatgtgnantttctnnanccntgaagaacataagtngaaaaatnctnaanatttattnnttnnnnnnaanctngnnnaancttggaganaaatngatnatnctnaaagtcctngaatanangggnnacnatgangantttgataaannggggttntantaancnnanngggtgngatntatnnggataatcgcttttantattntgaagatnnagaatnataatntnacnnttannggggnnancatattaatanacnnnttgnnaaaatttaanagnaaanttatcnatgntggactttanntnnntnaccatnnnanagcaatcnctntnatagcgattactaatattnagnattttatnnntatnatgaannanaatnatctnntggncnttaaaaacgacgtgttagcaanttnnntnncg

SEQ ID NO: 4464 - DNA, 960 bp, Homo sapiens
  misc_feature 275, 324, 358, 413, 434, 438, 455, 467, 477, 479, 480, 491,492, 505, 512, 513, 531, 532, 538, 544, 546, 550, 554, 556,559, 565, 569, 572, 599, 612, 613, 616, 618, 623, 626, 640,644, 653, 656, 663, 671, 680, 682, 691, 695, 698, 701: n = A,T,C or G
  misc_feature 708, 709, 712, 721, 724, 725, 726, 730, 733, 734, 737, 739,744, 745, 749, 754, 761, 762, 769, 771, 777, 780, 783, 790,791, 792, 799, 800, 804, 811, 814, 817, 829, 831, 835, 836,838, 843, 848, 850, 852, 858, 860, 865, 868, 872, 876: n = A,T,C or G
  misc_feature 878, 883, 892, 894, 915, 920, 922, 925, 927, 928, 933, 937,939, 941, 944, 946, 951, 953, 954, 958, 959, 960: n = A,T,C or G
ggcgaattggagctccaccgcggtggcggccgcccgggcaggtacgcgggatttatgtcaatgataacaatttacctatttttcaatttctgtttgttttatgaaaaagcaaatagaagcaatcagggcactgcaagttgtgactactccaagatgtgaatcatggatcatgcaaattacaatcatgttttaacctgacctccaaagggagaataaagtaaaaattatcccatgtgaggattattcaccagtttatatgtcattagttaccagtntttctttatgaataatgtttagcaatattataaaagtatgtctaatagnttatcaggtttttggcttgttactttttggtagnaacttataaaactgactggaaaagaccaataatggcactgttttgcatgttacanaattatatccaaaagaccaanaagnctggttaattaagaaantctttcaaattnaaaacccacntnnattattttttnnttttttattttancaccccnnccattcaagggaattacnncttttntttcangngganttgnanccnttggantcanggnaaaggggatggttatttttctttcaanaggctataattanngananggggnacnaattaataattttngttngagttgaanaanaagaatncattggcnattttaaananatttttaancctntcnacntttttannatngtgggggtnaannntttnatnnaangnaaaanngtcnctatngttcaanntcccttntnaaattngantgngggtgcnnnagagaanncaanatcgaanacnttnatgtcgtttatnanaatnntnccaangatgncnancaaggncnctccnatnatcnttgntnacacnccaacaaantntctgttggcgcactcgatagngttgntnatntnnctgtntganananatnangaatnannttgnnn

SEQ ID NO: 4465 - DNA, 868 bp, Homo sapiens
  misc_feature 616, 647, 683, 707, 738, 739, 752, 764, 768, 775, 782, 787,796, 797, 800, 809, 813, 818, 822, 832, 835, 837, 838, 839,844, 850, 853, 860, 864, 868: n = A,T,C or G
gcgtaatacgactcactatagggcgaattggagctccaccgcggtggcggtcccacaattgagaggtgagcaaatcacatagaacttgctttgtagccctgaatgtgcccatctccctctccctccagtgacctctgcttccagcttcccttccctatctcctgtatctctgcttcacttgtgctaccttctcacaccacatcttccaggattacacttttatgctacacctgcactgatcagtcttctactccagtcttcattttgtcttcgtaaaaatgttgaggatgaatgctgttccactttcctttcctatagcgagatggcctccccgcgtacctcggccgctctagaactagtggatcccccgggctgcaggaattcgatatcaagcttatcgataccgtcgacctcgagggggggcccggtacccagcttttgttccctttagtgagggttaattgcgcgcttggcgtaatcatggtcatagctgtttcctgtgtgaaattgttatcccgctcacaattccacacaacatacgagccggggagcataaaggtgtaaagcctggggtgcctaatgagggagctaactcacattaattggcgttgcgctnactggccgcttttcaagtcgggaaacctgcntgcccagcttgcattaaatgaaatcggccaaccccnccggggaagaggcggtttgcgtanttggggcgcttctttccgctttccttggttnnctgactccgttgnggcttcggtcgnttcnggcttgnggccaanccggnattaagctnnacnttaaaaggncggnaaatncggnttttccccanaantnnnggggntaaccncanggaaaanaaanattn

SEQ ID NO: 4466 - DNA, 845 bp, Homo sapiens
  misc_feature 1, 2, 3, 4, 5, 6, 581, 587, 588, 589, 590, 591, 592, 593,594, 595, 596, 597, 598, 599, 600, 601, 602, 603, 604, 605,606, 607, 608, 609, 610, 611, 612, 613, 614, 615, 616, 617,618, 619, 620, 621, 622, 623, 624, 625, 626, 627, 628: n = A,T,C or G
  misc_feature 629, 630, 631, 632, 633, 634, 635, 636, 637, 638, 639, 640,641, 642, 643, 644, 645, 646, 647, 648, 649, 650, 651, 652,653, 654, 655, 656, 657, 658, 659, 660, 661, 662, 663, 664,665, 666, 667, 668, 669, 670, 671, 672, 673, 674, 675: n = A,T,C or G
  misc_feature 676, 677, 678, 679, 680, 681, 682, 683, 684, 685, 686, 687,688, 689, 690, 691, 692, 693, 694, 695, 696, 697, 698, 699,700, 701, 702, 703, 704, 705, 706, 707, 708, 709, 710, 711,712, 713, 714, 715, 716, 717, 718, 719, 720, 721, 722: n = A,T,C or G
  misc_feature 723, 724, 725, 726, 727, 728, 729, 730, 731, 732, 733, 734,735, 736, 737, 738, 739, 740, 741, 742, 743, 744, 745, 746,747, 748, 749, 750, 751, 752, 753, 754, 755, 756, 757, 758,759, 760, 761, 762, 763, 764, 765, 766, 767, 768, 769: n = A,T,C or G
  misc_feature 770, 771, 772, 773, 774, 775, 776, 777, 778, 779, 780, 781,782, 783, 784, 785, 786, 787, 788, 789, 790, 791, 792, 793,794, 795, 796, 797, 798, 799, 800, 801, 802, 803, 804, 805,806, 807, 808, 809, 810, 811, 812, 813, 814, 815, 816: n = A,T,C or G
  misc_feature 817, 818, 819, 820, 821, 822, 823, 824, 825, 826, 827, 828,829, 830, 831, 832, 833, 834, 835, 836, 837, 838, 839, 840,841, 842, 843, 844: n = A,T,C or G
nnnnnngacgcgcgtaatacgactcactatagggcgaattggagctccaccgcggtggcggccgaggtactgacttatgctgggatggttctcgaatttttattagaatcccccagagtgcttttaaaactcttcatgttcaggccaagcctttaaaccattaacctaagaatctctgggtggagggtgtgacctaggctcagcttcttttaatgtttctcagttgtgtctgaagtgcagtcaggatgagaaccacttgtatgcatctcctaactttctaaactttactgtgcatgagaagcaccaggagatcttgttagaatgcagtttctgatttaggaagcctatgctaacgtcagagatctacatttccaccagctctcaggtgtagtgactctcctgctctgtggaccacactttaaatagccaggcttaccaatccacttaaaaatggccaaaaccacaattacttttgcaccaaactaatacactgtgctgtccagtatggtagctcctagccacatttgcctatttaaaagctcagttcctccatcctaccagctgtttttcaggggaccctnccgggnnnnnnnnnnnnnnnnnnnnnnnnnnnnnnnnnnnnnnnnnnnnnnnnnnnnnnnnnnnnnnnnnnnnnnnnnnnnnnnnnnnnnnnnnnnnnnnnnnnnnnnnnnnnnnnnnnnnnnnnnnnnnnnnnnnnnnnnnnnnnnnnnnnnnnnnnnnnnnnnnnnnnnnnnnnnnnnnnnnnnnnnnnnnnnnnnnnnnnnnnnnnnnnnnnnnnnnnnnnnnnnnnnnnnnnnnnnnnnnnnnnnnnnnnnnnnnnnnnc

SEQ ID NO: 4467 - DNA, 888 bp, Homo sapiens
  misc_feature 3, 6, 534, 678, 706, 714, 752, 779, 788, 790, 793, 803, 813,815, 821, 822, 827, 834, 837, 846, 851, 857, 858, 865, 873,878, 886: n = A,T,C or G
ggnttnggcgcgcgtaatacgactcactatagggcgaattggagctccaccgcggtggcggccgcccgggcaggtacctgactttgggtaagttgccagaataagatcatcaggcttggcttggaaattacatactttttcccaccattcttttgataatatcaacgtagggactccatctacttccatgatgttaaacagttctggctttttttccatcgtgggagcgtttttctcaatcttcgccattgggaatctggtatctcaggcagcagaggaagcagcttgctgcctttagtcaaactgcttcctggaaacccagagccaggtccagctccaggacactgtgcaagcaagagcacagcaggtccccgcgtacctcggccgctctagaactagtggatcccccgggctgcaggaattcgatatcaagcttatcgataccgtcgacctcgagggggggcccggtacccagcttttgttccctttagtgagggttaattgcgcgcttggcgtaatcatggtcatagctgnttcctgtgtgaaattgttatccgctcacaattccacacaacatacgagccgggagcataaagtgtaaaagcctggggtgcctaaatgagtgagctaacttaacattaattggcgttgcgctcactggcccgctttttcaagtcngggaaacctgtcgtgccagctgcaattnatgaattnggccaaccccccggggaagaggcgggtttggcgtattngggcgcttttttcgctttccttggttnacttgactncnttngggcttcggncgtttcgggntngcgggnnaagcnggtattnaanctttacttnaaaangccggnnaataccnggtatttncacanaaattcangg

SEQ ID NO: 4468 - DNA, 891 bp, Homo sapiens
  misc_feature 364, 495, 529, 566, 574, 575, 590, 599, 611, 618, 624, 634,638, 652, 656, 669, 690, 694, 696, 698, 702, 706, 714, 720,735, 742, 743, 757, 759, 760, 762, 772, 781, 782, 797, 799,800, 803, 812, 813, 814, 817, 826, 838, 842, 843, 844: n = A,T,C or G
  misc_feature 847, 850, 853, 859, 861, 866, 875, 878, 881, 887: n = A,T,C or G
gcgcgtaatacgactcactatagggcgaattggagctccaccgcggtggccgagcggccgcccgggcaggtactctcacctgtgggcatttgtcaaaatcagtattactgctgggggggatgagggctgaaaactcctatttcaccatctttctgacatcatttgccacagtgtgctttttttgttctggtatttccttatacccttgagtctcttccctattttagtcaacccagcagtctgtattcattcctcttaatcaggatttgagctttgcacctgctccttttggctggggttgagtctacttcagaggctagggatatagagggtccaaatacaatttaaataagaaaatgctacnaataaaaagtgttgagaagaataagaattctagaaaaaaagaaaaagaaaatggaaagaaaagacttttaaaatgttaaggcatctggcagagagaccaaatgggaacaaaaacccaattcctctctcctnacaagtccttgcaccctggcctaatggctgcttnaacccacaaaaacgccctttgtttatcagcacttcangtattcanntaggctggcatgcangttggcagnttttacccaaangacaagngctccnggggaaactnagancttttaacttgttnttgnaaccacctttcanaacttttactccattgctttntttntngnaatnttantccccatntttttncctttttttttaaanaaaaaanncttccttttggttnanntnggaaaccttnctccttttnnaaaaaggtttctggntnnacnttctacccnnnatnttgttcccncccttccctttngaannnttnatnccnttcttnangttgngtggccttnggnttntataancccg

SEQ ID NO: 4469 - DNA, 903 bp, Homo sapiens
  misc_feature 492, 542, 549, 559, 564, 586, 591, 592, 603, 606, 623, 628,643, 653, 660, 683, 684, 685, 688, 694, 704, 715, 717, 720,722, 725, 727, 746, 754, 762, 775, 776, 778, 783, 788, 792,793, 803, 804, 805, 806, 809, 811, 813, 817, 818, 819: n = A,T,C or G
  misc_feature 821, 825, 828, 829, 833, 838, 840, 850, 856, 857, 860, 862,868, 869, 871, 873, 874, 877, 882, 883, 884, 885, 886, 889,892, 893, 894, 898, 901, 902: n = A,T,C or G
gcgcgtaatacgactcactatagggcgaattggagctccaccgcggtggcggccgcgccggtgatcgacccgttcaactgggatgcgggcagcgtggcgcgtcccgtcatcaactacgcgcagtggggcacggccagcattaccgagcaaagcggcgtgtatgcgggcacgcgcctgcgcctggccgatccgctgtcgctggtgctgggcgggcgcgtgagctggtacaaggacgatgccggctactcggtggcgcgcgaattcactccttatgcgggtgtcgtgtatgacctcgacaagcagcattcggtgtacgccagctggaccgaaatcttccagccgcaggcttccacggacgccaatggacagcccttgaagccgatcagtggcaccaactatgaagcgggcgtgaaaggcgaatactttggcggcgccctcaatgccagcgcagccgtgttccagatccgccagcaaaaccggggcgtggacganctggccggcccgaatccttgccccggcagcacgtggggctattgccagcncgcgttnggccaaattncgcancgaaaggcgttgagcttgaacnttggnngggttgccctnacnccccgaattgggcaagnttgtncggcccggttctaanaaactaagtngggattnccccgggctttcaaggaaatttnnntantcaaancttttatttngataacccgtncnaancnttntnggggggggggcccccggtnacccaaanttttttgntttcctttttaanngnagggnttaanttgnncccctttggnnnnaantnantggnnnanttanctnntttncctgngngaaaattgtntattcnnttnanaatttnnanannaanattannnnnccnggnnnattnaannt

SEQ ID NO: 4470 - DNA, 913 bp, Homo sapiens
  misc_feature 146, 343, 418, 433, 434, 447, 463, 470, 510, 530, 536, 557,560, 569, 576, 588, 608, 629, 630, 636, 642, 659, 662, 692,693, 694, 710, 712, 714, 735, 736, 749, 770, 786, 787, 790,791, 801, 804, 805, 808, 822, 823, 829, 840, 842, 843: n = A,T,C or G
  misc_feature 847, 853, 854, 856, 857, 859, 863, 864, 882, 885, 887, 888,891, 893, 901, 913: n = A,T,C or G
gactactatagggcggaattggagctccaccgcggtggcggccgcccggacggtaccgggctcggtttggccattacccagaacatcatcagccagcaccagggtttgatcgaatgtgagagccatcccggccacaccaccttctngatctttctgccactggaacaaggagccccatcgacatgagccgtagtgaaactgtctggatcgtcgatgacgaccgttctatccgctgggtcctggagaaagccttgcaacaggaaggcatgaccacccagagcttcgacagcgccgacggggtgatgagccgcctggctcgccagcagcccgacgtgatcatctncgacatccgcatgcccggcgccagtggcctggacctgctggcgcggattcgcgagcagcacccgcgcttgccggngattatcatgaccgnncactcggacctgnacagcgctgtcgcgtnctatcanggcggtgcctttgaatacttgccaaaaccggtcgatgtanacgaggcggtggcactggtnaaaacnccgccaaaccagcaacgcccnttnggaacaacngaaccanggaaagctttcnggcggccccttgaccccgtnaaccccggaaaaatcattttnntgaaanctcccnccgaattccaaggaaanttntttttcccggcccaatcgggcgtttttgannnccaacttccaaaacantnanccggtgcctgattcaacgggnngagtttggggttnccctggttaaaaaaaacttgnttgggtttaacccccnntgnnaccggtaaanaannccnaaaggggccctcgnnggcctnttcaatttcantnnaaanattggnngnngntttnnaaaggaaattttttgaanttngnnaantnttctcccnttaaaaaaaggn

SEQ ID NO: 4471 - DNA, 897 bp, Homo sapiens
  misc_feature 73, 76, 124, 127, 148, 155, 252, 254, 260, 278, 302, 360,371, 376, 428, 440, 445, 471, 474, 486, 489, 509, 510, 520,552, 586, 593, 595, 604, 609, 615, 628, 630, 645, 646, 673,678, 680, 701, 706, 707, 731, 747, 759, 765, 773, 782: n = A,T,C or G
  misc_feature 784, 786, 790, 808, 817, 821, 827, 828, 829, 834, 836, 841,847, 848, 850, 852, 861, 879, 880, 885, 890, 893, 895: n = A,T,C or G
tagggcgaattggagctccccgcggtggcggccgaggtactttttttttttttttttttttttttttttcccngtncctcaaactactgtttctataatgggatattttattacatgaggtctntgngggcatagttatttcattaanaaacacncttcataaaattgcatccatgtatggtaatctaaaaaagccaatctagatgacagaagcttctgactataaattataagtaatcttatccatacatncncagaanctagtgatttattaagtnctctactgtacttccaaacacatntaagttttccaaaagatttcaaaaacaattcactggcagcaagcaaaaagtcaggganaaactgctganacagnggtgctggtaagggctcctggtaggacttttgcatgaagcagctgcatgtanacctgggccagncattnaacttttatggtttcggtttttttcnctnataaaataaaanttnctggaccactgagatctggnnaataccctgnagctcttatgtctttatcccctggaaaaaatntggggacacccccggcgtaccttgccccggggcnggcccgntnttaaaaacntaggngggaanccccccggggccngncagggaaattccgannattcaaggctttatcggatccccgtcnacccntngaagggggggggcccggggcncccanntttttggttccccttttaaggggngggggtaaatttgccnccctttgggcgnaaaacnatggggcnaaaagcctngntntccntgggggaaaaaattgttnttccggacncaanttcccnnnaacanancaagnccgggnngnanaaaaggggnaaagccccgggggggccnnaaggnggggnccnancc

SEQ ID NO: 4472 - DNA, 967 bp, Homo sapiens
  misc_feature 174, 259, 280, 304, 347, 374, 407, 408, 432, 434, 455, 464,470, 475, 487, 503, 510, 520, 526, 545, 546, 548, 550, 552,562, 567, 573, 577, 584, 587, 588, 597, 611, 619, 623, 645,646, 651, 664, 680, 689, 691, 703, 713, 715, 727, 731: n = A,T,C or G
  misc_feature 735, 742, 744, 745, 747, 748, 749, 750, 753, 754, 766, 771,785, 787, 803, 811, 818, 827, 837, 843, 848, 849, 850, 856,866, 870, 876, 885, 892, 895, 898, 901, 902, 903, 905, 906,913, 920, 926, 927, 929, 930, 932, 937, 942, 943, 949: n = A,T,C or G
  misc_feature 950, 954, 958, 961: n = A,T,C or G
gactactatagggcgaattggagctccaccgcggtggcggccgcccgggcaggtacttgactctccctgcactgccttgcttttgaaggcatctaaaatctctcacttttccccataccacatttcacagctgggtcattctgctggactcagcacaggaggaccctctctcanactggttggaaactttgggcacatttgaaaactgtcaacacaatctgtaaacacatcagtcataatgattctttcctaggaactngacacacccagatgaactctnttgttatgacaggatcagtaccangagaatttcctctcccgcgtaccttggacgcttttagaactangtggatcccccgggctgcaggaattcnatatcaaagcttatcgatcccggcggaacctcnnaggggggggggccccggtaccccnanctttttggtttcccttttaantggaggggnttaaanttggncccctttggggnggaaaaacaattgggncaataangctgggtttncctggngggtgaaaaaatttgtttnntncncnttcacaaaantttcncccaanaacnattaacnaanncccgggggnggccattaaaaggnggtaaaancccntggggggggggccctaaatggnntggangcttaaatttccnattttaaatttggggnttgggcccntnaacttggccccngtttttccananacggggaaaaancctngtgnggggccnanntnnnnttnnaattaaaaaccngcccnaacccccccggggnanagggcggggttttggngttttttngggcccnttttccccnttttcttggntaaatngaatnnnttttgnccttcggggngttngggttnggggggaanagggtgnttnacnttnnntnnaaagggngggaaanaccggnntnncnccaanaaaanngggggnnaaancccnggnaaaaat

SEQ ID NO: 4473 - DNA, 702 bp, Homo sapiens
  misc_feature 2, 4, 9, 10, 20, 397, 399, 437, 454, 477, 481, 485, 535,544, 550, 560, 594, 596, 612, 615, 631, 637, 638, 643, 647,667, 668, 680, 684, 685, 693, 700: n = A,T,C or G
gntncgcgnnctctaatacnactcactatagggcgaattggagctccaccgcggtggcggccggccatgctctcctcctctgccagtctcctccaccactctctaacctgagagcctgtggaacctgcccgtctcccctcctccatcagacacacctgcctaggaaacaggaaaggacctcggaagtcttctaaggagagtcatggcgtattaccaggagccttcagtggagacctccatcatcaagttcaaagaccaggactttaccaccttgcgggatcactgcctgagcatgggccggacgtttaaggatgagacattccctgcagcagattcttccataggccagaaagctgcttccaggaaaaaacgcctctccaatgtgatatggaaagcngncacaaggatctaccaggggggtcctcctcaactttatnctgggatggatataaanccagatttggacattccaacaangganggcncaacttgactggttgggttcctggcaacccttggggaatcctttggcttnaaaaacccnccagtnccctttgggncggtttttaaaaataaagggggatcccccccggngnttggaaggaaatttcnaantaaaagcttttttaanaacccnnccaancctnggggggggggggccccgggnnccacattttttnttcnncttttggnggggggnag

SEQ ID NO: 4474 - DNA, 652 bp, Homo sapiens
  misc_feature 2, 3, 379, 410, 427, 455, 501, 530, 532, 582, 595, 598, 601,651: n = A,T,C or G
tnngacgcgcgtaatacgactcactatagggcgaattggagctccaccgcggtggcggccgaggtactgccatgcaatgcaaggctgcacaccatgggggttaaaaaagaaaccttcccatgttgctcggaaagacccgaggcatgctaagatgtgcatgggtctcctgagcagttgtggaacttgctgccatgtgtctataaagggcaggcaacatatcttcaaaaacatttatttaagtctctggaagaacacaataatgatgtttgccgatagggaaaggtaaatggggacaggtgtgaggaggcttccatcctttctcatgccacttggaccacgtgaatgtggaaagtggccagggagaccctctctgcaagtncaggaatagggcggattcacccacagattgntataaagtttcaatgtncaaggaaaggacttgatgccctccaaangaaaaacccatgtatgtcttttgcctggtctaaggtctcttggcanaaggaaacaagccatgccagggtttactntncaaaaaacttgcaaacttctttttgctacaaaatgctggctttaccttgncccgggccggccnttntanaaaataagtgggatcccccggcttgcaggaatttcatattaaaccttatng

SEQ ID NO: 4475 - DNA, 669 bp, Homo sapiens
  misc_feature 2, 262, 367, 425, 434, 445, 458, 474, 476, 566, 574, 640,659, 662: n = A,T,C or G
tngtcctcgtaatcgactactatagggcgaattggagctccaccgcggtggcggccgaggtacctgactttgggtaaagttgccagaataagatcatcaggcttggcttggaaattacagactttttcccaccattcttttgataatatcaacgtagggactccatctacttccatgatgttaaacagttctggctttttttccatcgtgggagcgtttttctcaatcttcgccattgggaatctggtatttcaggcagcanaggaaagcagcttgctgcctttagtcaaactgcttcctggaaacccccccgcgtacctgcccgggcgggccgctctaaaactaagtggatccccccgggctgcangaattcgatattaagcttatcgatacccgccgacctcgagggggggccccgtacccancttttggtncctttaatgangggtaattgcccncttggcgttaatcatngncataagctggtttcctggggtgaaaatgttattccgctcacaaatttcacacaaacattaccaaacccgggagcattaaaggggaaaagnctgggggnggccctaatggagttgacctaacttcacattaaattggggttgggcttaattgcccctttttcaantcggggaaaaccctgtttntgnccccctt

SEQ ID NO: 4476 - DNA, 663 bp, Homo sapiens
  misc_feature 2, 426, 457, 490, 499, 519, 539, 562, 563, 576, 624, 636,655: n = A,T,C or G
gnccgcgtatcgactcactatagggcgaattggagctccaccgcggtggcggcccgaggtactcaagaaacccaggccagagttactggagcccttcctcacaattggccttggctccctctccacttgtgtgttttcacattgacttgatcttcagtggagtaactctgagcagtggctgtagctcagcaggtagaaaaactctctaacccttgaagaggggaatacagtagcaccattgaaaaaagaggttgtgtatagagtttcattcttaaatttgctttgccaaggagaaagcctgtgagaagtgaaagcaaggtggaactggggtccaaagagagggagtaaactagatgccatattaatttgtatttcttggagaatatgactgcagtttatatataacttggtttaaacatttttggnacctcttaaagaaaatttgggtttggggggnccaattttattttggaagaaaaagattaggaancccgtttanttttgggggcccaaagcatngctaccctcaaggagaccanggctttaaaaggaaaataaagtnnatgccacccagcntgagtaccctgccccgggccgggccggttttaaaaactaagtgggatncccccgggcttncagggaaattcgatattcnaagctttt

SEQ ID NO: 4477 - DNA, 643 bp, Homo sapiens
  misc_feature 428, 439, 453, 502, 515, 520, 529, 545, 553, 555, 556, 561,566, 603, 605, 606, 629, 640: n = A,T,C or G
tcgactactatagggcgaattggagctccccgcggtggcggccgaggtactttgggaggctgaggcaggaagatcccctgagcccaggagttcgagaacagcctggacaacataaggagaccccgtctctataaagtaataataataataataaaatagttgtttgccttgcagcccagggtgagtagaaaagtatggctgaatataaagcaacaaatatttattttactttctatatacttcttaaaagaaagtttattcttagtaaataaatactacctttacttaagtcctaacttcacattgtctgtacctgcccgggcggccgctctagaactaagtggatcccccgggctgcaaggaattcgatatcaagcttatcgataccgtcgacctcgaagggggggccccggtcccagcttttggtncctttaatgangggttaattgcgcncttggcggtaatcatgggcatagctgttttcctgggggaaattggtatncccttcccaattnccacnacatccaanccggggagcataaagngtaaaagncnnggggngcctnatgagtggacctacccccatttaattggggttgcgcntnnctggcccgcttttcaattggggnaaacccggcgngct

SEQ ID NO: 4478 - DNA, 923 bp, Homo sapiens
  misc_feature 3, 4, 5, 6, 16, 34, 43, 55, 60, 61, 64, 65, 66, 67, 72, 83,210, 230, 315, 333, 346, 359, 360, 462, 485, 493, 495, 498,503, 511, 513, 520, 530, 549, 551, 564, 584, 594, 595, 612,622, 633, 654, 663, 669, 674, 694, 700, 708, 714, 715: n = A,T,C or G
  misc_feature 716, 719, 740, 741, 744, 752, 758, 763, 765, 783, 792, 793,794, 797, 802, 804, 808, 821, 831, 832, 837, 849, 854, 859,861, 864, 876, 878, 885, 894, 895, 896, 900, 903, 910, 918,920, 922: n = A,T,C or G
agnnnnatcctctaantactactactatagggcnaattggaantgcacctccacngcggnngcnnnngcagntccgcgggganaatagagtggctgacttgctgattgaggtcggcagctcccgagaagcaggagaagtagagtttttgcagacaggcccacgaagtcaagcatgcggagtgcagccaagccctggaacccaaccatcanagcagggggccacggcccanaccgggtgcggcctctgcctgcagcctcttccggcatgaagagttctaagtcttcaacttccttggcttttgagtcccgactcancaggctcaagagggccancattgaggacacnctcaacaagccannaagtacctcggccgctctagaactagtggatcccccgggctgcaggaattcgatatcaagcttatcgataccgtcgacctcgagggggggcccggtacccancttttgttccctttaatgagggntaaattgntngcntggcntaatcatngnaggtaanaggattccancttttaatccggaattccngntgcaaattttaantttaccttgaaaaaaatttnaatgcgtaanngtccctttgttggaagngttccttaanccattgggggnttaactttaacgtttaaagantacttaagnccttgntgttnttttttttttaaatcccccnaaaccntaccttgnccaggnnnggntccaattttaaaaaacttaannggntcccccgnggggcnggcangntaattttttttttttaanccttttttnnnttnccttngnaacntttgaaggggggnggccccgggnncccantttttttttttncccanttaangnaanggggttaaattncnaaggttngggataaannnttgntcnaaaaaanttttgggngntnt

SEQ ID NO: 4479 - DNA, 869 bp, Homo sapiens
  misc_feature 2, 4, 8, 15, 19, 21, 26, 28, 33, 42, 144, 150, 151, 152,159, 165, 166, 377, 389, 398, 414, 567, 577, 579, 591, 618,636, 646, 672, 678, 688, 689, 694, 708, 712, 714, 715, 718,725, 730, 745, 747, 750, 762, 766, 768, 776, 777, 785: n = A,T,C or G
  misc_feature 786, 788, 794, 800, 806, 822, 827, 840, 847, 852, 853, 858,863: n = A,T,C or G
cngnctanggcgganctgnanctccncngcggnggcggccgnggtaccaatttattatatgctgccttcaggtattcatttatatatttgtctcttaaactaattgtaaagtgttcattagtactggcttataatccacatgtnagcaannnaaaagtntatctnnaacatttactttaatattttaaatattataatttcaaatgagttccaattttcccaacttgctcttaaccagtatttttttttaaccagttctctacttctttaatgaaattaaagaaactaaaataatttcaccacctttaataaccaaataaacatcagggaaattatatgtgaacatgtaataacaaaattaaagctactgatctgtnaaaggacagtangaaaaattngtattcaaaatgacanggggatatttaaatacgacactgcagcagcataaacatgataaatctcatttttgatataaatggggaatttcccaagaatccagctttttatgcctttgctattctaaaaaaatacttcataattctcttatcccattcaagagtcccagtnacccaccatnangcggttgaaganctaaacctttgggggccaggtgccagngaccccccgtttttgtantccccaaccncttttggggaaggccccgcccccccngccggnttttccttgnngggcncgggagtttcaaanaccncnnccngggcccnccagnggggggaaacccctngnccntttcttaaaaanttcnanaaattttnncccggccnngnggggcnatgggncctttnaatcccaacttctttngaagnctccaggccgggnaaaattnttttnnccccnggggngggggg

SEQ ID NO: 4480 - DNA, 1584 bp, Homo sapiens
  misc_feature 6, 11, 12, 14, 15, 24, 25, 26, 34, 37, 42, 44, 50, 52, 53,58, 63, 64, 67, 73, 79, 87, 92, 94, 95, 97, 98, 100, 110,111, 113, 114, 115, 116, 117, 118, 119, 120, 121, 122, 125,126, 131, 137, 151, 163, 166, 178, 198, 211, 217, 233: n = A,T,C or G
  misc_feature 241, 247, 258, 259, 263, 264, 278, 281, 285, 287, 294, 302,307, 315, 319, 320, 356, 377, 404, 434, 526, 539, 551, 596,601, 627, 647, 680, 686, 692, 697, 717, 722, 731, 761, 762,795, 810, 826, 829, 830, 832, 865, 884, 887, 892, 901: n = A,T,C or G
  misc_feature 907, 918, 973, 975, 990, 991, 994, 995, 1011, 1012, 1018,1029, 1051, 1058, 1059, 1064, 1079, 1081, 1085, 1086, 1089,1110, 1114, 1116, 1117, 1118, 1127, 1128, 1136, 1141, 1146,1152, 1159, 1160, 1178, 1179, 1185, 1193, 1196, 1198: n = A,T,C or G
  misc_feature 1200, 1206, 1208, 1214, 1222, 1229, 1231, 1239, 1247, 1249,1250, 1260, 1263, 1282, 1286, 1294, 1303, 1304, 1311, 1313,1315, 1316, 1320, 1321, 1322, 1330, 1331, 1334, 1338, 1346,1347, 1353, 1362, 1371, 1373, 1382, 1388, 1390, 1393: n = A,T,C or G
  misc_feature 1394, 1395, 1396, 1397, 1401, 1403, 1406, 1408, 1432, 1435,1436, 1442, 1445, 1449, 1450, 1454, 1455, 1460, 1462, 1467,1475, 1476, 1477, 1480, 1486, 1490, 1491, 1495, 1496, 1497,1498, 1499, 1500, 1501, 1502, 1506, 1509, 1511, 1521: n = A,T,C or G
  misc_feature 1527, 1529, 1533, 1542, 1544, 1554, 1557, 1573, 1574, 1576,1578, 1580, 1581: n = A,T,C or G
cgccancgcgnncnntggctccannntcgctggntantcccntnccaccntnnagatntcggnntgnatagtntcgtcntcgtgtgnctaananntnngnggctacattnntnnnnnnnnnnagnnagtgnggcgtngaatacgcctacanactttactatanganccaatttggcancgttcattggctgtcgcccngttcagtgtcacngcaggnagtgtgccgtcctacngactcacnttcggngctgtcgaganncatnnccaagctttaagtnaangtgnantttatanttttccantccangcgggggngganncaaaagaagccttctcggatcttccccaagggccantcccaaaggaaccgtttcctnttttccaaccttggattccaataattnacccttttattcaatcctttttgggggggnaaaaaaaaggtcaatccccccaggttctttgggaaattccccctggtcgggccccaaggtggaaattaaaggaataagaccggtccccaagnaattaaggcctcnaagcctttccangggtcccctttggaggggggttcttttcccttcaaaaagggggcnttttntcccctccaaccaaaagggggggggntccttcttccaaaaaaaganaaaaagggtggggggggcccaaccaaccctttngccttngaaccnaaatnggaaaaaccaggggggttcnccttnccccgggcnatttcaacaaaagcccctttccttgctttnnggggaattccttttccttccttttggggaaatnggggccttttcattncccaaccccttcaatnggnntngggaattttcttcaaattaaggaaaaaaataangggccacccaaggggccanatngggtnggggccggnaataanttttccttggncaatttccaaattgggggcccaacccctttcaacccgggttttgcttttttccancnttttgggccccgaannaannaaaggaaccccttccnnaagggnggcccccaagngcccccccacaaaaatgggggngccattnnttttngggccttttttgggnancccnnggnccccggggggccggggcccgntttncnnnacaaccccnntgttaacntaaantaaangggccnaaaaaannttaaggccccggtgcccnntgtggntggggccnccnantngccccngngtaaantcccccangcctttncntccaaggnaaagggcntnngaaaggcaanagnaaaaaaaattcctctttanaaancccccggnggagagggnnaaaaagngntnnccannntggaagannctngaanaaatcatnnggccanctcgggggncctcccacngnccctggggnccaaanancannnnnaagngnaangntgggcccttctccccccaattttnaanngggggncantaannggcnnccccngnggggnggggggcnnnccncccccnaccnnggannnnnnnncacnttntntccccccgcncgaatncnaccncaggagggnanatctttttcnccnttccgtggaggccccnntntntnnggt

SEQ ID NO: 4481 - DNA, 933 bp, Homo sapiens
  misc_feature 14, 30, 49, 88, 89, 224, 250, 323, 504, 507, 539, 588, 598,604, 651, 656, 666, 669, 677, 685, 716, 721, 739, 741, 742,744, 750, 754, 755, 757, 783, 784, 785, 786, 790, 825, 836,840, 842, 849, 858, 867, 872, 879, 890, 898, 901, 902: n = A,T,C or G
  misc_feature 904, 910, 911, 914, 915, 919, 930, 932: n = A,T,C or G
ggggtgggggtttngggcctttgaatacgnctcctatttggcgaattgnagctccccgcggtggcggccgcccgggcaggtactctcnnctgtgggcatttgtcaaaatcagtattactgctgggggggatgagggctgaaaactcctatttcaccatctttctgacatcatttgccacagtgtgctttttttgttctggtatttccttatacccttgagtctnttccctattttagtcaacccagcagnctgtattcattcctcttaatcaggatttgagctttgcacctgctccttttggctggggttgagtctacttcanaggctagggatatagagggtccaaaatacaatttaaataagaaaattgctacgaataaaagtgttgagaagaataagaaattctagaaaaaaagaaaaagaaaatggaaagaaaagacttttaaaatgttaaggcatctggcagagagaccaaatgggaacaaaaacccaattcctctttnctngcaaggtccttgcacctgggcctatggctgcnttcaacccacaaaaaacgcctttggtttatcagcacttcaaggtatcanttggctggcnttgcangttgccagtttttaccccaaagacaaagggctccagggggaaactangaccnttcactgctnctnggaacccncctttcancaaccttttacttccattggctttcttcctnggaanattttattccccatcttntnncnattttntttnnangacccaagcctcccttcttgctcaannnnggcnccctttcttccttttaaaaaattggttcccttganccacctccaanccanantgtgggngcccccccnttccctttngaaanatttcantccttttttcnaattgctnggnntnggggtnntanntaanccccccccaantnt

SEQ ID NO: 4482 - DNA, 1201 bp, Homo sapiens
  misc_feature 1, 2, 6, 7, 8, 10, 13, 14, 16, 17, 18, 19, 21, 23, 25, 29,33, 36, 40, 41, 42, 43, 45, 46, 48, 51, 52, 55, 56, 59,60, 61, 65, 66, 68, 70, 72, 74, 79, 81, 84, 86, 87, 90,93, 94, 95, 97, 101, 106, 107, 108, 110, 360, 421, 424,514: n = A,T,C or G
  misc_feature 529, 534, 538, 548, 551, 553, 560, 580, 588, 589, 605, 611,619, 624, 635, 642, 662, 665, 678, 681, 684, 685, 689, 701,715, 718, 719, 730, 748, 753, 754, 759, 762, 765, 790, 802,809, 824, 825, 826, 832, 833, 836, 837, 839, 840, 848: n = A,T,C or G
  misc_feature 849, 850, 851, 853, 860, 863, 888, 891, 899, 900, 903, 907,908, 917, 944, 950, 951, 953, 957, 962, 971, 975, 979, 980,982, 992, 997, 1000, 1001, 1002, 1003, 1004, 1006, 1007,1008, 1010, 1012, 1014, 1015, 1028, 1030, 1033, 1036: n = A,T,C or G
  misc_feature 1037, 1039, 1043, 1047, 1055, 1066, 1073, 1074, 1076, 1081,1083, 1088, 1089, 1090, 1093, 1096, 1097, 1103, 1104, 1116,1126, 1127, 1129, 1133, 1134, 1135, 1143, 1155, 1159, 1163,1165, 1172, 1174, 1175, 1176, 1177, 1178, 1179, 1188: n = A,T,C or G
  misc_feature 1191, 1193, 1195, 1196, 1199: n = A,T,C or G
nngcgnnntntanntnnnncntntngtantagnaantatnnnntnntnttnnatnngcnnnttannanantntngaatntnaancnnatngannngnggangcgcnnncncgtattactactcactatagggcgaattggagctccaccgcggtggcggccgaggtggccgaggtacgcggggggccaaataagcactatgtaagtttttttaattttcccaaacacatgcacagaattaatattgccttaaattttgttagcacaagtttgagagagctctttagttcataaaaaaatgttttatggaccaggtgccgtggctcacacctgcaatctcaacaccctgggaggcccaggngggaggatcgcctgagcctagggaacttgagaccatcctggccaacatggtgaagccccgnctntactaaaaaatacaaaaaaattattctgggacatgctggcgtgcgcctgtaggtctcagcctacctaagggtagactggaggtggggganaaatcaaccctgaanccctngggnaggttggaangtntngcaattnggggtttgagaatcaatggntacttggnnacccttggccccgggnccgggntccggctnctaanaaaccttaggnggggatncccccccccgggggccttgncanggggaaatttccnatnatnnaaangcctttatttcngtttaaccccggantgnnaccccttgganggggggggggggcccccnggttnnccccnaanttntttttgttgtcccttttttaagtgnggggggggattntatttgncccccccttggggcnnnaaacannatnngnnacataagnnnngngtccccntgngtggggaaaaattgggtttatcccnttnaacaaatnnccncaannaataatttncatatagcccgggggagccacataaanatgtgnnanaaanccccntgggggggncccntaanngnggggggggcncctcnccnnnnnannntntntnnggggtgtggggcncnaanttnntncccntttntttcacanagggggagaanctttttnngngcccncncttannnttnatnnaaaaannggcccccacccncccgggagannanggcnnnttttacanattttgtgggcncacntttncncctattnannnnnntatttgtgnatncncnnggnct

SEQ ID NO: 4483 - DNA, 1284 bp, Homo sapiens
  misc_feature 2, 7, 14, 18, 19, 22, 23, 24, 27, 30, 31, 37, 38, 39, 45,47, 55, 58, 61, 63, 69, 70, 71, 74, 87, 90, 93, 94, 95,97, 98, 99, 100, 102, 104, 109, 111, 114, 172, 175, 423,429, 436, 440, 447, 457, 500, 508, 522, 544, 551, 562, 575: n = A,T,C or G
  misc_feature 588, 597, 613, 614, 641, 649, 665, 666, 667, 671, 675, 676,682, 692, 698, 704, 705, 732, 736, 741, 750, 767, 769, 777,780, 782, 789, 794, 795, 803, 807, 808, 810, 821, 833, 853,861, 875, 880, 882, 902, 906, 908, 909, 910, 913, 927: n = A,T,C or G
  misc_feature 932, 933, 943, 954, 960, 961, 965, 972, 985, 986, 1001, 1005,1007, 1012, 1015, 1017, 1019, 1027, 1033, 1039, 1046, 1057,1071, 1084, 1087, 1088, 1096, 1098, 1099, 1102, 1103, 1111,1113, 1115, 1123, 1124, 1127, 1128, 1132, 1134, 1136: n = A,T,C or G
  misc_feature 1137, 1139, 1141, 1144, 1154, 1156, 1158, 1164, 1171, 1174,1187, 1190, 1194, 1195, 1201, 1202, 1203, 1205, 1211, 1212,1221, 1232, 1234, 1239, 1243, 1245, 1246, 1247, 1254, 1255,1262, 1264, 1276, 1277, 1279: n = A,T,C or G
cnctacncgacgtntttnnacnnntgntgnntcattnnntttttnangtacgtgnatnttntntagagnnntcnctcatatttattnttntcnnntnnnngngnggggngngtngggcgtaatacgactcactatagggcgaattggagctccacccgcggtggcggccgangtncgcgggggtatgcgatcgtggcaggattgcaggacgggcagcactctttctgcagaaggtaaaaatcaccttgctgaggaagcttttcgtctgctgattcttctttgtgacatcggggaataaggatttatttctaacagtcttgggggctcgtctgggatcacccagtctccttcgggtcggggtctctgattcccgccccccccaccaagggggaggccgccccactgcacttacttgcggtggcnctcagnggactgngganttccggnacttacctgnttgtggatggaataaacccgggaccccttcagcaacggttggnaaaaacgngcgcaattacggcnttgcatttgccaccttgccctntgggggnacccagaaatntaaacttcctggnttcaccaggaagncaaaaaggnaaaaaaggaaaaaccnntccgccaaagggggttggccgaaccanaaatgttnaccctttgcctcccgnnnggcngggnnccggcnttccttaagnaaaacntaaggnnggtgattccccccccgggtggccttgncaanggganaattttccngattaatttcaaaagancnttttattncgnantaacccncggtnnggaacccnttcnnanggggggggggnggccccccgggntaccccaaacctttttttgngttccccntttttaagtgtagngggtntntaaatttggccgcccccttngggncnnnttnagtccaattgtgtncactnnaggacttgtnttcccctggtngttggnnaaanaatggtntattcccgacttnnaacgacttttgccanaacnanaccanttncnanagccccgnggagancagtgnaaaaganggtaaaaagcnccctggggggtggnccctaaattgaangtnnaagccttnannttnnaacatttnantntggtgggnnggnngccntnanntntnacncgctttttcncnangatcanagaaacnccntattcgttgcccnacnctcnnttctannnanaatacnngaccaatanactacacgacnanaaaangagncnnnactctcnntttaatngnccttcctttacnngnttttc

SEQ ID NO: 4484 - DNA, 1224 bp, Homo sapiens
  misc_feature 2, 5, 9, 10, 12, 14, 18, 21, 23, 26, 29, 30, 31, 32, 34,39, 43, 45, 50, 51, 53, 58, 59, 63, 64, 66, 69, 73, 74,76, 78, 79, 82, 83, 85, 87, 89, 92, 97, 101, 104, 106, 108,110, 112, 113, 115, 119, 132, 298, 404, 408, 433, 453, 461: n = A,T,C or G
  misc_feature 473, 519, 559, 579, 599, 651, 669, 675, 680, 681, 703, 725,728, 734, 742, 744, 745, 748, 754, 756, 759, 760, 770, 777,804, 814, 832, 844, 845, 854, 866, 873, 874, 876, 881, 883,893, 905, 914, 915, 917, 919, 922, 928, 939, 940, 941: n = A,T,C or G
  misc_feature 942, 943, 949, 951, 952, 953, 956, 961, 980, 992, 993, 1003,1004, 1020, 1022, 1023, 1031, 1033, 1040, 1052, 1053, 1054,1066, 1068, 1071, 1072, 1073, 1076, 1079, 1087, 1088, 1090,1092, 1093, 1100, 1101, 1108, 1112, 1116, 1128, 1129: n = A,T,C or G
  misc_feature 1133, 1134, 1135, 1137, 1151, 1154, 1157, 1162, 1164, 1170,1175, 1184, 1186, 1192, 1193, 1201, 1213, 1214, 1215, 1219,1222, 1224: n = A,T,C or G
cnctnaatnnantnatantgntnttnttnnnntntaaanatanangaatnnantatannatannanaanattnntnannatnntntntnttnttagnaagngtntntngngnncncttntacgatcactatngggcgaattggagctccaccgcggtggcggccgaggtactcaagaaacccaggccagagttactggagcccttcctcacaattggccttggctccctctccacttgtgtgttttcacattgacttgatcttcagtggagtaactctgagcagtggctgtggctcancaggtagaaaaactctctaacccttgaagaggggaatacagtagcaccattgaaaaaagaggttgtgtatagagtttcattcttaaatttgcttttgccaaggganaaancctgtggaggagtgaaagcaaggtnggaaacttgggggtccaaangagagggnaattaaaactantatgcccataattaaattttggtattttcctgggaagaaatattgnacctgccaggttttttattattaataaaccttttggggtntttaaaaaccattttttttngtaaaacccctggcttttanaagaaaaaattttgggggttcttgggggttggggtccagaatttttttcaantttttgggtaaaggaaanataggnatttnntgggaatgtacccaggtttttntgtttttttgggggggaaccancanaagccnatggggcntnnccnttaccnanggnnagaaccaagngttcttngaaaaaagggaaaaaaaattaaaggtnggatggccangccccagccttgaagttnacctttgccccnnggggccggnccgccttcttanaaacctnngntgggngntccccccccngggccctgccanggaaaattnncnantanttcaangcctttattcnnnnnacccgncnnnacnccttnaaggggggggggggccccnggtttccccaannccttttttgnnttcccctttttgtagnannggggtttnanttttgcnccccctttgggnnntaaattacattngngcnnnaanctntgttcccnngntnnaaaaatnntttattncccntttnctaattttcccnnaacnnntnatcggagcccgggngcnaanaatantngataanccctngggggcccncncagagnnggggaccncccccccctttnnnctgnggncn

SEQ ID NO: 4485 - DNA, 880 bp, Homo sapiens
  misc_feature 533, 601, 624, 667, 672, 676, 678, 693, 714, 715, 717, 719,722, 724, 743, 750, 755, 764, 770, 774, 792, 795, 796, 797,802, 812, 814, 835, 837, 838, 839, 840, 843, 852, 854, 860,864, 877: n = A,T,C or G
aatacgactcactatagggcgaattggagctccaccgcggtggcggccgcgcaaatgcaacgtatcgcccgagagatgaacctgtcggaaaccaccttcgtgctcaagccacgtaacggtggtgatgcgctgatccggattttcaccccggtcaacgaactgccctttgccggccatccgttactgggtacggccattgccctgggcgcgcacaccgataatcaccggctgtacctggaaacccagatgggcaccatcgcttttgaactggagcgtcagaacggcagcgtgatcgccgccagcatggaccagcccataccgacctggacggccctgggccgcgacgccgaattgctcaaggccttgggcatcaagtgaatcgacctttcccatcgagatctatcacaacggcccgcgccatgtgtttgttggtctgccgagtatcgaggccttgtcggccctgcacccagaccatcgtgcgctgtccagcttccacgacatggccatcaactgtttttgccggcgccgggacngcgctggcgcagccggatgttctcaccggcttatggtgtggtccaagatgcggccaccggcttcccgntgccgggccactggcctattcanctggcgccgccatgggcccaggtcgagtttccggccagcaagnggganattntncaaggccgtggaaantacgggccgcctttaacttgnngntntgncnaagggccggaagggcccgnagcccgntcaanttgacaacnccttcnaatnttccggggaaatgggcgncannntccgnaccgggggancnatcggttttattaaccagttnannnncangggcaaaancncttgtngggnaaaaaaggcattntct

SEQ ID NO: 4486 - DNA, 918 bp, Homo sapiens
  misc_feature 97, 106, 156, 166, 193, 208, 225, 244, 246, 251, 283, 299,306, 358, 371, 432, 438, 466, 502, 532, 549, 554, 559, 569,571, 582, 608, 640, 648, 651, 652, 668, 680, 682, 690, 700,706, 707, 712, 713, 714, 716, 720, 722, 725, 727, 736: n = A,T,C or G
  misc_feature 739, 742, 747, 767, 785, 786, 788, 807, 808, 816, 820, 821,826, 828, 839, 842, 845, 857, 860, 862, 868, 900: n = A,T,C or G
tagggcgaattggagctccaccgcggtggcggccgaggtactttttttttttttttttttttttttttcctctaacagacatgtttacactgcaggngacaaagtntgcttgaaacaacaacagctctcatcgaatattcagagagtccactaggngccaggcaangtctgaagctcctgaggacagagcagngtacaaaactacgtntcccgctcttgcagganactcctttctaagcataananagacnataaaattggaggcaggagtgggtggtgggcnatggggtccactttanatacagngataatggaaaaaactttgctgagatggcatttgaactgaaacttgaatganataagacagcaangcctaaggtcatttaaaaattgaatataaagtgtaacgccggccaaaagctgtaatcccancactgngggaggccgaggtgggcagatcacttgngacccaggagttcgagaccagcctggctaacacagngaaactccatctttactaaaaaataccaanggatttagcccagggcntgggngggcncacccctggnanattccccagcntcctccgggaggcttgtaggccaggnaacctttttttttgaaccctgggaaggccggnaggttttncanntgaacccaaaaacttngtggcccattancnttccaaanccttggggcnaacaannggggnnnancccntngtntnacaaaattnaanttntattntaaaatttaaaaattttgcnttggggccttgggggggnnanataacttgggaaccccccnntttttggngggnnggctngnggccaatgganaanttncttttaaatccncangnggccgntgtttccggttaaaatttccccccttgccctncaccctgggtaaaaaaat

SEQ ID NO: 4487 - DNA, 889 bp, Homo sapiens
  misc_feature 427, 434, 461, 523, 525, 566, 572, 576, 578, 602, 615, 632,642, 646, 660, 666, 671, 672, 675, 691, 704, 707, 709, 714,718, 757, 763, 768, 771, 774, 785, 792, 798, 802, 804, 822,826, 837, 838, 839, 844, 855, 856, 862, 881, 885, 888: n = A,T,C or G
ggcgaattggagctccaccgcggtggcggccgcccgggcaggtactccaatctggggccagagcaagaccctatctcagtcaatcaatcaagattttgtgtaaatataatcattattccacaattttaaaaaatcagcttcaaacacagaaatatgaaaatcagaattaggaaggctggtggtcagtcttcacttaaaaataagtttataaagagtccattatctgttagagatatgtattgaagcattttccaataaagtgaatactgggatttgctttaaaatcatctgaggtagggggagcctagaattaactgttaaagctaagtgatgggagttcactaaattattctatttttctgtttgaaatcctccatcatgaaatgtttcattttgtttttaagtaagtttcccaaagatctttatnattaatntactctgtagataaaatgacaggctgnccttaagctgtcaaactctggtggctcaaccaggtatgctccacactgagcccaacagggtngnactcactcaatgcaggcccctttacaggagggcaacacaanaagggncccntncagaaaaaccaatccagagccccnagttctagaccancccagggcaggcaagtngcaaggggangctngggccgggcctaancttctntcacnnttnagggtattcccttaanggtgaaaaaatcnaanantcccnaaantggtcccaaaattcaggaaacctttctttgggccagccngcaacnattgnttnccnccaaggtgggnaaaaccncccccncccngnctttcttgcaacgggggncacnaatacccgagnnnccttnggtcgctcttnngaactnggggaaccccccggcctgnaggnaanc

SEQ ID NO: 4488 - DNA, 869 bp, Homo sapiens
  misc_feature 2, 3, 4, 8, 11, 636, 663, 683, 701, 702, 725, 746, 755, 767,768, 776, 781, 852: n = A,T,C or G
gnnnggcnccntaataccgactcactatagggcgaattggagctccacccgcggtggcggccgaggtaccgcgggagaaatacaaaaaatcagctgggactacaggcgcccgccaccaagcacagctaagttttttatttatagtagagacggggtttcactgtgttagtcaggatggtctcgatctcctgacctcgtgatctgcctgcctcggcctcccaaagtgccgggattacaggcgtgagccaccgcgccgggcctgatttcagtttcttccagcccttcctattgttaacatgggggttgtgttgaagaatataaagttacaaagtcaaggaagtaggaaacatttttacaagtattatgtagccatcttggtggggctgtggtgaggtaggctgcaaatgattctcctatttctttccctgagttcagaacataggaattagattgatagacatcaacatacccgctttattgctgactcatgacaactaatgggaagacatggctcagatgtgcagccacagtgagcttctgaacatttcttctcagactaagctcttacacacagttgcaattgaaagaaagaattgcttgacatggccacaggagcagcagcttcctgcagacatnacagtcaacgcaaactcatgtcactgngggcagacacattgtttgcnaagagactcagagcccanncaagcacactcaatgtgctttgncccaaatttaccccattaggnaaaatcttncctcctcccaannaagaaagngggangaagagccatgagtcctcacatggaaaccttgaaattcaggggaaatgaaggctcaccaaattattttggngccatgggtttaaattt

SEQ ID NO: 4489 - DNA, 872 bp, Homo sapiens
  misc_feature 194, 257, 349, 350, 422, 432, 448, 452, 469, 487, 490, 492,502, 546, 560, 564, 590, 591, 597, 609, 610, 621, 633, 644,646, 648, 676, 678, 679, 681, 690, 702, 703, 707, 709, 711,712, 713, 728, 736, 740, 742, 748, 749, 754, 761, 767: n = A,T,C or G
  misc_feature 768, 779, 780, 788, 789, 793, 798, 806, 807, 813, 814, 815,816, 820, 825, 827, 835, 836, 837, 839, 843, 844, 847, 852,855, 861, 862, 868, 870: n = A,T,C or G
ggagctccaccgcggtggcggccgaggtactctgcgttgaaccactgcttcccgcgtacacattacttgcacaaactgtttttgatttgtcccttactgaaactgtccttatgcttaatcatttttgtctttctttcatatctattagtttctctctaattgctttgatctgtatttttagctacattcactgntattttcctaagcctttcttgtattttgaagtgtccattttgtttccaactctctctcgtttnttgtatattatttttatctttagtttttatatattacgttttatctttagtttttagttttctaatttttaaaattagttccagcatgtggnntatataattttatttttaaacttatgccccccaatgattacttaaaattattcttttctgaggaatttacanggattttaantataaatctctatttntggntatttataagattgatnggtcattaaattaaaggnggntnatttttcatngaaaaaagttagaaaattaaactttttcttttgcttatactatntcaattttggggtncttnctttttaaggcgggcatttttttcannaacccnaaaaatccttannaaaaaaggaancatcccccgggnccatatttaantnanagccatgggggcctgccccatggggganannantcccaaaanaccaggggcttnnaatncnannnccaggagccttaatnttttctanccantnggcaannctggnggccagngggccnngtctctgcgtnngtggccanngggnccccntttatttnnggtggnnnngccnccctntnggaggggnnngncttnnttnccatnganccaagnngggccntntt

SEQ ID NO: 4490 - DNA, 912 bp, Homo sapiens
  misc_feature 313, 424, 432, 436, 445, 470, 541, 556, 574, 589, 597, 606,613, 624, 653, 660, 681, 682, 684, 686, 696, 705, 707, 710,717, 723, 724, 733, 740, 753, 754, 766, 768, 774, 784, 785,791, 793, 794, 795, 799, 808, 812, 820, 821, 838, 849: n = A,T,C or G
  misc_feature 853, 873, 875, 882, 884, 889, 890, 894, 898, 899, 900, 901: n = A,T,C or G
ggcgaattggagctccaccgcggtggcggccggccatgctctcctcctctgccagtctcctccaccactctctaacctgagagcctgtggaacctgcccgtctcccctcctccatcagacacacctgcctaggaaacaggaaaggacctcggaagtcttctaaggagagtcatggcgtattaccaggagccttcagtggagacctccatcatcaagttcaaagaccaggactttaccaccttgcgggatcactgcctgagcatgggccggacgtttaaggatgagacattccctgcagcagattcttccatangccagaagctgctccaggaaaaaacgcctcttcaatgtgatatggaagccgggcacaggatctaccagggggggtccctcctcacttcatcctgggatggatataaagcanaattttgncatnccaacaaanggagggcgccagccttacttggctnggtttcctgggcaggcacttggggaatccttggaccttaaaaaaccccaccagtacccttggggccggttnttagaaacttagatnggatcccccccggggctnggcaagggaatttcnaatattcnaagccttanttcgganaacccgggccnaacctttgaagggggggggccccgggtanccccaancttttggtttccccttttaanngnanggggttaaantttgccccncnttnggggggnaaatcnntggggcaanaaccttnggtttcccttggnngggaaaaattgntntttccngttttacaanntttccncnnnaaanataacaaancccngggggccnnaaaaaggttaaaacccnggggggggccntaantggggggggggcctacctcncnattaaantnggggnngggncctnnnntggcccccttt

SEQ ID NO: 4491 - DNA, 888 bp, Homo sapiens
  misc_feature 241, 342, 383, 408, 421, 433, 453, 480, 490, 496, 507, 517,538, 549, 572, 579, 586, 607, 621, 622, 623, 625, 634, 641,645, 646, 649, 654, 656, 672, 687, 697, 706, 707, 718, 745,759, 783, 785, 787, 797, 798, 810, 819, 821, 834, 837: n = A,T,C or G
  misc_feature 838, 840, 841, 844, 845, 851, 852, 853, 858, 860, 861, 873,876, 883, 887: n = A,T,C or G
ggcgaattggagctccccgcggtggcggccgaggtaccttttgccttttgaattctttattgttttcatttaagaaatgtggaaatctgaaacaaactatattctcaatcatgttagaaaaagtatatgtaatatgtatttttttaaagtccagtggctaagaacttagactgggttttgaaataataatttcctaacacagtttctcagtatgtttcctctagacaagagaaaactctgnaattatgattcttaatttaccctggtaatttcataagaaaaatgattaattactttgagccatcagttataccagataatcatgggtctttatttaaaccncaaaaaatagaaagaaagccgagaagcttaagccttaaatnttaaggccaattccggcctttaggnaaaaatggaatcnggggttaaaaanattttcttttagacacaagncaggcttaacaatcttttctatttttnggtgggggtnacctantttaattattnttttttaagnttcaacctaacctcttggccnccaaccaaatngggaattttggaaggggggaatntacctanctttggnaaaaaaaaaaaagggggggtnttttaagaaggggnnngncccttttanaaaaaangggnnggnttttngnggaaaaattggccaanggggggttttaaaantattaaaatncctcaaagnnaaggggggaangcctgggttttttttttatttggaaanaaaaaacccgcggnggaatttttttaaaggtttttggncnancccccagggnngggggggccggntttttaaangntttcccccttttnaannannggnnttccgnnntttcntnncctttaaaaacnggntttaacnttang

SEQ ID NO: 4492 - DNA, 889 bp, Homo sapiens
  misc_feature 5, 458, 464, 506, 528, 557, 564, 585, 606, 618, 624, 639,660, 665, 680, 684, 687, 705, 707, 714, 719, 720, 739, 741,760, 767, 771, 774, 793, 796, 802, 808, 811, 825, 826, 837,840, 849, 853, 854, 857, 867, 874: n = A,T,C or G
atgantactatagggcgaattggccctctagatgcatgctcgagcggcccgccagtgtgatgggatatctgcagaattcgcccttagcgtggtcgcggccgagaccacttcctgtgttttgttaagtcatgaaaattagatttctgattcatctttatttagcatttcactatgtatgtatttgttcctaatattcaaatcacttgctacttgaaattgaatttctgaagataatactacaatttaaaaatatttatttttgcctatgtaaaattaatagggagactccatctctacaaaaaaaataaaaataaaaagttagctgggtgtagtggcacatgccttatagttctggctactttggaggctgtggtaggaggatcacttgagcctgggcgggtgaggctggaatgagccatgaccatgccactacacccttgagaccctgtcttaaaacnaaaacnaggaacccaaacccctattatggtgctactcagaaatactgntaacattttaccggtttcttcngggccttagcctttctttaatgcacaccncaactgnacttacttaaatacagggtgngttttcccttatttggaaaanacttgggaaccnagaagnggaatttggattttnaaaatttttttaaaaattttngggantattttggggtttancttnttnagttacccattcccaaantntgaaaantttgnnaaacttgaaacccccccangngccttttcctttgggcccntaaaaanggtnttngggtttggggccctttcanaanttttcnaaattnggnattcaacccgtttnngttttaaaatnttncttaaacanaagnnatntggaaaaggnttttttntttgaataaagggct

SEQ ID NO: 4493 - DNA, 1023 bp, Homo sapiens
  misc_feature 1, 4, 6, 10, 11, 12, 14, 15, 17, 18, 22, 23, 24, 25, 26,27, 28, 29, 34, 37, 41, 44, 46, 50, 53, 54, 56, 58, 59,61, 63, 64, 65, 66, 67, 69, 74, 75, 76, 78, 79, 80, 81,82, 83, 84, 85, 86, 87, 88, 89, 92, 100, 101, 102, 103,104, 106: n = A,T,C or G
  misc_feature 107, 110, 129, 134, 137, 140, 488, 507, 534, 541, 585, 597,609, 610, 634, 641, 651, 655, 662, 684, 688, 693, 697, 703,712, 717, 723, 727, 733, 736, 738, 752, 755, 767, 787, 795,796, 810, 812, 819, 821, 824, 829, 832, 833, 837, 838: n = A,T,C or G
  misc_feature 842, 856, 859, 869, 872, 874, 878, 879, 880, 893, 894, 895,896, 898, 912, 915, 927, 928, 933, 939, 942, 949, 983, 986,989, 990, 992, 1000, 1006, 1013, 1018, 1021: n = A,T,C or G
ntantntatnnnannanncttnnnnnnnngtcgnacnttangtnantttnctnnanannanannnnntnaattnnncnnnnnnnnnnnnagngatcatannnnncnncgntcctatagagcatgctcgngcggncgncantgtgatggatatctgcagaattcgcccttagcgtggtcgcggcccgaggtactttttaaacctcaatgccacactcataatgaataaccagtctactatctcttatgaattcctgataattttctctcatttttactcaaaaactgccaaatgaatccaggaccgtctttccaagacttaaactttattttattttgaatactatgagctctaaaatatctagattttgtcagataaaatccatggtgttgagaatctttgtgttaatatttggaattaataaatggaatgaaatctgatattaatataatagaaagactagagtctggcagaagttgggctggattngtgcttttggaccttgggngactttatctaactactccaaaccttnggttttntttcccaaggaaactggaatgacccttttggggcattgttattnagaaattaaaantaatattttgtnngcaccctaccaccaattctaggantttaaanaagtaccttncccnggccggnccgatcgaaagggcgaaaattncagnacacnggcnggccgnttactaagngggantccggnctcnggaacnaancnttggggggaatcanggntcctaagctggnttcccggggtgaaaattgtnaatccacnnacaaattccccacntnatttacnangcnggaanctnnaaanncgtnaatccctggggtgnctnaataggtggnccnanccannnaaaattgggatgnnnntnactggccgcttctncanacggggggaaannttagncgcccngangcatttnaaaaattgcccacctccccggtagaaggttgttngtntanngngacctatnacgctntccatgntgacntgncc

SEQ ID NO: 4494 - DNA, 917 bp, Homo sapiens
  misc_feature 53, 593, 652, 656, 695, 711, 720, 734, 771, 779, 809, 818,823, 829, 831, 835, 838, 843, 860, 866, 871, 874, 886, 895,903, 904, 907, 915, 916: n = A,T,C or G
atcactactatagggcgaatcgggccctctagatgcatgctcgagcggcccgncagtgtgatgggatatctgcagaattcgccctttcgagcggcccgcccgggcaggtaccaagaaaatgtgtccaggtcaagccctaaggctttctgataaacgcattaccaaagtttaccgaaaatatagtgcactaccagagacagtggctcacgcctgtaatcccaacagtctgggattacgaagaggctgaggcaggaggatcacttgaagccaggagttcaaaaccagcctgggcaacacagggagaacccatcttaacaaaaaatttaaaaattagctaggccaggtagtgcatgcctgtagtcccagttacttgggaggccaaagatgggtcactttgagcccaaggagtttgaggctacagtcagctatgatcatgccacttcactcccatctgggcaacagagcaagaccccgtcttctttaaaaaaaaaaagtgccagccgggccgtggtggctcacacctgtaaatcccagcactttgggagggccaaggcggatcacttaaagtcagggagtttgaggatctgcttggncaacatggtggaaacccccatctttacttaaaatttcaaaaaccttaactgggtgtggngggnagatcctttaatcccaacttcttggggaggcttaagcangaaaaattacttgaancccggtggncgtaaggtgcaatnagcccaagatcattcccttggaattcaaccctggggngaaaaaangaaactcctttttaaaaaaacaaaaatttncccggcttnggggnccccancnttangtnccaantttttaagggggttggnggcatnaaaanttntttgaacccaanagggggtgntttcaatnnatnccaaatgnnt

SEQ ID NO: 4495 - DNA, 935 bp, Homo sapiens
  misc_feature 10, 410, 446, 485, 491, 492, 502, 546, 568, 580, 582, 585,606, 630, 638, 640, 644, 656, 658, 666, 684, 688, 694, 696,705, 710, 711, 719, 722, 728, 733, 740, 745, 750, 758, 759,760, 761, 766, 768, 779, 781, 784, 792, 816, 817, 820: n = A,T,C or G
  misc_feature 824, 825, 831, 835, 843, 848, 851, 854, 855, 857, 860, 865,870, 872, 873, 877, 881, 887, 892, 894, 897, 900, 902, 919,929, 930, 933: n = A,T,C or G
aggctactanagggtatacgactcactatagggcgaattgggccctctagatgcatgctcgagcggcccgccagtgtgatggatatctgcagaattcgccctttcgagcggccgcccgggcaggtactcactgccctatgccaggaccacacactagctctcagtttctactccctactttaacaatctcaagatgttaaaatgtctcaaggcaaaatggcttgctatttagcaagtgttactagaagagaaagaaaagcatgggtctgtaagctctccatttccttggtatattggcattttttttctcccagctcttaaacctcattcttagagaatctgctctctcttgagtggtgggcccatgtggttctgtacctcgggccgcgaccacgcttaagggcgaattncagcacactggcgggccgttactagtggatcccganctcgggaccaagcttggcgtaaatcatgggcatagctgntttctnngtgaaaattnttatcccctacaatttccacacaaacataacgaaccggaaaccntaaagtgtaaaagccctggggntgcctaaatgangngancttacctcacaattaaatttngcggtttgcccttccctggccccnttttcaanancggnaaaaccctgttngnggccaagnttgcatttaatagaaatngggnccaacncnccggggganaaggnnggtttggnttnttgggnggccnttttccnttttnattgntaaatgannnncatgncntgggactttcngnttncgggaganggggtttttattaaataaaaaggnnggntaanngggttntccnaaaattanggganaanccnngnaanaaacnttttnannaaanggcnttaaangggcntnaanccnanaaaggcccttttatgtnttttataaanncgnca

SEQ ID NO: 4496 - DNA, 928 bp, Homo sapiens
  misc_feature 23, 24, 25, 39, 515, 559, 584, 603, 618, 681, 696, 701, 714,731, 738, 741, 744, 774, 807, 818, 830, 831, 838, 842, 852,864, 866, 871, 872, 878, 907, 909, 913, 916, 918, 921, 924: n = A,T,C or G
tcactactatagggcgatacgannnctatagggcgaatngggccctctagatgcatgctcgagcggcccgccagtgtgatggatatctgcagaattcgcccttagcgtggtcgcggccgaggtacaaagggttatgcattagggactgagggcgtctatgtttatataaaatagcatttctatagaaattaaaaaacatacccatcactgtgatatgagatgctctgtctccatgtgatgccgaaaatatgtaaggagcttttgggctaaagcgtattcaaatgaatttttttttaagctaaggaatctaatcattgaaagtatctttgtaagtaattcaccaaatatttggccaggagaaaaataaacttttatttaaatgagcatttatttaaagtttgttattaaacttcttgtatttgcttgaagacgaggtctttaaaatcctgcataactttaaaatgtattgtatttcagaattatttgtcagagaaagataacaggggatacgaatntaaattaatatagggatgataattatgatctaaaaccagtaggnaatcatgttatttaaaactttttcntggatattccttttgcttnttgaccctgaagtgnttttatgggatcatttcttcaaccagccttttttcttcaaatgtgtatccagaacctcctttngatttttaaaagcantcccnaatttggggtccncaggactctgggattanacctatnggnggnataaaaatccagccaggatttgggctggcntgttttgggccttcagctttggtaccctgcccnggccggctcgnttcgaaagggcnnaattcanccanacttgcgggncggatactaatngnaaccnnagttcngtacccaaacttggccgtaatataatggncnatanctngnatnccnggcg

SEQ ID NO: 4497 - DNA, 887 bp, Homo sapiens
  misc_feature 2, 466, 499, 647, 648, 650, 651, 666, 684, 737, 745, 746,753, 761, 764, 767, 773, 781, 786, 788, 798, 823, 824, 826,828, 847, 852, 854, 855, 861: n = A,T,C or G
anactactatagggcgaattgggccctctagatgcatgctcgagcggccgccagtgtgatgggatatctgcagaattcgccctttcgagcggcccgcccgggcaggtacacacttgagaggcatcgctgtcctcccttcagctagccatattccgtcaatatatgaaggtttacctattagtatgataaatatcagatatgactttttactaccaaaatcagagcttaatcatcagcattgtttcttgctatttgtttggagaaattgtttcctgaccccaactataagactataggacccagcttatggaatgctgccttatctatcttggctgaactttccacacaaagtgacaatagtgcatgaaaaacaagtttaagtggacaggtttacagactgtttatccctgctttctaaggaatatttttctaatacccattgtatgtatgacaaaatttagactgngggttgctttaatgatatagcatttgatgaggnaaagaagacagctactcaaaaattcaaatttattctgcacttaaggcaaactattggaaaggtttaaacaaagaagagggcattaatccatttggtattttaagaaccaggagctccaatgaaaagcttggattggagaagagcttgnnannaccaaaacccgggtnccttgggccgggaccacncttaagggggaaattccagcccacttgggggccggtacttgggggaaccccanccttgggnnccaaacnttgggggnaanatngggcanagcggttncctgngnggaaaattgnattcccttcaaaattccaaaaaaanncnancccggaaacataaaagggnaaaancnngggggnccaatagggggccaacccccattaat

SEQ ID NO: 4498 - DNA, 897 bp, Homo sapiens
  misc_feature 4, 5, 511, 530, 542, 543, 547, 552, 554, 555, 556, 557, 558,559, 560, 561, 562, 563, 568, 570, 571, 573, 574, 595, 600,617, 633, 638, 643, 649, 651, 655, 658, 665, 668, 670, 671,676, 677, 692, 694, 696, 698, 699, 722, 727, 729: n = A,T,C or G
  misc_feature 733, 735, 759, 761, 768, 779, 784, 799, 822, 824, 850, 852,857, 863, 864, 869, 872, 880, 884, 888, 891, 897: n = A,T,C or G
taannctactatagggcgaattgggccctctagatgcatgctcgagcggcccgccagtgtgatgggatatctgcagaattcgccctttcgagcggccgcccgggcaggtacttttctttatgaatgttataccagaacttaggaggaaaaaatttttgagcatactgaatattaggaattggatatctccctaaattattaaagttcatcttccataaattctgtaaaactgaatgtagtatttccccctcttcccatgcaagtaactgatatcactttagaaaacctgatatgaacattatttgttattgtgcttttatgaagaattctgtctaatcttctcataagaagaaagaattagaacccaaaaatctaattatcagatttagtaagatgtaggcaagatccacctatttttttcatttatgtctttcaaaaatcaatcacattctattattcaccgatccactaaaacagatgtagaattcctattatggtagcaaggcattgntctgttaatggcaataatntaatccactttnnaaanaaaangnnnnnnnnnnaaaangnnannttccttgggccgggaaccccnctaangggcgaattcccaacanactgggcgggcggtantaggnggatnccgacntnggtnccnaaccttnggngnnaacannggcaaagcctggttncntngnngaaaatgttattccgctcccaanttcananaaananaccaacccggaaagcaataaaggngnaaaagcntgggggggccntaaanggggggcccacctcncatttaattggggtggggccccntngccccttttcaaatggggaaaaccgngngtgcncatgtnnttaanaantggccacncccngggnggngggggn

SEQ ID NO: 4499 - DNA, 918 bp, Homo sapiens
  misc_feature 2, 340, 341, 344, 383, 400, 444, 481, 499, 511, 514, 517,533, 537, 545, 551, 570, 579, 584, 589, 595, 602, 604, 621,630, 631, 650, 655, 666, 682, 688, 690, 691, 695, 696, 699,702, 704, 708, 713, 721, 727, 744, 751, 763, 765, 766: n = A,T,C or G
  misc_feature 774, 779, 783, 788, 792, 796, 800, 802, 804, 807, 809, 817,822, 825, 832, 839, 840, 844, 847, 850, 861, 870, 880, 882,883, 884, 886, 889, 891, 892, 898, 901, 904, 905, 906, 907,917, 918: n = A,T,C or G
angactactatagggcgaattgggccctctagatgcatgctcgagcggcccgccagtgtgatgggatatctgcagaattcgccctttcgagcggcccgcccgggcaggtacctactagatgccaaggtcacgaattagggtaggaaaggagctaagaagagcaaaaatgttaaaaggaatccaaatgattttataggagtggtgagatggtggtaggaagagttgggatgacatcaaggtggaagaagtgttttgttttggagacagggacttgctcttttgcccaggctggagtgcatatcacggctcactgcacctcgatctcctaggttcaagcagnngtnctgccccagcctcccaaagcaggccgggaccaccggatntggtgtcaccatagctngcctaatttttaaatttgtttgtatagacagagtctcacttatnttgcccaaagcttgatttggtctcccgacttcctgtncttcaaagttatcttccnatttttggcctncanaantgcttgggatttacanggcnttgaggcncccatncccaccctaggaaaatttntttttacanggccnctttnaaggantttggcntngcttaaataaaagtaanaaaaacctnncttgtgagggttgggaatngcccnactattaaagntttaactttgttaaancctttncnnttcnnaantanangaanggttntttttttngggtgnaaataaaaccccttgantcttttngggacctttaangnnggtttttnttggnaatnaaacntcanttanaaantntngtngntttaaatnaaaantgnttcatanctatgtnnactnccnttnctagatgctcntttaatttnagtttatatntnnntnatntnnaacttnttnttnnnngtgtgtatann

SEQ ID NO: 4500 - DNA, 881 bp, Homo sapiens
  misc_feature 4, 682, 688, 692, 729, 730, 739, 747, 750, 755, 756, 765,768, 769, 777, 788, 794, 795, 809, 815, 817, 822, 829, 834,835, 843, 844, 845, 852, 853, 863, 870, 877: n = A,T,C or G
atcnctcctatagggcgaattggccctctagatgcatgctcgagcggcccgccagtgtgatggatatctgcagaattcgccctttcgagcggccgcccgggcaggtacctagaggaatagtgctgggaggtgcaggatggggtcaggagtaggggcaaatgagggatgtcttttgaaagtgagaagaaagcagagattctttttccaagaaaagattttttaaaatatcaagtaaacatatgatgatgatatcttagatataaacattgtaatacatttgctactctactcataaatcctttatcagacaaactgatgggatttaataatgaccgtctttttgtatttgtctatggtaggcattgtagtttctacatatactgacaattcatttatctttcttggtgttcttttattattaacagttctcagagtaaaacaaaaacaattttgaaaaaatttctttatctcattcaatatcatggcaaatgaaacgtcacaaaaaatggtcataatttacattgagaaacaattacaggttaaaatctaaaaagtggaaaaacttgcaatggtttttatttatataatagtcagtttaggttaaacagctcttaaaactatagtcataactggagtatcttaaccttgcagtattcattaagaggatttccttttatatggngacccntttnatatcttgggcccttgatttcaaggggaattcccctnnttattaatngggggacntantgtgnngtaactacntgnnacaccaanctttggtccgngtggcnnttttttgggctttncctaangnaaaanctttttnctggnntcttttcnnnttcccanntaaatttttnccaaaantaaaaantgtg

SEQ ID NO: 4501 - DNA, 879 bp, Homo sapiens
  misc_feature 511, 526, 566, 575, 594, 618, 655, 678, 714, 731, 743, 748,754, 766, 775, 780, 789, 799, 814, 845, 860, 865, 874, 879: n = A,T,C or G
gtaatacgactcactatagggcgaattgggccctctagatgcatgctcgagcggccgccagtgtgatggatatctgcagaattcgcccttaggcgtggtcgcggccgaggtacgcgggaagagaaaatcacttggtttatagaaggcctttaacattttgtgagtatgtgttttaaaccaaaacccatagataggaagagccgacagggagctggaaactgcaataagctttcttctaactagcaaacgcagttgacagacatctttttatagacgtatctgtgattgcacgctgtttttaggcttgataattttttcaacaaggaaaaacttttcttcaatttgaaaaagctgtttacagtaaaatggcaaagtatgagaagacagaaagccatcctgctcattctaaagctaaattgggccacatttcccttaaagtatagacaacagcagcagtggaacacaagttaaatgtgtgtttagtgaaagaaaagtttttgaatactgccgncacaataatttttcnaaccttggaattcttttattgagaaaagtgaccaaatcantggagagangggaaagggaaaagaaaanttattggaattttgcaaaaatttnttaaacaccttggatttcccgaagttaaaagaattgnattttgaaaggcccgggccccangggctcactccttttaattcccaacatttttggganggctcaaggccgggccnaattaaaagggnggccncggganttttggaaaacnagctttggnccaanattgcttgnaaaccctgtntttttcttaaaaatnccaaaaaattttcctttgggccttgggggtnccctgcccgggcggnccctncaaaagggncaaan

SEQ ID NO: 4502 - DNA, 890 bp, Homo sapiens
  misc_feature 5, 14, 17, 20, 32, 534, 608, 659, 719, 724, 734, 735, 742,764, 772, 780, 784, 798, 800, 808, 830, 839, 876: n = A,T,C or G
gaaanttgagaccnttnacnactcactatagngcgaattgggccctctagatgcatgctcgagcggccgccagtgtgatggatatctgcagaattcgccctttcgagcggccgcccgggcaggtacagacggtcagaaggaaagaaggagagggattgcctgctgcctccccgcgtgcacacacgagagtgggtgctcccaccagctttcagggggctttcttcacgaatgtgagcactgattttgggagatctgcagtggaaagtcaagtcatgaatattttttataaagagagaaatgatgtaattttatcacagaagatatttcagatgtatttttccattttaaaaattcattggcagtgctcatacaagagaattacttgagctgaaaatgactctgtccagtttcttcctatttcgttaatgattttgcagtcactgaattctttctaaaagttgtataacccagataaagtcaggcctcctggaagccagcttcagcccagagacatacgaaaagaagcaccaaatntcactggaaaaccaatttaaatttatactgaataatctcattcataaaccacagcacaacattctgaagcctgncccttccaaaatctataagctctctgccactctgatgacttttcattctgnctcttttttctaccccaaaaaatctctcaactctcttcaatctttctgcaaaaacttttnccttnctggcttaannctaactnttgggcttttcaagtgcccccnctgtattntatttctnttgncccctcaatttaancntttgcttnttttcccgattgtcaattccanaaccggccncaaattttttcccacttaaccttctttaacccctttncccaaattttggat

SEQ ID NO: 4503 - DNA, 873 bp, Homo sapiens
  misc_feature 457, 669, 768, 808, 849, 852, 857, 864, 865, 870: n = A,T,C or G
ctatagggcgaattgggccctctagatgcatgctcgagcggccgccagtgtgatggatatctgcagaattcgcccttagcgtggtcgcggccgaggtacactctctgccttagaactaccatcttttgcactacattccagataaaggattttgttactacattctaggtaaaggatattgttactatcctcaagttacacagaaaacactcaaggatgtaaaatcaatatttatctcaaatttgttgactgctactgctatcttttttgaagaattaaaagataaattaaaatttctaaaaatatgccatatatcaataatttacaatagcttgatcagccaaaaaatccaccttgagcttaaagctagagtttgatagggtgatccttactctcctaatttaaatatcactgtatattaagttttacaatatacagtgtatattgtgtatattgngtatacaatatacagtggatattctttttccaaacacactttattaataattacaaatcacagggaagtaactgcacaactttctactagggtgtttattaagttactggaaaaagtttaattacaaaaaacgtataggtccctagattttgaatggtaaaccacacataccttgttagctggctaaaagaatatatttggaatatattttnggattttgcaatggttgccccaaaactaatgttagggaagttaccctaaaaaaattaaaaataatttttcataaattaaattttggcattaaaaaattntaaacctggaaccaatcttaaatggcggatttattttatnaaaaaattttaatatttctttttgcccctggaaaaaccttnttnttttntaattanncctgnatt

SEQ ID NO: 4504 - DNA, 1226 bp, Homo sapiens
  misc_feature 4, 8, 10, 12, 14, 23, 24, 25, 26, 29, 30, 35, 36, 37, 42,43, 44, 55, 57, 60, 65, 68, 69, 71, 72, 76, 77, 78, 82,83, 85, 88, 89, 94, 96, 105, 123, 133, 224, 419, 462, 472,484, 507, 513, 516, 522, 524, 529, 552, 553, 571, 592, 598: n = A,T,C or G
  misc_feature 599, 601, 604, 626, 634, 646, 650, 653, 658, 673, 680, 682,686, 702, 708, 713, 718, 721, 722, 727, 735, 738, 744, 745,770, 773, 788, 794, 797, 802, 817, 827, 834, 836, 843, 850,865, 877, 890, 894, 896, 917, 918, 950, 953, 957, 961: n = A,T,C or G
  misc_feature 962, 966, 981, 982, 983, 988, 993, 1010, 1012, 1016, 1017,1035, 1051, 1052, 1054, 1056, 1085, 1088, 1115, 1119, 1121,1122, 1132, 1136, 1142, 1143, 1145, 1154, 1159, 1163, 1167,1168, 1176, 1179, 1181, 1182, 1184, 1186, 1194, 1202: n = A,T,C or G
  misc_feature 1204, 1212, 1213, 1215, 1220, 1225: n = A,T,C or G
cccncctncntncnaattaaaannnngtnntctcnnntaaannnaaaatctcagnantantcatnttnncnntgcnnnatannanaanngcacnanaaagaaaanttgaaaccttttacgacncactatattncgaatcgggccctctacatgcatgctcgagcggccgccagtgtgatggatatctgcagaattcgccctttcgagcggccgcccgggcaggnactcacagctgcatcacactgaatatcatctccctgcactgccatttcatttgagcagggcgttgcctgtcaagaacattcatatcttttgataaacagtgcattttttccctgatagtctgtatgggacagcctccttgtttgcatctgaagggacagggactttcaggacctcctgcttgtggtccaccaaanggaatcaccattcaaaactttcttcagcaagggtgttatgggncctttctcangttttgccctancgatcccatttgagggcaaaaanggtttnccnttcttntncaaantacaacccccttctgctttttannccaagggggggaaccctncccccaactgggacccttcgncctaanngnggnatcctaaattttggggtccccntgaaaccngggttaagtaancccnttncgggnccccgggggaacccnaccgccntnaaanggggccggaaattttncccaanccacnacctnggnncgggncccggttnacntaaggnnggggatcccccggaggccttcgggntanccccaaaagcctttnggggcngtnaaatncaattgggggacaanaagcccttgnttttccntnggggggnaaaaaanttggtttaattcccngcttccaaaaantttccccccaccnaaanantaacgaagccccgggaaaagnnattaaaaagggttaaaaagccccttggggggnggncccnaaanngganggggaggcctaaccnnnaaaanttaanatggggggttggggctncncttnnccccgggttttcccaaantgggggaaaaacccgnntntnggccccaacttggcaattaaaaatgaaantcnggcccaacccccccccggggaaaaaangccngnnttggccgtantttnggggcnncnttttccccngtttncctncggnnaaaaatgnaananngntnggcccctncggatcantnatcgggtnngncgggnaaaang

SEQ ID NO: 4505 - DNA, 892 bp, Homo sapiens
  misc_feature 9, 18, 59, 60, 83, 608, 642, 652, 683, 715, 738, 762, 764,785, 786, 788, 809, 811, 812, 814, 819, 838, 857, 871, 890: n = A,T,C or G
gaaaattanaacttttangacccactatatttcgaattgggccctctagatgcatgctnnagcggccgccagtgtgatggatntctgcagaattcgccctttcgagcggccgcccgggcaggtacaccactatcgctggctaatttttgtattttttccagagacgaggtctcactgtctcactgagctcaggctggtctcaaattcctgagctcaagagatttaccagtctcagccttccaaagtgctaggattacaggcatgagacactgtgcctggccagtaattttgttttattatattaaggtgaggtttataccaccttcttctgattacagaagtaatacatgctcattatgtaacactgaaaatgtaagcagtataaaaaagaaaataaaaaagaatatgaaaatcactagtggtcccattgtctactgatacactatgtgctgcttcctaatctttacttcctctccctccatgtgtgtctttgtgtgtttgtgtgtgtgtctgtctgtgtggtctttttcttggccataggacaatagctgacaattatagctcccctaccagtggttgagcattggtgttaagcaattaacaaaagnggattttatttaactcctaccagaaaacctaatnaagggggaanggcagttttaattaaacaagaatttccccanatgaaaaagactggggaccttgacttgagggnccacaattttttatattaacagncatttggtatttttaactttcaananacctttaacaaaaagtaaggnngntcctgggaaaaaaacttgggncnngntaagnctataaaaaaaaaaataangcatttttttggggggaanaaataagttttttncaaaagcatgccccgggangg

SEQ ID NO: 4506 - DNA, 920 bp, Homo sapiens
  misc_feature 499, 592, 613, 634, 641, 667, 678, 691, 700, 702, 712, 714,716, 724, 728, 734, 747, 759, 762, 780, 794, 795, 814, 826,829, 830, 841, 842, 862, 877, 878, 889, 897, 900, 902, 906,909, 913: n = A,T,C or G
gactactatagggcgaattgggccctctagatgcatgctcgagcggccgccagtgtgatggatatctgcagaattcgcccttagcgtggtcgcggccgaggtactgatggcaaggttactcaaatatttatcaagcgtctcaaagaagaagactgatataaccttgcatgtttgaatacaaaaattaatatttagttactgtccactctcttatttccaggtagagggactctctgaccctcactcactcctctcctaatcagactggttggttttagagaaggaaatgaacatgcctagatcaaccccttcctctcccttttttcttgggatctgcacactccgcagagagcacgaattctcctctccacccagatccataaatgttcaggatctgctccctgctggaaatgccacagttgggtgggggtatatttgattcgggggctactggcaagtccacagtttccccacaattaaaactactttctcaaacaanactgccattttcctaactcctggcttgtcaatcttgtgggggagggaaaaagtgaaagtgcaacctaatgaagtctttttaaaaatttcccantaggaaaccttcttatttagnaaaatgggtgggcccgggccnttggttngcctcaaaaactggttaatcccccanccccttttttnggaagggcccaangccaaggtngnattcaacccnangntcaaaggnaganacaaanaaaccattcctantcccaaccaccnggngaaaaaccccctgttttnttacttaaaaaaannccaaaaaaaacttttcccncggccgttgggnggnngggcaccttgnnagttccccaacaacttcaanggaaggcttaaggcnnggaaaaattgnctttaaanccnangaanggngggngctttgg

SEQ ID NO: 4507 - DNA, 870 bp, Homo sapiens
  misc_feature 201, 347, 351, 354, 362, 456, 457, 474, 521, 534, 539, 546,560, 562, 574, 580, 588, 609, 622, 627, 640, 662, 680, 683,684, 688, 691, 694, 696, 697, 702, 716, 747, 766, 789, 792,796, 800, 804, 815, 819, 829, 837, 844, 860, 865: n = A,T,C or G
gactcactatagggcgaattgggccctctagatgcatgctcgagcggccgccagtgtgatggatatctgcagaattcgcccttagcgtggtcgcggccgaggtaccaaagagattaaggaaaaaatgcaggctgtgaatgatggggcccctgtgttctttccccacttggctctcacagtcatggcaaaaggccttttatncttcagtttaaaactcaaaactttctttggaaagcttgacttattctaaagatatcgcaggacttaacccaacaaacagccaggccgttgcaggcccaatcgtgatgccagcgtgctccaccctattaaaaataagcagatcagcntatntcngagaaaancctttaacatggaagattaacacagaaaaaaaaactatcttgaagtaaataaagcgggagtggaagacgacagtacctgcccgggcggccgctnnaaagggcgaattccagnacactggcggccgttactagtggatccgagctcggtaccaagcttgngcctaatcatggncatanctgtttnctgtgtgaaaaagntntccgctcacaanttccanacaacatncgagcccggaagcataaaatnttaaagcctgggngggcnctaatgagtggancttacttaacattaatttgcgnttgcgcttcacttgcccngcnnttcncantangnnaaaancgggccctgccaancttcatttaaattaaatccgcccaacgcgcnggggtagaggggggtttgngtaattggggcgcttttttcccnttncttnttancttnacttggttggncctncggatccttngggttgcngggcgangcgggtattaaggttnacttnaaagg

SEQ ID NO: 4508 - DNA, 881 bp, Homo sapiens
  misc_feature 112, 126, 344, 352, 357, 360, 369, 378, 413, 423, 433, 440,446, 466, 469, 470, 477, 496, 505, 518, 519, 542, 553, 554,559, 573, 575, 601, 612, 613, 615, 617, 623, 625, 639, 640,642, 649, 651, 663, 672, 677, 678, 687, 694, 705, 706: n = A,T,C or G
  misc_feature 717, 718, 719, 726, 729, 734, 735, 737, 743, 744, 752, 755,768, 769, 771, 772, 773, 775, 777, 783, 785, 787, 788, 789,790, 792, 793, 794, 803, 816, 817, 818, 819, 820, 823, 832,835, 838, 841, 844, 848, 849, 854, 856, 857, 868, 872: n = A,T,C or G
  misc_feature 873, 875: n = A,T,C or G
gcgaattgggccctctagatgcatgctcgagcggccgccagtgtgatggatatctgcagaattcgcccttagcgtggtcgcggccgaggtacactggaggtagggagctcanggatggcagctcanatccggaacaattacaattcaatacttgggcatcagcactctaaatcccgaggagctagccaggagtgaagtgaggaaagagcaaatcaatttaaacattgctaaataccaaagacaagctagctatttcttactttgcatgaggcttgcccacgtcctttcttgtaaattgtctggaccatctctggtcatttggtggcatcagcacgacagagatntaaccganatgcntanagccattcnaagttgtantgacttggcggaaacaaaatgtgactaagttcttngaaaaccttnaatcactganttgaagnccgaancatttagatgggaacttttnttnnataaaanaacttggcagacaatgctnttcttagcnaaaattgcaaaannttaatttggcaaaactacaattnggataattggnngaccncctcctttccgccncncttctgttttcccccccccaaacccntttccgccccnncncncttttntngccccccttttcgnncnctgttcncnaacacctttaanggccgaaanttccnnaaaccaacnttggggnggggcggtttnntttaggggggnnncccccanctnccggnnancccaannttttgggngtnaaaacttggggcnntnnncntntttttncntnnnngnnngaaaatttnggttccccccccnnnnnaanttttccccncanaanaanaangggnntgggngnngggtttaaaangttnnanaccccc

SEQ ID NO: 4509 - DNA, 910 bp, Homo sapiens
  misc_feature 8, 61, 64, 66, 68, 80, 154, 248, 265, 288, 376, 385, 402,413, 414, 452, 459, 461, 465, 472, 480, 487, 495, 505, 519,541, 579, 582, 590, 591, 595, 598, 607, 612, 641, 645, 646,648, 661, 662, 663, 666, 668, 671, 684, 686, 687, 694: n = A,T,C or G
  misc_feature 696, 699, 700, 704, 707, 725, 728, 729, 730, 733, 747, 748,749, 750, 753, 758, 766, 770, 771, 774, 799, 802, 804, 816,820, 830, 834, 835, 836, 841, 842, 843, 844, 848, 849, 852,871, 873, 874, 875, 882, 892, 905, 908: n = A,T,C or G
gggaaganttttacccttactatagggcgaattgtgccctctagatgcatgctcgagcggncgncngngtgatggatatntgcataattcgcccttagcgtggtcgcggccgaggtactttttaaaacaacctctccaacataatatcaaaaangtaaagtattctcttaccttgcatatctacatcaaagaaaaccataaggaaaagaaactacagatgtgcacgcagttagtccaagatgcttaanaatgtcacatcatgttnaacctgagtcaacctaacagtanggctgtaaaaacaactctacttcctgatttgttactgcattcagctaatgtattgagggcctataatgactcagatcctaaaaatatnaggaataangaagcaaagaacccttncctaagctagnncaggagacctatcagtaaagacatgactgtaacacagnatggatntngttnactggtnttaggtancaacaangggttttnaaagaaaggnttatcggtttccanataaaaatttgatttttaaatnttcccatgtttatttttaaaaaaaaattttctggggcnttnttaactcnnaatnttntttttaagnctttnaagcttatcttaatttttttggcaacaantttnncnaaaaaattttttnnnggntnttngtttccgaaaccntnntaacccnanggnntccnggnaatttttaataattcttnttnnnatnccaaaaaatggacnnnnaanatggnaaaaatcntttnnttntttttaaaaaaaataaaaaagggcntcncnaaattttttttnttgngggggggaancccnnnaaaannnntggnnaanccccggggaaaatgggggntnnntttgggnaaaaaaaaanaaaattttttggnccncg

SEQ ID NO: 4510 - DNA, 795 bp, Homo sapiens
  misc_feature 518, 639, 665, 666, 668, 674, 677, 698, 711, 720, 723, 734,750, 752, 767, 769, 779, 780, 781, 784, 789, 793, 794: n = A,T,C or G
cgactcactatagggcgaattgggccctctagatgcatgctcgagcggccgccagtgtgatggatatctgcagaattcgccctttcgagcggccgcccgggcaggtactttgctacacggccgggggccattgagactgtcatggaagacttgaaaggtcacgtagctgagacttctggagagaccattcaaggcttctggctcttgacaaagatagaccactggaacaatgagaaggagagaattctactggtcacagacaagactctcttgatctgcaaatacgacttcatcatgctgagttgtgtgcagctgcagcggattcctctgagcgctgtctatcgcatctgcctgggcaagttcaccttccctgggatgtccctggacaagagacaaggagaaggccttaggatctactgggggagtccggaggagcagtctcttctgtcccgctggaacccatggtccactgaagttccttatgctgctttcactgagcatcctatgaaatacaccangtgagaaattccttgaaatttgcaagttgtctgggttcatgtctaagcttgttccagcttatccagaaatgcccacaaagaattcaactggatcttggaagaggaaaagaaaactggtggngtttaactgaacccattttgattggnnanctacanaanggctggatggtcattcatttnggaaaccgccaancaaaacttnggntttttcccttncccccggggggaggantngggttttttggaaanantttttttggnnnccnccggncccnnc

SEQ ID NO: 4511 - DNA, 798 bp, Homo sapiens
  misc_feature 549, 602, 617, 646, 650, 659, 676, 693, 717, 720, 725, 727,729, 739, 751, 759, 763, 768, 769, 780, 782, 795: n = A,T,C or G
gactcctatagggcgaattgggccctctagatgcatgctcgagcggccgccagtgtgatggatatctgcagaattcgccctttcgagcggccgcccgggcaggtacttgttaaagtctagaatggtggtaggtgcctacatatattatttaattcttataacaatgcccaaaagggtcattccagtttcttggaaagaaaaccaaggtttggagtagttagataagttacccaaggtccgaagcacaaatccagcccacttctgccagactctagtctttctattatattaatatcagtatttcattccatttattaattccaaatattaacacaaagattctcaacaccatggattttatctgacaaaatctagatattttagagctcatagtattcaaaataaaataaagtttaagtcttggaaagacggtcctggattcatttggcagtttttgggtaaaaatgagagaaaattatcaggaattcataagagatagtagactggttattcattatgagtgtggcattgaggtttaaaaagtacctnggccgcgaccacgctaagggcgaattccagcacactggcggccgttactagtngatccgagctcggtnccaagccttgggggtaatcatgggcatancttntttccttgngtgaaaatttgtttttnccctccacaaatttccnaccaaacatttcggagcccggganccnttaangngnttaaaacccncgggggggcccncattgggngggnggccnnccccccatttnanagggggggggggnccc

SEQ ID NO: 4512 - DNA, 845 bp, Homo sapiens
  misc_feature 420, 424, 495, 533, 543, 553, 565, 569, 574, 602, 606, 612,622, 626, 644, 650, 655, 664, 667, 668, 674, 683, 687, 700,709, 713, 718, 720, 725, 731, 732, 740, 741, 743, 745, 747,749, 764, 765, 770, 778, 779, 780, 783, 790, 791, 792: n = A,T,C or G
  misc_feature 796, 817, 819, 820, 821, 822, 823, 824, 825, 829, 834, 835,836, 843, 844, 845: n = A,T,C or G
ggcgaattgggccctctagatgcatgctcgagcggccgccagtgtgatggatatctgcagaattcgccctttcgagcggccgcccgggcaggtacgcgggtcgtcttcagatggagcttgtgttgtgagctctggagagggggttgtctttctacactgcatctcccatccttcctaacgagtcacggagctgtcgactccgccttcttggctttagttaacaggttcttcttgtgtagtcacatcaacgtcgggtcacatgggaatgtggtaaagcctcattactgtagagttcagacatgatcacttaaaaagagctttattgggccgggccgcggtggcttactcctataatcccagcactttggggggccgaggcaggcaagatcacctgaggtcaggagttcgagaccagcctgnctanacatggcaaaaccctatctcttctaaaaatacaaaaaataagccaagggcgttgggtggccggggcacctngtaattcccacctactcaggagggcctgaaggcacaangaattgcgtnaacctgggangtgggaagtttngcanttgancttaaattggcaccggttgcaactttcnatgnttgggnaaaccaaaangtgnaggacttccttttttttntaaaanacttnccttttaanagnnaaaaanattgtttcntttngcccgggggcccncccctatangggncgaanangtttnaaatannaaaagggnngngntngnttttggttaatgggnncaccnaattcctnnnaanaatgggnnngggngccctttttcttgggttttgngnnnnnnnaacntggannntgggggnnn

SEQ ID NO: 4513 - DNA, 833 bp, Homo sapiens
  misc_feature 425, 430, 484, 503, 559, 567, 603, 615, 626, 633, 638, 647,655, 659, 667, 670, 672, 675, 677, 679, 692, 694, 695, 702,711, 719, 724, 731, 745, 750, 755, 756, 758, 767, 774, 776,783, 785, 789, 790, 800, 803, 815, 816, 822, 828: n = A,T,C or G
ggcgaattgggccctctagatgcatgctcgagcggccgccagtgtgatggatatctgcagaattcgcccttagcgtggtcgcggccgaggtacctgtaaatctctcagctaagttaagctataaatttgattaggttgacttgggcaaatgcaccataaagtcctttccagagaaggagttcacttttcataggttctacttgaaggaattgtccaagaaggtttactgtataaaggaaattgaacacagaaggaatgaaaagtaaaaattaaacctaaaatttgcagaagaaaacactacagaaaatttttgtgacctggggtttggcaaagatttcttaaatatgacaccagaagcacagtctataatgaaccgtattagtttattgggttaatcaaaatgtaaaacttctgctcttcaaaanacagnattaagagaataaaaagagaaaccacagattgataatcttttgtaagccatgtntctgatcaaggacatgtanaaatatataaagaactctggaaagctcaatagtaagaaaaaccaaattggctgggntgcgggangctcattgccctgtaatcccccagccctttggggangcctgaaggccngggtgggatcnattgaangtccngggaggttncaaggaancaanccctgggnccnangantngntgtaaaacccccntnntttttcnttaaaaatngccaaaantttancttgggnccgttggttggggnaagcnccctnntnaaccccccnaacttgntnggggagngnttgnngccaaaaaanttngcttttaacctnnggggangggcgnagggg

SEQ ID NO: 4514 - DNA, 616 bp, Homo sapiens
  misc_feature 3, 4, 5, 6, 8, 564: n = A,T,C or G
ggnnnngnttgaatacgactcactatagggcgaattgggccctctagatgcatgctcgagcggccgccagtgtgatggatatctgcagaattcgcccttagcgtggtcgcggccgaggtactatttttttcagttgtaaaaagtaaaagagctaggttttatgaacaggatgggaagccagttatattccagttatattcgatttctggttttaataaactaaagagaaaagtgctttttaggcaaaaatcctgagatttctaataacagactgtttttttcatcatcttattaaataacctattgcacactgattacatttattcttactattttctttattttttcctggatcattttcacaattttatttttcacagcattctcaatacttttcttcatgtttcattaatgttctgtatatagtccgaattctgtagcaacctctttagaagctctttattaatacctagctgaaatataaaaaatatgtaagtgtaaaactactcgattttatgggagctcgttttgcttagtggacttttaaaacttcacccgtttggnatatttctggattaagagggaaaagttaaaacatttaaaggtaaattcttat

SEQ ID NO: 4515 - DNA, 620 bp, Homo sapiens
  misc_feature 10, 11, 16, 24, 28, 29, 34, 81, 90, 169, 268, 309, 397, 564: n = A,T,C or G
ggccttactnnttgantcaacgcntatnntgtgnattgggccctggtacatgcatgctcgagcggccgccagtgtgatggntatctgcanaattcgcccttcgagcggccgcccgggcaggtactggggaaaaaaatcgtggaattttggagacaaacaaatccacgtntaaatcctcactttgctacttacttactaatattctacccagggcaggttacttaatgtctctgagactgaatttttcttcatttaaaatggataaatnactctttgtcttaaaagcttgttttgagataaataactttngatggtatgtaggtgtgtttcaacaagagtaacagtagttttcattttttaagtgtcttatagatgcttgggacagggacagagggtntacctcggccgcgaccacgctaagggcgaattccagcacactggcggcccgttactagtggatccgagctcggtaccaagcttggcgtaatcatggtcatagctgtttcctgtgtgaaaattggtatcccgctccaattccacacaacatacgagccggaaagccantaaagtgtaaaagccctggggtgcctaatgagtgagctaactcaccattaatttgc

SEQ ID NO: 4516 - DNA, 610 bp, Homo sapiens
  misc_feature 2, 3, 14, 534, 564, 609: n = A,T,C or G
gnntttttgaattngactcctatagggcgaattgggccctctagatgcatgctcgagcggccgccagtgtgatggatatctgcagaattcgccctttcgagcggcccccgggcaggtacgaagtgtgtttcagagtggcgaggaagggcaagttgttaagattggttgttgaattagtttctgtttgatgttaaagagaacatagagtaaatgataatccctcgaaagtggagatcttggcaggctggcgcctggtggtatagtagaaatctgagaaagggggaggatattaagtcagttttatcaggtaaagttgaatgaaataatcaagtttaagtgcgtcttgggtatttgcaaagatgtatagattaaggctaaaagggttggagaaatagatttgggagttacctatgattttttttggttattctgctctcaggattgaaaactaaagaatctcagaactgcatttctaattagtgcccataaaattctttattgatgccaagtttttggtttttccttgtaaattgnggtaggtagaattcttaatgacctccagtngacccactaccagtgtatattgcataatccatgggactgtgtgant

SEQ ID NO: 4517 - DNA, 612 bp, Homo sapiens
  misc_feature 3, 4, 5, 6, 8, 372, 504, 612: n = A,T,C or G
ggnnnngnttgaatcgactcactatagggcgaattgggccctctagatgcatgctcgagcggccgccagtgtgatggatatctgcagaattcgccctttcgagcggccgcccgggcaggtacttttaatacaccatcctggtggatctggcgcaagggaactccacacagaaaaacactgccctcacgttatgaaaggattcaacattattctctcttttgaaagataattggcttcaaagaataattgaaagttagaaacttgggtcttttacagaaccaggtaatatctctactactcttttgggaattagtcttgaactgcagccactgtgaaagcttctggtgttatttaaattaattcttgtattgntattaaactttccacatggttttgtttatctcctcaactagggtttgtgttcctgagaggcaagaactatgcttatatatttttaaaaaatattttcaacattatttagcactcttattaaatatttattangccctcaataaacatactgtaattttggttaaaaagcacctaaattgctttaaaatccaccttaacttctgaggcatgaagccacctctcttcgtggatattgcttcn

SEQ ID NO: 4518 - DNA, 687 bp, Homo sapiens
  misc_feature 444, 447, 481, 493, 506, 509, 511, 515, 516, 519, 526, 540,545, 548, 557, 564, 569, 581, 588, 589, 608, 627, 645, 656,660, 661, 667, 669, 670, 674, 675, 682, 687: n = A,T,C or G
actcactatagggcgaattgggccctctagatgcatgctcgagcggccgccagtgtgatggatatctgcagaattcgcccttagcgtggtcgcggccgaggtacctgcaaaggcactgaggtgggagggagcatgccaatgtagggaaatgaagaaacccagtgtgtatgagccaagctgaataaaacatgagaagaagctggagaatgagagagaccagtccccaagctctcaaggagcaagaggaagccttttcggcatttgaagtggagggatggcatgatctcgtgccgtagtttttaaaagaaccactcaggctactcttttgaagaatattgtggggaggccagagtagatgcctataggacttatacagaaggttaaaggcagttgataaagagtattaaacaatgatgggtaagccttacctcaacatgctttttntanatttataagggcctaagaaaaggtgggcccaaangccccaataatnacccaatttaatnggnancaannggnaataccntttttttgctttcntgggnatnccggtgggnaaaaatnaaatnttttgtggcccnccaccanncttggagttgggacccctnccccaagtgggaccttttnaaataacttggggggaancctcttgggcncaannactttnannaaannattgaanaaaan

SEQ ID NO: 4519 - DNA, 670 bp, Homo sapiens
  misc_feature 388, 403, 416, 419, 452, 467, 484, 486, 494, 514, 519, 524,531, 552, 561, 562, 578, 595, 596, 614, 632, 641, 649, 663,664, 668: n = A,T,C or G
gactcctatagggccgaattgggccctctagatgcatgctcgagcggccgccagtgtgatggatatctgcagaattcgcccttagcgtggtcgcggccgaggtacactgagcctagaatatcttgtggggtcaaaaggtaaggcagtgctcaaaaaacaacagtaaaatggcaaaaatacatagaacccaacttgaagggcatcctaatgtaaaatctagaaaaatctgagcacaaaatgtattatagtcatgggttataaccaatataatgagaatccaagagtccagactgatttttaaaaaattgcattttttcaatataaaagaaaatatcttccttatagtaacattttaattgacaaatgtagaagtaatgatggaaagtangaaaatcactggttnggcacacactggngtnataactggttttcaggcaagaaattatcccacnaatgcctaaaattangtttgggtggaaaagtntngattgaangaaccaaaggattcctttancattnagggnccaaaangcattcttccttgaccaaagnatacctttnntttcattttcccccanggaaaaaaaaaaaattnnggaaaccttttcccgttngaagaaaatcttggccangaccttcanctttaatncaaagtggttgggnnaggnat

SEQ ID NO: 4520 - DNA, 907 bp, Homo sapiens
  misc_feature 491, 515, 539, 569, 592, 593, 629, 639, 647, 649, 650, 657,692, 717, 736, 741, 762, 768, 795, 810, 811, 825, 837, 856,861, 865, 866, 874, 885, 901: n = A,T,C or G
cgactcactatagggcgaattgggccctctagatgcatgctcgagcggccgccagtgtgatggatatctgcagaattcgcccttagcgtggtcgcggccgaggtacgcgggaagagaaaatcacttggtttatagaaggcctttaacattttgtgagtatgtgttttaaaccaaaacccatagataggaagagccgacagggagctggaaactgcaataagctttcttctaactagcaaacgcagttgacagacatctttttatagacgtatctgtgattgcacgctgtttttaggcttgataattttttcaacaaggaaaaacttttcttcaatttgaaaaagctgtttacagtaaaatggcaaagtatgagaagacagaaagccatcctgctcattctaaagctaaattgggccacatttcccttaaagtatagacaaccagcagcagttggaacacagttaagttgtgtgtttagtggaaagaaaggntttttgaatactgccgccccaaanaatttttcaaaacctttgaattcntttattggagaaagggaccaatcaattganaagaaggggaaaaggggaaaaannaaaaattaaatttgaatttggcaaaatttttctttnaaccaacctngggatttncnngaagttnaaaagaaatgaatttttttaagggccccggccgcnaatgggcctcacttcctttttattnccaagcattttttgggganggctnaagggccgggccagaatttcnagggangggccaaggaatttttggaaaaccaancttgggccaaaaatnncttgaaaacccctnttttttttcttnaaaattccaaaaaaatttnctttnggcnntggggggntccctggcccngggcggggcccttttnaaaagg

SEQ ID NO: 4521 - DNA, 680 bp, Homo sapiens
  misc_feature 198, 229, 285, 299, 339, 378, 381, 385, 389, 395, 399, 404,406, 408, 412, 413, 418, 421, 426, 435, 438, 440, 441, 442,444, 460, 472, 473, 474, 476, 480, 483, 484, 489, 493, 495,500, 502, 506, 508, 514, 519, 523, 524, 526, 536, 538: n = A,T,C or G
  misc_feature 544, 545, 546, 552, 553, 554, 556, 565, 571, 580, 582, 584,588, 592, 594, 596, 602, 608, 610, 613, 616, 619, 623, 626,630, 632, 633, 635, 637, 638, 640, 641, 643, 654, 659, 661,662, 665, 666, 667, 670, 671, 673, 675, 679: n = A,T,C or G
ctcctatagggcgaattgggccctctagatgcatgctcgagcggccgccagtgtgatggatatctgcagaattcgcccttagcgtggtcgcggccgaggactatgaattttaaaattatttgcttagacagaatatgtggacatacaaatgatgaatgtgataattgtcatacatatatatttatcttagacacttantcaaaacatgtggtttttggttatgagttanacactgtcactttacctggaagatacaaagtaattgggtcatagacctctcaaatnattggaacacttanattttttcagggggaatgacatggaaggggagcccagggngtcttatgattaaggtaaaatatttgttttgggtggctnaancctncccnaaaagnggcntgggnantnacanngctgnggngcccnccttccctnggncnnntnttattttgtttcctcntgggggcccccnnncnttgngcnnttttngacnancaatntntcangngttttntgctncctnntntttgtcctanangatccnnnaccccnnncnccggagggnttttanatccctttnanantatntttnancngggganaaaagngntanctntgngggnggncccncnntncnntnncnccccagagggnagaantnnggnnntcnncncngttnt

SEQ ID NO: 4522 - DNA, 637 bp, Homo sapiens
  misc_feature 382, 406, 457, 462, 470, 476, 486, 500, 531, 535, 546, 555,556, 572, 578, 583, 589, 593, 635, 637: n = A,T,C or G
gactcactatagggccgaattgggccctctagatgcatgctcgagcggccgccagtgtgatggatatctgcagaattcgccctttcgagcggccgcccgggcaggtactagaccctatccctgcaaggactgagctgtatttcaacaatcagagattagaataagatggcaccaatgcccagcagaagatggtcacagatgagatgagcagcaaataacatttgtggactgactttatcagaactcaacagaaactggccctttggcctgcaaaggtcaagatatcaggtgaaaaatatatgggtaatgagtaaatatcatatctaggcatcaggaaatctcagttcttagctcagtgtccccattcacaagaaacagagcncagggctccaaaaaagctggtcangaaaagtggaaaataaagattttctgctttgcaagcttgtctgggactgangggtnaccactgnaccctngggcggggancacgctaaaggggngaattccagcacacttggcggggccggttantagngggatcccgangctcgggtnnccaaaccttggggggnaaatcntgggncaaaangctngttttcctggggtgaaaaattggtaattccccctccccaaantn

SEQ ID NO: 4523 - DNA, 861 bp, Homo sapiens
  misc_feature 18, 568, 570, 584, 617, 620, 646, 720, 723, 732, 733, 747,749, 763, 765, 766, 769, 803, 807, 829, 830, 836, 838, 846,853: n = A,T,C or G
ctcactatagggcgaatngggccctctagatgcatgctcgagcggccgccagtgtgatggatatctgcagaattcgcccttagcgtggtcgcggccgaggtacactctggactccccagctcaaggtgactccgataatataacgcatgtgtggaatgaggatgatggacagaccttatctccaagcagtctggctgcacagctcctaattctggaaaactttgaagatgccctcttaaatatatcagcaaatagtccttatattccttacttggcatgtgtgagaaatgtgactgacagtttggccagaggttcaccagaaaatctaagactcctgcagtccacaatacgatttaaaaaatcttttcttcacaatggttcctatgaagattactttcctccagttcctgaagtcctaaaatcaaaactgtctcaacttcgaaacttgaccgaacttctttgtgaatctgaaactttcaagtttgatagaaaagtcatgccactcttttgatatgagctttgggagcctgtgtgaaaaaagtgagttttgatctgcaactcctcgaancngcagaactgggccnccgaaataagcagcccagcttactggtacctgnccnggcgggcgctcgaaaagggcgaattncaaccacactggcgggccgttactagggggatccgacctcggtaccaagcttggggggtaaatcatgggcatanctngtttcccgnngggaaaattgttantncgctcacaatttcncnnaanataccgagccgggaagccataaaagtggtaaaancccngggggggccctaatgggggggnncctaancnccccattnaattggngttgggcc

SEQ ID NO: 4524 - DNA, 950 bp, Homo sapiens
  misc_feature 493, 501, 527, 533, 542, 550, 594, 633, 654, 659, 666, 713,755, 772, 773, 798, 807, 817, 826, 829, 831, 846, 851, 858,877, 908, 910, 913, 917, 918, 920, 921, 937, 949: n = A,T,C or G
gactcactatagggcgaattgggccctctagatgcatgctcgagcggcccgccagtgtgatggatatctgcagaattcgccctttcgagcggccgcccgggcaggtaccaacagcttttcagcagatgttagcattcacatatgagaaagttgcagcagtgtgcacattgtgcttctgccctagatccttatgtaaataggacgtccgtgacttgatgttgaaatgacctttcaggcagtattctgttgccacatgcctgagcttgtatcccagagtaattagacgttttgacttacacatcttggtatacagtgtttatgctaattataaatgtctgaaagtttcctgaaactttttctttgtagctttttatcaaagacagacaggaggttgggaggagggttgtggattgtggtcctaagcctttgattttcaagtctctcattttttgggaatgaaaaattaaaaatctgcttttccagttgcccgaanacatgggnggggatattttttattatttctttcnatcttngaacaaaanaaaactgntttgggaaatcaccagcaatttttaaataacctttttttaaaantaaaatattttttaatttctttaaaggggcatttttagncttaaaaaaattttaaagganttggnggaagtnccccttaaaattaaaaaaaattattttcccaacctggacccctgttngggaaaaaagccttaaaaattaccttaaaaatttaaaaaatngggaggaaagttttttnnttttcaacaaaagggaaaggggtcnttccaaatnttttggtttnaaaaaattnaanancctcaaaaaactttnttttncctgggnggggggggtaaccctcaancccctcaaaagctgacccttagggtttaccnantanccanncnnttcctttgggccgggnaacacccctaang

SEQ ID NO: 4525 - DNA, 647 bp, Homo sapiens
  misc_feature 283, 309, 389, 436, 438, 440, 447, 451, 474, 475, 479, 486,495, 499, 502, 529, 532, 537, 542, 550, 552, 553, 557, 558,598, 599, 600, 602, 634, 639, 644: n = A,T,C or G
tcactatagggcgaattgggccctctagatgcatgctcgagcggccgccagtgtgatggatatctgcagaattcgcccttagcgtggtcgcggccgaggtacttttagtggctttagtttaaaagatatgcttcattacttcatgccaaatagtcaataaaaggtttgtaattcaacatcaaactgggtaagtccttcttaaaattgtttttaaaagcaaaagatcccaaaataccagttgtcaccattttaaaaggatattttaaaagatttcttttatggntattcaagtaagaaaaatgaaaaagncagaaattttacttctctcattttttagctgtatatcaatatttttgaagaggtaacatatgcatacgctaccaacagtnaaaaggccaaattggaatacaggggaaaaccagacataaagcagganangncattttnccanttcctttttaacaccaccacatnnttgnttgggcnaaccacaancaangangtatttctttatatttgggctaaaatnatnccagnttcancatttcangnntttnnctttttttttaaaaatttattatttaggaagaccaggggnnntncaaccattgttggccccaaggctttggtgccnaaacnttttnggg

SEQ ID NO: 4526 - DNA, 894 bp, Homo sapiens
  misc_feature 419, 469, 478, 489, 492, 495, 517, 582, 593, 638, 652, 656,659, 661, 663, 669, 673, 686, 704, 705, 710, 714, 726, 734,740, 741, 744, 749, 757, 770, 773, 786, 789, 790, 795, 808,824, 848, 849, 858, 865, 866, 867, 868, 888, 894: n = A,T,C or G
actactatagggcgaattgggccctctagatgcatgctcgagcggccgccagtgtgatggatatctgcagaattcgccctttcgagcggccgcccgggcaggtactttgctacacggccgggggccattgagactgccatggaagacttgaaaggtcacgtagctgaggcttctggagagaccattcaaggcttctggctcttgacaaagatagaccactggaacaatgagaaggagagaattctactggtcacagacaagactctcttgatctgcaaatacgacttcatcatgctgagttgtgtgcagctgctgcggattcctctgagcgctgtctatcgcatctgcctgggcaagttcaccttccctgggatgtccctggacaagatatcaacttggactctatctcccagaatttncacatgttgtgggagggacccatggagaggagcaagggagaaagccttangatctactnggggaagtccngangancagtctctttgtccccgcttgnacccatggtccactgaaattcccttatgctactttcactggacattctatgaaataccacccagnggagaaaattnctttgaaaatttgcaaagttggtcctggggttcaatttttttaancctttttttccaancttnttncnanaattgncccnccaaaaaatttcnaacttgggttcttggaannaaggnaaanaaaaccccgatnggtgtttnaacttnnaancccantttttggnttgaaaacccttnacnaagggctttgatnttnnttcantttgggaaaaccnccaccaaaaatttggnctttttcccttttcccccgggggnnatttttggnttttttnnnnaaacctttttttgggccccnccgccn

SEQ ID NO: 4527 - DNA, 1250 bp, Homo sapiens
  misc_feature 3, 4, 8, 10, 13, 14, 18, 26, 28, 31, 32, 33, 46, 56, 57,59, 62, 88, 93, 95, 96, 97, 98, 100, 101, 102, 103, 125,126, 129, 140, 152, 183, 206, 207, 209, 278, 337, 442, 443,448, 468, 483, 487, 509, 519, 527, 554, 559, 581, 584, 605: n = A,T,C or G
  misc_feature 606, 621, 623, 626, 636, 637, 640, 642, 660, 666, 670, 673,677, 682, 683, 701, 715, 727, 733, 749, 753, 763, 770, 771,775, 777, 779, 784, 789, 798, 807, 808, 818, 825, 827, 834,835, 838, 841, 844, 848, 852, 853, 859, 860, 869, 880: n = A,T,C or G
  misc_feature 883, 887, 890, 916, 918, 919, 923, 925, 926, 930, 938, 947,953, 955, 958, 969, 974, 981, 985, 987, 1006, 1016, 1020,1022, 1025, 1031, 1032, 1037, 1041, 1042, 1053, 1061, 1072,1073, 1075, 1077, 1079, 1083, 1084, 1092, 1100, 1107: n = A,T,C or G
  misc_feature 1108, 1110, 1113, 1115, 1117, 1120, 1121, 1126, 1138, 1140,1156, 1165, 1167, 1171, 1172, 1176, 1177, 1193, 1195, 1197,1198, 1200, 1202, 1208, 1209, 1211, 1217, 1219, 1220, 1222,1226, 1227, 1229, 1231, 1232, 1234, 1235, 1239, 1240: n = A,T,C or G
  misc_feature 1241, 1250: n = A,T,C or G
ccnnctcncntgnnagantatgttgngntgnnntatccttggagtnattactgganngnaanatgttttttaaaatatattctcacanatttntnnnnannnngttatatcttatacgactcacnntantttagggcgantcgggccctctngatgcatgctcgagcggccgccagtgtgatngatatctgcagaattcgcccttnngngcggccgcccgggcaggtacctgggtgatggccatactgcgtgccgccataagctcaagccatgtgccngaggctgtgcatttagggaagagaaagaatgttcactcccaaaagaactgattcaggcntgaacaagaaccattgcacatcctcaggaggttctagcaaaccttgcacatccatgttcttgcacttatacatacataaacaggagtgaggaatgcctttcccannagcancagcaagaaagtttcaactnggcaaaccgacccanggangaattttttcaggcttcatccnttttaccagnaaaaaatngtaaaccttcccattgggaagtagggnaccanggggtttaaatttccaataacnaanaggaaccaaaggccggggaannaccttcctttttctntnttnacttgccacnngtngncttggggttaaccctttngggggncggnccnaacncaacnngccctataagtggggccngaaaatttctccangccaacaacttnggggcngggccccgttttaccntagnggtggggaantcccggnncccncncnggttnccctnaagggcttntggggccgnntaaaattcanatggggncncaattanngcntgnttntccnctgnnggttgnnaaaatttgngttaatacccngcnttcnacnaaattttctccaccaaccaattccgnanncccngnnaagngccaatanaaaggtggntaaaangnccnggggggggggnccctnatgggangtgnangctctaaacttcaacattnaaatttgctntttngnggnctacanntcggncccnntttttttcagntgtggggnaaaaaccttgnntntnantccnncctggganatttaatngaaattnnangcncnanccnnccggngtggaggagggncngtttttggcgtgtatntggggcggntntttnnacannttccctaaaaataaantngnncntnattttnngngtgggngnncncttnntntnngnngtgnnngacgggaan

SEQ ID NO: 4528 - DNA, 931 bp, Homo sapiens
  misc_feature 5, 257, 262, 265, 318, 374, 402, 423, 472, 493, 494, 506,508, 519, 530, 547, 551, 552, 555, 562, 569, 578, 584, 605,616, 643, 649, 656, 659, 663, 672, 675, 686, 690, 691, 701,705, 710, 721, 726, 730, 734, 736, 745, 765, 771, 772: n = A,T,C or G
  misc_feature 774, 781, 796, 807, 814, 818, 844, 846, 848, 853, 860, 870,877, 884, 890, 901, 903, 905, 912, 922: n = A,T,C or G
gaatngggccctctagatgcatgctcgagcggccgccagtgtgatggatatctgcagaattcgcccttcgagcggccgcccgggcaggtactcaaggccacaagacaggccgccatagaactttggccttggggaatgaaccaaagctagtttggagagtagggtgattggggtgatcacttttccctttaaaggtggcatgctgcaagaagaaaggctttgaagagtgatgggtagtcactaaccatggcactatnctatnttntaaccaacgtgatggggtcctggaatgatcctaggtctgcactagaagaggtngacccagaggaccttgtctaacataccccttgcttcttgacttcttcccatacctngcgtttctctccggcctcaattactggncttgagatgttacaccctttncaagcattaaaatgatgaacccgcttcatggtgcctgtaaaaggccctntttgcaaaagcaccctgcagnnggtattggtttngngttttccttcnactttcacttntaaaaaaaaaatgaaanaggnnttnaaggggnaaaaaantgaattttngggccntgggacttttttaactttggntttttgaaaanacttgcaatttggcctttttaactttngggggntttgttnagncaancccaaaaanaangaagctttttnattnnaaaaggggcnccanaaaanaacaataaaancttgncctnggtntnttttaactnattaaacccaattgaagggngttttnngnaaaaacnaaaaaatggccaaantttttaaaaanaaaaatngccnttttcctttggggggggggggggttncnantttanaagcctngattccccgnctttttntttttcntaaatngcctttttttngncnttccttnttaaactganagggttcct

SEQ ID NO: 4529 - DNA, 910 bp, Homo sapiens
  misc_feature 130, 148, 318, 509, 571, 583, 585, 610, 619, 629, 631, 673,683, 690, 713, 715, 747, 753, 775, 779, 781, 795, 809, 826,843, 851, 855, 867, 872, 876, 881, 891, 892, 901, 905, 907: n = A,T,C or G
tcactatagggcgaattgggccctctagatgcatgctcgagcggccgccagtgtgatggatatctgcagaattcgcccttagcgtggtcgcggccgaggtactcccctccttcgctaccaacttcctggncacagccaccatcatctncccgccaagcttcctaacaggactccctgctccttctcttaccccacccgtggtctattctcaacacggtagcaaaagagaacttcttaaaacttatagcagatcaacacctccacctctcgcaccagaactgtgtgaaagttgattatacaaaatgggtcagggtgtancgcaaggtgtgaaagttcatgatgtggaatgggtcattctttgcataccccaaactgaatcactctgagggcctggaggataaaggcactcagggcacatagcatggctccaagaatgtaattctcttgcaagcccagctgcttgaaactgcctgctgcaaccataagaccgggtttaacctaatagcctncttgaaaaatgaccctgcccacaactcttaaagctagcttttacctattaaccgggcacctngcctgtttcaanancctttggccagccttcccccttaancttgctttnttcttgccangngaagccttttcttttccaatttcttaataaaaacctattgtntaataaaaantccttcnaaacttttggctcccaattgaantntgggggcataattgccctttggaactgcaaanttcttntggattccccaaaaataaaaancacntngaaattttaagacncccttggccttctntattttttgaacttttnacaaaaagggcaaattncttttaantggnttatgggccccnaaatngggnttttnaaggcccccnntttttttanccananttc

SEQ ID NO: 4530 - DNA, 952 bp, Homo sapiens
  misc_feature 2, 3, 4, 5, 6, 335, 427, 445, 448, 472, 484, 486, 487, 496,500, 511, 518, 572, 576, 580, 584, 591, 612, 614, 632, 636,671, 675, 678, 689, 706, 707, 713, 715, 725, 732, 737, 740,741, 743, 745, 753, 756, 757, 759, 767, 768, 770, 775: n = A,T,C or G
  misc_feature 778, 782, 786, 787, 790, 795, 800, 806, 807, 812, 824, 826,828, 851, 852, 853, 856, 860, 864, 877, 878, 881, 883, 884,887, 888, 889, 892, 900, 906, 907, 912, 914, 916, 920, 926,927, 934, 937, 938, 939, 940, 945, 949, 951, 952: n = A,T,C or G
gnnnnntgaattgtaatacgactcactatagggcgaattgggccctctagatgcatgctcgagcggccgccagtgtgatggatatctgcagaattcgcccttagcgtggtcgcggccgaggtacatttggggacaaaatgtttttgtggagataatgtagacttaaaattttaaatccgtagctgtattttcgtcacaatgaaaatttgatgtccttagtaagccccgaatagaaagccttgacttgctttttgagcatagttaacagtgttgagataagagaggtttgctggcagttgcactgatggctgcactgttgtccagtgggcccagcntgggtgtacctgcccgggcggccgctcgaaagggccgaattccagcacactggcggccgttactagtggatccgagctcggtaccaagcttngcgtaaacatggtcatanctntttcctgtgtgaaatttggtattncgcttacaattncnnacaacatancgancccggaagctnttaaagntgttaaagccctgggggtgccctaaatggagtggagcttaacctcacaatttanattngcgntttngcgcttnactggccccccttttttcaantntcgggaaaaaccttgtcnttgnaccaagcttgcatttaaattgaaattcggcccaancccnccngggggaaaaanggccggttttggcgtanntggggncncttttttccncttttcntttgnttnnantngactttgnttnngnctccgggnncnttttnggnttgngggnnaanccggntttcnattttnnctttnaaaagggggggnananaacggggtgattcccccaaaaannnagngggnatanaccccatgaaatnnaanannttnnngcnaaaaaagnccaacnnaaaangncnaggnatcctnnaaaaagnccnnnnttttntttncnn

SEQ ID NO: 4531 - DNA, 852 bp, Homo sapiens
  misc_feature 3, 5, 17, 461, 471, 487, 542, 619, 659, 673, 679, 725, 726,781, 794, 810, 828, 842, 852: n = A,T,C or G
tantnctatagggcganttgggccctctagatgcatgctcgagcggccgccagtgtgatggatatctgcagaattcgcccttagcgtggtcgcggccgaggtacacagcagcaaacagttcagattgttgatgcttttgatgaccattaatgcaaaaggattatggattatggcactgtattatgaatagacaaaaagattagtgaaaagttgtttagcctagtagacattttgacgctttctgcgtgaaattgaaagataaaccagagaaccattgaaagttcatgtatcaattaataggtcaagtaaaaatgtatctaaaattcaacaagaagagattgttttctatttcagttttcaaatgcaaggtagtgaacccgaaatcaaatcaacaaaataaatggtcccaaggactcttattataagtatacaaatgttgtaactcccaggaaatgaaaatnttaatgggtntaaatgagaagaactnttaaaacaaagccatcccaaactaccaaataaagcctaattctactgacaggtanctccacataataacctagaaccaatttttttaaaataaaataaaaactcaaggccttttagctgaccaaaaaatttnttgaaatggaaagaccccttaggaaagtaaaaaaaaattntaccttaaaatatnattttnccaaagccattattaagtaatttttttttaaacctttattgaatgnnggggagccctgctccatttggtttaaagaatttaattaaaaaaggggttttcagnaaaaaaccttttncttttaaaaaaatccntaaaattttttaaatccntttttttttaaaanttccattaan

SEQ ID NO: 4532 - DNA, 858 bp, Homo sapiens
  misc_feature 8, 11, 13, 15, 20, 323, 526, 537, 552, 559, 565, 579, 596,620, 629, 632, 642, 660, 670, 671, 677, 678, 682, 689, 690,695, 702, 706, 710, 711, 727, 728, 738, 751, 754, 756, 759,761, 768, 771, 779, 794, 796, 801, 803, 805, 810, 817: n = A,T,C or G
  misc_feature 838, 841, 848, 849: n = A,T,C or G
tcctatanggngncntgtanatgcatgctcgagcggccgccagtgtgatggatatctgcagaattcgcccttagcgtggtcgcggccgaggtactccagctatcaaaggagaatagcctttaaaacaccaggatcctggtcgagatggtagaggtggtctgtttgaatttgggtgaatagaggaaatgccagttaagggatagccattctacagacaaaaatgcagccgtctatacttttactccgtggtaatacattatttgtatttcttctttcttaagcctcttgtctgtttgtcttaggtatttgtcttatgtatttgncacctacataaaatatgctcactaaaacgccactgactttaaggaattttaagtatgattatatgtggtccttgtagaaaaaccatctttaaagtgtaaaaaaagaagttttttttaaaaagctaaattaggaaacaaaaaaagatctggaaaactctggaatgtataccctatagaaatgggttttttgaggacccatatgnttcctctttgntaataccaaaatggnggtccgnaaaganccaaatattctgcnaaaaattcaaacctacnaaagaaatacccatgccgagtttnaatgccatntcnaggcccggtncagtcaggaggaaaaaanttttgggagnnaacccnngcanggggggnncccantccccgnaatncctnnttttttggcaaccggnnggataaaaanttcccagattgcntgngnccncncccgtgntgngtgtgggnaggggcttcccaggntnggagnananccccntgggaantttttttttttttgggggganaanggggccnngaccccccc

SEQ ID NO: 4533 - DNA, 636 bp, Homo sapiens
  misc_feature 332, 401, 425, 437, 475, 502, 527, 529, 554, 560, 569, 582,595, 599, 621, 633, 635, 636: n = A,T,C or G
gggcgaattgggccctctagatgcatgctcgagcggccgccagtgtgatggatatctgcagaattcgccctttcgagcggccgcccgggcaggtactttgctacacggccgggggccattgagactgccatggaagacttgaaaggtcacgtagctgagacttctggagagaccattcaaggcttctggctcttgacaaagatagaccactggaacaatgagaaggagagaattctactggtcacagacaagactctcttgatctgcaaataccacttcatcatgctgagttgtgtgcagctgcagcggattcctctgagcgctgtctatcngcatctgcctgggcaagttcaccttccctgggatgtccctggacaagagacaaggagaaaggcccttangatctactgaagggagtcccgaangaacaagtctcnttctgtcccgctggaaacccatgggccaacttaaggtncttatgctacttttcactggaaccatnctattgaaaataccaccaaggggangnaaaatttcctttggaaattttggcnaaggtngcttggggnttcaattgttttnaaagctttggttncaanctttttccaagaaattgccccnccaaagaaattnann

SEQ ID NO: 4534 - DNA, 1141 bp, Homo sapiens
  misc_feature 520, 529, 594, 597, 604, 622, 641, 688, 708, 712, 715, 724,731, 751, 759, 761, 767, 770, 784, 817, 819, 828, 831, 840,841, 848, 849, 851, 858, 879, 897, 905, 909, 931, 950, 953,958, 967, 971, 972, 973, 976, 982, 983, 995, 999, 1002: n = A,T,C or G
  misc_feature 1006, 1012, 1028, 1033, 1042, 1047, 1054, 1056, 1059, 1073,1075, 1079, 1085, 1089, 1097, 1103, 1105, 1108, 1110, 1112,1113, 1114, 1123, 1126, 1138: n = A,T,C or G
gccgccagtgtgatggatatctgcagaattcgccctttcgagcggccgcccgggcaggtaccaggattatagttagaatttacggactgggtaggaagactggatagaaatctaaagattgctgattcaaacacaatgtggtttctttgctttattgtcacagctctgaattcacaattattagttaaattcataggcactataactttagaaagcaccttcccaaaccaagtattaagtgatttattataatttctctgacttcttatagaattgactttccaagtgttcatgagaattattgagaaattgctacatagtatcatctcagctctgtccacatgagctatctgtcaccttgtcttaatgaataattgttcagtaggaatattggttttggcatttaaagtgatctatatctaaatgtagataggatcagggaccactcttgaacattaatgtccaggcatcttaaaattacacataaggctttcataatctgacttctgccccactcttncatctttangccttttccctgtgtgccctttctctggcattactgaactgctggcaatgccctacttactcatnctnctattgnaggcaaatcctttcactnttttcaggcctcgcttccnctcttgctggtgcgtggcattgcccgcacccttttcctggcctttancccttttaatcttggctggnctcnaanatttaaaanctcttgncttgggccatggtttcttanaaaaaccntncccggnctnccttattttaattntttttaaaccctaatgcccacattgtttttagncngggctcaanaanaaattttgnntaaaatnngngtaaaanaatgccccaaaccgtctttgnatcttggacaaacggggnaaaaattngggnggaaaatttaccttggccgganccccttagggggaattccnccnctggnggcggtctnaggnnnccncccggnncaacttgggganaaanggnaaanttttcnggggaaatgtttcccnccaancccaaaaanaccgnaaataangnaanccggggccaaaagnanaccnaaaatngggnggcccccncctccnanggnancnnnccccctttnaantcccccgggggnggg

SEQ ID NO: 4535 - DNA, 395 bp, Homo sapiens
  misc_feature 120, 157, 199, 386: n = A,T,C or G
gattgaatacgactcactatagggcgaattgggccctctagatgcatgctcgagcggccgccagtgtgatggatatctgcagaattcgcccttagcgtggtcgcggccgaggtacccagngctttaactgagttgggatttttttttaatgttatancatttaataggaaaaatcatttgaagatcatttatcttttgnataactggaattgaaaatgtcaactaattatacagtgtttttccccataaaacacaatttagtgccaggagaaaaaagaactatttcttcagataactttatatgtgtccttttttttccattaaaaattaaatagcccaaagtatgttccttttggccttaatgacaggacctgaagccaaagctntgcattcaa

SEQ ID NO: 4536 - DNA, 398 bp, Homo sapiens
gattgtatacgactcctatagggcgaattgggccctctagatgcatgctcgagcggccgccagtgtgatggatatctgcagaattcgccctttcgagcggccgcccgggcaggtactaacatcaataagtcgagaaaattatattaactgaaagaaaacaaaataatagagaattttattaaacgtatttctaatgtttctcttcatgtttggagaaaagctgccacataattaaaacaattcttaccctgtaaaactgattgtcttccaatctcaggaggtttacattaacaggaatatagaataagaaacaggcctatggccgggctccgtggctcacgcctgtaatcccaacactttgggatgccgaggcggacggatcacgaggtcaggaaatc

SEQ ID NO: 4537 - DNA, 409 bp, Homo sapiens
gattgaatacgactcctatagggcgaattgggccctctagatgcatgctcgagcggccgccagtgtgatggatatctgcagaattcgcccttagcgtggtcgcggccgaggtactcccccagcaaaaaccaaatgccagacacattttatataagaatgaacaattaatctgaataataaaaataaggcttatttataaaggttaagttgaatagtatatacatgcacatatatgcaaatatatataattcagatattttatctttcttaatgcttacatgactctaaactctcacaattttaaattaaaacataaatatgacataattgtaaatttttcagctttatacatcagcattttaccatcatgagaaaagatattctttttcttctttttaatttccccaaa

SEQ ID NO: 4538 - DNA, 394 bp, Homo sapiens
gattgtataccgactcactatagggcgaattgggccctctagatgcatgctcgagcggccgccagtgtgatggatatctgcagaattcgccctttcgagcggccgcccgggcaggtacatgataatttttctagtctagagctggatgagaacctgctccgttctgctaccttgtcaaacccacctacacccctggcagggcagatccaggggcagttctctgccccagccaacgttggccttacttctgccactctgatcagccagagtgcacttggggagagagccttcccaggacagtttcatggacttcatgacggcagccatgcctcccagaggccacatcctgcccagctgctgagcaaggcagatgacctaatcacctcacgacagt

SEQ ID NO: 4539 - DNA, 1156 bp, Homo sapiens
  misc_feature 406, 415, 444, 482, 492, 498, 541, 547, 566, 587, 614, 616,620, 626, 629, 651, 680, 689, 702, 711, 713, 714, 721, 725,734, 751, 763, 766, 782, 803, 835, 840, 845, 849, 850, 852,855, 864, 867, 869, 871, 872, 877, 881, 887, 888, 908: n = A,T,C or G
  misc_feature 911, 913, 920, 922, 929, 930, 934, 943, 950, 951, 954, 964,978, 982, 989, 996, 1008, 1009, 1012, 1015, 1025, 1039,1045, 1047, 1058, 1063, 1071, 1083, 1090, 1093, 1096, 1097,1099, 1101, 1105, 1107, 1117, 1120, 1121, 1134, 1135, 1137: n = A,T,C or G
  misc_feature 1139, 1141, 1143, 1144, 1147, 1148, 1149, 1151: n = A,T,C or G
gccgccagtgtgatggatatctgcagaattcgcccttagcgtggtcgcggccgaggtacaagttgcactgtctgaggaggtgcccttcaagctagcacatcaatactaaaaagaaaagcatgccgagagctggcagaaagaaggcttcaggcagaaagaacaacagcaaaagtcctaagactggaaaaggtctgagttgttcaggaaacagaaaggaaaccattgtggctggacccgaggtaagaagcaatgagggaaaggtgggaaaagagcaaggagggcccgaggtcatgggatggagttaggctgttaagtgctttgagagcctaacatcctaactcattgggaggttttcagcaagggtaggaacatggttggcatttgcctttgagagctcttcccaacnttctgtgtngagaatggctttgaaagacttaaaagcanaagggttttgtaggaaggcttgatccggaagtacctgnccgggcgggncgctcnaaaagggccgaattccaagcacactggccgggccgttactaantggatnccgagcctcggtacccaanccttgggcgtaatcattgggncattagcttgtttcttgtgtggaaaantngttnttccgnttncaaattccccaccaacattacngaaccccggaagcattaaaaatgttaaanccctggggntgccctaattagntaacttaantnncattaanttgngttcgctcnttgccccttttccaatngggaaacccttnctngccccttctttaattnaattgcccaccccccgggggngaggcgttttctattgggccctctttcccttnttagnttaantganntnctngccttggcnttngntnnggggnaacnggtttnncttttttaaaggcgttatancgntnttcacanantctgggnnaccnaggaaaaanttttgtnnaangcccccaaangccttaccttaaangccntttttgngtttttnaggtcccccctnnaanttnaaaattatcnttattttaggggcnaacccncngggatttaaanccccntttccttnaattttttgccnttttttnccnttnntncnaaantncctttttttngannggggttttttttnncntngntnntannngntggcc

SEQ ID NO: 4540 - DNA, 1188 bp, Homo sapiens
  misc_feature 451, 500, 563, 575, 597, 677, 712, 727, 730, 753, 755, 766,768, 772, 786, 789, 798, 808, 810, 842, 849, 856, 860, 869,889, 890, 902, 917, 921, 923, 926, 934, 940, 942, 943, 949,950, 951, 954, 968, 974, 983, 984, 992, 995, 1033: n = A,T,C or G
  misc_feature 1038, 1040, 1041, 1049, 1058, 1063, 1065, 1069, 1073, 1082,1087, 1089, 1092, 1093, 1099, 1102, 1106, 1118, 1119, 1124,1125, 1126, 1127, 1129, 1132, 1133, 1141, 1143, 1144, 1146,1166, 1174, 1178, 1179, 1183, 1186, 1187: n = A,T,C or G
gccgccagtgtgatggatatctgcagaattcgccctttcgagcggccgcccgggcaggtacaggctttgatgtaggaccgtctacgtcatgagtgaagagcggtaaagtgccagggtgtctggtggacagagtgaataagaacatggtataagatgaggttatgactatattgtgtagaaccttataagccactttaatgattttgggttttgttctagacgggaaaccattggaaggccttgagaagagaagtgatgtgataggacctactctatcttctatgcagtgcatagacttggggccaagggtagattcagaaagactagtttagagactgttatagtaatccaagcaagagataatagtggcttgaatcaggctggtacctcggccgcgaccacgctaagggcgaattccaagcacactggcgggccgttactagtggatccnagctcggtaccaagcttggcgtaatcattggtcatagcttgtttcctgnggtgaaattgtttatcccgctcacaaattccccacaacatacgaagccgggaagcattaaagngtaaaagccctnggggtgccttaatggaggtgancctaacttcacatttaattgcgtttgccgcttcacttggcccgcttttccaattcgggaaaaacctgtcgtgccaggctncatttaatgaaatccgggccaaccccccgggggangaaggcgggtttggnttnttgggcgccttttccccttcctngnttacttaactncnctgngcttcggtccgttntgnttgggggcnaaccggtttnantttacttaaaaggcggtaaatacggttattcncagaatnagggganaacnccaggaaanaacttttgaccaaaaggccnncaaaaggcccgnaaccgtaaaaaggcncgtngntgncgtttttntaaggncnncccctnnnagnttacaaaaatttancttaanttaaagtgnnaaaacccnacnggaaattaaaaaaccagcgtttcccttgaaaccccttngcccntnnttttcaancctgctttncgggnancttntccnttttctttnggaangnggnnttttanatnaccntgaggatttatnnggggnnnntnccnnctaaattntnngncaaaccccttaacccccggngcttattngatnnattnatnng

SEQ ID NO: 4541 - DNA, 1176 bp, Homo sapiens
  misc_feature 429, 431, 457, 493, 600, 628, 632, 653, 656, 659, 661, 671,711, 717, 722, 741, 749, 758, 779, 801, 818, 832, 842, 852,856, 877, 880, 881, 892, 894, 946, 950, 956, 962, 968, 981,984, 988, 989, 997, 1003, 1007, 1015, 1021, 1040, 1043: n = A,T,C or G
  misc_feature 1046, 1054, 1061, 1065, 1071, 1087, 1091, 1101, 1106, 1108,1109, 1112, 1119, 1121, 1123, 1128, 1132, 1134, 1144, 1151,1157, 1160, 1169, 1171: n = A,T,C or G
gccagtgtgatggatatctgcagaattcgcccttcggccgcccgggcaggtacgcgggggacacattcagaggtgagcccagagcgggtaaagtggactggggagaacttcggaggatgttcatgtccaggagcagccccacgccctgtatggtcggtgtctagagcctcacagcaactaagaccaacccagctctcagaagaaggaatgtcaaaatgtcatgttcaattttacattcagtgcctggaatcttttcttcacaattgaaatgaaatgtgctgaaggaggtgaatccatgcattaatcttcagctcacaaaggaaatactacataagaagcaagaccacagactcaagacggacataattggattttttttgccatggcctggaaagaaaggtacacacagttaaccacaaaacaggcctntnttgaaaaaaccattgccatggactgncagacaggaccatggccagaccacaaataccttttngtgtgtgagcccccgggacatgtgaagctttcccgctgatgcttccttcttatatcaaaagatcacttttcacaagatgaagccgacttaatttttttttttcaaanccaatggatcccttgccaagcttttggnatanttttttccagctttgttaaanctnttntnggcattgaanaatggggggacttataaaaattgctggatcccaataaaanaaaacnttttngggcaaaaagggttttatnaacttagngggggactnaaggtttaaaggaaaagtttnttttgacctttctttccaccgngggggtacctgggttcncttttttagagggnttttaccctntttggccttncaanaaaggcctgaaaaaaattttnaanngctttaaaaangnccctgggattttttaaaggaacttttttttaaaaaaaaaaaaaaaaaaaaanatcnttggcngaaccnccttanggggaatttaccnctngggnngtttttanggaacngccnggaccaanctgggnaaaatgggataaaatttcntgnggnaatgtttnctttaantccnaaatanaaaccgaaattaaagnaaanccgggggccntaggngnnaanattaagngngnccctncccntnccgggaaaanttgcccncttttnttncccccccgngnggggg

SEQ ID NO: 4542 - DNA, 1179 bp, Homo sapiens
  misc_feature 40, 52, 56, 59, 72, 197, 363, 411, 466, 514, 526, 547, 550,552, 588, 612, 613, 615, 623, 647, 656, 662, 664, 667, 681,690, 709, 711, 716, 718, 719, 723, 732, 750, 752, 757, 775,776, 787, 807, 811, 815, 825, 829, 830, 837, 838, 840: n = A,T,C or G
  misc_feature 841, 843, 854, 859, 860, 869, 878, 879, 890, 893, 894, 895,897, 908, 913, 918, 921, 932, 937, 944, 948, 951, 959, 963,965, 977, 979, 982, 983, 993, 994, 998, 1006, 1008, 1009,1017, 1018, 1026, 1028, 1029, 1030, 1031, 1045, 1058: n = A,T,C or G
  misc_feature 1071, 1073, 1101, 1102, 1122, 1123, 1129, 1130, 1137, 1140,1141, 1142, 1146, 1148, 1149, 1150, 1154, 1159, 1160, 1163,1165, 1168, 1172, 1173, 1174, 1179: n = A,T,C or G
gccgccagtgtgatggatatctgcagaattcgccctttcnagcggccgcccnggcnggnacgcgggacctanctcgggaccggcctggagatggagttcgactgcgagggcctgagacggctgcttggcaagtttttaaagatagttctcagaaagacctgctgaattttactggcacaattcctgtgatgtatcanggtaatacatataacataccaattccgtttctggattttggattctcaccctttcgctccccctatttgcttcttgaagccaactgcaaatatgggaatcttactcggaaaacatgtggatgctcaaggcagaatatattttgccctatctccaaaactggagccntcctaaaatctgtcattgttggattaattaaagaaatgattgccaagntttcaagaggaacttcccatgtattctctatcatcatctgatgaggcaccggcangtaagacttgctagcctatattgcaaaaatcactgaagggggtttcanatacaaaatttnaaaggagctggggcaaattcntgnanaattaaacccgtccaataaaaattacttggggggtnggaaggggggagaaacctccgggnntngccctgcncattaaacaaattttcaacaaaangggatttgnaagaananggntttgtccctttttnaaacttttnaaaaaagggacttaaaagnanccccnanngganccttggaanttttcaacccttcccaangnggganaaaaagcaaaaaaatttnnctgcctttgcncatttccaagggggggaatnttcnaagncaaccttttngggnngtttcanncnnanccttgggcccngaccnncttaagggngaattcccnncctggcggccntannntngggacccaacntgganccaanctnggggtaatatnggganaaaccgnttcntgnggaaatgntttncntcccattccccnanaanncacccggaannttanattaaaancnnggggcccnnaggggganannnncataattggggggncccctcccctttnaaaggaaacttgngngcccttctttaaaaacccccccccgggnnggggtgggtttgggcctttnntctccnnaaaaaantgnnnagtnannnggangggannaancnctngggnnnttttn

SEQ ID NO: 4543 - DNA, 634 bp, Homo sapiens
  misc_feature 5, 466, 506, 529, 541, 549, 560, 622, 630, 633: n = A,T,C or G
gattnaatacgactcctatagggcgaattgggccctctagatgcatgctcgagcggccgccagtgtgatggatatctgcagaattcgccctttcgagcggccgcccgggcaggtaccagaaggcaggttgggtctagaaagccctgacagtctaagaaggtcctgagttcaggatactgaatagtgttacttcacactctagtcaagtgattctgagaccttagcatgcatcagagggctggtaaaacagattgttgtctccacctcaaagtatgtgattcagtagatttggggtggaattggaattgtggatttttaacattcttaggtgatgctgatgttgtttgtggtccagggagctcacgttgaagactgctgccctgggcaattgggatccatggaatgtttggaagtaaaagaataaaattatcatgactgtgtctaaaaaagatgacatttagcagantgatggatatattgggagaggaaagggcctaaggatggtnaggccagttagaactttgagtantccatgtgtgangtaatcanagaatgaaccnttgattggaggtgggaaagctggggctgttgattctttattcgtttaaggcttatctgattnattttttnaana

SEQ ID NO: 4544 - DNA, 1188 bp, Homo sapiens
  misc_feature 410, 470, 505, 508, 511, 537, 539, 566, 571, 572, 583, 600,636, 651, 674, 677, 688, 691, 692, 693, 697, 702, 711, 719,735, 740, 761, 767, 788, 789, 795, 799, 801, 803, 811, 820,826, 831, 850, 851, 853, 861, 866, 883, 888, 892, 896: n = A,T,C or G
  misc_feature 897, 898, 903, 906, 909, 918, 923, 937, 940, 941, 943, 944,953, 956, 970, 974, 978, 986, 995, 1001, 1003, 1004, 1008,1016, 1024, 1026, 1027, 1051, 1059, 1060, 1061, 1067, 1074,1089, 1091, 1095, 1097, 1102, 1106, 1107, 1110, 1115: n = A,T,C or G
  misc_feature 1116, 1119, 1120, 1129, 1130, 1132, 1142, 1150, 1156, 1166,1170, 1172, 1173, 1178: n = A,T,C or G
gccgccagtgtgatggatatctgcagaattcgccctttgagcggccgcccgggcaggtacgcgggacattcagaggtgagcccagagggggtaaagtggactggggaggacttcggaggatgttcatgtccaggagcagccccacgccctgtatggtcggtgtctagagcctcacagcaactaagaccaacccagctctcagaagaaggaatgtcaaaatgtcatgttcaattttacattcagtgcctggaatcttttcttcacaattgaaatgaaatgtgctgaaggaggtgaatccatgcattaatcttcagctcacaaaggaaatctacataagaagcaaagaccacagactcaaagacggacataattggattttttttgccatggcctggaaagaaaggtacctngggccgcgaccacgctaagggcgaattccagcacactggccggccgttactaagtggatnccagctcggtaccaagctttggcgtaaatcatggncantancttgttttcctgggtgaaattgttantnccgcttcacaatttccacaccaacatnaccanncccggaagccntaaaagtgtaaaagccntgggggtggcctaattgaagtgagcttaactcacanttaatttgcgtttgngcttaacttgcccgtttttccantcngggaaaacctnttnnngccnacctngctttaatnaaattggncaacccccccgggganaagcnggtttgcgtatttgggggctntttccntttcctcggttaatttaatcnnttgggntttngncnttttgggnttgggggangggggnttaanttaattaaaaggggggatnncngggttttnccacnaattagggggttacccnggaanaaantttnnnccaanggnccncaaaagccncaaancttaaaaaggcccnctnntnngttttttanatngttcccccccttcngggntcanaaaatggngctttattngggggngnnaccnccgggctnttaatttncnnggtttccctgggaattttgccctnttttcccnnnggttcnaaaattncggtttttttttggnangggngnttttnattnnccnggganntanntgggggganngntaaaaagggntgaaaaancccctnaaaacactgnggtntnntgaanaaataattct

SEQ ID NO: 4545 - DNA, 658 bp, Homo sapiens
  misc_feature 118, 119, 120, 121, 122, 124, 128, 130, 132, 135, 137, 138,139, 140, 149, 150, 151, 160, 163, 165, 174, 176, 180, 183,186, 192, 194, 198, 200, 209, 222, 225, 231, 237, 238, 243,286, 346, 421, 453, 463, 492, 524, 526, 534, 541, 552: n = A,T,C or G
  misc_feature 561, 566, 567, 569, 573, 595, 599, 611, 614, 627, 634, 647,657: n = A,T,C or G
gattttatacgactcactatagggcgaattgggccctctagatgcatgctcgagcggccgccagtgtgatggatatctgcagaattcgcccttagcgtggtcgcggccgagggacttnnnnntntttntntnttntnnnntagcgggtnnntttttcttnttnanaactttttnangatnttnatntccatnancatncncacgccctntatggtcggtgtntanagcctnacattnnctaanaccaacccagctctcagaagaaggaatgtcaaaatgtcatgtncaattttacattcagtgcctggaatcttttcttcacaatttgaaatgaaatgtgctgaangaggtgaatccatgcattaatcttcagctcacaaaggaaatactacataagaagcaagaccacagactcaagacngacataattggattttttttgccatggcctgnaaagaaaggnacacacagttaaccacaaaacagggcctntctgaaaaagccatttgccatgggactgccananaaacaatngaccaangacacaaattnccttctggntgtgnnanccancgggacatgtgaccttccccgntgangctccccttaanatnaaagatcattttnacaagangaagcgactcaanatcttttatna

SEQ ID NO: 4546 - DNA, 634 bp, Homo sapiens
  misc_feature 510, 516, 603, 608, 610, 617, 622, 628: n = A,T,C or G
gattttatacgactcctatagggcgaattgggccctctagatgcatgctcgagcggccgccagtgtgatggatatctgcagaattcgccctttcgagcggccgcccgggcaggtacttccatcaagtcgagggagtaacgcaaactagaatagtagccatctattaaggatagttctgaggtttggaatttgtaactgatttttaggagctacgacatgaatatcatatcaggtagaaatactcagagtgatcaccttttatgaaagttagttctatctttcatgtctaggaaaatataacagtgaatgtttgctttttgtatgttttgtctccaagcagaggaaactgacagttttatgttttaagtgccgaaagttgtttttggctaggcagttccagagttaatcactgggatgttaacttgaatttttgtctttaaaatgttttagatttttaaaacgaaatatacttccattatttccaaactgacaccatgtgttctggattanttttanagaaatgttttccaaattctcttggattacttgaagtcattgattttgaaatatttagtttagtttttttcttttaaagcttatcanaaagnanaggaagnacctnggccgnaccacc

SEQ ID NO: 4547 - DNA, 1152 bp, Homo sapiens
  misc_feature 521, 589, 593, 602, 614, 618, 635, 646, 649, 653, 658, 677,683, 719, 742, 744, 746, 753, 757, 772, 780, 808, 813, 819,820, 834, 835, 852, 868, 873, 879, 880, 893, 914, 937, 941,947, 951, 962, 966, 970, 972, 973, 974, 978, 993, 998: n = A,T,C or G
  misc_feature 1012, 1014, 1019, 1021, 1022, 1023, 1024, 1028, 1030, 1042,1049, 1055, 1057, 1065, 1066, 1067, 1069, 1070, 1077, 1078,1079, 1084, 1087, 1088, 1094, 1098, 1099, 1105, 1106, 1109,1113, 1114, 1125, 1129, 1135, 1142, 1143, 1144, 1148: n = A,T,C or G
  misc_feature 1152: n = A,T,C or G
gccgccagtgtgatggatatctgcagaattcgccctttcgagcggccgcccgggcaggtactgttttcagtgaccttcaacataaattataccatttgaactcacaaccacttcagacctaggaagggctgggccaattatcctccctctacagatgaggaaactaagggctggaagatgatatgttttaccttttgtaagacagtcagaattaaatctaggtattgtgactccatgtctacaggactcttcctcagctgttgagaatgaatatcaggatttcttttcgtgaaagtaaagtccactctgcttctttaccaaactgtctatatcttgctaaataaatcaagtctctaggtaagaataggtgctataattaatttggtgctattcattagatgctatttcgatttccacagccagagtctcaggactcgaaagatttgatttttcatttggacaacatgtttatgtttcttttgagacaaacattataaaccaccttctgtcaaagaattcangttgctggagaactctgttcatagccgttgttgggatgcaagggggtgtctgggaaaaggatgggggngttncagatcccnccaccaaaagcncaangggtcattggtgtttcncgcccttggangangaangggangcatgggggaaaaacacantgggcngtgacagtcacagcaagctgaggcccccagggcagntttccaacctcaagggcttgaanantnttggggngggntggaatctttcaagnccctaagnggttgaaaaaaaaaccccctcaaacacntggcnttgggnntttggaggcttgtnnccaaacccaaaaacctnattcctgaaaaggggnggggngggggnntcccttggccccnaccccctaaggggaattccanccctgggcggccgttctatgggntccncctggnccanccttggggaanaatnggcnannngttnctggggaaatggttnccctncaaatcccaaaaananaaccngnnnnaaangntaaacccggggngcctaanggggananccaataannngnngcccccnnnccttncannggaaanctgnngccctnnttntaanncccccccgggngggngtttgnttgggcnnncccncccn

SEQ ID NO: 4548 - DNA, 900 bp, Homo sapiens
  misc_feature 253, 271, 317, 402, 445, 453, 468, 473, 478, 480, 492, 496,510, 514, 516, 529, 555, 595, 599, 600, 616, 621, 623, 639,641, 644, 647, 655, 656, 659, 661, 667, 672, 674, 679, 682,683, 691, 692, 696, 705, 707, 709, 711, 712, 715, 717: n = A,T,C or G
  misc_feature 718, 726, 730, 731, 737, 738, 741, 744, 746, 752, 764, 766,768, 769, 782, 783, 784, 788, 796, 800, 802, 812, 816, 819,823, 828, 829, 832, 835, 842, 854, 855, 857, 858, 863, 865,871, 872, 879, 882, 883, 892, 896, 897, 899: n = A,T,C or G
gaattgggccctctagatgcatgctcgagcggccgccagtgtgatggatatctgcagaattcgccctttcgagcggccgcccgggcaggtactagtagtatatttgaaaagtgatatttaataagaagcctgtaaaaccctaagcttctctcccttattatttgaaaattattttaagacctgtagcccccacattttgatgttgttagatttatcaacattgtctgggtaatggtcctgttctatttagggnggcctttctgcttatggnctgggctacctcttaatatacagtattaaagagttttggttaactntgaactgcccgggttgattagagtgatttccaggacagatcgtgtttttgaacttacattttttattttccaattttaatggganttgaaaaaacatttattttaataatgttgtttctaaggcccanggcacaantgggcttcaccgccntggtnaatcngnaaccaccttttngggnaggggcccgcaggnggancnaagattcaacccnttgaggggtcctgggaggtttccgangaacccaagcccttaagcccaaaccattgggttgaaaacncccnnttcctttttccttaanaaaantncccaattaaaattttncnttnggnccatgggnnggncnaatganccccngnaaatnccnnaacctacnntggntagggcttnanancnnccnannatttggcntttnnaccccnnggnaangncaaaangggttttaaaantngnnttttaaaaattgnnnttantttgtacnttcnanccttggggtngganaanaacnttggnnctnccnttctttnaaaaaaagggtnnannttccntntaaaannttttttnttnnttggcccancccnngng

SEQ ID NO: 4549 - DNA, 957 bp, Homo sapiens
  misc_feature 5, 17, 18, 31, 38, 73, 179, 212, 232, 253, 269, 295, 333,353, 362, 366, 395, 411, 426, 488, 505, 532, 550, 551, 554,578, 587, 593, 598, 604, 617, 618, 620, 628, 639, 644, 646,648, 672, 674, 680, 687, 689, 694, 699, 705, 708, 717: n = A,T,C or G
  misc_feature 718, 726, 729, 730, 733, 752, 757, 764, 781, 793, 795, 796,799, 800, 801, 809, 814, 827, 832, 838, 839, 842, 850, 852,855, 860, 861, 863, 864, 872, 877, 885, 888, 889, 896, 899,900, 904, 909, 925, 926, 928, 947, 948, 949, 952: n = A,T,C or G
tgagnccttgtacgacnnactatatttgtanatggcgnattgggccctctagatgcatgctcgagcggccggncagtgtgatggatatctgcagaattcgccctttcgagcggccgcccgggcaggtacatccttctgggattctaaacctcccttctccaaatatggccttgttgtanagtatagtcaccaggaatgattaaccaacattnaatctgagctaagagcaaanacaaacaagtgactgcctaanactgtatcaagtaagngcacagcacacacaaacacacatganttacttgcttgccactttggccttaggagtataaaatncccagatttgagacaagatncatttaagntttncactttcacacacaacacaatcctgttanagaaaaggaatgtgtngttcctcctttttgnccttcaaaacaaaaggaattattttaaaaaatgaaaacccatttctaccccgttaacagggnctgggggattcatcctntggggactttggttttttcttcccccnatgccaagggattacctnnctnggggggggaggggccccctaaganttttttttncctggncaagnttgggnggccccccctggnnanggaaattncccttttggtntttcncncnaagcccaaaggcccatataaattnanggttcnccgcccnanaattngggcnggggcnttncacaatttnngggaactnttnnccnttaaaagggtctttttgtnttggnttctttnggggtgcccaaaacaanaatgggcggtcnannaannnccccaggnctttngttttgggtgttnttgantggacnnccnccccccangnaangtttnngnncctttttnccaantttaacanttnngcgaaanggnntatntcatntgggaaccttttttgnngncaaaaactttttttttttnnngtnccgcc

SEQ ID NO: 4550 - DNA, 849 bp, Homo sapiens
  misc_feature 440, 533, 548, 582, 618, 641, 652, 663, 674, 681, 693, 694,701, 725, 727, 745, 751, 754, 769, 775, 776, 788, 790, 792,799, 807, 817, 819, 820, 827, 828: n = A,T,C or G
gactactatagggcgaattgggccctctagatgcatgctcgagcggccgccagtgtgatggatatctgcagaattcgccctttcgagcggccgcccgggcaggtactcaagctttggcttttctgaactttccttattttcaaaaatgtcccccagccccacttccacctgagacattcacacaccccatttcctcttccaggaaggctcttatgtcgcctgggtaaacttactcttcaagtctagtgacctttttccagaagctttcctgatatctttccatttcaccccactgctgacttattaaaatttctagaattttatacttttacactacattctctgtgttgtattctcttattcagggtctgctatttaatttttaagttccttgaaaatagagacaatttcattggttttcatcagttttggtccaagtntatataacatagatgaaaaatagatattttgggattaatatatattatataaaataattgtttgaatgagatgaataaactataggtgagaangatgcctaggctttngtaaccattcaaaacctaaactcaaaattcccancgcgggcaccttggctacctctggtacccttcgggncgcgacccacgcttaaggggcgnaatttccagcnccacctgggcngggcccggttncctaagntggaatcccgannctcgggnacccaaagcctttggggggtaaantnattgggccataaggcttntttccntgnggggaaaaattggtnattccnnttcccaaaattncncnaccaaanataccganccccgggaangnnataaaanngggaaaaacccttgggggggg

SEQ ID NO: 4551 - DNA, 919 bp, Homo sapiens
  misc_feature 6, 8, 18, 27, 411, 415, 446, 488, 503, 514, 539, 543, 550,553, 582, 592, 624, 644, 646, 650, 663, 665, 668, 672, 679,702, 711, 724, 725, 736, 762, 766, 769, 780, 783, 792, 795,796, 818, 820, 829, 832, 838, 839, 841, 842, 844, 849: n = A,T,C or G
  misc_feature 851, 855, 858, 859, 860, 861, 866, 867, 868, 873, 881, 882,891, 901, 902, 907, 910, 916, 917, 918: n = A,T,C or G
ttgagncnttgtacgacncactatatngcgaattgggccctctagatgcatgctcgagcggccgccagtgtgatggatatctgcagaattcgcccttagcgtggtcgcggccgaggactgactgctactggtagacctagggtcagctttgaggactgaggtaaccaccacaggaaataagttttgaggtctgattttgaaacaatattggaagaccattcctttgtgagatagaaacttctccattttaattttagtattttaagcttttcctacaggtcagttgggaataatttttatttagggactcacaatcttgaatttttagctaaatgccttaagaataaaatattatttaaaaagtattaaaatgctgtgattccaaacagttttcttgttcaaggatgaagnaatntaaaaaatataccaccctgtctcggcaactnggaaaaaagccccattttaattttccattcccaaaaatggangagactggaaaaatnaaagggcttanggacccacaaatcccacaacccctncctnccaaaanctnctggtcttggtctttttggataaaaaagncttccaaaangaaaaaaagttttcaagggaaacctttttcangaccctttttattaatttangncctnaaaaccaccttgngnttncccnaagatgntggtaaaagttccaaaaaccgcnttaattttnctccttgggggannaccaaagcttnaaaggcattgggggcaaaccagaaanaacntgnccttggaaaanggnccttttttnaannattaaagttcaccgggcccgtncntatttttcnctnaagggnntnnangggcnanaaanccnnnnattgnnngcacncctgggtnncaacttttnttaaatatgnnggaantgntcaacnnnc

SEQ ID NO: 4552 - DNA, 897 bp, Homo sapiens
  misc_feature 240, 362, 369, 371, 373, 399, 409, 412, 441, 461, 530, 532,537, 555, 567, 569, 571, 574, 584, 591, 592, 593, 594, 601,603, 607, 610, 611, 617, 624, 631, 637, 645, 649, 652, 655,659, 660, 665, 667, 682, 684, 688, 697, 705, 710, 729: n = A,T,C or G
  misc_feature 730, 747, 749, 756, 757, 758, 764, 765, 766, 771, 772, 773,777, 780, 782, 783, 790, 792, 793, 801, 804, 805, 808, 815,820, 829, 832, 834, 840, 844, 847, 848, 854, 857, 861, 867,878, 883, 884, 887, 889: n = A,T,C or G
ggcgaattgggccctctagatgcatgctcgagcggccgccagtgtgatggatatctgcagaattcgccctttcgagcggccgcccgggcaggtaccacttcctagatgtgagattgttggcaagcatttcgtctttgtgagcttcagtttccttatcaatacagtgcagctaatgctacccggcttacaggatcatggtgaagattcagaagaggtgacatagagcaagtgtccaggggntgtgtctgatgccaaggaggcacatggtaggtcagttctcttcatcccttgccttgcccctagaaaaggcatttgttttaagtcgcttgctgcaatccatcatcccccttttcctccacctntacaggntntntcccactatttctccctaaccttttnccccttgaanganttggggaaatttggggtttctttctaaanccacagcccttcaccttccnctgcctggaaccaacaagcaaccctggtgggctgttttctttcctgcttacccaaaaatttgggcaggnangcccnttggtgcttcttggcttnggcttttccctnancnatngggccctctntaaaccnnnnaccgcanantaangannaaaaancgctcanatgtaantggttncctttggnccgnggnacncacnncttananggggggggaatttcncngccnccaacttgnccgggccngttancttaatgggggatcccgannctccggggaccccaaancnttggggnnnaaattnnnagggnnnatangantnnttttccngnngtgaaaanttnngtntacccgntcacnaaatttccnccncnaaattnacgnaanncgggtnaancatntaaatnggtaaaagccnggggnnggncnaaatgaaa

SEQ ID NO: 4553 - DNA, 867 bp, Homo sapiens
  misc_feature 160, 299, 308, 335, 366, 378, 392, 404, 426, 453, 474, 476,479, 482, 483, 484, 487, 494, 496, 503, 504, 505, 508, 520,528, 529, 534, 538, 539, 544, 547, 549, 557, 561, 566, 568,570, 572, 575, 577, 591, 594, 605, 611, 613, 615, 623: n = A,T,C or G
  misc_feature 629, 632, 639, 648, 649, 658, 662, 663, 665, 666, 669, 670,677, 678, 679, 682, 687, 690, 691, 692, 694, 703, 705, 708,709, 710, 711, 713, 716, 717, 720, 723, 724, 729, 740, 744,754, 758, 762, 763, 764, 766, 770, 771, 774, 778, 789: n = A,T,C or G
  misc_feature 790, 793, 802, 804, 805, 807, 808, 809, 812, 814, 817, 826,830, 831, 835, 836, 842, 843, 844, 845, 854, 859, 861, 866,867: n = A,T,C or G
tgcatgctcgagcggccgccagtgtgatggatatctgcagaattcgcccttagcgtggtcgcggccgaggtactttatcttttcggggttttcttattccagaaaccttgttattgcctgtaaaatgcaaatgaattttgcacttattttgttttatttnctcttgtgttttcagaaatgttttgatgcatcagaaattgagagatcagtgatttcagttctcctgtcacacccttttatgataaaatattttggccatttctaaggagtagttagagggaaatcctttcataaatcantttcacttnaaaaaaacagtgattgttggaaaatcntatagtattctttgtggattagttgaaaatnatgaaatggcgnaaaaaataatatgnacaattttaatntgttttctcaatttaaagaccntgaatgcaatttttataattctcaaanaatttggatggggggacgggnanaanatnnnatnttttgancntatattnnnggntcccttggcccngggcgggnnccgcntacnnaaagnggncnaaaattcnccangcacnancntnggngnggcccggttactangtnggaatcccgcncttcgngntncccaaacntttggncantaaatcncttgggccnntagcttgcncccnngnngtnnaaaattnnntantcccntcnnnantttcccacncncannnntnccnnagnccnngaaancataaagtgtnaatngccctcgggngggncccnnntngggnnggngccntccccaccatnnatntgggctttngnncnnnatncnccnggttttccnaaanngggnnaaaccnnnnctgcccatntgctntnatcgnn

SEQ ID NO: 4554 - DNA, 869 bp, Homo sapiens
  misc_feature 422, 529, 553, 566, 573, 578, 586, 626, 646, 651, 678, 690,693, 694, 699, 703, 704, 709, 714, 722, 729, 730, 745, 750,760, 768, 771, 773, 776, 778, 792, 800, 803, 807, 810, 817,824, 829, 830, 831, 842, 857, 868: n = A,T,C or G
tcactatagggcgaattgggccctctagatgcatgctcgagcggccgccagtgtgatggatatctgcagaattcgcccttagcgtggtcgcggccgaggtaccacacagacacctcaggaccccagcaaatccaaacctgatctatcccttcactaccagatagcctcctcttcctctatccacttaaaggcacaagtgtattccctattttccctaccaaaagttgggaccccttcttaactaattccactttctcatcctcctaatctacttgttggaagataattctggcatttcttcagaaatgggtaaaagagattgatagaattgttaaggatgtttccaaaactattttggaaagaatgtatgtatgtctacatttaaggctaataagccgtgagcctttctactctagacattncagggtcctaaaaaataatgtctaagagtgacatcagcaaaaatgggtggattagggaactgtccagggccattccctttccccaaagccaaaaaaacaaaaaattnttcttggcaaaaaacctggtatanttccaaccttttngccaganttttnttgggaangacaagtttaattgttttaccagcaaacccaggggtggcnccacttttaattcaaaaaanaaaanggcccccctggaaaaaaggggataagnaaaaaagatttnggnngggcntttnncaaantttanactttttngcccccnncattaccctttttcnagganccttgccccngggggggnccntnttncnaaaaggggcgaaantttccaanccncccnttnggggggnccggttncttannngggttccgaancttcgggtacccaanactttgggggng

SEQ ID NO: 4555 - DNA, 610 bp, Homo sapiens
  misc_feature 4, 29, 30, 117, 134, 548, 574: n = A,T,C or G
aggnttagattttatacgactcactatanngcgaattgggccctctagatgcatgctcgagcggcccgccagtgtgatggatatctgcagaattcgccctttcgagcggctcgcccnggcaggtacagaagaangaagggggctgagtcttgcatacttctactgcccccattttacctggtccctaggagtagtgtgagactgggacaagtgatctgggattacactgattagcatgcttcacaggagggaaatataaggagaaaggaagaagtatttctcagtaacatcccgagttagccagaaaggctcaggaaatccctgtttggtgatgagatcattgtatcattgtttagagatttctaattcatgatgcaatgtatttttaaatggtaagttttagaaagcttgtttttataattctaaactctttcagacatcagttgtgtatctaatcttttgtttacaggacctactcaatctaaatcagaaaaagaacaggctgaagctacaaataagataaaaagaagtagaaatgactgtcttgnatttataaaatggcgatcatgagatntcctgttaatgactgactaccgagacatgctatttt

SEQ ID NO: 4556 - DNA, 656 bp, Homo sapiens
  misc_feature 435, 522, 529, 534, 626, 648, 651, 654: n = A,T,C or G
gattgaatacgactcctatagggcgaattgggccctctagatgcatgctcgagcggccgccagtgtgatggatatctgcagaattcgccctttcgagcggccgcccgggcaggtacgaagtgtgtttcagagtggcgaggaagggcaagttgttaagattggttgttgaattagtttctgtttgatgttaaagagaacatagagtaaatgataatccctcgaaagtggagatcttggcaggctggcgcctggtggtatagtagaaatctgagaaagggggaggatattaagtcagttttatcaggtaaagttgaatgaaataatcaagtttaagtgcgtcttgggtatttgcaaagatgtatagattaaggctaaaagggttggagaaatagatttgggagttacctatgatttttttggttattctgctctcangattgaaaactaaagaatctcagaactgcatttctaattagtgccataaaattctttattgatgccaagtttttggtttttccttgnaaattgnggtangtagaattctaaatgacctccagtagacccactaccagtatatattgcataatccatgggactgtgtgactaggggtggcttatactcctgngattattgtttaatatatggcncanttnac

SEQ ID NO: 4557 - DNA, 605 bp, Homo sapiens
  misc_feature 4, 5, 6, 7, 10, 12, 13, 71: n = A,T,C or G
tagnnnngtngnntacgactcactatagggcgaattgggccctctagatgcatgctcgagcggccgccagngtgatggatatctgcagaattcgcccttagcgtggtcgcggccgaggtactctcttttccaactttccatggccacctttgcctgaagattcagctataaatcctttttcaaacttgacaagcacagcctttcaaaacataaccctaacttattttaccaatcttgttgctcacataactctgtattatgtgctttagctagtagacaatttgatgcttccttttcaaatcttttgtttatcctgttcttacagttagcagtttcctctctctagctatcctgcctcttctctcttatctttcttttattttctcgttatttttgaatatatagatattatttattaatttatctgttttcttcagcttcataacatttatgtgtcatttataaactttagaactttgttagaagtttaatttctcttctgtttttatagtgagtagagagaattattttcacatttatattactctaaatcatgctagccaaggaataatttatctcattaatttataacaaaatctgtttgt

SEQ ID NO: 4558 - DNA, 641 bp, Homo sapiens
  misc_feature 520, 576, 641: n = A,T,C or G
gattgtaatacgactcctatagggcgaattgggccctctagatgcatgctcgagcggccgccagtgtgatggatatctgcagaattcgcccttagcgtggtcgcggccgaggtacactgagcctagaatatcttgtggggtcaaaaggtaaggcagtgctcaaaaaacaacagtaaaatggcaaaaatacatagaacccaacttgaagggcatcctaatgtaaaatctagaaaaatctgagcacaaaatgtattatagtcatgggttataaccaatataatgagaatccaagagtccagactgatttttaaaaaattgcattttttcaatataaaagaaaatatcttccttatagtaacattttaattgacaaatgtagaagtaatgatggaagtagaaaatcactgtttggcacacactgtagtaataactgtttcagacaagaattatccacgaatgctaaaattagtttggtgaaagtatgatgagaaacaagatacttacataggtccaaagcatntcctgacaagatacttattcattacacagaaaaaaaatagaaactttacagtaganaaatctggcagacatcaccttaatcaagtgatggaagtaacatcattagtaatgggacaagccan

SEQ ID NO: 4559 - DNA, 606 bp, Homo sapiens
  misc_feature 2, 17: n = A,T,C or G
gnttagacttgacgacnactatattgcgaattgggccctctagatgcatgctcgagcggccgccagtgtgatggatatctgcagaattcgccctttcgagcggccgcccgggcaggtacacactagctgataagacactgttgcccataatgtctatttattggatcagcaatttataagtcccacattctcatgccacatagctctacacagctgcaaaaatataccatagcttgcaggtgatcattggtttgataaaagatattgagtcgctcatcttgtgaaagtgatctttgatataagaggagcatcagcggggaagctcacatgtcccgtggctcacacaccagaaggtatttgtgtcttgtcattgtctgtctggcagtccatggcaatggctttttcagagaggcctgttttgtggttaactgtgtgtacctcggccgccgaccacgctaagggccgaattccagcacactggcggccgttactagttggatccgagctcggtaccaagcttggcgtaatcatggtcatagctgtttcctgtgtgaaattgttatccgcttcacaattccacacaacatacgagccggaagcataaag

SEQ ID NO: 4560 - DNA, 644 bp, Homo sapiens
  misc_feature 493, 525, 589, 607, 611, 630: n = A,T,C or G
tacactactatagggcgaattgggccctctagatgcatgctcgagcggccgccagtgtgatggatatctgcagaattcgccctttcgagcggccgcccgggcaggtaccaacagcttttcagcagatgttagcattcacatatgagaaagttgcagcagtgtgcacattgtgcttctgccctagatccttatgtaaataggacgtccgtgacttgatgttgaaatgacctttcaggcagtattctgttgccacatgcctgagcttgtatcccagagtaattagacgttttgacttacacatcttggtatacagtgtttatgctaattataaatgtctgaaagtttcctgaaactttttctttgtagctttttatcaaagacagacaggaggttgggaggagggttgtggattgtggtcctaagcctttgattttcagtctctcatttttggaatgaaaattaaaatctgcttttccagttgccgagacatggngggatatttttatattcttcatcttgaacaanaaactgtttggaatcacagcattttaatactttttaaataatattttattcttaaggcttttanctaaaaattcaagattgngagnccctaaataaaaattattncccaactgaccttg

SEQ ID NO: 4561 - DNA, 655 bp, Homo sapiens
  misc_feature 503, 532, 540, 556, 587, 602, 611, 619, 631, 638, 647: n = A,T,C or G
gattgaatacgactcactatagggcgaattgggccctctagatgcatgctcgagcggccgccagtgtgatggatatctgcagaattcgccctttcgagcggccgcccgggcaggtaccaccaagtccatttcctgagtttaaatacccaccccaccgaactggggttgtgaccttcagcaagattgtgttctattttagtttgttttaaacttcttcaagtcttcattgtctcatctgtaaagtgaggatcacaatgggatcccacttctaaggtaggtatgaaaattaaatgcagtcctgaatgccacgtgcttagctcaagtcccagctaaatggaggctacagaggacattgggtgaaaccacacctttcttatcttgttgatggtcccaacaaccttgggtggggtagcctcttttgtctccctcattgggcagttacagaaagctacacctgagaggtcacacatctaggaagtagaagaacctgaactagaacccangactctggatcttcccaggctctggcctncactgaangtgtgaaagtcaatancaattaggtggctggcccattcattgacatnaagggcactgggaangtctgactnttctcctnttcctttaccanacaaaanaatttcctntttctctc

SEQ ID NO: 4562 - DNA, 940 bp, Homo sapiens
  misc_feature 263, 285, 359, 366, 371, 446, 449, 452, 455, 480, 492, 502,505, 510, 518, 526, 529, 534, 542, 551, 561, 562, 577, 585,595, 614, 630, 632, 641, 644, 648, 652, 656, 657, 659, 662,664, 667, 672, 675, 676, 678, 683, 685, 692, 697, 699: n = A,T,C or G
  misc_feature 701, 704, 710, 717, 720, 746, 747, 754, 759, 762, 768, 769,772, 775, 781, 782, 784, 793, 802, 804, 812, 818, 823, 834,835, 840, 845, 857, 858, 863, 866, 871, 872, 873, 878, 879,883, 887, 897, 899, 913, 914, 916, 917, 922, 923, 927: n = A,T,C or G
  misc_feature 928, 929, 933, 934: n = A,T,C or G
gactcactatagggcgaattgggccctctagatgcatgctcgagcggccgccagtgtgatggatatctgcagaattcgcccttagcgtggtcgcggccgaggtactatacttggccctctataattctgggtgtaatgtcagttgggttcaggcacattacctgcagcagcaacaaacaccttcctatcaaagtctcaatttcccactctaaaataccaatatgtcagtgttgaagttaaattaggtttctaacccaatgcanggaaaaagagaattgatggcangtccttgatattaattagttgagtaaatgttgaaaatgacattttgaacaaaatattgaaaaagataacatgcncggtcanatgtncagcaagccaaaagaagaaaggctttcctgaaaaatgtaaaatttcaaagaagaagtttttgaaaagaaaaatanggngcnatnaacccagccttaagaagaaagaagnagggaagattgnatttcccagnatngccanaaaaaaancgccattnatncccanaggacccnggagggggnttcccccggnnttacctttcccccgngggcgggnccgccttttnaaaaagggccgaaattttncaaccaacaaccttgncnggggcccgnttncttnaggngggnntnccnangcntcggngtnncncaaancnttggggngttantntnatngggtcnattagcntgnttttccttgtggggaaaaattggttnnttccccnttcanaanttttcnnacnaantttctnnancccggaaanccttaaaantngttaaaanccccgnggggngcccttaattnnggggngcctnacctccccattnnatttnggntttgnnnctttnntttncccntttttccaantngggaaaaaccattnntnnttccnnctcnnntttnnataaaa

SEQ ID NO: 4563 - DNA, 854 bp, Homo sapiens
  misc_feature 3, 5, 120, 488, 522, 529, 531, 532, 540, 548, 590, 605, 607,638, 643, 663, 677, 678, 690, 693, 702, 704, 719, 724, 730,748, 753, 754, 755, 760, 766, 774, 780, 797, 812, 816, 818,834: n = A,T,C or G
tantnctatagggcgaattgggccctctagatgcatgctcgagcggccgccagtgtgatggatatctgcagaattcgccctttcgagcggccgcccgggcaggtacgcggggacattcanaggtgagcccagagcgggtaaagtggactggggagaacttcggaggatgttcatgtccaggagcagccccacgccctgtatggtcggtgtctagagcctcacagcaactaagaccaacccagctctcagaagaaggaatgtcaaaatgtcatgttcaattttacattcagtgcctggaatcttttcttcacaattgaaatgaaatgtgctgaaggaggtgaatccatgcattaatcttcagctcacaaaggaaatactacataagaagcaaggaccaccagactcaagacggacataattggatttttttttgccatggcctggaaagaaaggtaccccacagttaacccacaaaacaaggccttttnttgaaaaaagccattggccatggactggcagacnagacaantnnccaggacnccaaattnccctttctgggggtgttgagtcacgggacatgttgagctttncccgcttgatgctcntnttaatttcaaagatcacttttccaaagaatngagcngacctcattttttttttttnttcaaaacccatgnnttcccccttgcnaangcttttggntnttttttttgcaagcnttggntaaaanctttttttgggcttgaanaattnnngggancctttntaaaattngttggntcccaataaattaaaancatttttggggcaanaagngntttttattaacttttnggggggactcccccccccct

SEQ ID NO: 4564 - DNA, 903 bp, Homo sapiens
  misc_feature 4, 5, 6, 12, 521, 543, 573, 575, 583, 589, 591, 597, 600,609, 610, 617, 618, 622, 629, 639, 643, 670, 672, 687, 691,705, 726, 728, 732, 737, 741, 742, 752, 753, 779, 781, 785,786, 787, 792, 793, 795, 800, 802, 806, 811, 812, 813: n = A,T,C or G
  misc_feature 820, 822, 826, 827, 828, 829, 832, 838, 839, 840, 842, 843,844, 845, 850, 851, 853, 856, 857, 858, 861, 862, 863, 865,866, 867, 868, 880, 882, 884, 885, 886, 888, 901, 902: n = A,T,C or G
aggnnngattgnatacgactcactatagggcgaattgggccctctagatgcatgctcgagcggccgccagtgtgatggatatctgcagaattcgcccttagcgtggtcgcggccgaggtactatttttttcagttgtaaaaagtaaaagagctaggttttatgaacaggatgggaagccagttatattccagttatattcgatttctggttttaataaactaaagagaaaagtgctttttaggcaaaaatcctgagatttctaataacagactgtttttttcatcatcttattaaataacctattgcacactgattacatttattcttactattttctttattttttcctggatcattttcacaattttatttttcacagcattctcaatacttttcttcatgtttcattaatgttctgtatatagtccgaattctgtagcaacctctttaggaagctctttattaatacctagctgaaatataaaaaaatattgtaagtgtaaaactactcgattttatnggggagccccgtttggctttangtgggacctttttaaaaaccttccaccggntnggggatantttctngnattttnganggaaaaagnnaaaaccnntttnaaagggnaatttctttnttangaaaaaaaaaaggcattttccaaaaanantaagggttatttttntttntttaaaaaaaaagnaattttggcttgggaaaaaananttgnggaantttnncccaaaaaannttttaagggttttttttttttttttngnaaannnaaacnnanccttngnttgnccccnnncctggtnangggnnnnggncccaannntnnnntgggnnanttnnnaannntnnnncctcccgggggntnannncnttttttttttttnnc

SEQ ID NO: 4565 - DNA, 938 bp, Homo sapiens
  misc_feature 97, 251, 270, 325, 331, 333, 337, 385, 390, 398, 402, 421,429, 430, 438, 457, 472, 476, 489, 490, 493, 502, 505, 508,509, 511, 517, 518, 521, 525, 529, 535, 538, 544, 552, 553,554, 563, 564, 570, 576, 585, 596, 597, 602, 603, 605: n = A,T,C or G
  misc_feature 608, 614, 617, 621, 627, 628, 631, 639, 643, 658, 660, 666,667, 669, 674, 679, 681, 695, 703, 712, 717, 720, 721, 729,730, 732, 734, 737, 740, 742, 751, 752, 756, 758, 761, 764,765, 770, 780, 790, 792, 793, 797, 801, 803, 805, 808: n = A,T,C or G
  misc_feature 810, 811, 814, 823, 828, 831, 836, 839, 846, 847, 849, 850,854, 857, 866, 867, 869, 872, 877, 883, 889, 892, 894, 897,898, 903, 909, 913, 915, 918, 924, 927, 929, 931, 936: n = A,T,C or G
gggccctctagatgcatgctcgagcggccgccagtgtgatggatatctgcagaattcgcccttagcgtggtcgcggccgaggtacagatgtggttgngaaatagttcaaatcatggcacattgaatgtcctcactggatttttaggaatgtgttcactgagacagccaaatcctatttcattttctttggctcattgcattggctgtaaattggagatattcactttaatatgtgagtcaaaatttatttncaaacataatactgcaggngttctgtcacagaatataaattttcttatttatttccttaatacccttgctttcnactttntncttncacttcttctatttttattcctgggagtaatgtggaaaaagggttttnccaanaaaaagantttngccattattgcccattaantcctaacnngatggaantacctttttttttgggggntacctcttttcaatnatcntttgggggaggannatnaaccttatnggnaanngnggtttnnggnaatncccnaggggnttncagggnaaaaaaannncgttaattnnaccctntttttntggaaaaangccccctcccnnatggnntnccncttttntgnattntccccnnccngggggaanaaantttttttttattttntnggttcnnanaaatnttaancnttttatattatttnaggggccnctttggttntcacntcnntcggttanngncnctnttnanttttttttnnctcnanccnttnnccatngggtcacttnttcggtaaananncttnttgncngnccnanncancccttggtnttttnttnattanagntttttcnnanntttnttntaccccttnnanaancccgngaaccncgtgantgngnganncttgngttggngtgncncanatttanacncntnttgtnac

SEQ ID NO: 4566 - DNA, 853 bp, Homo sapiens
  misc_feature 419, 546, 580, 612, 628, 629, 647, 649, 653, 657, 671, 682,691, 704, 707, 717, 721, 743, 753, 773, 774, 787, 792, 794,804, 806, 807, 808, 818, 829, 832, 838: n = A,T,C or G
gaattgtaatacgactcactatagggcgaattgggccctctagatgcatgctcgagcggcccgccagtgtgatggatatctgcagaattcgccctttcgagcggccgcccgggcaggtaccagaaggcaggttgggtctagaaagccctgacagtctaagaaggtcctgagttcaggatactgaatagtgttacttcacactctagtcaagtgattctgagaccttagcatgcatcagagggctggtaaaacagattgttgtctccacctcaaagtatgtgattcagtagatttggggtggaattggaattgtggatttttaacattcttaggtgatgctgatgttgtttgtggtccagggagctcacgttgaagactgctgccctgggcaattgggatccatggaatgtttggaagtnaaagaataaaattatcatgactgtgtctaaaaaagatgacatttaacagaagtgatggatatattggagaggaaagggcctaaggatggtgaggccagttaaatactttgagtagtccatgtgtgangtaatcagagaatgagccctgattggaggtgggnaagcctggggcctgttgaattctttcatttcnttttaaagggcttatnntgaattcattttatcaancnaatngganaccaatgggccctncctcttaattnccttttganaatttttttttanggnttggccaaantttnagggaaaataaaccaatttcanggatgggccnccttttttttttgagttttnnaaggtaaaaaacnaaaananaccttttttnannnatagggtttnggccctaaatnttnggggcnggcccccccccccct

SEQ ID NO: 4567 - DNA, 903 bp, Homo sapiens
  misc_feature 12, 26, 27, 406, 445, 452, 461, 480, 481, 500, 512, 515,519, 529, 548, 562, 574, 583, 585, 591, 599, 606, 608, 612,636, 642, 648, 654, 660, 661, 663, 666, 675, 677, 685, 686,693, 694, 695, 700, 701, 709, 719, 727, 733, 754, 759: n = A,T,C or G
  misc_feature 762, 764, 773, 778, 781, 793, 819, 820, 821, 837, 843, 851,871, 885, 886, 890, 897, 901, 902, 903: n = A,T,C or G
gactcactatanggctgtagggcganntgggccctctagatgcatgctcgagcggccgccagtgtgatggatatctgcagaattcgccctttcgagcggccgcccgggcaggtaccttgctacacggccgggggccattgagactgccatggaagacttgaaaggtcacgtagctgagacttctggagagaccattcaaggcttctggctcttgacaaagatagaccactggaacaatgagaaggagagaattctactggtcacagacaagactctcttgatctgcaaatacgacttcatcatgctgagttgtgtgcaagctgcagcggattcctctgagccgctgtctatcgcatctgcctgggcaagttcaccttccctgggatgtccctggacaagagacaanggagaaagccttaaggatctactggggggagtcccggangaaccantcttttttntcccgctggaacccatggnncactggagtttccctttantgcttactttcnacntggngcattccctntggaaaattacaacccagntgagaaaattcctntgaaaaattttngaaagtttntntggggnttcattgnttttaancnttgnttccaagcttttcccaaaaaattnccccancaaaanaatttnaaactnngnatncttgggaangnaggaaaannaaacttnnntgggnnggtaaacntggaaccccntttttggnttgganaacctccccaaggggctggangtcanttntnttgggaaanccgcnaanaaaacttggggntttttccctttgccccgggggggaannnttttgggttttttggngaaagncttttttnggaccctttgggcccggaancaccctttaagggnngaanttcccanccannn

SEQ ID NO: 4568 - DNA, 922 bp, Homo sapiens
  misc_feature 408, 413, 414, 422, 445, 480, 510, 524, 528, 533, 550, 559,560, 578, 582, 587, 595, 597, 599, 616, 617, 620, 621, 623,630, 639, 644, 650, 666, 668, 672, 675, 685, 689, 692, 699,707, 715, 723, 729, 735, 737, 740, 749, 755, 765, 780: n = A,T,C or G
  misc_feature 785, 787, 790, 791, 797, 804, 811, 815, 825, 835, 838, 864,866, 878, 879, 881, 884, 911, 915, 916, 917, 919: n = A,T,C or G
gactactatagggcgaattgggccctctagatgcatgctcgagcggccgccagtgtgatggatatctgcagaattcgcccttagcgtggtcgcggccgaggtacaagcgtgccctgcaggtggcacacaaagctgagatattgtcacctttgggagcactgtattacaacactggccgatacgaagaggctttgcagatttaccaggaagctgcagcacttcagccttctcagagggagctccgcttggcactggctcaggttttggccgtgatgggtcagacaaaagaagctgaaaagatgaccaatcacatttgtgtcagaagagaccggatgcctttgaatgctatccgcctcttgtcaagcccttctatagcaagcaaggagaaccacgacaagggcaccttgntgctnntagacaangcttctccagctgaaacccaaanggacccaaaaagtcattttctgaaacttttttttncaaaaagggaaacccaatttaagaagagcnagaacctttttttngacnaaaancttttttgaggaagctnttaagaagnngggctggtgccaaacttnaaanccccngacccaangncnccagggccttgggattnnaannantggggtnggcatttcnaacancatttnaaagggggaaaaattntngtgnttntgccaaaganaccnttnttttttnaagaaaangcctttanaagttggnttttcnaaaaancnggnaaaaattgnggtggnaaggaaaaanttttttgcccaaaanttggnantcnncttaanaaaaaanccatttnccanaaaagttttngggaaaaaanggntccaaaactttttgcaccccccgttntngacccaaccctnntnagnaaaaatttggggggccctctgaaaaangggnnngngta

SEQ ID NO: 4569 - DNA, 959 bp, Homo sapiens
  misc_feature 1, 343, 380, 386, 393, 394, 395, 397, 414, 430, 451, 459,474, 479, 483, 492, 499, 500, 518, 525, 536, 545, 552, 566,571, 583, 589, 591, 601, 603, 608, 610, 618, 634, 635, 636,643, 650, 657, 660, 669, 674, 675, 680, 687, 691, 695: n = A,T,C or G
  misc_feature 704, 707, 709, 714, 718, 726, 733, 738, 745, 750, 751, 759,761, 763, 764, 766, 768, 785, 789, 793, 794, 795, 796, 799,812, 818, 819, 827, 830, 833, 835, 841, 842, 843, 848, 853,855, 857, 858, 861, 863, 865, 869, 870, 872, 875, 878: n = A,T,C or G
  misc_feature 883, 884, 888, 889, 891, 893, 899, 901, 912, 921, 923, 924,925, 931, 932, 939, 940, 948, 953: n = A,T,C or G
nactcactatagggcgaattgggccctctagatgcatgctcgagcggccgccagtgtgatggatatctgcagaattcgccctttcgagcggccgcccgggcaggtacaggctttgatgtaggaccgtctacgtcatgagtgaagagcggtaaagtgccagggtgtctggtggacagagtgaataagaacatggtataagatgaggttatgactatattgtgtagaaccttataagccactttaatgattttgggttttgttctagacgggaaaccattggaaggccttgagaagagaagtgattgtgattaggacctactctatctttttatgcagtgcattngactttgggggcccaaggggttatgatttccagaaanagactnggttttnnnanaacttggttattaggtnattcccaagccaaggnagataaattaagtgggcttgnaattcaangcctggggtaccctncgggnccgngaacccacngccttannggggcgaaaatttccaanccaccancttgggcgggnccggttttnccttagntggggattccgaancttcnggttaccccaancctttngncggtaaattnanttggngnaattaagnctggttttccttggtnnnggaaaanttggttntttccgnttnaccaaattncccannacaanatttcgnaagncccngggataccnttnanaggtngtanaaaacccntgggggnggccnttaattngaggnntagcttancntnncnanttttaattttgccggtngggncttnnnnttntccccttttttcnaatttnnggaaaaanccnttncntgcccnnnctggnttttnantnnaantntngccnnanccnccnggggnnaganncngngttttngnttttttggggngcttttttncnnntttccnngttaaannaaatctgntgggnttcggg

SEQ ID NO: 4570 - DNA, 789 bp, Homo sapiens
  misc_feature 260, 379, 389, 393, 402, 410, 418, 424, 436, 450, 460, 471,474, 477, 478, 479, 481, 493, 494, 497, 499, 500, 503, 508,514, 521, 530, 547, 553, 558, 560, 561, 562, 563, 564, 571,576, 577, 578, 579, 580, 582, 583, 593, 594, 600, 603: n = A,T,C or G
  misc_feature 605, 608, 610, 612, 614, 615, 620, 621, 622, 623, 625, 628,630, 638, 639, 640, 652, 657, 658, 659, 660, 663, 664, 666,679, 682, 691, 693, 698, 702, 703, 709, 712, 716, 717, 719,721, 724, 731, 732, 733, 734, 735, 738, 741, 742, 748: n = A,T,C or G
  misc_feature 749, 751, 759, 766, 771, 775, 777, 781, 782, 783, 786, 787: n = A,T,C or G
gactactatagggcgaattgggccctctagatgcatgctcgagcggcccgccagtgtgatggatatctgcagaattcgcccttagcgtggtcgcggccgaggtactgtcagtgtgtcacacaggttagtgaggcttgaagcccttgctttttacacttacagttggtattcctgcagcacttggaagtgatcatgcctttttctagaagagttacctacagcagaagtgttaaaatggaagagatttacttccactattnctggggggattcttgttaccttggcttacctgaggacctacagttctacatttactccaggatacagggtctgaacatacttgctagagggaatgtgattgcactggggcatgagtttnttgtgttggngggnttcctgccnttgggggnatttattntattcntttgggccaatnctgtccaccaaaanctttacccancttccatgggntgnttnnnangctctactttcnnagngnnaanaaagnaaccanatgggcngccccttantttttgggggttgggtncccttnccctngnnnnngcctccnttaannnnngnnaaatttttcnntccccntgnanggncnanannctatnnnngnttnanaattttgnnntaccacaattanttttnnnncanngngacgatatatttnttntcctttggngnaaatntatnntccctntcnactnncncnatntaattcnnnnnatnaannatcatnntnttgacctnacggtgncttantagntnaccnnntanncc

SEQ ID NO: 4571 - DNA, 775 bp, Homo sapiens
  misc_feature 428, 443, 462, 482, 487, 492, 501, 502, 514, 518, 519, 533,534, 537, 544, 551, 556, 560, 563, 569, 574, 577, 583, 584,586, 587, 588, 591, 593, 598, 609, 613, 614, 616, 618, 621,623, 624, 626, 640, 642, 646, 647, 652, 653, 657, 659: n = A,T,C or G
  misc_feature 660, 663, 664, 669, 676, 677, 680, 681, 686, 692, 694, 695,703, 705, 706, 710, 715, 719, 723, 735, 737, 739, 740, 741,742, 743, 748, 749, 751, 753, 757, 758, 768, 770, 771, 774: n = A,T,C or G
ctcactatagggcgaattgggccctctagatgcatgctcgagcggcccgccagtgtgatggatatctgcagaattcgccctttcgagcggccgcccgggcaggtactcttccttccagaggtttccccatgccctcttttggacttgatgggggtcatttgggacaataaggcctgataactccttggacttaggaagcgagagagcaggaatcaagaaaagcttttgtgttttttggtttgtgtaagaaaatatgatggattgagataaaatttttcaaaataggcccaatgaagaagagcagattcaaggagtaaaggattatttatgaggatggcctgtgcaaaaagacacccagagatttcatgctgttgattcacagaaaagcctgttcctttttactccgtaagagtcctcagagctggatnatcccttacagaaanaccttgataatatttctgntaaccctccaagggttcccntttgncaaanggtggtgcnnaccctttcttanaaanntcacccaaaaggtnnatnagggganaaaaganaaaanaaanccnaaattnccaanttnttaaanngnnnttntnaacantggaaggatcnaaanncngncangnntntgggttttactggnangaanncaccnnttgnannccnnacccnaaaaaannacnntgggntttttntnnccctggcncnngaanccccnttangggngaatttccagcncncnnnnngggcnntntnttannggaaccccgncnncgnc

SEQ ID NO: 4572 - DNA, 837 bp, Homo sapiens
  misc_feature 2, 6, 7, 8, 9, 10, 11, 192, 312, 479, 486, 524, 594, 637,687, 724, 753, 759, 768, 784, 793, 821, 824, 831, 836: n = A,T,C or G
tngggnnnnnntcgactcactatagggcgaattgggccctctagatgcatgctcgagcggccgccagtgtgatgggatatctgcagaaattcgcccttagccgtggtcgcggcccgaggtacttctatacagtgggaatgctactcagcaatgaaaaagaaaaagatgcaacaacctggatagacctcaaangcttatgtatagtaaaaaggtcaacccttaaaaaggtatatattatatgattgcatttatataacattctcaaaataaaaaaaaactatagaggatgaagaatagactagtgatttccangggcacagggacagggtaaggaaaagaattggtagaccaatgtgaatgccaaagaaggtcttctggtgttggatgggaaccagtctgtatcttggattgggggtagtgggcttcctcaaaatctatgtatgggaataaattaaattaaaaattataccttatacccnccaaatnactgcaggtttaaaaatggtttaaaaaaaaatggttgnaaaactaagttaaaaatattttaagtctagcctaaccaataaatgaaccaatgtcaacttaactggtttnggggtattataccagctaaaataagaatgtcattcattggggnccaggccgtgggtggcttcacaccctataatctcaaccacttttggggangcccaagccgggccggatcaacgaaggtcaaggagantcgagacccattccttggcttaacaaggnggaaanccccgtctnttactggaaaataccnaaaaattancccgggccttggtaagccgggcgccctntanttccccncttcnt

SEQ ID NO: 4573 - DNA, 780 bp, Homo sapiens
  misc_feature 2, 3, 4, 5, 6, 12, 13, 14, 15, 16, 427, 428, 474, 576, 677,688, 728, 766: n = A,T,C or G
gnnnnnggggtnnnnntacgactactatagggcgaattgggccctctagatgcatgctcgagcggccgccagtgtgatggatatctgcagaattcgccctttcgagcggcccgcccgggcaggtacccccagagattattcaatcattgcttatgactgtggcaaacaattttgttaccgacaagaactctggagaagtcatgacagtaggaatcaatgctataaaggagataacagctcgatgtcctctggccatgactgaagaacttctccaagacctggctcagtataaaacacacaaggataagaatgtaatgatgtctgctagaactttgattcacctcttccgaacactgaatcctcagatgctgcagaagaaattccggggtaaagcctacagaggcctccatagaagcaagagtacctnngcccgcgaccacgctaagggcgaattccagcacactggcggcccgntactagtggatccgagctcggtaccaagcttggcgtaatcatgggcatagctgtttcctgtgtgaaattggtatcccgctcacaattcccacaacatacganccgggaagcataaaagtgtaaaagcctggggtgccttaatgaggggagctaactcacattaattgcggtttgcgctcactggccgcttttccagtccgggnaaacctgtcgngcccacctgcattaatgaatcggccaacgcgccgggagangcggtttgctatttgggcgctttttccgctttcttggnttaatggacttggt

SEQ ID NO: 4574 - DNA, 821 bp, Homo sapiens
  misc_feature 5, 6, 7, 8, 9, 10, 450, 496, 520, 571, 705, 717, 727, 730,738, 755, 769, 782, 793, 810, 820: n = A,T,C or G
tgggnnnnnntcgactcactataggggcgaattgggccctctagatgcatgctcgagcggccgccagtgtgatggatatctgcagaattcgccctttcgagcggccgcccgggcaggtaccatagatcactggtaggggaaacaaaagcaaaagcaaaacaaaacaaaacaatagatcctgatgacacaggtctatttatacaaacgattgaagcaaaaatcaattgtaactgtatcaagtttatgcagggagaaatgacaattctatgtcatgtgactagacaatatggtgacagatgggttttggaaagcttcaaaataattggtgtatgtttaaacagctcatagtgcccattacacataccgtatgggcccgccaattatttctttccagtttctgttgccaaaatgcttgaattcaaccaacccccttacaatattggtaccttngggccgcgaccaccgcttaagggcgaatttcagcacacttggcggnccgttactagtgggatcccgagcntcgggtacccaagctttggcggtaatcatgggcataagctggttttcctgnggtgaaaattgttattccgcttcacaaatttccacaccaaacattaccaagcccggaaagcattaaaatggtaaaagccttggggggggccttaatggaggtggagcctaacctcaccattaaattggcgttgncgcttcacttgncccggttttncanttcggggnaaaccttgtcgtgccangctgcatttaatgnaatcgggccaacnccccgggggangaggcgggtttgggttnttgggccccnt

SEQ ID NO: 4575 - DNA, 797 bp, Homo sapiens
  misc_feature 5, 10, 411, 432, 471, 487, 519, 599, 605, 611, 630, 637,674, 676, 679, 690, 712, 727, 731, 752, 765, 774, 775, 781,783, 797: n = A,T,C or G
tgggnttgtntcgactcactatagggcgaattgggccctctagatgcatgctcgagcggccgccagtgtgatggatatctgcagaattcgccctttcgagcggcccgcccgggcaggtacaaaagctgagggaaaaagtttcagcttcaagcattaacgttttagttcataaatctgaaggaaaataaagagaaaataaaggcattaagagatatgaaacaatgtaaaaatgaatatttcttttatgaatccttgtgaatatatgacagtatcaaagctcagaaaactagtttactggggaggatcacgaaggtcaggagatctaagaccatctggctaacacggcgaaaccctcttctctactaaaaaataccaaaaattagccaggagtggtggcgggcacctgtagtnccaactactaatggggctgangcaagaaaatggtgtgaaccccggagtcaaaaggttgcngtgagcccaaatcgcnccccttggacttcaacctgggcgacagaaaanagactttggcttcaaaaaaaaaaaaaaaaaaaaggaaaggaaaaaaggaaaccggtttaaggggccagccaaattgagangggggnaagcanccccccacccgaattttgnaccggtnaaacctgggaaggaaccttttaaatgggaaaaggagngnaanccttttttttnattccttgggggaattggccangggcttggggggttncccnccaccaaataaaataatttanaaggggcttttgnaaaattggnnaaacancnattttgcccttgcn

SEQ ID NO: 4576 - DNA, 765 bp, Homo sapiens
  misc_feature 6, 8, 9, 183, 507, 533, 662, 699, 701, 704, 707, 710, 717,746, 761: n = A,T,C or G
agtttngnntcgactcactatagggcgaattgggccctctagatgcatgctcgagcggccgccagtgtgatggatatctgcagaattcgcccttagcgtggtcgcggccgaggtacaggtaagggggaagttccaaagctgttagtcaccttgttttcatgctgatcacccaaccagatctantgtttgtgttctaagaactttaatgttttggaggaaatatcttgtggccttcaaaaaatcattctgtgaaatagttgtttctacctacattcgtctcattaatttttctacatacagcagaattctgcatatattagaggtaactcagtcagggtgtcatggaggaaggtgacccatggttcaccatcttgccaatagaaaaaccaataggaagtcatctaaccatcattcggagggattgaggtctgtcatagggagaacaaactaaagaactggacttttgctttcagtcaagatggagtaacagggactaaatttaccctnccacctgaaacaaccccagaatccanataaataagaagacaatgggtattgagacactggacatcagacaatgaaggacagtgctttgaccaggtgggaaaacaaaccaacttgagccctgtaattgcctttcttaccaatttgaagaacctttncagggagggggagaccaagcaaggacctgccccggcngncgntcnaanggccaanttcagcacactggcgggccggtactaagnggatcccagctcggnccct

SEQ ID NO: 4577 - DNA, 671 bp, Homo sapiens
  misc_feature 121, 197, 209, 285, 348, 373, 391, 397, 405, 406, 422, 427,433, 435, 440, 441, 453, 485, 487, 492, 502, 519, 526, 528,532, 533, 567, 572, 580, 582, 585, 589, 591, 596, 606, 613,615, 620, 621, 622, 625, 626, 639, 640, 641, 645, 657: n = A,T,C or G
  misc_feature 659, 662, 667, 670: n = A,T,C or G
gggccctctagatgcatgctcgagcggccgccagtgtgatggatatctgcagaattcgcccttagcgtggtcgcggccgaggtactgccccgcagagggcctgggtgaaggggccacccancaaggatggcaatgtgtatgggaggagagccgcgttgcttctagaggctgaatgcctgtcaaatggagaaggcttncatttacttcanaaagctacactgactctactaaaaggcccctttcctgctggcttttaggaaaagagagaattccctcatcagtctnaaaatcacaagcaacagaaatgggaaatcgtttttctaaagaaatgaaatgtgttgaattcantaatactctttcatcttccccttanccaagaacccactagctnctcaanaatatttnngagttatctggtaganggtgncctttncngacanncaaaatttggcntaaataaacattttgggttggaataattttancntaatnccgcccaggncacctggggcttaaagngggcttncnttgnngaaaatttttttaactttggatcctttaccccancagantccttcgntnacncttncnttttngaccaagatngaagaananacttnnngannttcacttatgggnnntaancttcaaccaccngnttntgtgnacng

SEQ ID NO: 4578 - DNA, 651 bp, Homo sapiens
  misc_feature 563, 567, 584, 605, 633, 650: n = A,T,C or G
gaatacgactcactatagggcgaattgggccctctagatgcatgctcgagcggccgccagtgtgatggatatctgcagaattcgccctttcgagcggccgcccgggcaggtactttgctacacggccgggggccattgagactgccatggaagacttgaaaggtcacgtagctgagacttctggagagaccattcaaggcttctggctcttgacaaagatagaccactggaacaatgagaaggagagaattctactggtcacagacaagactctcttgatctgcaaatacgacttcatcatgctgagttgtgtgcagctgcagcggattcctctgagcgctgtctatcgcatctgcctgggcaagttcaccttccctgggatgtccctggacaagagacaaggagaaggccttaggatctactgggggagtccggaggagcagtctcttctgtcccgctggaaacccatgggtccactgaaagttccttatgctacttttcactgagcattctatgaaatacacccagtggagaaaaattccttgaaaaatttgcaaggttgncctnggggttcatgtctaaanctttggtcccactttttccangaaatgccccccaaagaaatttaaactngggatcttggaaagaang

SEQ ID NO: 4579 - DNA, 634 bp, Homo sapiens
  misc_feature 573, 577, 581, 584, 586, 589, 594, 604, 610, 619, 625, 630,634: n = A,T,C or G
ctatagggcgaattgggccctctagatgcatgctcgagcggccgccagtgtgatggatatctgcagaattcgccctttcgagcggccgcccgggcaggtacgcggggacacattcagaggtgagcccagagcgggtaaagtggactggggagaacttcggaggatgttcatgtccaggagcagccccacgccctgtatggtcggtgtctagagcctcacagcaactaagaccaacccagctctcagaagaaggaatgtcaaaatgtcatgttcaattttacattcagtgcctggaatcttttcttcacaattgaaatgaaatgtgctgaaggaggtgaatccatgcattaatcttcagctcacaaaggaaatactacataagaagcaagaccacagactcaagacggacataattggattttttttgccatggcctggaaagaaaggtacctcggccgcgaagggcgaattccagcacactggcggccgttactaagtggatcccgagctcgggtaccaagcttggccgtaaatcaatggtcatagcttgttcctgtgtggaaaattggttantccngctnacnanttncaccncaaccatacnagcccnggaaagcanttaaantggtnaaan

SEQ ID NO: 4580 - DNA, 695 bp, Homo sapiens
  misc_feature 366, 393, 396, 397, 407, 430, 433, 434, 456, 463, 466, 472,485, 494, 499, 508, 512, 513, 515, 524, 525, 529, 536, 553,557, 572, 579, 582, 585, 588, 599, 601, 603, 609, 610, 623,624, 629, 638, 639, 643, 646, 648, 651, 657, 658, 659: n = A,T,C or G
  misc_feature 667, 672, 673, 689, 690, 695: n = A,T,C or G
gactactatagggcgaattgggccctctagatgcatgctcgagcggccgccagtgtgatggatatctgcagaattcgcccttcgagcggccgcccgggcaggtacgcgggaactgcggtttcctggcgcgctcagacgtctgatgctttgcttgcctttgtaaagtcaggtatctttttctgcatgaagcctttgaaaattaacggttaattggtttcacagagcagtattgcagttcttttgtgaggatgcagaaacttgtgtaaattagcttttacctgtaaatctgtcgggatgttgagtatagaacaacaaataaggtgtatggcactgcttttacaaatttggttggtggtggaaccttcngccgcgaacactcttagggccgaattnccnncaccactggnggccgttaattaaattggattcntannctcggtaccaaagctttggccnataaatnatnggtcantagctggttttcnctgtgttgnaaaanttgttaatnccgnncnacaaatttnncacnacaaacncattaccgaagcccggnaaancaattaaaaggtgtnaaaaganccnggnggntgccctttaantnantgtggnngcaaaaacttgannatttnaattggccnnttantcncncanctatgnnnccgctttnctcannacgggataaaaacctnntccan

SEQ ID NO: 4581 - DNA, 642 bp, Homo sapiens
  misc_feature 390, 407, 436, 483, 516, 529, 533, 535, 574, 601, 602, 622,623, 624, 634: n = A,T,C or G
atagggcgaattgggccctctagatgcatgctcgagcggccgccagtgtgatggatatctgcagaattcgccctttcgagcggccgcccgggcaggtacttttaatacaccatcctggtggatctggcgcaagggaactccacacagaaaaacactgccctcacgttatgaaaggattcaacattattctctcttttgaaagataattggcttcaaagaataattgaaagttagaaacttgggtcttttacagaaccaggtaatatctctactactcttttgggaattagtcttgaactgcagccactgtgaaagcttctggtgttatttaaattaattcttgtattgttattaaactttccacatggttttgtttatctcctcaactanggtttgtgttcctgagnaggcaagaactatgcttatatatttttanaaaatattttccaccattattttagcactcttattaaatatttattnaggccctcaataaacatactggtgaattttggntaaaaaaagccangccntnaaatttgctttttaaaaatcccaccctttaaaacttccngaggccatgaaagcccaccctcttttnngtggggaatatttggttttnnnaaacaaaagnaattttcc

SEQ ID NO: 4582 - DNA, 659 bp, Homo sapiens
  misc_feature 529, 556, 579, 587, 593, 604, 612, 614, 629, 634, 644, 656,659: n = A,T,C or G
gtaatacgactcctatagggcgaattgggccctctagatgcatgctcgagcggccgccagtgtgatggatatctgcagaattcgcccttagcgtggtcgcggccgaggacaactgacatctcatcactgaagtgttatgaattgatcagcttggatatacacttaggtcataatactaaatatgaatattcgtttttttccataaccatagggtgtaatcatatgcctatgattctgtatcctctactttatccatctgaatgcttctcgatccactcatgcaagatgtgtaaaactcatcatggaaataatctatactaagctttcaatattgacatatttatataaaaatttattgcaatagattaaataaacataaagtaactttttttatattgctaagtcaccacaatatttatcttaaaaagcaatcttattattcaagtataaaatttcaagtattttttcaggatccctacaattcgcctggttttgggtggatcatttagtcttataaataaattttttnggggaatgggcaatttttacccaaaancaacaccaactttcctttaaacnattaaaangccaantggttctcaanttttccananataatcctcattttncaatnaggcttaacnatttaaaccaanaan

SEQ ID NO: 4583 - DNA, 885 bp, Homo sapiens
  misc_feature 473, 561, 582, 593, 616, 623, 630, 640, 641, 681, 711, 714,720, 750, 758, 773, 788, 805, 831, 835, 861, 864, 865, 871,879, 884: n = A,T,C or G
gactcactatagggcgaattgggccctctagatgcatgctcgagcggccgccagtgtgatggatatctgcagaattcgcccttagcgtggtcgcggccgaggtacgcggggactctttcttgaagtccaaaggagaatcctcaaagaatctctgaagaaaatttgactccactgattaccatctgttggtgacactctgcttcaattattctttgttctgaactccaaggactgttttaagttctacaatgtctggcagattgaggaacaaagataagggagaacaagcagaaactggtcagagggcaaatccagacagaacctttgacttggtgttgaaagtgaaatgtcatgcctctgaaaatgaagatcctgtggtattgtggaaattcccagaggactttggagaccaggaaatactacagagtgtgccaaagttctgttttccctttgacgttgaaagggtgtctcanaatcaagttggacagcactttacctttgtacttgacagacattgaaagtaaacagagatttggatttttgcaaactgacgtcagggangcccaatttggtttatgcatncttaaggtgantattttgtagtaaaaaaaaattnagatgcnaaaatanggtaactatnnttctctaattggacctttggtatgccttggggattgaaanaaaaaaactttgttttttttttaaaaaacnaangttggnaaaaaaaaattttccctggatttttcttgnattcccgnaaatcagttttaagnttttaaaagaatttncccattaaccattaggngggaacttttccttggaaaataaatncgantttttttaaaagaataagtttttttntannaagttnttttttgnaaaant

SEQ ID NO: 4584 - DNA, 908 bp, Homo sapiens
  misc_feature 147, 148, 208, 416, 469, 471, 502, 511, 525, 533, 540, 567,583, 617, 618, 619, 631, 643, 655, 663, 670, 671, 673, 675,696, 729, 739, 753, 767, 776, 782, 783, 795, 797, 800, 803,805, 827, 828, 830, 849, 853, 855, 870, 881, 887, 893: n = A,T,C or G
  misc_feature 896, 898, 902, 907: n = A,T,C or G
gactcctatagggcgaattgggccctctagatgcatgctcgagcggccgccagtgtgatggatatctgcagaattcgcccttagcgtggtcgcggccgaggtacctgtaaatctctcagctaagttaagctataaatttgattaggnngacttgggcaaatgcaccataaagtcctttccagagaaggagttcacttttcataggttntacttgaaggaattgtccaagaaggtttactgtataaaggaaattgaacacagaaggaatgaaaagtaaaaattaaacctaaaatttgcagaagaaaacactacagaaaatttttgtgacctggggtttggcaaagatttcttaaatatgacaccagaagcacagtctataatgaacgtattagtttattgggttaatcaaaatgtanaaacttctgctcttcaaaagacagtatttaagagaaattaaaagagaaacccncngattgataatctttgtaagccctgtattttnatcaagggncatgtgggaatttnttaaaggnactctgnaagctcaattgttagaaaaaccaaatnggcttgggtgccgganggctcattgccttgtaatccccaccacttttttnnnaaggcttggaangccaaggtggantcaattgaaggnccggggangttaaannancnagccttgggcccaaaattggnggaaaacccccaatttttttcttaaaaaatgcnaaaaaaattnaccttgggcccttngttgggcaaggccncccttttanccccannttggttttgggnanggnttngnggcaaaaaaatttgtttttaanntncgggagggccaaaagtttncaangngccccaaaattgggnccacttgtacnttcaanctgggncananaaanggggng

SEQ ID NO: 4585 - DNA, 953 bp, Homo sapiens
  misc_feature 322, 338, 368, 371, 372, 384, 469, 482, 545, 546, 555, 560,561, 570, 583, 603, 625, 626, 629, 635, 637, 638, 646, 662,665, 672, 673, 712, 719, 721, 725, 730, 752, 757, 758, 768,781, 783, 785, 788, 795, 811, 812, 820, 828, 830, 833: n = A,T,C or G
  misc_feature 834, 835, 838, 845, 846, 853, 860, 861, 871, 878, 880, 882,883, 887, 889, 894, 895, 901, 909, 910, 914, 920, 921, 922,925, 928, 930, 934, 935, 944, 945, 946, 947, 949, 952: n = A,T,C or G
gactcactatagggcgaattgggccctctagatgcatgctcgagcggcccgccagtgtgatggatatctgcagaattcgcccttagcgtggtcgcggccgaggtacaggtaagggggaagttccaaagctgttagtcaccttgttttcatgctgatcacccaaccagatctaatgtttgatgttctaagaactttaatgttttggaggaaatatcttgtggccttcaaaaaatcattctgtgaaatagttgtttctacctacattcgtctcattaatttttctacatacagcagaattctgcatatattagaggtaactcantcagggtgtcatggangaaggtgacccatggttcaccatcttgccnatnnaaaaaccaatangaagtcatctaaccatcattcggagggattgaggtcttgtcataggggagaaccaaacctaaagaactggacttttgcttttcantcaagaattgggngttaacaagggacttaaaattttaacccctccccaacttgaaaacaacccccccagaattccnngaataaaanttaannaaagaccanttgggttatttgnaggaacaacttggaccttcnaggacaaattggaaagggacanntgncttttnannacgggggngggaaaaacaaaaccnaanccttgannccccttgtaattttgccctttttttttaccaaaattttngaaaaancntttncccanggggaggggggggggaaccaanccaannggtacccttnccccggggcgggncngnttnaaaaaangggccgaaatttccanncacacttngccggccngnttnnntanaggggannaccaaancctcggnnaccaaaaccnttggggntnanntttngngcaannaccctntttccttnngggnaaaatnnnttntcncnttcnnaaatttccnnnnanaant

SEQ ID NO: 4586 - DNA, 624 bp, Homo sapiens
  misc_feature 224, 351, 419, 429, 449, 450, 462, 464, 481, 494, 500, 535,552, 576, 577, 587, 596, 599, 608, 613, 618, 623: n = A,T,C or G
atgctcgagcggccgccagtgtgatggatatctgcagaattcgcccttagcgtggtcgcggccgaggtacccgtgacttattgcacttgaaaagtcacacacgatgaacattctggcaagagctgcagtgctttgcagggacacagcagtgttttgttttctgctggcaatggacaagcattcggtgagaaccaaggtgcagggtgttagggagacagacccanggtctggaggcatagagcttccatgacagactaggaagggaaatggtgagagtcacacataaataaggacaagttcaccaacaacaagatcattatggtgagacacaatccaaaaacaagtaagacnaattcacaaaataaaataatgaccatgtgttgtgaatgcttataaaggaaacagagatctaagattanaacaaggcangagaaatggcagggaaacannccaaaccctttntnggagacatttacttctngtgcctggccaantccctnaccttttgctaaattcaatagcaagaagggccagnacattcaattagtgttnaaagtttaggaaacccgggaaaanntgaaagtttnaagaaaggnttnggaagggangcccnggccnttggnt

SEQ ID NO: 4587 - DNA, 946 bp, Homo sapiens
  misc_feature 3, 113, 258, 416, 451, 463, 475, 480, 483, 500, 522, 541,570, 573, 582, 590, 600, 607, 613, 627, 633, 638, 645, 646,648, 655, 666, 668, 694, 696, 708, 727, 730, 746, 748, 753,762, 779, 798, 799, 804, 812, 813, 820, 822, 823, 826: n = A,T,C or G
  misc_feature 831, 834, 836, 840, 845, 846, 849, 851, 855, 861, 862, 874,876, 877, 883, 885, 887, 890, 893, 896, 897, 905, 911, 914,920, 921, 922, 924, 933, 934, 945, 946: n = A,T,C or G
gtnatacgactcactatagggcgaattgggccctctagatgcatgctcgagcggccgccagtgtgatggatatctgcagaattcgcccttagcgtggtcgcggccgaggtacncgggggctcgcggccacgtgaccgacgccaacatggcggcgcccagtggcgtccacctgctcgtccgcagaggttctcatagaattttctcttcaccactcaatcatatctacttacacaagcagtcaagcagtcaacaaagaanaaatttcttttttcggagacaaagagatatttcacacagtatagttttgccggctgcagtttcttcagctcatccggttcctaagcacataaagaagccagactatgtgacgacaggcatttgtacctgcccgggcggccgctcgaaagggcgaattncagcacactgggcggccgttactagtggatccganctcggtaccaanctttggcgtaantcatnggncatagctggttttctgnggtggaaattggttataccggntcacaaattttccaccacnaacatttctaagcccggaagcataaaagntgnttaaagccntggggggnggccctaatngaaggtntagctnaacctcaacatttnaattgngtttngcgcctnnanatgggcngcttttccaantncggggaaaaccttgtctgttgcccancntggcattttaantgaaatttcgggcccaacnccnccgggggaaaaggccngnttttnacgtatttnggggccgctttttccantttttcttttctttaattnnacttncgttttgnnctttggntnnttnccggngtngncggnaaagnnggntnttanctttannttaaaaaggcgngnngataancngngtnttntcnnaaaatttngggggngtnataccnnngnaaaacaaanntttgtgatccnn

SEQ ID NO: 4588 - DNA, 913 bp, Homo sapiens
  misc_feature 85, 91, 107, 163, 176, 401, 450, 458, 466, 474, 476, 480,482, 491, 503, 524, 546, 549, 550, 554, 555, 564, 600, 602,610, 615, 629, 635, 636, 640, 644, 649, 656, 660, 671, 675,677, 691, 692, 694, 695, 716, 720, 725, 726, 732, 737: n = A,T,C or G
  misc_feature 738, 739, 740, 744, 746, 772, 774, 777, 780, 788, 791, 792,803, 808, 809, 811, 828, 838, 845, 848, 850, 851, 856, 868,876, 877, 880, 882, 886, 887, 888, 889, 890, 892, 895, 897,901, 903, 912: n = A,T,C or G
gactactatagggcgaattgggccctctagatgcatgctcgagcggccgccagtgtgatggatatctgcagaattcgccctttcnagcggncggccgggcaggtacngggaaaagtgatgacagcgtgactatgtagagttatataaactatgtaaaaagtcntaaaaatgtgagnggagtgaatttgtcacctcgattttcttttcccttaaccactctactttccttctctctccatctgtaatgctatgcagtaacttcagttttatgcttccatccatggcatgatatcatcaagcaatctaacacttattcttgttgagggtccagtaagccttgagtccaagctgccactactacagggggttatccacatggaaagtgcagattgttactactnacctaattcccgtaagcagaagcaaattctgtatagatgaaggacttanctatgacnagccaatnctttaaantntttngnaaatcaatntttttattatcngcttaagaaatttttttttcncaagaccagaaaatttagccanatnnatannggaaaccanaatttatttaaattcccgccaaccatttaaaaatgngnaacacaangaatncttaaagggggccnaaattnngggntccntttgnggccggngaanccccctttaangggncngaaattttccaggnncnncctgggcggggcggttacttnaatngggtnncaaacntttgnnnncccnangcttggggggaaaaaaacggggcaanangtngtntcccttgntgnnaaaatttgtantcccnntnaacaatttccccccacntttacctaanccggganggncnnaaagngtgaaaaaaccntggggggnnccnanttgnnnnnanccntncccnantttaattgng

SEQ ID NO: 4589 - DNA, 418 bp, Homo sapiens
  misc_feature 2, 6: n = A,T,C or G
gnttgnatacgactcactatagggcgaattgggccctctagatgcatgctcgagcggccgccagtgtgatggatatctgcagaattcgcccttagcgtggtcgcggccgaggtacccagagagccagaaggctgttggtgagatggagcagtcactgagcgggtcaccaggagaacttactttatgagatctgctgctaatttctgactttgggcaagtcacctcaccagtctggggctaagattcactcctcatcagtaaaatgaatactttggatgagacgggaggttttcccattctgatgctaggatcttgttcatgagttaatgaagacagttgaggaaggtaaggagctatttctacttgattagtgaggcttcagtctatttcaacatttcaaagtttttcatgataattt

SEQ ID NO: 4590 - DNA, 411 bp, Homo sapiens
  misc_feature 153, 162, 166, 169, 173, 177, 179, 180, 182, 186, 191, 192,196, 197, 200, 211, 214, 220, 222, 223, 235, 240, 249, 255,256, 270, 272, 273, 282, 285, 294, 295, 299, 301, 302, 305,311, 313, 316, 318, 325, 329, 357, 371, 388, 397, 398: n = A,T,C or G
  misc_feature 399, 402, 403: n = A,T,C or G
gattgtaatacgactcactatagggcgaattgggccctctagatgcatgctcgagcggccgccagtgtgatggatatctgcagaattcgcccttagcgtggtcgcggccgaggtacttttttttttttttttttttttttttgtttttttatngaaaaattntaangtngttnattnannanctanatttnngaannatntttttaatatntcnattttntnnattttgctaatnttaanatgggattnaactannaaagcataaatatntnnaaaaaaaanatnatttttaannaaanannatnattttnanagnangtcaatntcancttttaaaaaaatttgctaccaaaaaantttaaaatcaaaanacatatatttaaaaaanttaatcccnnntanntgcccggg

SEQ ID NO: 4591 - DNA, 402 bp, Homo sapiens
gattgtatacgactcactatagggcgaattgggccctctagatgcatgctcgagcggccgccagtgtgatggatatctgcagaattcgcccttagcgtggtcgcggccgaggtacgcgggacacattcagaggtgagcccagagcgggtaaagtggactggggagaacttcggaggatgttcatgtccaggagcagccccacgccctgtatggtcggtgtctagagcctcacagcaactaagaccaacccagctctcagaagaaggaatgtcaaaatgtcatgttcaattttacattcagtgcctggaatcttttcttcacaattgaaatgaaatgtgctgaaggaggtgaatccatgcattaatcttcagctcacaaaggaaatactacataagaagcaag

SEQ ID NO: 4592 - DNA, 398 bp, Homo sapiens
aattgaatacgactcactatagggcgaattgggccctctagatgcatgctcgagcggccgccagtgtgatggatatctgcagaattcgcccttagcggccgcccgggcaggtactaaaatgtggagctcacaaacaatttagagccggtctggtggacttgtggtccgaagacctgggttgtgccctggcctggcttccctctggctgtggagccacaggcctgtaacttaagcttcactcggctccatttgggcagtcagggccgtgagaccccctttgcaaggtggttgtgactgcggcgtgagagaatgtacatgaaggtgcttttcgcagtatacaatgcacttgttagcagtgcttggccttttcagtgtaactaagtctgattatacgccct

SEQ ID NO: 4593 - DNA, 403 bp, Homo sapiens
gattgtaatacgactcactatagggcgaattgggccctctagatgcatgctcgagcggccgccagtgtgatggatatctgcagaattcgcccttagcgtggtcgcggccgaggtacgcggggacattcagaggtgagtccagagcgggtaaagtggactggggagaacttcggaggatgttcatgtccaggagcagccccacgccctgtatggtcggtgtctagagcctcacagcaactaagaccaacccagctctcagaagaaggaatgtcaaaatgtcatgttcaattttacattcagtgcctggaatcttttcttcacaattgaaatgaaatgtgctgaaggaggtgaatccatgcactaatcttcagctcacaaaggaaatactacataagaagcaagc

SEQ ID NO: 4594 - DNA, 397 bp, Homo sapiens
gattgtatacgactcactatagggcgaattgggccctctagatgcatgctcgagcggccgccagtgtgatggatatctgcagaattcgccctttcgagcggccgcccgggcaggtacgcgggtcagtcagtggttcattgctgacgaagtcacttttaagtcatgttttagaagaactaccaagtgtggcaggtcaggcatgtggcaggactgtttctgagcacagatgaatggatgagcacctggccccactgtgcccagttggtctagcttcccacttggccacctacggtctgctgtgtggaccttgtctggcagtctcctttaatttattttttattatttttttctttttgagatggagtcttgctttgttgtccaggctagagtgcagtgg

SEQ ID NO: 4595 - DNA, 408 bp, Homo sapiens
  misc_feature 29: n = A,T,C or G
gatttttatacgactcactatagggcganttgggccctctagatgcatgctcgagcggccgccagtgtgatggatatctgcagaattcgcccttagcgtggtcgcggccgaggtacgcggggacattcagaggtgagcccagagggggtaaagtggactggggagaacttcggaggatgttcatgtccaggagcagccccacgccctgtatggtcggtgtctagagcctcacagcaactaagaccaacccagctctcagaagaaggaatgtcaaaatgtcatgttcaattttacattcagtgcctggaatcttttcttcacaattgaaatgaaatgtgctgaaggaggtgaatccatgcattaatcttcagctcacaaaggaaatactacataagaagcaagaccaca

SEQ ID NO: 4596 - DNA, 404 bp, Homo sapiens
  misc_feature 8, 75: n = A,T,C or G
gatttttntacgactcctatagggcgttttgggccctctagatgcatgctcgagcggccgccagtgtgatggatntctgcagaattcgccctttcgagcggccgcccgggcaggtacgttatttattccttatttcaaaaaaaaatacttttgtgaacaggtgagaaaaggaaaaaaaagagaaggaagggaatatcctaaggaatagaggccacaattagaagaatgatagaaagaatatgcaggttactagtcaaacaattagagaatatttaccaggaataaatggtgtgtgaatcaacttcttagaattctagactagtgatattaaattaaagaaaactctaagtaaacccacatatcctttgttgtgctgggcaataatgatacgtgtgtttaaatta

SEQ ID NO: 4597 - DNA, 396 bp, Homo sapiens
gtatacgactcctatagggcgaattgggccctctagatgcatgctcgagcggccgccagtgtgatggatatctgcagaattcgcccttagcgtggtcgcggccgaggtacgcggggaccgtaatttaaataggctaagtttaaaggattatgatgctgtgatagaacaatataaatatgtttagagaatctaaactattctagggctgagggcgagtagccaaagtaggacaaagttggaagagagtccccctctggtgttcagactttattggagaagttgtggctgcacgacactggatgatgtggaagtttgctggcgtgcctcgggccagagctggtttagaattgtctgataaacaggaaacggtcctctgggacacaggcaagccaaggc

SEQ ID NO: 4598 - DNA, 863 bp, Homo sapiens
  misc_feature 529, 556, 585, 595, 609, 683, 687, 694, 737, 738, 754, 776,791, 800, 801, 811, 818, 826, 830, 837, 839, 840, 853, 857,862, 863: n = A,T,C or G
aattgggccctctagatgcatgctcgagcggccgccagtgtgatggatatctgcagaattcgccctttcgagcggccgcccgggcaggtactctagcctgggcgacagaacgagactctgtctccaaaaacaaacaaacaaaacacagaaatactgggaataaaagtatttttgaaacatgtagatcctcttttattaagaaagaggcagacatctcacacttaggaaaatctcaacccttaaagagagaaatgaaatagaaattttacaaatcaaaacaaaagtaaaaaaaatcaaaaataacagatttttatcaaagaaattaaaatttcagatttaacgtggaaaatatctgaaaaatgttgtgattatgaataagccttatgacatttctgcatcacttcctgacttatagacctatttctctaaattgatattcattctacaccaatgaaccactaaaggccttggtcatcaagattccagagggggatttctattcatattttgctatgaatcaccaaactgnatgaaaaggtagtttttccatttctgnaaatataagtttaataaaaatacaccccnggttaacacncccgggcccaatgncttagtcaaattaccaacctttagccatgtttttcctatcccaaaaaattcattttggttttttgggggacagngggnggaatgnaaaaccatttaatttaccttaatttttcatttggggttttcanngaaaaaaccttggttnccaggtttggttccattgtaangggttttgggaaaanaataacagnnatttttgggngggtctnaaaaaaanttgnaacattncnngtttttattcaanccancaatnn

SEQ ID NO: 4599 - DNA, 644 bp, Homo sapiens
  misc_feature 482, 608, 619: n = A,T,C or G
gggccctctagatgcatgctcgagcggccgccagtgtgatggatatctgcagaattcgcccttagcgtggtcgcggccgaggtacttctaaataatatgtgaattacagaattatttatctcaaaataaatttaaaaataggtaacactaaacaaatatgtaaaacaaacttatgaaagtttgtagaatatagtaaaagtaatgattagtgagaaatgtatagcattaagtgcatatattcgaaaatattaaagacgtaaaatcaagtgttcagcaactagagaaaaaagaccaagttaaacataaaacaaggagaataaaataaataataaaaggggagaaaatcattgaaatggaaaattggaaaacaatttaaaaatcaacaaaactaacattgtattctttgaaaagatctgaaaatttctaatcctcaatccaagccagtccagccacaaacaaaatagagaagacaaaaatttatnaaaccagaaataaaagaaaaaaagagtagtcattactttctatatcatgtatattaaaaggattataagaagtacctgcccggggcggccgctcgaaaggggcgaattccaggcacactgggcggnccggtactagngggatccggggcctcggtacccaaa

SEQ ID NO: 4600 - DNA, 632 bp, Homo sapiens
gggccctctagatgcatgctcgagcggccgccagtgtgatggatatctgcagaattcgccctttcgagcggccgcccgggcaggtacacagcatgcaggccgcagcctgggcccctgccaggcaagatgtagggtgtgaggttgtgctctgccccattcactctggaacagctccgcccttgagtccaggatattttctcagtgcctccacgcatttgaccatccagaaaacatcccaactcagtgtgcctcggccaccataaatcagccaaccacacatgctgccctcaatgcttctgaatatcaagggaaaggatctgcctcatcctgccctgctcctgaggcttgcgcattgacgtttgagttatgtcattatttttttaagtgatagaaatctagtcaatgatttgtagcaatcaccactgtgcaacgtatgccaaaaaactctgtctatccttacagaaggagggagaaacctagcaaattagtctgacttccttgacacaattctgtgatgggccagtattaggtaaggctaaaatcaggtgctgtgattaaaagattatgacaatgtgaaaaagtcagtcattacataaattagaaaatgttttcaagggaaacccaagagaggg

SEQ ID NO: 4601 - DNA, 878 bp, Homo sapiens
  misc_feature 82, 504, 541, 554, 653, 659, 673, 676, 678, 700, 706, 728,731, 738, 740, 741, 752, 761, 772, 809, 828, 833, 844, 855,860, 865, 866, 874: n = A,T,C or G
tagggcgaattgggccctctagatgcatgctcgagcggccgccagtgtgatggatatctgcagaattcgcccttagcgtggncgcggccgaggtacagtgcacacacacacacaagctcatgcatccatacgcacaaggtgctggtaagcatggctgctcagctcaggattctcagatccagcagtgcagaaagtcctcagctttgtctgtatacatgtccaccaagacaggcttgcaatttgtatttttaaccactggtaagggtctaggagccaatagaaaccacagaactaaaattaccaggttcaaattgctggacaaactttagacaaggatgaatagaaaatgaatggtagacaaaacagaagctaatgctaagatgcaattttatagctggatgatctctagtttctttttataacttgcatgagtccctttttcatgttcccagaaagaaggctccaaagaacttaggagattctacccagggaaaacagaatgcnagcagctcgggctgtttgaatatgctagactgtcttncagaccagtttangttagaggacagaaaaatgagaagacagggcctgtacctgccccgggccgggccgctcgaaaaggggcgaaatttccagcacacttggcggggccgttnctaggnggatcccgagcttnggnanccaaagccttgggcggtaaatnatgggnccattaagctgggtttcctggnggnggaaaantnnttattccggtncacaaattnccacaccaacnataccgaggccggaaagcattaaaaggtggtaaaagncctgggggtgcctaatggnggggngctaacttccnattaatttggngttgngctcnntggccgcntttc

SEQ ID NO: 4602 - DNA, 648 bp, Homo sapiens
  misc_feature 403, 457, 478, 514, 526, 545, 595, 598, 628, 644: n = A,T,C or G
gggccctgtagatgcatgctcgagcggccgccagtgtgatggatatctgcagaattcgccctttgagcggccgcccgggcaggtacttttttttttctttttttttttttttttggatttttagtagagactaggttttaccgtgttagccaggatggtctggatttcctgacctcgtgatccgtccgcctcggcatcccaaagtgttgggattacaggcgtgagccacggagctcggccataggcctgtttcttattctatattcctgttaatgtaaacctcctgagattggaagacaatcagttttacagggtaagaattgttttaattatgtggcagcttttctccaaacatgaagagaaacattagaaatacgtttaataaaattctctattattttgntttctttcagttaatataattttctcgacttattgatgttagtacctcggccgngaccacgctaagggcgaattncagcacacttggcgggcggtactagtggatccgagntcggtaccaagntttggcggtaatcatgggncatagctgtttcctggtggtgaaatttgttatcccgctcacaatttcccncancaacaataccgagcccgggaagccataaangtggtaaaaagccctngggg

SEQ ID NO: 4603 - DNA, 646 bp, Homo sapiens
  misc_feature 617, 629: n = A,T,C or G
gggccctctagatgcatgctcgagcggccgccagtgtgatggatatctgcagaattcgcccttagcgtggtcgcggccgaggtaccaaaacttgtccgaaaattatagctaaagttttctcacttttcctgtctttctcactactgggaaggcattaggaatggaattatctgagcatgcagaattgtgttttatttgcaataggtgagtattaacaaaaatgcataggtgtgcatctataaaatttatcatatacactcagtatagacaaatacttatgaaacattagaaaatcagctgaataccttgttaatacacagtatcattcagcataattgagtttctaaattttaataagttctcaggcgatgctgataccagtggtacctgcccgggcggccgctcgaaagggcgaattccagcacactggcggcccgttactagtggatcccagctcggtaccaagcttggcgtaatcatggtcatagctgtttcctgtgtgaaaattgttatcccgctcacaattccacacaacatacgagcccgggaagcattaaagtggtaaaagcctgggggtgccttaatgaagtggagctaactcacattaaattgcgttnccgctccactgnccgcttttccaagtccg

SEQ ID NO: 4604 - DNA, 647 bp, Homo sapiens
  misc_feature 8, 511, 547, 579, 598, 610, 642, 646: n = A,T,C or G
gggccctntagatgcatgctcgagcggccgccagtgtgatggatatctgcagaattcgcccttagcgtggtcgcggccgaggtacagagaacagggtgggtggaagatcgctgagagggaagaagacattttggctgctcaggagcagcagcaaagggaagaggaccaactgcttccaggaaaaagtgagcgaggcacaatttatatatgctgattaaagttatgaactgtataattaagtcttcttaagagataagatgcaagtcagcagtgagataggcacacataacacacagaggggatttagaaagaattccaggctaccacttagaattgtatttctctctctccattttctctctttctcagtccttacctaaccgttcatctcttccacatacaccgcggcagaacaagacatggcccagagatataaatggacagtgcccaattagcagagtacctgcccgggcggcccgctcgaaagggcgaattccagcacactggcggnccgttactagtggatccgagctcggtaccaagcttngcgtaatcatgggcataagctggtttccctgngtgaaaattggttatccgnttcaccaatttnccccaacaaacataccgagccggaaagcattnaaant

SEQ ID NO: 4605 - DNA, 638 bp, Homo sapiens
  misc_feature 59, 590, 616, 620: n = A,T,C or G
atgctcgagcggccgccagtgtgatggatatctgcagaattcgcccttagcgtggtcgnggccgaggtactataggttaaattatgcttttttggatcctttgcaaagcaaaagcctgatctgacatggttgacttaaaaacttggtgcaggttgtttcagcaatgtggatggagaagcatataggagtttattactgattacctggatgtggagaagtgacagctatatgtgctttacaggaaagatggcgtgggttttatttatacacagccttgcctagaaagggtaagagatggtttgtagggacacataaaaaataaggtcatgtaaatcagaagtaggtgggaatgtctacagtaattctcttcattttaaaatttttaggtaagtaaaatacttttacgtctataggttggttgcttgccatattgcttgccattattacaagaggggaatgttaatagtttatcgtattttataaagtatttcttgaaatatatttccaggtaaattagttttaagtattaatcagttttatttggggaacttaaatatattccatttagaaaggttatcttctttttgcangatatattaatgaaaaaaggaatttnttancaagggtaaatttggcct

SEQ ID NO: 4606 - DNA, 874 bp, Homo sapiens
  misc_feature 575, 667, 670, 687, 707, 738, 740, 765, 777, 778, 781, 784,801, 820, 840, 846, 847, 851, 853, 859, 874: n = A,T,C or G
tagggcgaattgggccctctagatgcatgctcgagcggccgccagtgtgatggatatctgcagaattcgcccttagcgtggtcgcggccgaggtacaggtcatggtgagcaggtgttctgagggaagacaaaggaaaagcagagggagtgttgacaattctgagcttccatatggcagacattcggggcctgttggcatggtcctcagagcagcaacaacagcatcaattgaggttcattaaaatgcagaatcgcaggttcatgtggacctactgaatcagaacctgcattctaacaacagttttcagtggttcttccgcacattaaagtttgaaaagcactggtctggaggaggaggctctacaaaagggttgggtattgaggagccgaaaagacaacctggaactgagattcccagggatgacctgaaaacaagcatttcaaaagctcagaaaagcaagattttaactactctcattttatattatcgcaactacatgttcaagattttacaaaatagtctcagttttcaaacactctgtttcccttttgcagatcatggtattatggatggncttggggccacaaggatagacccatgggtatttgggaatgagtatgcagaggggtaagaatactggaaaatttgttattattgtggggtatnggngaccgggcttagtttancatgaaaggacctgcttganttgttttgggggttggtcccggcttgatccntnttgaaccacctgaaaaaaattaaanttggaagttccnnaanaangaatcaatggtttaagnttagggaagaaccaagaanaaacttttttggggatgatnggaaanntttntntttttnaccttggcccaaccn

SEQ ID NO: 4607 - DNA, 896 bp, Homo sapiens
  misc_feature 468, 490, 494, 502, 512, 544, 588, 591, 592, 595, 602, 603,609, 623, 625, 640, 641, 646, 647, 648, 669, 682, 697, 698,701, 702, 739, 746, 750, 758, 762, 768, 778, 784, 785, 787,788, 789, 791, 800, 813, 837, 850, 853, 863, 865, 866: n = A,T,C or G
  misc_feature 874, 889, 894: n = A,T,C or G
tagggcgaattgggccctctagatgcatgctcgagcggccgccagtgtgatggatatctgcagaattcgccctttcgagcggccgcccgggcaggtaccaagtgtccccaaaccaccaaattctgaatgccctgagctggctgaatgtagaccaaagactgggtggctgaccattgggaaggcactcgacactgtggacaggttaaacggttgatccccagctgttctgaataaatgtccacatgggttgattgtagagctaagtgaagcaactccagtggaaaggccaccttttgaaactactgaagccacagaaggtgtcgaagatgaagttggtgtagtagaggaggctgctgaggatggtaaccgttctccagactccatattgtgatcaatgtggtcaatcttgtgacatcacttgttgggaaacctttactctcgaactgagaagttgcggggagaatgaanattttttgccctttttccccanaatnggttgaanggttaagaantttttgggaaaaccccaccaccctcccttaantttcctatttaattaattttcctgcaaagaaaaaagtattaaangannagntttgtanntggganggtggaagattttntngaatccggggaaaannccttnnnacttcctttcctttttccggnctttcccggcctnttttttttttccccnnggnncccttcgggcccggggaaccaccccttaaggggcggnaatttcnagcnaccccttnggcnggcccnttccttaagngggganncnnncnctcgggtanccaaagccttggncgtaaaatacattggggcaataancttggtttcctgnggnggaaaattgntnntccccttnaccaaattttcccancaacnaa

SEQ ID NO: 4608 - DNA, 872 bp, Homo sapiens
  misc_feature 516, 517, 566, 574, 589, 596, 627, 645, 691, 715, 716, 726,729, 733, 742, 747, 756, 757, 768, 802, 806, 813, 825, 841,844, 851, 858, 859, 865: n = A,T,C or G
tagggcgaattgggccctctagatgcatgctcgagcggccgccagtgtgatggatatctgcagaattcgccctttcgagcggccgcccgggcaggtaccctgacccatgaacacctggccatgacctttgactgctgttactgtccacctcccccgtgccaggaagctatttccaaagaacctatcgtgatgaaaaatttatattggattcagaaaaacgcctattcccataaagaaaaccttcaattaaatcaggagacagaagccataaaggaagaactgttgtattttaaagctaatggtggaggggctttggtggaaaacacaaccactgggattagccgagacacacagacgttgaagaggcttgcagaagagactggcgtccatatcatatctggagccgggttttatgtggatgcaactcactcctcagagaccagggccatgtcagtggagcaagcttaccgatgtccttatgaatgaaaattctccatggagctggatggaaccagnnttcaaagtgtgacattttttggagaaattgggttgcttctgggcctttngactgganaggtgaaaaaaaaanggttttncaggccacaggcttcatgcccaggcttcagntttggtttggcctggttnttattccattcctgggacgggagcttcaagggcacccattttaaanttattcccaaatatttgcaggaannaagggcgccnaancttnttccaaaanagttnatggtcacnnccttgggatanggactatttctttgataaaaaaagaacctttttnggangtttggntcaactttggcntggttactttgggaanatngaacctnttttggnnccctcnggccccc

SEQ ID NO: 4609 - DNA, 901 bp, Homo sapiens
  misc_feature 175, 200, 511, 552, 567, 570, 571, 577, 598, 601, 610, 615,621, 635, 649, 650, 652, 665, 667, 672, 673, 692, 707, 709,710, 719, 722, 735, 748, 766, 767, 771, 784, 786, 792, 811,813, 814, 819, 821, 839, 842, 849, 850, 852, 861, 871: n = A,T,C or G
  misc_feature 886, 889, 898: n = A,T,C or G
tagggcgaattgggccctctagatgcatgctcgagcggccgccagtgtgatggatatctgcagaattcgcccttagcgtgggcgcggccgaggtacccccccctttttttcagatcagaacactgaggctcagggaggcaaattaaacttctcaaatggagccaaaatcggaacnagcatgagttctggattttatgctncacacatttataaactaggaaatttcacccttgaatgggaatttctggcttgaaatgttggaaggtctcaacccctgtgttgagttctcactgggcaggagctgagtcgaggctgctctgcatcctctcctgtctcctcttgacttgctccactcactctactgagcctgggaggcatctcattggctgtgtagctgcctcctccagggctctgctgctcacctgtgcagtatctcaaattacaccaggggagtggcctttcaacccgggaccctgcccgggcggcccgcttcaaaagggccgaattccancacactggcggcccgttactagtgggatccgagctcggtanccaagcttgggcgtnaannaatggncaataagctggttttccctgnggngaaaaattngtttnttcccncttacaaatttccnacacaaaacatacnnancccggggaagccntnaaagnngtaaaaagccctggggggngcccttaaatgagtngnngcttaaccntcncattaaatttggngtttgcgcctcanttgccccctttttcaaanngggnaaaacctggggcngnggcccnccttgcatttaaaataaanannggccnanccccccggggaagaaggnggntttgggnnanttggggggnctttttcccntttttcctttaaatnaantggcctggnccc

SEQ ID NO: 4610 - DNA, 890 bp, Homo sapiens
  misc_feature 301, 402, 420, 489, 490, 594, 600, 629, 650, 662, 664, 666,670, 671, 687, 709, 712, 714, 728, 751, 753, 756, 759, 796,809, 825, 828, 850, 855, 877: n = A,T,C or G
attgggccctctagatgcatgctcgagcggccgccagtgtgatggatatctgcagaattcgcccttagcgtggtcgcggccgaggtacaggcggagggggcagaaactgacatcatggagtgtcaggcacggtgctggtgctatgcatacactcaacaagggcctgggtaatgcaacatggagaagggaaaactggggggcagaacaattttgtcgtctgaaagcctttcacagagaggccctgaacccatagctctccttctctgaggacagaaaaggaggaagtgtgtctgtcctgcantatgtgggatggatagatggatgcgaaattaagcactgaagtgggttgcttggagaggcaatgactgccccctgccctcacctgaaaatccttaaagacanaagggatcatccgcccangaagctgaggctgcaggataagctggccttttcctgaacagtgacagttggagcgttcaccctcactgnncttgtcagagttacaggccaagaaaggagaatccttttggataaagtgtcttaaaaggaacctggttgattttacccttttggcttttatgggcctccctgaangttaanggagccaagggtttcaagggaagaattanccttaacttgcaaggccaganctgatcttttcntngntgcnngaaaaaaataaagggnagaattcttcattttttttttncancnttatttttttcccnaaaaatttaatgttttttttccngnccnagnaaaaacgaacctcccaaaaccttccaaaccctttttnaactacccccccngtaaaaaaagcttaantancaatggcctttttgcattttgnattgnaaccttgccccgggcggggccnctttaaaagggcg

SEQ ID NO: 4611 - DNA, 860 bp, Homo sapiens
  misc_feature 460, 508, 583, 598, 651, 668, 682, 717, 718, 719, 734, 745,772, 774, 780, 787, 804, 805, 820, 822, 824, 829, 846, 853,857: n = A,T,C or G
gaattgggccctctagatgcatgctcgagcggccgccagtgtgatggatatctgcagaattcgccctttcgagcggccgcccgggcaggtactgccagatcacaggggctgaaagagaactctgctcaaggatctgtcaaaggtgagaaggaaaaaacacttttgatgatcaagaaggatccaaaaaggagcaactatgcagatgagagcatttccattagtcttaaaaaaaaaaagacctactatatattgataaattacttactaattctaaattaatcaggatacatttactatatgctctgtgctgggtgctagagggtcaggttagatagagatgcaaagatgacaataataaaaatgttagtgatgattataggtaagaggaaaacaaagaagagaataatggaggaggcttagtaggagcattagcagcatgagtccacccccgggagctcanggtccaggaagtgacagaagatgtgacaacccattattcccccgattngagtaacatgaccaagggccatgtgtaccttgggccgcgacccccctaaggggcgaattccagccactggcgggncgttactagtggatnccgagctcggtacccaagcttggcgtaatccatggggcatagctggttcctgngtgaaaaatggttattnccctcccaatttcncaccaaaaataccgaacccgggaagcattaaagtnnnaaaagccctgggggnggcctaatggnggggagcctaaacttcccatttaattngnggttgnggcctcnctggcccctttttccanngcggggaaaaccttncngnggccnacttgctttaaatgaancccggcnaacnccg

SEQ ID NO: 4612 - DNA, 985 bp, Homo sapiens
  misc_feature 7, 19, 352, 400, 408, 427, 452, 454, 460, 493, 504, 512,525, 553, 570, 577, 615, 625, 627, 638, 641, 646, 654, 659,662, 696, 701, 708, 709, 716, 718, 728, 741, 751, 760, 763,771, 783, 784, 793, 794, 798, 799, 810, 816, 822, 830: n = A,T,C or G
  misc_feature 846, 869, 900, 923, 932, 935, 946, 961, 963, 974, 979, 981,984: n = A,T,C or G
tagggcnaattgggccctntagatgcatgctcgagcggccgccagtgtgatggatatctgcagaattcgccctttcgagcggccgcccgggcaggtacgcggggacattcagaggtgagcccagagggggtaaagtggactggggagaacttcggaggatgttcatgtccaggagcagccccacgccctgtatggtcggtgtctagagcctcacagcaactaagaccaacccagctctcagaagaaggaatgtcaaaatgtcatgttcaattttacattcagtgcctggaatcttttctttcacaattgaaatgaaatgtgctgaaggaggtgaatccatgcattaatcttnagctcacaaaggaaattactacataagaagcaagaccacagactcaanacggacantaaattgggattttttttncccatgggcctgggaaaagaaaggntncctttnggcccgcgacccacgcctaaggggccgaattcncagccacaacntggccggnccgttactaagtngggatcccgaggcttcgggtacccaaanctttgggcggtaaattnaatgggnccattaggcctggtttttccttgtggtggaaaatttgntttattcccngncttccccaatnttnccccnccaaccantaccngangcccccggaaaggccattaaaagttggttaaaanccctnggggggnngcccctnantggaggtggnggcctaaaccttnaccatttaantttggccgnttngggcctcnacttggcccgcnntttttccannttcnnggggaaaaccnttttcnctgccncacttggnatttaattgaaattcnggcccaaccccccccggggggangaagggcggggtttggcggtttttggggccncttttttcgcttttctttggttnaacttgaanttncttgtggcctncgggtcgttttgggntnggggggcgaanccggntnttnt

SEQ ID NO: 4613 - DNA, 1002 bp, Homo sapiens
  misc_feature 19, 82, 207, 232, 249, 283, 289, 308, 342, 358, 385, 388,391, 397, 398, 407, 410, 417, 455, 463, 481, 528, 539, 542,547, 549, 564, 569, 571, 580, 596, 621, 630, 644, 647, 661,662, 665, 667, 705, 709, 711, 717, 730, 763, 766, 775: n = A,T,C or G
  misc_feature 779, 795, 804, 805, 815, 818, 819, 821, 840, 848, 855, 859,860, 866, 868, 873, 884, 885, 887, 909, 912, 914, 917, 920,924, 926, 928, 929, 936, 938, 947, 956, 959, 961, 967, 970,971, 984, 989, 990, 991, 994, 995: n = A,T,C or G
tagggcgaattgggccctntagatgcatgctcgagcggccgccagtgtgatggatatctgcagaattcgcccttagcgtggncgcggccgatgtacaagaatcaagaacagctgggaatgaacagcggcaatatcactagaaaggaggggacacatagggaggcaatgaataagttcatttaaaattaaaaaaaaaaaatttgttgngttttaaaaggaaagcgaagtgganagagaaacacaccactnacaacaacaacaacaacaacaaaagcacagaatnggattnggagatttgcctgagacantgagtgtagtttaatttcatcaagctccagtgtnctgaaatgaaaaaacngtcttaaggttgttttatgctcacaanggnaanaggctnnagcaagttnagnccggaanctgtcccgcactgctgttctgctacaaagaaaagaacnggtttagntgggggaggggaaaaaangcgccttttctgcctggacctcccaccaatttcttattttccttacntggtttgcccnaangggtngncctcccttgttttcnaaaantncccaacccnccaagacccaccaggntactttggcaaaaattggaataaanctttatttncccacccccccctngcntgcttgggccccannttntnttaccttgggaaaattaattttaaaagggattggggangacnanccccgnggttaccctttgnccccggggccggcccggcttttgaaaaaggggncgnaattttccncccncacctgggccgggccntttaccttnngtgggaattnccnnanctttcgggtacccaaaacnttgggcgntggaatncatnngggccntnggctnggtttcccttnngngggaaaatatagttttttcccnttncnaanttncctncnannaatatcnanacccggaanacttttaanatngnaaaaanccnngggggtggcctcnatgannnggnncttaccc

SEQ ID NO: 4614 - DNA, 851 bp, Homo sapiens
  misc_feature 1, 3, 34, 119, 150, 330, 423, 434, 437, 439, 443, 450, 513,559, 617, 626, 631, 656, 675, 682, 692, 694, 714, 719, 720,726, 728, 739, 748, 754, 764, 771, 773, 784, 788, 790, 799,804, 805, 824, 827, 838, 846, 849, 851: n = A,T,C or G
ntngggccctgtagatgcatgctcgagcggccgncagtgtgatggatatctgcagaattcgccctttcgagcggccgcccgggcaggtacctaaggtgcagtctctgccttagagttgnaatccaggaaggggctgcaagagagactcanaagatgtggcctgacaatatataagcacaatgtctgacccttaaagaatgacaggatttcaacaggcagacaggagaggaggaggaattctaagcaaaggctttcacatgtaaacggtgaattcttagataagatctgttttctatataccaggaatagtttgctggcatttgaggaccnaggagtaagttcaaatgaaaactttaaaatgtttccccaaagtgttcatatgaaattttaaggatgtgcctatggactgggaataatcaaatnacataaaatanacntnagtnacataanccataaaataataccattttttttctacttttaaaattgggcccagaatatagcttgcggcgntttcttaattggataaaacttcagttcatcacctttcaattaaatntgttaatgcattgaccatttgcttttggaataatatcctaggctatatttattaattnggggcctgngcttnttttggcccaaggaatggtatgtanttccggttattctctttancctcccnttggtattcnangctataacaccatttaattnttaannattgcntntatttccaatnttttaattnaaggcnaggcaaatanttctaantnaaaaagtttcnaagngngaattttgngattnntccaatacccttgggccgngancccccctttangggcgaanttncn

SEQ ID NO: 4615 - DNA, 930 bp, Homo sapiens
  misc_feature 323, 351, 363, 435, 444, 446, 447, 482, 492, 505, 517, 526,529, 531, 545, 558, 559, 569, 595, 610, 622, 628, 638, 663,677, 681, 687, 694, 698, 703, 717, 725, 726, 730, 738, 740,760, 769, 774, 777, 778, 779, 786, 789, 793, 798, 803: n = A,T,C or G
  misc_feature 808, 813, 835, 840, 844, 845, 846, 858, 868, 870, 880, 886,890, 897, 898, 908, 912, 915, 922, 924, 926: n = A,T,C or G
tagggcgaattgggccctctagatgcatgctcgagcggccgccagtgtgatggatatctgcagaattcgcccttagcgtggtcgcggccgaggtactatacttggccctctataattctgggtgtaatgtcagttgggttcaggcacattacctgcagcagcaacaaacaccttcctatcaaagtctcaatttcccactctaaaataccaatatgtcagtgttgaagttaaattaggtttctaacccaatgcagggaaaaagagaattgatggcaaagtccttgatattaattaggtgagtaaatgttgaaaatgacattttnaacaaatatgaaaagataacatgccggncaggatgtccancaagccaaagagaaaggctttcctgaaaaatgtaaatttcaaagagagtttttgaaagaaaatagggaccantgaacccancnnaggagaagagagggaaggatgatttccccgatgcngaaaaccccntgagcaaaagacngaagggataacnaaactggangcncngctttcctggcttncaagattattgtnnaccaaagttnccaaaaattaaagtttggttagaagntaaaaaggggcctangaatggtaaaanaaattnctggaaggtnttaaaagccattcttaagggccacntggtaccccttgtncccnggggcngggccgntttnaaaanggggcctaattccnaccacacnnggcnggggcctnancctaaattgggaatcccganccttcgggnacccnaannnctttggncgnaaantcttngggtnataanctggnttccctgtggtgaaaattgttnttccncttnnnaaatttcccccncaaccattancnagcctgggangccatnaaantggtaanncctgggggtncctnaangagggtncntnacct

SEQ ID NO: 4616 - DNA, 971 bp, Homo sapiens
  misc_feature 2, 6, 8, 9, 10, 13, 14, 16, 17, 18, 20, 25, 26, 29, 30, 32,33, 35, 36, 38, 39, 40, 41, 43, 44, 47, 48, 51, 55, 56,57, 59, 60, 65, 68, 70, 72, 78, 80, 82, 86, 87, 88, 89,90, 91, 92, 93, 94, 95, 99, 100, 101, 105, 106, 108, 109,111: n = A,T,C or G
  misc_feature 112, 114, 115, 116, 123, 124, 129, 139, 146, 172, 178, 182,185, 203, 205, 211, 224, 241, 318, 323, 340, 341, 362, 370,373, 374, 383, 401, 424, 475, 477, 483, 511, 534, 536, 564,571, 578, 582, 591, 598, 603, 639, 646, 650, 659, 661: n = A,T,C or G
  misc_feature 671, 674, 675, 680, 697, 701, 710, 723, 730, 744, 745, 757,764, 773, 774, 776, 790, 803, 804, 810, 815, 828, 829, 837,841, 844, 852, 863, 867, 870, 889, 890, 894, 900, 906, 914,921, 924, 931, 932, 938, 941, 946, 947, 949, 950, 951: n = A,T,C or G
  misc_feature 952, 954, 965, 969, 970, 971: n = A,T,C or G
cnccancnnncgnntnnntntttannganntnntnnannnnanntannttnatannntnnctatntcnantnattatnananttcnnnnnnnnnntagnnnaganngnnanngnnntagctgnnttacntgttttgcgnccctctncacccatgctcgagcggcccgcagangtgatngatntcngcctacttcccccttagngnggacgnggcccgaggtacncgggaatcattccttcnacaactgctgcatgtccctgtgggtgaaacagaacaatcgcttgccctctctgccagcaggactgggtggtccaaanaatcnagcaaatgagagtggtnncgaaggcttcttaagccgcangtttgttncannaagccctgngtggaatccttgtaaatnacagtgcccttacaaaggcttangaaccaactaccatgggggatgaaatttctttcaaataagggggcccgaantnggatcntgtgggtccctttgggggacttcaatcnaaaaaggcctttggggtttttangnaaattttttggtcaaagtttttttattnctttcangaaaaantttnttcttgggncaatttnaaagnaaagaattaaatttttatttaaaaaggggtggggtnccttttnccanaaccctttntncacgggttgncanntagtncccccccaccaccaagntttnaaaaaaagntggcttattaaanaaaaaangggaaaaagaaggnntcccaaaaaatnggaattnacccttttnntnaaattttaccccanttttttttataannaacaangccantgtgggaaaacanntttttcanaaanaancttttttncatggctttangggngtnggattcacggttaaaaaannaagnaaatgnttcccntttaaccnaaattanaanggggcanngttttntanccccnntnnnntnttatttttgcnagcnnn

SEQ ID NO: 4617 - DNA, 632 bp, Homo sapiens
  misc_feature 8, 525, 560, 572, 574, 575, 576, 577, 579, 582, 584, 585,586, 587, 589: n = A,T,C or G
gggccctntagatgcatgctcgagcggccgccagtgtgatggatatctgcagaattcgccctttcgagcggccgcccgggcaggtacacacagttaaccacaaaacaggcctctctgaaaaagccattgccatggactgccagacagacaatgacaagacacaaataccttctggtgtgtgagccacgggacatgtgagcttccccgctgatgctcctcttatatcaaagatcactttcacaagatgagcgactcaatatcttttatcaaaccaatgatcacctgcaagctatggtatatttttgcagctgtgtagagctatgtggcatgagaatgtgggacttataaattgctgatccaataaatagacattatgggcaacagtgtcttatcagctagtgtgtactaaggtttcaggaacagttgttctgaccttactatccaacgaggagtaactgattcacttctcagaggtatattaacctaatttggacatcacagaatgcctgaaaaataattcttcangtgcattaaaccagtcccctggatctattaaagtnagcttattcacncnnnnanaanannnngnaaagtacctcgggcccgcgaccacgcttaaggggcgaattcca

SEQ ID NO: 4618 - DNA, 947 bp, Homo sapiens
  misc_feature 4, 6, 8, 9, 11, 15, 16, 17, 18, 21, 27, 32, 36, 42, 44, 46,48, 49, 50, 52, 55, 57, 69, 73, 75, 81, 86, 87, 89, 90,95, 100, 105, 110, 143, 365, 368, 413, 419, 433, 452, 460,473, 480, 482, 502, 517, 526, 548, 551, 553, 561, 566, 570: n = A,T,C or G
  misc_feature 581, 584, 591, 605, 606, 612, 615, 619, 623, 634, 636, 639,642, 652, 655, 657, 659, 660, 662, 666, 674, 676, 679, 685,690, 691, 698, 699, 701, 705, 708, 709, 712, 714, 719, 720,724, 726, 728, 732, 740, 746, 747, 748, 755, 756, 759: n = A,T,C or G
  misc_feature 766, 768, 770, 771, 777, 778, 784, 788, 799, 802, 805, 807,819, 833, 838, 841, 852, 855, 856, 857, 861, 863, 870, 872,873, 875, 876, 878, 880, 882, 887, 890, 893, 895, 901, 903,909, 910, 913, 917, 919, 920, 925, 931, 934, 937, 939: n = A,T,C or G
  misc_feature 941: n = A,T,C or G
ctcncntnnanattnnnntanggtttntattntttnttttancnantnnntnccncnttttttctattngttntntttttntcttnntnntagcnagggngaatnattanatgcttactatagggcgaattgggccctctagnatgcatgctcgagcggccgccagtgtgatggatatctgcagaattcgcccttagcgtggtcgcggccgaggtacagatggtgcagctttatagctgtctccaaataccaaatgccaaactgctcctttgataaggcaaggcggtgtaaaggtttaaatatagcctcttggtggaatgtcagtgaatgatggatcccagttacaaacacaccaaaatattctntgntttaaacattttttacaaccatggttgtcgaaggattctattatncaaggnaaattatgcatggngggaaaaagaacaggtaanactttacnctgaaaaaaattnttatgtngntattacctaaccaagattcngggtttaaaattttnggatggaangggggaagttgctgggtaaaanagntnaccttggncccgngggncgggtaccggnttntgaaaangggcctgaaatttnncaagcntantacntggnccgtgcccgtntnccntangcggggatcncanangnncngggntaacccanangtnttgtgnaccgnntatattnntnggtncanntantntcgtnntacncngngggngaaaaaantgggtnnntcccagnnatnccccaantntnntcaccnnccatanattnacgtgacgccntgnganangcaatatgatanattggtaaaatagnccccnggnggggtgtcccntannntgangngaggagntnntnntncntnacacnatnttncnatatgngntatgtnncgnttcnannttggncccgcntgntancncngacacg

SEQ ID NO: 4619 - DNA, 672 bp, Homo sapiens
  misc_feature 348, 388, 395, 444, 451, 463, 472, 486, 490, 491, 524, 529,538, 542, 544, 548, 549, 553, 560, 567, 569, 591, 592, 605,615, 627, 631, 637, 638, 639, 642, 645, 656, 658, 659, 660,667, 668, 671: n = A,T,C or G
gggccctctagatgcatgctcgagcggccgccagtgtgatggatatctgcagaattcgccctttcgagcggccgcccgggcaggtacgcgggtaagagaatcaagccagttaactgtttggtgagatcaggtctgtgggatctgaggcttatactggtatttgggtcctaacatttattttctaatgtaagttttatttatttctttctttaatagggagagtttaatgaggtattgggattgtttaaaggcctagtgaatgcctggtgagagtgatccttgctaagaatcataaatgagtaatgccttcactgcacttcaagaaatgatgagcttgtcaaaacagangtgaggaatttagtttgcatcttaatgagcagatactctntttcttnaaaaaaaaaaaaaaaaaaggtcctttggccgcgacccccgctaaggggnggaattncagcacactggncggcccggntactagtgggatcncgannttcggaacccaaagcctgggccgtaaattcatngttcnatagcttgntttncntgtnngtgnaattggntatcccngnttcacaaatttcccacacaaannataccatgcctgngaaagccatnaaagtgtaaaangccntggggnnngcntanatggagttggngnnnacttcannttna

SEQ ID NO: 4620 - DNA, 903 bp, Homo sapiens
  misc_feature 1, 2, 3, 10, 11, 16, 18, 21, 26, 27, 28, 34, 38, 39, 41,42, 51, 54, 60, 61, 63, 67, 69, 71, 82, 87, 88, 93, 94,96, 102, 106, 108, 270, 385, 402, 415, 445, 469, 476, 480,496, 504, 526, 537, 551, 562, 565, 571, 574, 577, 613, 614: n = A,T,C or G
  misc_feature 628, 632, 662, 681, 682, 690, 695, 697, 703, 709, 715, 722,732, 738, 746, 757, 767, 772, 775, 783, 788, 790, 792, 793,794, 796, 815, 819, 847, 857, 862, 868, 869, 881, 892, 897,901, 902: n = A,T,C or G
nnncatactnngattntnttngtttnnnatattnattnnannttttatgtnttntaaatnntnattntnanttatatatttnactgnntgggnntnaactanttantnttatagggcgaattgggccctctagatgcatgctcgagcggccgccagtgtgatggatatctgcagaattcgcccttagcgtggtcgcggccgaggtactttgctacacggccgggggccattgagactgccatggaagacttgaaaggtcacgtagctganacttctggagagaccattcaaggcttctggctcttgacaaagatagaccactggaacaatgagaaggagagaattctactggtcacagacaagactctcttgatctgcaaatacnacttcatcatacctganttgatgtgcagcntgcagccgggattcctctgaggcgctgtcntatacgccatctgccctgggcaantttcacncttnccttgggatggtcccntggacaangaagacaaagggaggaaaggcnctttagggatnttacttgggggggnagtcccggganggnagccangtnctntttttctgttcccgcctgggaaacccccaatgggtnnccaacctggaaagntttnctttaatgccttaacctttttcaacttggngccaattccccttaatggnnaaataacnacccnangtgggnggaaanaatttncctttgngaaaattttngccaangggtttgnttctggggggnttccaaatgntcctnaanagctcttngtttncnannntnattacccaggaaaatggcncccncaaagggaaatttcaaacttggggttcnttgggaaaanagggngaaaannaaaaccttgaantggggtgttanaactngaannt

SEQ ID NO: 4621 - DNA, 899 bp, Homo sapiens
  misc_feature 1, 3, 6, 9, 13, 15, 19, 20, 22, 25, 28, 31, 32, 33, 38, 40,42, 44, 46, 56, 64, 66, 68, 70, 77, 78, 81, 87, 88, 93,94, 96, 99, 102, 108, 114, 115, 121, 133, 134, 346, 380,381, 445, 526, 542, 574, 595, 656, 657, 677, 683, 694, 717: n = A,T,C or G
  misc_feature 755, 760, 763, 767, 796, 844, 852, 863, 867, 868, 877, 887,888, 892: n = A,T,C or G
ntncgntgngttntngtannanatnatncannntatgnantntntngtgttgtatncatgtgtntntntntgatgcnnatncatacnngcatnnanatnagntagggntgtgcnngatatntactcacttatnnggcgaattgggccctctagtatgcatgctcgagcggccgccagtgtgatggatatctgcagaattcgccctttcgagcggccgcccgggcaggtaccgcgggagttttaatttttccaaagtatcatatgaatggaatcatgtgatatgtagcccatgaatcatgtatatgggtttttcacttagtagagcacatttaagattcatcattgntactatgtgaatcaatagctggttccttttatcnntccgcagctcctactgcactgaggaagcacgttgttctccatttccctggggggagaccattgnatttgggcagtttggaaccaaaacaccatggactggggaaggctttacacaacaggaaaatttattttctttgctgggtcntagaagggcttggggnaaagcctcaaggtgccatggctgcaatatttncattctggagggccctctttnttgaatggtggccaggccaagcatgcctttcttgactttggggcctccacaatttgggaannaggagggggaagttcaagcntttttnggggtggtccntcttttctttgtgaaaggggacnaccttaacccccccaattttcaccttagggggcccccnacccnctncatngacccttaaatccacccccccaaaagggntccttgttcttcccagaaccatatattaaccaatgggggggcaagaangctttttnaaattggtacncttnngggcccggnggaacccacnncttnaaggggg

SEQ ID NO: 4622 - DNA, 896 bp, Homo sapiens
  misc_feature 4, 6, 7, 16, 17, 19, 21, 22, 23, 27, 29, 30, 32, 35, 36,37, 38, 40, 42, 43, 45, 48, 53, 58, 61, 62, 66, 67, 69,70, 79, 80, 81, 85, 88, 95, 96, 97, 105, 252, 295, 308,386, 395, 399, 442, 473, 554, 585, 596, 601, 607, 612, 628,635: n = A,T,C or G
  misc_feature 639, 664, 674, 679, 706, 739, 744, 755, 774, 782, 787, 814,815, 816, 824, 854, 860, 863, 864, 873, 876, 880, 893: n = A,T,C or G
cctntnnctttattanntnannntatntnngnttnnnntntnntntantgttnatganganntagnnanntagagagtnnncttncgncagggcnnntaatattntacatctcactatagggcgaattgggccctctagatgcatgctcgagcggccgccagtgtgatggatatctgcagaattcgcccttagcgtggtcgcggccgaggtacgcgggtggactggggagaacttcggaggatgttcatgtncaggagcagccccacgccctgtatggtcggtgtctagagcctnacagcaactaaanaccaacccagctctcagaagaaggaatgtcaaaattgtcatgttcaattttacattcagtgcctggaatcttttcttnacaatttgnaaantgaaatgtgctgaaggaggtgaaatccatgcattaatcttcanctcacaaaaggggaaaatacttaccataagnaagcaaaggactcacaagactctaaggaccgggacattaaattgggatttttttttgccattggccctgggaaaaggaaangggtaccctgccccggggcggcccgcttcgnaaaggggccgnaattncaagcnacacntggccgggcccgttanctaggtnggancccgaggcttccggttacccaaagnctttgggcgntaaantcatggggtacaattaagcccttggcnttcccttgtgggtggaaaaaattggtttatttncccgnttcaacaaaantttcccaccaaccaaaacnaattaacnggagnccccggggaaaggcccattaaaaagtnnnttaaaaangccccttgggggggttggcccctaaaatgnagggtnganngcttaaacnttnacantataaattttggngcg

SEQ ID NO: 4623 - DNA, 600 bp, Homo sapiens
  misc_feature 509, 523, 554, 588, 599: n = A,T,C or G
gaattgggccctctagatgcatgctcgagcggccgccagtgtgatggatatctgcagaattcgccctttcgagcggccgcccgggcaggtacctgccttgttcatatccaactaattttttttggctaattaagtaataataatcaaaacacttaaggttttaaaggatgaatgaccagttgagagttacttcttatttgctcctaaatccaatatatttcctgatcagtcaataacacttagaacatctagttataattggtaatacaattgtttaaaaaatgataattaaaaggactaagactatatatggtcttttgaggggataacaattgaattatttaaacaaagtatattaggataataaaacacgagaagtcagtccagtggttcaatccattattcagaatttcattctgtttataattaagcaacagtgaccttcaggttagtcttccttagctgttaacaaccagctggagaagctgagggctatttttgcaattatnatctgtgaaagatntgaaaaacgtttaagataaaataacgtggtncaccttattaacaggccaactcattttccacacnttggaattccnt

SEQ ID NO: 4624 - DNA, 921 bp, Homo sapiens
  misc_feature 5, 6, 8, 10, 11, 13, 14, 16, 18, 22, 24, 27, 33, 35, 42,51, 55, 59, 61, 66, 74, 75, 76, 85, 88, 89, 90, 97, 98,102, 103, 104, 106, 109, 111, 114, 116, 117, 119, 121, 122,129, 130, 131, 135, 229, 238, 264, 283, 298, 301, 323, 349: n = A,T,C or G
  misc_feature 362, 422, 438, 449, 456, 466, 489, 542, 559, 580, 586, 601,618, 687, 688, 708, 736, 758, 759, 762, 778, 781, 782, 790,797, 801, 825, 837, 841, 842, 856, 862, 864, 866, 867, 868,871, 879, 883, 890, 891, 903, 911, 917, 919, 920, 921: n = A,T,C or G
caacnncntnncnngntnttcntntantgatanangtgttanacatgcagntgtnaatngnatatntaataaannnaataatatntannnttaagtnngggnnntnacngngangnntnanntcacttnnncggngaattgggccctctagtatgcatgctcgagcggccgccagtgtgatggatatctgcagaattcgcccttagcgtggtcgcggccgaggtacttntttttgttncttttttttttttaagatggagtctngctttgtcccaggctggantgcaagtggcatganctnagctctctgcaacctctgcctnccgggttcaagcgattctcctgcctnagccttctgagcnagctgggattacaagtgccgcgccaccatgcctggctaatttttgtatttttggtaaganacgggggttatcacantgtatggccangctggtncttggaactncatggaccttgtttaatcttgcncgaacgtttggccatccccaaaaatgcctggggatttacaaggtggtggagcncacccggggccttgggnctagttttttttaatttttcntaaaanaaataagccccaccnctttttaagtcaaaatnaggaatttttttttatttttttaaaaaaaattttttttaagcttttccccaaaggcttttaatggaagnngcttttcccccctttttacntttcccctttttttaaaaaaaaaaaagnaggaaaattgggaaaccttatnnttnggtttgaattcccttnaannaagattanttttttngttngtaggggttaaattttggggaacnacaatttttttnctgnnaccccttggggggnaaaaangntnnntgncctaatanttcntattggnnaaaaaaaaaaantttttttnttcccncnnn

SEQ ID NO: 4625 - DNA, 857 bp, Homo sapiens
  misc_feature 6, 9, 18, 26, 40, 47, 50, 53, 56, 62, 63, 64, 71, 72, 77,87, 89, 92, 96, 97, 99, 102, 106, 107, 108, 111, 433, 474,485, 541, 553, 557, 586, 606, 612, 618, 622, 650, 669, 674,686, 698, 701, 708, 711, 719, 721, 740, 742, 758, 763: n = A,T,C or G
  misc_feature 766, 771, 778, 789, 807, 826, 827, 838, 839, 851, 856, 857: n = A,T,C or G
ccatcncangaaatgttnttaattgntgattcattcggtntaccttnttngangtncttttnnnttaatgnnttttnactcttcttngnagnggtnnanacnaatnnnatnctatagggcgaattgggccctctagatgcatgctcgagcggccgccagtgtgatggatatctgcagaattcgcccttagcgtggtcgcggccgaggtacgcgggtgagatggcaaatatttattaatcatccaactgtgtatcagacactaagaataagctgggaggccatggcaagtgaggtcaccacagtccctgccacagtggaggttatggtatacaggtaaggcagggaagagcactgcaaagggtttgcccattgcatcagtcatttatttatgcacatgttgattcaaacaattaatttctatgccaagctgtcnttcaaggtgcctgggagggaaaatgaaagccgttacctgcnccgggccggcncgcctctgaaaaggggccgaatttccaagcaccactgggcgggccggttactaagntgggaatcccgnagcntcgggtaaccaaaagccttgggcggttanaatcattgggttcaataagncttgtntttccntggnggttggaaaaatttggtttattcccggntttcaccaaattttcccancaccnaaaccattaccngaagccccgggnaangccattnaanaagttggntnaaaaaggcccttggggggntnggccttaaaatgggangttgnaanccttnaaacctncaacaaatttnaaatttggccgttttgcngccttcaacttggccccgnntttttcccaanntccggggaaaancctgnn

SEQ ID NO: 4626 - DNA, 921 bp, Homo sapiens
  misc_feature 2, 3, 5, 7, 14, 16, 25, 26, 28, 29, 30, 31, 32, 34, 36, 38,39, 40, 41, 49, 53, 54, 59, 61, 63, 64, 65, 73, 76, 84,85, 99, 100, 102, 109, 110, 113, 116, 118, 121, 322, 394,471, 491, 514, 519, 537, 547, 560, 567, 575, 620, 626, 704: n = A,T,C or G
  misc_feature 720, 735, 736, 740, 749, 762, 783, 799, 821, 826, 834, 860,871, 883, 886, 900, 915, 920: n = A,T,C or G
cnnananatatatntntgtatatgnntnnnnncntntnnnnatataaangtgnnatgtntntnnntgcagtanatntgtgtatnnatataattttggtnnanattgttnntanatntntantatagggcgaattgggccctctagatgcatgctcgagcggccgccagtgtgatggatatctgcagaattcgccctttcgagcggccgcccgggcaggtacatgataatttttctagtctagagctggatgagaacctgctccgttctgctaccttgtcaaacccacctacacccctggcagggcagatccaggggcagttntctgccccagccaacgttggccttacttctgccactctgatcagccagagtgcacttggggagagagccttnccaggacagttttcattggactttcatgacgggcaagccatgcctttccagaggccacaatttcttgcccaagcttngcttgaagccaaggggcagnatgaccctaattcacccttacgnacagncaaaatacaagtcagttngattcaactnacaacctctcttnaaccccntatggggnaaggcccaatttattgaattaggttggaggccattaatggcccgnttttcnccttaaccaaggtggaacccattattcaacccttttttcccccaacaacaaaacaattccggtaaccccttccggggnccggcggaacccaacngccttaaagggggcnnaaantttcccaanccacaacttgggncgggcccggttaacttaagtngggaattcccggaggncttcgggtaccccaaagccttngggcngttaaatnaattgggttcaataagccttggtttnccctggtgggnggaaaatttgtntantccccgcttcaacnaaattccccacaacnaaacna

SEQ ID NO: 4627 - DNA, 588 bp, Homo sapiens
  misc_feature 439, 481, 503, 507, 540, 567, 576: n = A,T,C or G
atgctcgagcggccgccagtgtgatggatatctgcagaattcgcccttagcgtggtcgcggccgaggtacactgagcctagaatatcttgtggggtcaaaaggtaaggcagtgctcaaaaaacaacagtaaaatggcaaaaatacatagaacccaacttgaagggcatcctaatgtaaaatctagaaaaatctgagcacaaaatgtattatagtcatgggttataaccaatataatgagaatccaagagtccagactgatttttaaaaaattgcattttttcaatataaaagaaaatatcttccttatagtaacattttaattgacaaatgtagaagtaatgatggaagtagaaaatcactgtttggcacacactgtagtaataactgtttcagacaagaattatccacgaatgctaaaattagttttggtgaaaggtntgatgagaaacaaggattcttacatagggtccaaagcatctnctgacaagatacttattcattncacnggaaaaaaaaaatagaaaccttttccagttgangaaaatctgggcagacatccccctttnatttaaagnggatgggaaggg

SEQ ID NO: 4628 - DNA, 587 bp, Homo sapiens
  misc_feature 497, 547, 551, 585: n = A,T,C or G
tgcatgctcgagcggccgccagtgtgatggatatctgcagaattcgccctttcgagcggccgcccgggcaggtacgcggggactcctcacccagcatccataaaagcatgctgcacctttggcacagcgcgacttccctggccctccccctgcggaccagtgaacctcgcccgagggctcaataaagaagatttttgccctctttttctcacctctcagccttattgatccatggtgcccttccattgcctttcattggtgccgaaacccgggaggggacacctcctaagcccccccagaggctcagggggactcccctcctggtcggatcagtcctctccctcagtcaggtcaggcttctcctccacggccatctgtccatttcgtccggttacttgctgccaggtcgcagttgctgcagctactccagtccaattcggccgacgctagatcaacttgagatgcaaaacccatgttcacatcatgagtgagtcttntaactcgggacaatgcaattcaacaaatttcttaagaccaaaatccgggnggcnactggctttcaaaaagctcctggagtgtgggaangg

SEQ ID NO: 4629 - DNA, 868 bp, Homo sapiens
  misc_feature 9, 10, 11, 14, 16, 19, 24, 25, 26, 27, 34, 36, 37, 38, 39,43, 44, 45, 46, 48, 50, 51, 54, 59, 60, 77, 79, 80, 85,87, 91, 95, 97, 98, 104, 106, 107, 108, 109, 113, 116, 117,121, 123, 126, 129, 134, 136, 143, 152, 157, 160, 167, 183: n = A,T,C or G
  misc_feature 193, 205, 220, 461, 486, 545, 568, 572, 614, 640, 647, 660,669, 686, 689, 701, 707, 718, 755, 774, 778, 792, 796, 811,826, 829, 836, 841, 844, 845, 863: n = A,T,C or G
ccctccccnnnctncntcntctannnngcttctncnnnntatnnnntngnnccntccgnntcgatatgtctatattntnnttccncnagtngggngnnactgtnannnnattntcnnctcntnttnggntagtngngctcctntagtatgcntgctngancggccgncagtgtgatggatatntcgcagaatncgcccttagcgngggcgcggccgaggnactccagcctggctgacagaacaagaccctgtctcaaaaacaaaaacaaaacaaagtttcttgtttgttaatcatcagcttgttgatagaaaactcacagaattggagaaatatttactattcctttctttctgctaataccactaatcattttctatgaaagacctgttctttttttggaacttatgaataatgttaggaaatgggaacattggatgtttttaaatgtataccatataanccttcccaaaattaaatttattcangggtgatcccaggttaggttaggaccctgtggaccctcttgaaaggcctccctgctttnctcaatcccttccccttcctgcntggnggaattttggttggtcctttcccccttcctggcttccatttncccccctttgggggtcctggttttcntttcccnattcccttcttcncccccaatngcctcccccttcttggntgnggtccaattttncccccnttttaccttcntcccaactctttttgggccttggcaactttcccaagncccctgggggcggaccaanaaancccgaggaacttcntggncctcaaaaagggganaattaaaaaaaattnaanaaaattnatttngcnnaagggtcaaatttttttngcagc

SEQ ID NO: 4630 - DNA, 582 bp, Homo sapiens
  misc_feature 94, 257, 313, 493, 499, 523, 526, 534, 545: n = A,T,C or G
cctctagatgcatgctcgagcggccgccagtgtgatggatatctgcagaattcgcccttagcgtggtcgcggccgaggtactttttttttttgnttttttttttttaaaccttggagaatatgtatttcatctcccaggatgagagccaacctatgttagtgagtaaatagagttaatactatcctgttttttatttttatacctcttaaaaaaggaaacaaaaaaaaaaccttaaatcaaacctaaattattttgngtcttttatgttttttttccattcattctttaaatgccagctccagtgacactttntttgtgaaactctccctgcccagtcactctgagcaagagttaagtataccatagaaagatatttaaatttcaatcactcctcttaagactccttcttataatctattggaaccattccttcttctctgcctttcctactaaaggcaatgctcttgggggcaggtatcggtgggttatcgnttctgnattccggttcccctggtaccaatnatntgagcccntaagagtaccnggaggatatttctttaaattaaactcaatcatcccta

SEQ ID NO: 4631 - DNA, 830 bp, Homo sapiens
  misc_feature 700, 748, 798, 806, 809: n = A,T,C or G
tactatagggcgaattgggccctctagatgcatgctcgagcggccgccagtgtgatggatatctgcagaattcgccctttcgagcggccgcccgggcaggtacacagcatgcaggctgcagcctgggcccctgccaggcaagatgtagggtgtgaggttgtgctctgccccattcactctggaacagctccgcccttgagtccaggatattttctcagtgcctccacgcatttgaccatccagaaaacatcccaactcagtgtgcctcggccaccataaatcagccaaccacacatgctgccctcaatgcttctgaatatcaagggaaaggatctgcctcatcctgccctgctcctgaggcttgcgcattgacgcttgagttatgtcattatttttttaagtgatagaaatctagtcaatgatttgtagcaatcaccactgtgcaacgtatgccaaaaaactctgtctatccttacagaaggagggagaaacctagcaaattagtctgacttccttgacacaattctgtggtgggccagtattaggtaaggctaaaatcaggtgctgtgattaaaagattatgacaatgtgaaaaagtcagtcattcacataaattaagaaaatgttttcaaaggaaaccaagagaggcacatccttgggaggtcaagggtcccccagaggtcaagaagggacaataaanggcattaaggtttagaaagaaataggctgtcactatcccccttttttnttgaacttttgtcatcaatgggctaccaatgccctacaaaacctgctctntttcctgnctnttctggccttccccgccgcct

SEQ ID NO: 4632 - DNA, 635 bp, Homo sapiens
  misc_feature 103, 374, 383, 387, 409, 417, 421, 429, 438, 448, 457, 458,471, 474, 475, 477, 478, 479, 481, 490, 491, 501, 510, 515,517, 532, 533, 534, 540, 545, 552, 555, 556, 558, 560, 565,567, 569, 571, 573, 581, 590, 596, 597, 599, 606, 609: n = A,T,C or G
  misc_feature 612, 620, 626, 633, 634: n = A,T,C or G
tgcatgctcgagcggccgccagtgtgatggatatctgcagaattcgcccttagcgtggtcgcggccgaggtacgcaacatgacattggctggtgtaaagatcntacaattatttttaaagtttcattgtattcatttgattatatagtttcttgccatcacaacaaacactcctattcatgtctaattcgatacctggtgagtccacataagcatttgggtccccactgatgagagcaccatggccaggtcacccacttgatcaggttctcttgctttttgttgtgcatctcatcttattgtaggcattcaaactgtggggctcaggcaagcctttccagtgtgatcatattaaattttatattttatggtgtnaacaatggncctncaataactttgcttttccttgnctcaccantggnggaagcantttttcccnactttaatgnccccccccnncaattggtttttngannannncnggttgactnntttttgaaanccggggganccctngncccgggggggggggnnnttttanaaaanggggggnaanntntnacacncncntngncgggggcnggtttctanatgggnnanccccagnctntgnggacccanaacctntgggggnng

SEQ ID NO: 4633 - DNA, 1226 bp, Homo sapiens
  misc_feature 1, 3, 5, 6, 7, 10, 12, 13, 14, 16, 18, 19, 20, 21, 22, 24,25, 29, 31, 33, 36, 37, 39, 41, 42, 43, 46, 48, 49, 50,51, 59, 61, 65, 66, 72, 77, 79, 85, 86, 87, 89, 91, 95,99, 110, 111, 112, 114, 115, 118, 122, 123, 125, 127, 131,136: n = A,T,C or G
  misc_feature 407, 466, 478, 490, 509, 512, 519, 523, 532, 549, 594, 606,609, 616, 630, 634, 641, 651, 652, 655, 661, 671, 676, 683,702, 710, 742, 752, 764, 767, 774, 779, 785, 815, 822, 839,846, 863, 869, 872, 877, 881, 886, 888, 897, 900, 910: n = A,T,C or G
  misc_feature 922, 924, 928, 932, 935, 953, 955, 959, 960, 964, 966, 967,969, 978, 986, 987, 989, 1003, 1006, 1013, 1014, 1027, 1028,1037, 1040, 1046, 1051, 1052, 1053, 1054, 1055, 1061, 1062,1067, 1069, 1071, 1075, 1083, 1086, 1090, 1092, 1098: n = A,T,C or G
  misc_feature 1107, 1116, 1117, 1118, 1119, 1122, 1127, 1131, 1133, 1135,1140, 1141, 1147, 1148, 1152, 1153, 1154, 1157, 1166, 1173,1176, 1177, 1182, 1191, 1192, 1198, 1204, 1207, 1208, 1214,1222: n = A,T,C or G
ncntnnntgntnnntntnnnnnannttgntnanttnnancnnnttntnnnntttttttnanttannttatanttaanancatatnnncntncttncacntaagttagagnnntnnagnacgnntnantatngggcnaattgggccctctagtatgcatgctcgagcggccgccagtgtgatggatatctgcagaattcgcccttagcgtggtcgcggccgaggtacagtaaaaacttgtggccatctcatctatgcctgcaggcaactgaaaagcagtgatttggacctttttcgagtttggatgggagtgtggacagggcggttagggggctgggcccaggtcatgtttcagtttctaagccaggggttttactgtggagtaggactgtttactcgttttcttaanactgctgggtgcttttgcttgctccttggctctgggccctctttttgggctttctacantttggggaatgngcgggttttctngggtgggggaactaagggntgnacccggntttnggccttggnaagggggataaagggcnttaccccttgggcttctttcttctttgggccttgggaattcttcncagccctttgcnaanccgtttngcctttggaacttnttgncttgaanaaggaattannccnagggcnccattggggncaagncggggcntgggttaaaggaaaataangtttcaanttgggggggccttgggccttgggaagtttttncccctttggngggttccaaagncangaaattnatttnaataanggccaggggggaaaatggcacccttgtaanccttaangttgggggccgccttanttgtccnaggcccttggaaagaanagaaangangggcnttcngaacntntttggaacnaangggccttggngggtttcccttnangganttgnagnctaataaacccctttttncnattnntacncnntnccccccggnccgggccnncntaaagggggcgganatntttcaanncaccaactttggnncgggccggntantttgantgggnnnnnccgaanncttcngntncccnaaagcttnggngagntnaaatcnaatgggccnaataagctnnnnttnccttntggngnanaaatnnggtaanntccnnntcncaaattttncaccccnaanntttangggggcccnnaagaancttaanaanngcaaanaggccggncccg

SEQ ID NO: 4634 - DNA, 845 bp, Homo sapiens
  misc_feature 535, 619, 641, 653, 657, 665, 674, 681, 683, 688, 709, 711,733, 734, 737, 767, 769, 774, 776, 780, 783, 788, 809, 810,811, 830, 832, 838, 839, 841, 845: n = A,T,C or G
tagggcgaattgggccctctagatgcatgctcgagcggccgccagtgtgatggatatctgcagaattcgccctttcgagcggccgcccgggcaggtactttaagaagtaatgcccttgagttagaaaatcatcattttaaaatctctgatgatataatggatttaggcaataatcatcaaaaaactaagttaagactacaacctgtcaaccaaataccatgtgtagaccttgtttggatattgacttaagcaaataaccctacaaagacacttttacaatcaagaaaaactgaatgggactgcgcatggtggctcatgcctataatcccagcactttgggaggcaggtgaattgcttgagcccagaagtttgagactagcctgggcaacatggtgagaccctgtctctaatataatttaaaaaaaagaaaaactgaatgtgaactgaatattagacaatataaagaatatattttgttgtgtttgacaaagaaaatgtggtggtggttaaaaggaatggaaaatgacttatctgnttatgtctggtttccctggtattctatttggcctttttgactggtgtagccgtatgcatatgttacctcttcaaaatattgatntacagcttaaaaaatgaggagnaagttaaatttntggncttttttnaattttttnttactgnanaaccntaaaagaaatctttttaaatntncttttaaaaaatggtgaccacnnggnatttttggggatcttttgcttttaaaaacnanttttnangaanggnctttncccagtttggtgggtgaattnnnaaacctttttttttggacntnttgggnntnaacn

SEQ ID NO: 4635 - DNA, 901 bp, Homo sapiens
  misc_feature 521, 542, 567, 608, 611, 628, 653, 655, 664, 687, 692, 704,709, 711, 725, 730, 735, 745, 749, 758, 761, 765, 766, 770,772, 775, 777, 786, 789, 790, 792, 799, 803, 804, 805, 809,810, 811, 812, 815, 817, 818, 820, 821, 822, 823, 825: n = A,T,C or G
  misc_feature 826, 832, 833, 844, 846, 850, 851, 853, 854, 855, 856, 858,862, 865, 867, 868, 870, 877, 878, 880, 881, 883, 884, 886,897, 901: n = A,T,C or G
gactactatagggcgaattgggccctctagatgcatgctcgagcggccgccagtgtgatggatatctgcagaattcgccctttcgagcggccgcccgggcaggtactttgctacacggccgggggccattgagactgccatggaagacttgaaaggtcacgtagctgagacttctggagagaccattcaaggcttctggctcttgacaaagatagaccactggaacaatgagaaggagagaattctactggtcacagacaagactctcttgatctgcaaatacgacttcatcatgctgagttgtgtgcagctgcagcggattcctctgagcgctgtctatcgcatctgcctgggcaagttcaccttccctgggatgtccctggacaagagacaaggagaaggccttaggatctactgggggagtccggaggagcagtctcttctgtcccgctggaacccatggtccactgaagttccttatgctactttcactgaagcattccatggaaatacaccagtgnagaaattccttgaaattttgnaaagttgtctggggtttaatgtttnaagcctttgttccagctatcccagaatgcccaccaaagaanttnaaacttggtttcttggnaagaaggaaaagaaaacttgatggncngttaaactngaaccccattttttggatttganaaccntacaacaggggnttgantnttatttcaatttgnaaaanccggnaaccaaaaantttnggctttttnccnttgnnccgnanggnanatatttggnttnntngaggggncttnnntagnnnntcnanntnnnntnnctacannttttaaaattnanattnntnnnntnattncgngnnantattaanntnngnnanacccccccccncccn

SEQ ID NO: 4636 - DNA, 841 bp, Homo sapiens
  misc_feature 558, 691, 692, 714, 754, 760, 762, 771, 778, 787, 827, 828,831: n = A,T,C or G
gactcactatagggcgaattgggccctctagatgcatgctcgagcggcccgccagtgtgatggatatctgcagaattcgcccttagcgtggtcgcggccgaggtaccaaactgctgtccccaaataaagaacttacatcaacaaggaatataaaaatgttatttaggacttctgttctcagatgtttaatacaaaggagagattgttgtgccagggaacaaagtgatccaatatccacgaagccagaattctcctactgcacattttgtttccaaaacactaaggaatacagcaagatttcaagttggagtaaagaagctacttctggaaacaagagaggagataactgaggactttcacagaggggctgaaatccttcccggaaaactgtgctcatcagggaacctcagcctagggggcagcgagggtggacggtgagctgacctatccccagacatgtggaataggtattgggtgtgcggggggtgcagtgcagaatgaaggctgggagttgttaaagctacagaatattctagtagcataccacggggaactcanggacctcaaacgtttttcaaaaattaaccctttgggctcagagtttcaggcagtccaatgtaattttacttccactgggattggtgccagaaagaaacaagcagtgctccttgactacagatttttaaacctnntttgttcatgccaggtgtgtgngatcctaaggggacttattttaatttaaaatgggggtganggaacnangaaggcttnatgaagnggccccttnttccttggaatgggcccccacatttggacctgttttaccnnaancaaaaaccct

SEQ ID NO: 4637 - DNA, 488 bp, Homo sapiens
  misc_feature 57, 63, 66, 87, 89, 96, 97, 100, 103, 454: n = A,T,C or G
aatgcgggccctctagatgcatgctcgagcggcccgccagtgtgatggatatctgcngaattnggnctttcgagcggacgaacagantntttctgnnctnacnttctccagctatactgcccaggaatcactctacctcccccatccctgttgctgctgcacctcaacctgctacttgaaaccacaggcccagcaaagaaactgtgctccaagtgcccaaaccaattcagttccctgttccgcaggaatcagagcttcagcatagggaagcagccatgaccccagcatcgaagcccatgctgtgccttgcccttaggagaccaggtgctctcatctagtggaaaagctgtacctcggccgcgaccacgctaagggcgaattccagcacactggcggccgttactagtggatccgagctcggtaccaagcttggcgtaatcatgggcatagctgnttcctgtgtgaaattgttatccgtcacaattcct

SEQ ID NO: 4638 - DNA, 587 bp, Homo sapiens
  misc_feature 3, 9, 11, 14, 15, 16, 18, 20, 23, 24, 25, 26, 27, 33, 38,39, 40, 44, 45, 46, 52, 61, 65, 67, 68, 80, 82, 85, 104,106, 116, 172, 183, 186, 188, 241, 436, 437, 504, 556, 558,566, 576, 579, 581, 587: n = A,T,C or G
ctntgcctntncannntnanatnnnnntatttnttctnnnatcnnncaatcntaagctagnaggngnncctatattgtantnaantcaaaagaccctatagtcnanttgtgccctntagatgcatgctcgagcggccgccagtgtgatggatttctgcagaattcgcccttncgagcggccgnccngncaggtaccacctatgaagaattctgcctaaagatattaaacctgaagcttatnaaatctgtaaatctgactacgacttgactgaaaatttagtggcaaaggaatatagtaaatgacatcacaaggatatagcatccaaacccagaaagcggatattctttaggataaatgacccagttccctcaacaatgaaatggcctggaatagaaaaaagagggagaacttaaaataacataccaaccaaatatnngcacatggatcctgttttaatatggattcagaaatccaattctgaaatgacattttttaaaaatcangaggcccgggcgtgatggctcatgcctgttatcccagcactttgggaggctnangtgggccngatcacaaangtnangagatn

SEQ ID NO: 4639 - DNA, 480 bp, Homo sapiens
  misc_feature 56, 57, 73, 76, 77, 81, 84, 89, 90, 91, 92, 432, 434, 437,438: n = A,T,C or G
gggccctctagatgcatgctcgagcggccgccagtgtgatggatatctgcggaatnnggcctttcgagcggangannaganttnttctnnnnaatctcatgtcctgggaaacccctcagtcctgggcaaactggagaccggtggttatcatacaaagagaaaaccaaataagactaaaattatgtccaaacactttcattgtggctaggaacacaagttgaacaccctaataaggaacacaaataataaaagcttgcattattgagtgcttatatgaggtaagtattatactattatctccattttaaagataagcaaactgagacatagtaagggtaaataagttagttagtgaaggcaccagaatttaaacccagaaagtttggttttagagcatacactacaatcagcactgtatggaaagattctaanancannagacaggcagagatgggagcactggggaagacatcatggagg

SEQ ID NO: 4640 - DNA, 496 bp, Homo sapiens
  misc_feature 117, 174, 274, 316, 332, 431, 467, 483, 496: n = A,T,C or G
ggcgaattgggccctctagatgcatgctcgagcggccgccagtgtgatggatatctgcagaattcgcccttagcgtggtcgcggccgaggtgctttttttttttttttttttttttngagacggggtctccctatattgccaaagctggtgtcaaactcctgggctcaagtctntccttagcttcctaagtagctgagaccaaaggcacaggccaccgtgcctggctctacttctcaccttaactaaataaccatccacctgagaaataacatntacatgtaagcttaattcaaatattcaggttttgtgatcctnaaacgtgaatgatcanaatcacctagggagctttttgaaaaaattaaatcccccctctacatcagtttctacagggaagtttgggaattcatgtcttaaaaaaaaaaaaaccctnataggctggggcatggtggcttacacctgccccgcntaccttcccgggcggngcgtttaaagggn

SEQ ID NO: 4641 - DNA, 467 bp, Homo sapiens
  misc_feature 40, 42, 46, 47, 57, 61, 64, 66, 67, 73, 453: n = A,T,C or G
atgctcgagcggccgccagtgtgatggatatctgcggggngngggnnttcgagcggnaganaananntttttnttttttttcggccgggggccattgagactgccatggaagacttgaaaggtcacgtagctgagacttctggagagaccattcaaggcttctggctcttgacaaagatagaccactggaacaatgagaaggagagaattctactggtcacagacaagactctcttgatctgcaaatacgacttcaccatgctgagttgtgtgcagctgcagcggattcctctgagcgctgtctatcgcatctgcctgggcaagttcaccttccctgggatgtccctggacaagagacaaggagaaggccttaggatctactgggggagtccggaggagcagtctcttctgtcccgctggaacccatggtccactgaagttccttatgctacntttcactgagcatc

SEQ ID NO: 4642 - DNA, 434 bp, Homo sapiens
  misc_feature 5, 9, 12, 13, 17, 27, 32, 38, 46, 52, 398: n = A,T,C or G
ctttngggnggnngggngggcaggaanagaanaagggntgtttttnttttgntcgccacaattttgacctaggcaggaagctttacagcttgaggcagtttcatggtctgaagacaaacttcttgtgacttgctgccggtgttggactgcaggagagagcctcactgggtcaggagcacgagaacaaagtggatcccactaccacatcccacccctcctgtttcagaggcagatcatgggaccaggactactgagagttccatggccctacccatcatctgaaatgcccaagaacttctcccgattaacaaaggtcaagcataaactctattgccaccaccacagctggttctcacttttaggtgctacctcctgcctaaaggttgatctacacagtnccttacaacatctgccgacttaagagcacagagctc

SEQ ID NO: 4643 - DNA, 523 bp, Homo sapiens
  misc_feature 4, 15, 22, 30, 36, 53, 66: n = A,T,C or G
ccgntccccctttcnccccccncattttgnaaaggncctctagatgcatgctntagcggccgccantgtgatggatttctgcagaattcgccctttcgagcggccgcccgggcaggtacttttctttatgaatgttataccagaacttaggaggaaaaaatttttgagcatactgaatattaggaattggatatctccctaaattattaaagttcatcttccataaattctgtaaaactgaatgtagtatttccccctcttcccatgcaagtaactgatatcactttagaaaacctgatatgaacattatttgttattgtgcttttatgaagaattctgtctaatcttctcataagaagaaagaattagaaccaaaaatctaattatcagatttagtaaggatgtaggcaagaatccacctatttttttcatttatgtctttcaaaatcaatcacattctattattcaccgatccactaaacagatgtagaattcctattatgtagcaggcattgttctgtta

SEQ ID NO: 4644 - DNA, 499 bp, Homo sapiens
  misc_feature 499: n = A,T,C or G
tagggcgaattgggccctctagatgcatgctcgagcggccgccagtgtgatggatatctgcagaattcgcccttagcgtggtcgcggccgaggtacgcaacatgacattggctggtgtaaagatcttacaattatttttaaaatttcattgtattcatttgattatatagtttcttgccatcacaacaaacactcctattcatgtctaattcgatacctggtgagtccacataagcatttgggtccccactgatgagagcaccatggccaggtcacccacttgatcaggttctcttgctttttgttgtgcatctcatcttattgtaggcattcaaactgtgggctcaggcaagcctttccagtgtgatcatattaattttatattttatgtgttaacatgtgcctccaataacttgctttccttgctcaccatggtgatgcatttttcctactttatgtcctcgctcattgattatgatgagctgctgactatttgaan

SEQ ID NO: 4645 - DNA, 393 bp, Homo sapiens
tacgactactatagggcgaattgggccctctagatgcatgctcgagcggccgccagtgtgatggatatctgcagaattcgccctttcgagcggccgcccgggcaggtacagtaagctggctgctatttcggtgcccagctctgccgcttcgaggagttgcagatcaaactcactttcttcacacaggctcccaaagctcatatcagagagctggcatgacttctctatcaaactgaaagtttcagattcacaaagaagttcggtcaagtttcgaagttgagacagttttgattttaggacttcaggaactggaggaaagtaatcttcataggaaccattgtgaagaaaagattttttaaatcgtattgtggactgcaggagtcttagatttta

SEQ ID NO: 4646 - DNA, 412 bp, Homo sapiens
gattgtaataccgactcactatagggcagaattgggccctctagatgcatgctcgagcggccgccagtgtgatggatatctgcagaattcgccctttcgagcggccgcccgggcaggtacttttttttttttttttttttttgtagagatggagtctctatgttgcccaggctggtcttgaaccctgggctcaagcaatcctcctgcctcggcctccgaaagtgctaggattacaggcgtgaggcaccaggaccggccaataagatgtatctttacatgcattccaacactctcagtctttcctcacacacccgctgctaagagaagaattcagcgctaccaagagaaattttctccagggctcctgccttctgtggtgaagtttcatcttgactgaaaaatagattcggga

SEQ ID NO: 4647 - DNA, 417 bp, Homo sapiens
gattgaatacgactcctatagggcgaattgggccctctagatgcatgctcgagcggccgccagtgtgatggatatctgcagaattcgcccttagcgtggtcgcggccgaggtacgagaaagatttaactgctttgaagtggatataaaccagagacctactgaagtcatttatctgactcagtgtgactgctcagcatttgtagaaattgagtatagtgagagtatagtgaggcctggagatttatgaagtcatgaggaagagccttccaggctctgatccgaatgaaattcaattacaaatggatttgagatgaatcttaatacaaaaaaacagtgtgacagtgtcctgaggaatgggtctacagagcctttggatagctgaattgtagagaacctgggaggctcaatagtatctt

SEQ ID NO: 4648 - DNA, 410 bp, Homo sapiens
gattgaataccgactcactatagggcgaattgggccctctagatgcatgctcgagcggccgccagtgtgatggatatctgcagaattcgccctttcgagcggccgcccgggcaggtacaccactatcgctggctaatttttgtattttttccagagacgaggtctcactgtctcactgagctcaggctggtctcaaattcctgagctcaagagatttaccagtctcagccttccaaagtgctaggattacaggcatgagacactgtgcctggccagtaattttgttttattatattaaggtgaggtttataccaccttcttctgattacagaagtaatacatgctcattatgtaacactgaaaatgtaagcagtataaaaaagaaaataaaaaagaatatgaaaatcact

SEQ ID NO: 4649 - DNA, 394 bp, Homo sapiens
  misc_feature 359: n = A,T,C or G
tacgactactatagggcgaattgggccctctagatgcatgctcgagcggccgccagtgtgatggatatctgcagaattcgccctttcgagcggccgcccgggcaggtacttttaatacaccatcctggtggatctggcgcaagggaactccacacagaaaaacactgccctcacgttatgaaaggattcaacattattctctcttttgaaagataattggcttcaaagaataattgaaagttagaaacttgggtcttttacagaaccaggtaatatctctactactcttttgggaattagtcttgaactgcagccactgtgaaagcttctggtgttatttaaattaattcttgtattgntattaaactttccacatggttttgtttatctcctc

SEQ ID NO: 4650 - DNA, 416 bp, Homo sapiens
  misc_feature 6: n = A,T,C or G
gattgnatacgactcctatagggcgaattgggccctctagatgcatgctcgagcggccgccagtgtgatggatatctgcagaattcgcccttagcgtggtcgcggccgaggtactggataatgcaaaattcactttgaaactttttattagaatatttgcttgcctaattaaagatggaatagagcaatattataataaatgtgcatagcctgaatacaaaggagctaagagataacggaatacatacatacttggccaaagaagacagaccacaattataaatatagcctagatatatacaaagcaaatggtcatgcattaacacattaattgaaggtgatgaactgaagttttatcaattaagaaaacattgcaagctatattctgggcccaattttaaaagtagaaaaaaaat

SEQ ID NO: 4651 - DNA, 401 bp, Homo sapiens
  misc_feature 2, 4, 6: n = A,T,C or G
gnancnactactatagggcgaattgggccctctagatgcatgctcgagcggccgccagtgtgatggatatctgcagaattcgcccttagcgtggtcgcggccgaggtacagtaagaatttgcactgagtgagatgcaggtggtgtttctgaaatggaaaagtagccaaatcagaaatttattagtaggaaacacaaaaggaatccaagggatgttcatctgtaaacctgagagaaggtattttaaaactgtcgctgttcacattggcaggtgactactcactctaatagctccttcctgcctctggtgatactaatggacagggcaaagttccccagcataccccattacagcctgcagccacagggagttagcgagggctacacccctttgcctggacat

SEQ ID NO: 4652 - DNA, 394 bp, Homo sapiens
gtatacgactcactatagggcgaattgggccctctagatgcatgctcgagcggccgccagtgtgatggatatctgcagaattcgccctttcgagcggccgcccgggcaggtacagagacgttaagcagcttgcccaaagtaaggcatctctgctaattgacagagctgaaattgaactcaggaaccttctagattctatgtatttggcttttcacaacatcattcttgttttcaatccttgtcactatctctgctgtgcctgagattcccaaaacgagttgtggttaacccagagaataacccttcagtgcctgatgttggtggagagaagaattgcctagttacatctcatatggctcagcaggggagaggagtgccctcatggttgctaaac

SEQ ID NO: 4653 - DNA, 403 bp, Homo sapiens
gattgtatacgactcactatagggcgaattgggccctctagatgcatgctcgagcggccgccagtgtgatggatatctgcagaattcgcccttagcgtggtcgcggccgaggtacgccggggactctttcttgaagtccaaaggagaatcctcaaagaatctctgaagaaaatttgactccactgattaccatctgttggtgacactctgcttcaattattctttgttctgaactccaaggactgttttaagttctacaatgtctggcagattgaggaacaaagataagggagaacaagcagaaactggtcagagggcaaatccagacagaacctttgacttggtgttgaaagtgaaatgtcatgcctctgaaaatgaagatcctgtggtattgtggaaattc

SEQ ID NO: 4654 - DNA, 402 bp, Homo sapiens
gttgtatacgactcctatagggcgaattgggccctctagatgcatgctcgagcggccgccagtgtgatggatatctgcagaattcgcccttagcgtggtcgcggccgaggtacttttagtggctttagtttaaaagatatgcttcattacttcatgccaaatagtcaataaaaggtttgtaattcaacatcaaactgggtaagtccttcttaaaattgtttttaaaagcaaaagatcccaaaataccagttgtcaccattttaaaaggatattttaaaagatttcttttatggttattcagtaagaaaaatgaaaaagtcagaaattttacttctctcattttttagctgtatatcaatattttgaagaggtaacatatgcatacgctacaacagtcaaaac

SEQ ID NO: 4655 - DNA, 419 bp, Homo sapiens
  misc_feature 419: n = A,T,C or G
gattgtaatacgactcactatagggcgaattgggccctctagatgcatgctcgagcggccgccagtgtgatggatatctgcagaattcgccctttcgagcggccgcccgggcaggtactctgtttcaggccctcactgcgtgccggagatccactagaatacaagatctgtttctgtgtctttgagggacatgtatccagcaattagttacatcagtcccttgtagatgtcaattccagtgtcacaaatttcttgttttgcaacgttgagcaagtttttttcaatgtttctaagcctcagttttttgccctacaaaatgtggtaataatatttaaccattagtaatgttgtgaaaattaagcaaaaatacatgtaatatatttaacaatgcttggtgttcgttaatgctttaatatatn

SEQ ID NO: 4656 - DNA, 409 bp, Homo sapiens
  misc_feature 183, 196, 251, 353, 407: n = A,T,C or G
gattgtatacgactcactatagggcgaattgggccctctagatgcatgctcgagcggccgccagtgtgatggatatctgcagaattcgcccttagcgtggtcgcggccgaggtacgagaaagatttaactgctttgaagtggatataaaccagagacctactgaagtcatttatctgactcantgtgactgctcancatttgtagaaattgagtatagtgagagtatagtgaggcctggagatttatgaantcatgaggaagagccttccaggctctgatccgaatgaaattcaattacaaatggatttgagatgaatcttaatacaaaaaaacagtgtgacagtgtcctgangaatgggtctacagagcctttggatagctgaattgtagagaacctgggaggctnaa

SEQ ID NO: 4657 - DNA, 395 bp, Homo sapiens
gattgtatacgactcactatagggcgaattgggccctctagatgcatgctcgagcggccgccagtgtgatggatatctgcagaattcgccctttcgagcggccgcccgggcaggtaccttgctacacggccgggggccattgagactgccatggaagacttgaaaggtcacgtagctgagacttctggagagaccattcaaggcttctggctcttgacaaagatagaccactggaacaatgagaaggagagaattctactggtcacagacaagactctcttgatctgcaaatacgacttcatcatgctgagttgtgtgcagctgcagcggattcctctgagcgctgtctatcgcatctgcctgggcaagttcaccttccctgggatgtccctgga

SEQ ID NO: 4658 - DNA, 436 bp, Homo sapiens
  misc_feature 309, 312, 340, 354, 355, 364, 370, 378, 383, 397, 427: n = A,T,C or G
gattgtatacgactcactatagggcgaattgggccctctagatgcatgctcgagcggccgccagtgtgatggatatctgcagaattcgcccttagcgtggtcgcggccgaggtacaccaaatttacttagacatccaggccagacgtgaagaatttctctgtcagatctagtaagctccatcaatttaacattttggcttctctggggcaaagagaagactgccaaacagcactggtgctgggggggcaccactggtgacatgtggcagttcttgaaagaaaattaatgaacatgaccagtaacctttntgncccttttacttcttatttaaaggaaganaaggaaaatttcannaattggggngactangcaactgnttctnttttaaacagcttnaaaatggtggggtttttttttccccaaaanttgccaatt

SEQ ID NO: 4659 - DNA, 409 bp, Homo sapiens
gattgtatacgactcctatagggcgaattgggccctctagatgcatgctcgagcggccgccagtgtgatggatatctgcagaattcgccctttcgagcggccgcccgggcaggtactgccagatcacaggggctgaaagagaactctgctcaaggatctgtcaaaggtgagaaggaaaaaacacttttgatgatcaagaaggatccaaaaaggagcaactatgcagatgagagcatttccattagtcttaaaaaaaaaaaagacctactatatattgataaattacttactaattctaaattaatcaggatacatttactatatgctctgtgctgggtgctagagggtcaggttagatagagatgcaaagatgacaataataaaaatgttagtgatgattataggtaag

SEQ ID NO: 4660 - DNA, 407 bp, Homo sapiens
gtatacgactcactatagggcgaattgggccctctagatgcatgctcgagcggccgccagtgtgatggatatctgcagaattcgccctttcgagcggccgcccgggcaggtacgcgggtcttttaactgttatggatgtataagcactatctatgatggacgaggcatagtgcatctcctaggccggaaatgtttcactcactaatgagctggacaattctactctgtgaatttaactttcctgactcccttatgcaggttaattttggtaacatatcatattttactctggcttggtgggattaggtgggaaattacagattgcatcaacaatttggtctgcctggatacaatttggtctgtttcagtcacagcctgggtcacacctgttgatatatatttttaat

SEQ ID NO: 4661 - DNA, 1047 bp, Homo sapiens
  misc_feature 5, 8, 112, 113, 158, 286, 287, 289, 299, 313, 325, 357, 370,380, 389, 401, 416, 419, 434, 438, 444, 473, 506, 529, 532,558, 560, 576, 584, 586, 602, 603, 611, 615, 624, 625, 632,634, 639, 642, 644, 656, 657, 662, 667, 669, 672: n = A,T,C or G
  misc_feature 695, 710, 721, 724, 726, 761, 767, 777, 780, 788, 790, 793,813, 829, 830, 833, 837, 855, 856, 864, 872, 874, 877, 882,886, 892, 899, 902, 904, 905, 907, 915, 920, 921, 924, 928,930, 936, 955, 956, 959, 966, 979, 981, 992, 1003: n = A,T,C or G
  misc_feature 1019, 1024, 1033, 1038, 1040, 1043, 1044: n = A,T,C or G
aagcnatntactatagggcgaattgggccctctagatgcatgctcgagcggccgccagtgtgatggatatctgcagaattcgcccttagcgtggtcgcggccgaggtacagnntctgagtatgggaacttccctccccaagtggtgggaagttacagntaactacagcttactcaactatcacttccagaggtttagtgtttttaatatgggaaagaggagaaatctcaggtctaatcagggttctgcccatcagctttttcactgaaacttttcaacatgtgttnngntttttggttntttttttccatctntccagtttctancctggtgtatgccttcatccctccgcggttcnccattcctatttntttatggctnttttgggtncctccctttacncagccttcaatggtnctnccatgaagtttcaangctngtaccnccctgtcaatttttgggggaaaccagtangaggaaaaaaaaccaaataggaaatttttggcnttggaaaaaaaaaaaaaaataanggncccaaagtttgccggatggggccttnancaaccccttggtaaantttcccanancaattttttggggggnngggccttngaantaatggggnnttggggnantccanccntnggaggggtcaanngggantgttncngangaacccaaagcccttggggcccnaaacaaatggggtgnaaaaaacccantgntntttcttttttaaaaaaaatacccaataaaattttnatcttngggcccattnggntgggcccncnttngccctgtgtgaatccccaancttaaccctggggganngcntttnagggccagggaaaaaaanncccttggnaaaacccntnggngaaangttnggaaangcctttnaantnnangccccganaatannttncccncnttgtancttttaaccccttgggaannaancaaaatnccagggaatttcntntttttctaaanggaggaaaaangaatttaatcataaanaattnaattttaanagggngnaanntgc

SEQ ID NO: 4662 - DNA, 832 bp, Homo sapiens
  misc_feature 201, 352, 405, 435, 440, 456, 462, 470, 479, 481, 487, 499,550, 563, 565, 586, 590, 606, 628, 651, 655, 670, 673, 676,692, 697, 702, 705, 707, 711, 712, 714, 716, 717, 720, 735,759, 761, 762, 765, 784, 785, 797, 800, 812, 823, 826: n = A,T,C or G
ctatagggcgaattgggccctctagatgcatgctcgagcggccgccagtgtgatggatatctgcagaattcgccctttcgagcggccgcccgggcaggtacgcgaggaacttcggaggatgttcatgtccaggagcagccccacgccctgtatggtcggtgtctagagcctcacagcaactaagaccaacccagctctcanaagaaggaatgtcaaaatgtcatgttcaattttacattcagtgcctggaatcttttcttcacaattgaaatgaaatgtgctgaaggaggtgaatccatgcattaatcttcagctcacaaaggaaaatactacataagaagcaagaccacanactcaagacggacataattggattttttttgccatggcctggaaagaaaggtnccttggccgcgaccaccgcttagggcgaanttcanccacactggcggccgntactantgggaatncgaacctcngnaccaancttgggcgtaancatgggcatagctgtttcctgtgggaaaaatggtatcccgcttcacaattncacccaacatacnancccggaagcattaaagtggtnaaangccttgggggttgccntaatgaggtgagcttaacttcnccattaaattggcgtttgcggcntcanctgggcccgcttttncanatncgggaaaacccttttnggtgnccacnctngnattnnanannaantcggcccaacccccnccgggggaaaaaggccggtttttncnntanttggggccccttttttcgnntttctttggttnacntgaactcccttngcgcctcgggncgntttcgg

SEQ ID NO: 4663 - DNA, 1064 bp, Homo sapiens
  misc_feature 2, 10, 14, 53, 156, 160, 192, 193, 248, 251, 291, 330, 335,353, 368, 392, 422, 425, 431, 436, 437, 445, 459, 473, 504,511, 512, 518, 524, 535, 536, 539, 555, 556, 563, 569, 585,586, 590, 593, 617, 620, 627, 630, 634, 638, 646, 647: n = A,T,C or G
  misc_feature 661, 665, 666, 671, 672, 677, 679, 689, 700, 709, 725, 739,741, 742, 747, 750, 764, 767, 772, 779, 792, 799, 800, 807,808, 810, 811, 813, 815, 819, 827, 847, 852, 853, 858, 864,867, 870, 875, 879, 882, 891, 893, 907, 916, 923, 927: n = A,T,C or G
  misc_feature 936, 944, 949, 951, 955, 964, 965, 970, 975, 976, 986, 995,1005, 1007, 1011, 1012, 1027, 1029, 1030, 1034, 1041, 1043,1047, 1052, 1053, 1055, 1059, 1061, 1063, 1064: n = A,T,C or G
tntagattantatnggcgaattgggccctctagatgcatgctcgagcggccgncagtgtgatggatatctgcagaattcgcccttagcgtggtcgcggccgaggtacaaaaggacaggcactgactagcaggaccctggcagaaactatgtccctncccnaaccacccacccgtcaggagtgcagagctcanntgtggcctggggagaagagtcacatcatcaatggcaacaggacctttcccacganttntctggaaatactccagattcctgccactctgggaatattnttttgagtctcatgatattaaaaaaaattttgggctttnttcangtattgtccaaactccantggaaccattgaagnactttggggcaaaggaccctttanaaaaagttcaaaaaaaaacccaaattgggncgncccacnttaannctttaacncccccaccttaacnccaaaaaggctttnaaaaaaaactttttaccaattcccaaccccnttttttnnaattantttgcnttgggttaaannttnttgggtccttttttgnnaaattanccggtncaaaaccttttttatnngttnaanctttccccaaaaacttttttgggngtncaaaaanaancccntttnaaactttnntttccccccagccnccgnnaagcnnaaaantnaaaagtttgnaaaaccttggntccaagaancaatttctttatttantttggaaaaaaaancnnttttnttntttccttggaaaanacntggtnaaatggntttccttaaaaangggcttnngcccccnncnnantngggntggggganttaaaggggggggagaaaanttttnnccccntttaanaanaantgggnaaanggncccccaatngnctttttccccgggnttttttttntccccgntttngtcttgggntaaaaccncgaanangggncccattttnnggggnccccnntcgggggttnttaaagggntataaagggncncccnnatgttaccattggcncnngggngggggancnttcntaaanngngtgnanann

SEQ ID NO: 4664 - DNA, 969 bp, Homo sapiens
  misc_feature 13, 58, 365, 389, 391, 401, 418, 467, 520, 521, 554, 595,602, 633, 636, 642, 644, 658, 662, 669, 673, 679, 701, 717,718, 723, 727, 732, 737, 739, 745, 747, 748, 753, 758, 759,765, 766, 770, 783, 788, 792, 797, 802, 805, 806, 814: n = A,T,C or G
  misc_feature 818, 828, 829, 834, 835, 837, 841, 846, 851, 858, 863, 867,868, 869, 872, 876, 890, 897, 900, 901, 921, 925, 927, 932,933, 941, 942, 949, 961: n = A,T,C or G
cttagttcgaatngggccctgtagatgcctgctcgagcggccgccagtgtgatggatntctgcagaattcgccctttcgagcggccgcccgggcaggtacattcatgttaatccagggagcaaggtaaagctgtcactttcattattcacatgaccacgaaaataaattgtattttttttttttacaaattctattcttccaatgtgatattaattataactataggcatttacctttatggtgaatctatttgttccactaaatgatccataggcctcctactatgatggagacaaaaagatctttgaatacaaaattcaatctaattatttggctatgaaaactaaatgtttatattatctcnatttaccacataaagttttgtcangntctacattanccctatttccacaggangcctttacaaaaggtcattgggaaagatagcagatgttaaaacttttcntatttttaattttaattttaattaaaaaccttggtattttttaaaatttccannaaaggggtgccattgttgttggccatttttgtntaccctggggtattaatttggcaattaaatggaatggaaangttttgngggggggtattggccaatggaccccccaatncancccaangngtaccctttggggncgcnggaacanaccncttaanggggccggaaattttccaagcnaccacttgggcggggnnccgtntaantaagntgggnanacccgngnncttcnggganncccaanncctntggggcgggtaantcaangggnccaanaggcntgnntttccctngggngggaaaattnngtttnntnccgncttcncaaantttcccncccanacannnccnaagnccccgggaaaggcnttaaaanagnntaaaagccctgggggggtgngccnanaatgnnggggcgcnnaaacctnacaattttaaanggcgggtg

SEQ ID NO: 4665 - DNA, 991 bp, Homo sapiens
  misc_feature 1, 3, 4, 6, 8, 11, 324, 376, 390, 412, 448, 483, 503, 507,513, 543, 556, 564, 597, 601, 606, 609, 615, 636, 637, 643,646, 650, 651, 659, 669, 673, 687, 689, 690, 692, 698, 702,705, 714, 727, 733, 736, 742, 755, 756, 761, 772, 773: n = A,T,C or G
  misc_feature 784, 791, 793, 795, 803, 809, 816, 824, 825, 827, 835, 847,852, 859, 861, 873, 875, 876, 879, 880, 881, 883, 886, 889,903, 917, 921, 930, 939, 942, 943, 947, 951, 960, 965, 966,968, 970, 975, 977, 978, 980, 982: n = A,T,C or G
ntnncnangcncttagggcgaattgggccctctagatgcatgctcgagcggccgccagtgtgatggatatctgcagaattcgccctttcgagcggccgcccgggcaggtacgcgggtatcacctctccttgttgtcagtagtttcctttctgcagacaggagttccatgtgctgggaagagggccattcagagcctcgtattctcatcctctcagtttagcaatgcgagaagaaaaaacttttgtctcacaacctcatatacaatctcaggaaataggctcttattttctggcttgaggctgtccagaggcaccaggcactgtngatggtctcacttttctgtcctggatctatctggtgggggcccagacagcanggatctattttcangaaaatatggccgaggagaggnaaaaaacttatgtgggcccgtaaaaaaacaggcggntttttcaaggtggggctattccccccattcccacnattcattaaaaccttttttnttgncttganggctttaaaaaggtgcttttagaacttttncaaaaactttggnattccttnaaaaaccaggaaaaaatcctttacccttggggnaaanagaantanaacccntattcccaggtttcacctttnnggcccnatntccnnttcattcnaccttctttnttgntcctctttgaaaantnntnaacccnaccngangttttccancacccgtttttcncctgangangaggcngttcttccttttnnattcntttttacccanncattgttgggnagttctnancnaagatttngggggnttttcanttattaannancttcttgncctttaccctancttanttccgangnttccccctaagncnnggnnnanttnganctttccttttggcncttttttggttttntttnggtgggtgnaaaaggggnaannaacncatngtgctttgntcaannangngtttngnnancntaaccatgg

SEQ ID NO: 4666 - DNA, 850 bp, Homo sapiens
  misc_feature 3, 5, 6, 452, 481, 490, 492, 515, 548, 568, 614, 624, 634,639, 645, 647, 656, 669, 675, 677, 683, 684, 708, 712, 716,718, 721, 729, 731, 743, 745, 746, 751, 752, 758, 767, 768,772, 775, 776, 793, 794, 796, 798, 800, 816, 817, 819: n = A,T,C or G
  misc_feature 840, 844, 847, 849, 850: n = A,T,C or G
atntnntcctatagggcgaattgggccctctagatgcatgctcgagcggccgccagtgtgatggatatctgcagaattcgccctttcgagcggccgcccgggcaggtaccacatgagccagcagcttctcctgatgcacagtgcaagaaatgaacataagtggtaataataaatattcagtgaatgaatgtaggcctcacatatctttttcccatagagagattgaggttggtaagtaataacagatctggtgacactgtcttctactttagagacctgatattggctagaggtggggtaggtaaaggggagggaataggcttttattaggttggtgggtaaaatttgctgttttctgaaagagttggacaatatcaaagagctttacagtgttcattagtcaattctcattagcccaatgattccatttatagacatgtataatcaaaatncccaagcaaagatttacatttccaaaatntgtttttantngaaagttcttattttataaatancaaatgccaattggaacattaattaagttattntatttttaacaccgttaatngtaaattaaacaccaaaatatttcaatgggtattaaaaaattgggncaaataaaantcgggggcantaacnccacangnttttaaaangataccctttggnaccgcngnaccacnncttaagggggccgaaatttcccanacancaantnggncgggccgntnaccttagtgggnanncccannctcggntaccccaanncttnggnngtaaattcattgggtcnntnancncttgttttccctggtnngnaaaattggttaattcccgctncacnaantnn

SEQ ID NO: 4667 - DNA, 1012 bp, Homo sapiens
  misc_feature 2, 6, 9, 81, 97, 101, 127, 148, 187, 188, 194, 196, 201,236, 283, 292, 304, 310, 316, 321, 324, 334, 335, 342, 343,348, 351, 354, 356, 383, 400, 421, 423, 438, 439, 467, 487,493, 503, 514, 526, 529, 534, 537, 554, 559, 561, 574: n = A,T,C or G
  misc_feature 581, 583, 597, 605, 610, 618, 624, 625, 629, 633, 639, 646,648, 659, 660, 662, 663, 674, 686, 706, 714, 715, 719, 731,739, 760, 773, 777, 779, 785, 787, 794, 796, 797, 802, 823,828, 830, 836, 848, 851, 855, 857, 860, 862, 868, 871: n = A,T,C or G
  misc_feature 874, 875, 879, 881, 883, 884, 891, 896, 898, 899, 903, 904,915, 917, 930, 932, 941, 943, 944, 952, 953, 961, 963, 965,970, 974, 989, 993, 1002, 1003, 1008: n = A,T,C or G
tnatanggngaattgggccctctagatgcatgctcgagcggcccgccagtgtgatggatatctgcagaattcgccctttcnagcggccgcccgggcnggtncaaacaaacagcccacaacaattctntaatggtgggggagtaaatanagtgaccgattatgctggaggaagaggaagtgaatgggnncccaantntaggntaggaatgaaaaaatccctaccaatgtaaatcagnatataaaatacacaaaagagttcatgtatgtgtgcgggaaggaaagntgatatttngggggttggganggtganacatgngggtnccnagtacatatnnacaactnntttantcnccntnccaaaggtcatggggaatgagcattcnttaacatttttgatacntcataccttagacttgacccntnggaccttttgattgnncattggggaaaaaatttccaaccctccncgtttaattcccagcaaggnttcacntttctttccntgggtgcccanatcttttaattngantgacngtntatggggcttttgggtngaatnantacattattcttnggcttantngggggaaaaaagcnaatgaaangggcnttttgggngcaaannatgnaatncggggnttttaangnaaatttttttnnannttaaccaaatnttggttggcgcnctccttaaataaaggcttgncaatttannaaanaaaaaatggccnttcccatnttttttttaccctttattccntaaagtatatggnaaancnttttcnanttgggangnnaatanattttttttatacccacttgntgagncnttgttnggccccactagnganaaantnaantntggggngtntgnncaancntnnattttgntgcanannctcnnaaacattaaananacccccattctangnttgtgtgancnnttacagannaaaagcgngngnttatntgcntaaacacccaggggnaaanccttgggtnngggtnggtg

SEQ ID NO: 4668 - DNA, 978 bp, Homo sapiens
  misc_feature 3, 4, 333, 392, 439, 464, 466, 531, 533, 536, 560, 607, 608,609, 644, 653, 679, 698, 718, 719, 741, 746, 757, 769, 801,815, 816, 817, 838, 854, 858, 860, 865, 867, 868, 882, 898,903, 904, 931, 933, 938, 939, 951, 957, 958, 965: n = A,T,C or G
  misc_feature 972, 973, 974, 975: n = A,T,C or G
ctnnaggcgaattgggccctctagatgcatgctcgagcggccgccagtgtgatggatatctgcagaattcgcccttcggccgcccgggcaggtacctaaggtgcagtctctgccttagagttgtaatccaggaaggggctgcaagagagactcagaagatgtggtctgacaatatataagcacaatgtctgacccttaaagaatgacaggatttcaacaggcagacaggagaggaggaggaattctaagcaaaggctttcacatgtaaacggtgaatttcttagataaggatctgttttctatataccaggaatagttttgcttggcatttgnaggacgaggagtaagttccaaatgaaaactttaaaaatgtttccccaaagtgttcatantgaaattttaaggatgtgccttatggactggggaaataatcaaaatnacataaaataaaaacattaaaatanancattaaaacccattaaaaaattaattacccatttttttttttttcttacctttttaaaaaatttngnggncccccagaaattattaggcctttngccggggggttttttcctttaaatttggaattaaaaaaccttttcannntttccattccaccccttccaaatttaaaatattgnttttaaatngccaattggaacccaatttttgcctntttgggtcataataatccnaaggggcctatttatttaanntaaattgggggggtacttggcnttttnttttgggcccnaaagtattggtnatggtaattttccgcgttaaatactctttaancccttcctttttgnnnttttcaaggggcttattaccnccatttttatttattnaatnanttggncnntattttcccaatcntttttaaatttagggncaaannccaattatttctttaaattaaaaaaangntttcnnaaagggtggaantttttnnccttttntttcccnnnnccc

SEQ ID NO: 4669 - DNA, 946 bp, Homo sapiens
  misc_feature 3, 4, 5, 6, 7, 10, 11, 13, 14, 352, 422, 455, 464, 480, 489,507, 509, 514, 522, 532, 544, 547, 550, 553, 560, 575, 581,584, 596, 607, 625, 631, 641, 675, 696, 709, 725, 739, 746,754, 762, 768, 774, 785, 805, 810, 814, 822, 829: n = A,T,C or G
  misc_feature 831, 835, 836, 844, 848, 850, 860, 876, 878, 882, 893, 894,902, 906, 908, 916, 918, 922, 936, 942, 944, 945: n = A,T,C or G
agnnnnnacnnanngggtccgctaaatgcctgctcgagcggccgccagtgtgatggatatctgcagaattcgcccttagcgtggtcgcggccgaggtacatgcaatatacaattatttgagataattaaatatatgagataacgtagaaagggaaacagaaaagttgtcttagcctcctaaatcagcctaatgcttaactggaacctcaggtggaataggctgtttagctctaatagttaacaggatctcttgtgaccctccatcagtcctggttgttgtttcttcacaacttgctgtctcagaattgtctgttgggccctattctggtccttgccatgctatgaaaccagnctagcctacatcctaacttctcttctttctgagacaactttttctaggaagccccttcaatggggcttcntcctttcccttggggcttctcctttccttaagnctttctgcnctttaccccagctttncaaatggtnctggcttttcttcccctngnggtantcttcaanttttgcttcnaccccctcttcnctngantgncttcccngtcctaggtggtttncccgantcnttccaaaaaagnaaaaggggaanacccccgggttggaccangtgttngttgggccangggggtaagccaaaagaacctttgttgttgggcnaagggggttgttggggggggncaaggtttatggncggccccggaaaaaanccattgggggggcntgggtgngggaatanggcccaancatacntttgcnattgggccctnaaccttaaaaccccttgggncacancaanttttttgnggaaaangnttanncaaaattntttncntcaaaatttnttcttccccttcttanantttncccctttttanngaaatttntttngnaaaaaatnanaagnatcctttaagaatnaaaacncnng

SEQ ID NO: 4670 - DNA, 484 bp, Homo sapiens
  misc_feature 283, 326, 329, 376, 389, 414, 420, 428, 444, 446, 478: n = A,T,C or G
gaattgggccctctagatgcatgctcgagcggccgccagtgtgatggatatctgcagaattcgcccttcgcggccgaggtacgtctgcaccgtgtgggtgtcttcactgggggagtctggatgcatatgcacttacttcccccacccctattaaatatggagcagcttttcaggactctgtgactgccttctcctcagggtcacattgagtttgaatctgacccaaggtgcaggaatcctgcaatggggaaataaaagaatatacagaacggggtcaggtcanctgctcagaggccaaaacccctacagctgctttgattttattnttnggtgtatattttaggctccttctgccattgtacctgcccgggcggcngctcgaaagggcnaatttcagcacactggccggccggntctagngggatccngagctcgggtaccaancnttgatgtaataaatgggcatagctgttcctgngtgaaa

SEQ ID NO: 4671 - DNA, 460 bp, Homo sapiens
  misc_feature 326, 368, 422, 446: n = A,T,C or G
tgctcgagcggccgccagtgtgatggatatctgcagaattcgccctttcgagcggccgcccgggcaggtactttcatcatgaccccagaaaaccaccaattaatgccactattttaggactcatttttcactcttgctattcatttatcttgcaatctcttagtctgtaaccctcttccgctataaaacttttcataaatatttacagtggaagcttcctgtgctttggcttatcaagataaactcatctatctcatttctatttgaaataagtgtgttgaaatatcctgtttcctgtagaattctcctatcctcttctttgttgnaagtttaaaagctttttatttctttattggcattttaatggngctcagaaagaaaagatatgcacctcatgagctcaatctgtagtcttgaagcanaaagtaaaaatattccattccttnaataagtaataagg

SEQ ID NO: 4672 - DNA, 516 bp, Homo sapiens
  misc_feature 6, 7, 22, 28, 32, 55, 79, 83: n = A,T,C or G
ggttannctttgaaattcacanatttgnaatnggccctctagatgcatgctcttngcggccgccagtgtgatggatttntgcngaattcgccctttcgagcggccgcccgggcaggtacagctaactgtgctaggcagggcagccctgtgagttctactgctgtcttggttttacagagggggaagtgaggcacagagaagttaattaacctctgaagtgttgcagtctaaggcacagagacacagttccaggcaaggttcatctgaatcttaagtcctcactctttgccaccatcctccactgctgagaccatccctgtgagtcctgccgctctcctcccctggtccatattcactgctactcaatgaggccaaggaagccaatggtcgtgtccccaagaggatatctctcccctcctgagaatctttctcatacatctcaattctgagatacagattgagaagcacctcagcaaatccactgcatggaaggcaaaacaaccttgatccaccgca

SEQ ID NO: 4673 - DNA, 483 bp, Homo sapiens
  misc_feature 482, 483: n = A,T,C or G
gggccctctagatgcatgctcgagcggcccgccagtgtgatggatatctgcagaattcgcccttagcgtggtcgcggccgaggtactggtctgcctgaaggctgagggcagtagaattattgacattactataatactgacctcaatcgagctaacctttaaattctgagaaacaggttttcaaacaggtttataggccaaagagagtctggaacaccctaagggcttggttttcctggccaagtaatcagtcaaagctattactgtcactctgccttttccttgtggctagataacacagcccaagtgcagttgccaatttctaatgaatactaggtgtggcctccattttatcctgtgcaaggggatattggaaatctttgttcgaagcaatatccacgagagaggtggcttcatgcctcagaagttaaggtggattttaaagcaatttaggctgctttttaaccaaaattacagtatgnn

SEQ ID NO: 4674 - DNA, 530 bp, Homo sapiens
  misc_feature 11, 14, 18, 30, 42, 53, 64, 77, 79, 82, 84, 90, 91, 96, 97,104, 105, 114, 117, 132, 152, 170, 172, 180, 215, 227, 236,239, 285, 313, 362, 371, 377, 419, 425, 441, 456, 469, 492,521: n = A,T,C or G
gatttaatctntgncttntcaaaacccttnaattttggaaanagcccccagangcatgcttttncgggcgccatttntnttngntttttnnacaanncgccctnngcgaggagngcngtcgaagtacccagnctgcagcttcaacagttacnacattgagccaaccggananactgccanggcaggaaaaagccctggaaagcccacggcccctntttcccttgggncaaaggccntanagctggctgccaaagcagccaaccaaaggggcagctcagctcctgngaggcaccagcagtgacctgatgcagtngaagagttgatgtctttgacaacatacggacactggctggattacctanatgacacancttaantgccaattgatgaaattaggggaaatgaaaagaaaagcactnaaagtnccccttagagcatttnaacaatgacatgcanccaggttttgtcngctaataattatttggccccctncatccctcccaccagtttctttcctgaantctgtgggg

SEQ ID NO: 4675 - DNA, 575 bp, Homo sapiens
  misc_feature 1, 2, 4, 5, 7, 11, 26, 28, 31, 37, 39, 41, 42, 44, 45, 46,49, 54, 57, 59, 65, 69, 71, 76, 90, 93, 126, 146, 228, 460,472, 477, 511, 513, 575: n = A,T,C or G
nncnncncgcnatttcgattctcctncncgncgtgcnangnnannngtntgtcnagncnaggtgnacgngncgagnatcctcttaaggcnaantggccctctaatgcatgctcgagcggccgccantgtgatggatatctgcaganttcgccctttcgagcggccgcccgggcaggtactgtgtgggtcggccacagggtaggccactatccccgtcctgatggatgnttgcattgttttcaatcttttgcttttccaaataaagccagtatggatagcttgtgcatagtttgtggttttgttttgttgttgtttgtccttgtggaagtgcatctacactagtaagaatttgttgtcaaagggtgtcttggtaaccaggtattatccaatgtctctgattgggaattttaacagtttgcattctcaacagtaatgtctgagtgtgactgtttttccatancttcatcaagtngaagngtattggctcactatggacattatttaattaagntnattatttgcattttcccttttaagaaatgagcttgagaaactttttctgtgtttaagggatn

SEQ ID NO: 4676 - DNA, 464 bp, Homo sapiens
  misc_feature 458: n = A,T,C or G
cctctagatgcatgctcgagcggccgccagtgtgatggatatctgcagaattcgcccttagcgtggtcgcggccgaggtacactcctgaatgcgcagagagagagtgagagagagaagctcaaagaggatgaggtctaggagacccagagtgttcatgggatgtaacaatgagccagtgcccttcctcagcacagtagtctagcaatggggatgctctggacccatttaaaaccgggttacagtgtaaaattcctaatgcatttgcaagtctcagagcaccagcaaaccaaggagggctcctttgtatgagccatgacccagaaaggggctgttagccttggggcctgtcatggtaacatgggccaccttttctcagacaggtctgacaccatcatgaattgtccatgtaatgtaatttgaccatgtaactgacaaccctgtgagcagccactggtgntccttt

SEQ ID NO: 4677 - DNA, 465 bp, Homo sapiens
  misc_feature 328, 380, 387, 418, 422, 442: n = A,T,C or G
cctctagatgcatgctcgagcggccgccagtgtgatggatatctgcagaattcgccctttcgagcggccgcccgggcaggtacgcggggactcctcacccagcatccataaaaacatgctgcacctttggcacagcgcgacttccctggccctccccctgcggaccagtgaacctcgcccgagggctcaataaagaagatttttgccctctttttctcacctctcagccttattgatccatggtgcccttccattgcctttcattggtgccgaaacccgggaggggacacctcctaagcccccccagaggctcagggggactcccctnctggtcggatcaagtcctctccctcagtcaggtcaggcttctcctccacggncatctgnccatttcgtccggttacttgctgccaggtcncagntgctgcaagctactccagtncaattcggccgacgctagatcat

SEQ ID NO: 4678 - DNA, 461 bp, Homo sapiens
  misc_feature 243, 329, 339, 362: n = A,T,C or G
attgggccctctagatgcatgctcgagcggccgccagtgtgatggatatctgcagaattcgcccttagcgtggtcgcggccgaggtactaccatgcccagctaatttttgtattttttgtaattatttttttgtagagacagggtttcgtcatgttgcctaggctggtctcgaattcctgggctcaaacgatctgcctgcatcggcctcccaaagtgttgggattacaggtgtgaaccactgngtctggctatatcttctgtaacacccaaatgccaccaggcaaagcccaagttgaaccaggagggaaaaaggcctggcaggatgtangccttgcatnaggatctcagaaacttcactaancagtccaattcctcttttcccgaggtctaactctatgctgaactctttgcatttttatctcacttaatccatatcacatgcacaggaaggaagcattcc

SEQ ID NO: 4679 - DNA, 473 bp, Homo sapiens
  misc_feature 425, 428, 439, 444, 445, 455, 458, 468, 470, 473: n = A,T,C or G
tatagggcgaattgggccctctagatgcatgctcgagcggccgccagtgtgatggatatctgcagaattcgcccttagcgtggtcgcggccgaggtactttgctacacggccgggggccattgagactgccatggaagacttgaaaggtcacgtagctgagacttctggagagaccattcaaggcttctggctcttgacaaagatagaccactggaacaatgagaaggagagaattctgctggtcacagacaagactctcttgatctgcaaatacgacttcatcatgctgagttgtgtgcagctgcagcggattcctctgagcgctgtctatcgcatctgcctgggcaagttcaccttccctgggatgtcctggacaagagacaaggagaaaggctttaggatctactgggggagtccggaggancantctttttctgngccgnnggaacccatngancactgaagtncntan

SEQ ID NO: 4680 - DNA, 573 bp, Homo sapiens
  misc_feature 1, 3, 4, 6, 7, 8, 10, 11, 14, 15, 16, 17, 20, 22, 29, 32,37, 39, 43, 44, 45, 46, 47, 49, 51, 52, 53, 55, 56, 57,58, 60, 63, 64, 70, 71, 76, 254, 536: n = A,T,C or G
nanntnnntnnctnnnntancnatgtgtnatntttcnanactnnnnntncnnntnnnncngcnngggggnncgtancgactcctattggcgaattggccctctagatgcatgctcgagcggccgccagtgtgatggatatctgcagaattcgcccttagcgtggcgcggccgaggtacgatctcaccataggcctgttttggaagcaaggtttgaattttcttaaagaaattttgaatgttattcttagaacancttcttgtttctcacaaaaatcatttatgtaaagggaaggaacacactgatttatttaaaatttggggaaattgcgaaccaaaaaaaaatgcattccaatttacaagttacttgattctgtcatatgaagtggcagtgtccttttcctttcctgcttaaaaaagcagctctggcctgtggaaggcaagtggcaaatgtaagctttatggcaaaacccactcaattgatttaaaaatgcttccaggaaacacttgtgttggaaagaaatcagtggtaccctgncccgggccggccgttcgaaaagggccgaattccacct

SEQ ID NO: 4681 - DNA, 1135 bp, Homo sapiens
  misc_feature 4, 7, 9, 10, 11, 14, 16, 24, 27, 30, 32, 34, 37, 39, 40,41, 44, 48, 56, 58, 62, 63, 66, 67, 69, 71, 78, 80, 81,82, 83, 85, 86, 91, 96, 97, 98, 99, 107, 109, 111, 391,424, 426, 435, 470, 542, 544, 552, 559, 612, 636, 643, 652,660: n = A,T,C or G
  misc_feature 666, 674, 681, 684, 694, 704, 707, 734, 749, 753, 761, 762,767, 773, 809, 820, 821, 828, 833, 836, 842, 856, 875, 878,885, 887, 894, 903, 913, 921, 931, 942, 943, 944, 970, 975,976, 978, 992, 994, 1001, 1002, 1006, 1033, 1036, 1041: n = A,T,C or G
  misc_feature 1042, 1052, 1055, 1057, 1060, 1074, 1075, 1083, 1090, 1094,1108, 1120, 1122, 1123, 1129, 1133, 1134: n = A,T,C or G
cccnccncnnnttntntatattgnatnttntntnttntnnngtntttnctttatcntnattnnttnntntnttaatantnnnntnntagcngggtnnnntttattcnancnttcgggcgaattgggccctctagatgcatgctcgagcggccgccagttgtgatggatatctgcagaattcgcccttagcgtggtcgcggccgaggtaccaggttcaaatagtcagcagctcatcataatcaatgagcgaggacataaagtaggaaaaatgcatcaccatggtgagcaaggaaagcaagttattggaggcacatgttaacacataaaatataaaattaatatgatcacactggaaaggcttgcctgagcccacagttttgaatgccttacnataaaggatgaggatgcacaacaaaaaagcaangnagaaccctngatcaagtggggtgacctgggcccatgggtgctcntcatcaagtggggggaaccccaaaatggcttttattgtgggaccttcacccagggttaattcggaattttangnaccattgnaaattangggaagttggtttttgttttggtggaatggggccaaaagaaaacccttattanttaaattccaaaaattggaaattnaccaaantggaaaaanctttttanaaaaantaaatttngttaaangantctttttacnacccaagccnaanttggtccattggtttggcggtaacccntggcccccggggccngggnccgcttcnngaaanggggcngaaaatttcccagacaccaacttggggcgggcccgntttactttaanntgggganttccnganacttcngggtaacccaaaanacttttgggccgggtaaanccnatggggncnaattagnctgggtttnccttgggggnggaaaaantttggtttanttcccggcttnnncaaattttccccaacaacaaaccatntcccnnanccccgggaaagccntnaaaaatnngttnaaaaccccttggggggtggccttaaantgnagtgnngccttaactncananttnaaatttggtggttnnggcgcttnaactggncccnatttttcccaattnggagaaaaaccntnnttcttncccnnc

SEQ ID NO: 4682 - DNA, 1126 bp, Homo sapiens
  misc_feature 2, 7, 10, 14, 15, 16, 18, 19, 20, 22, 25, 26, 33, 34, 35,38, 39, 41, 42, 43, 44, 55, 56, 58, 61, 63, 65, 69, 70,72, 73, 76, 78, 81, 82, 83, 86, 87, 89, 91, 93, 94, 95,96, 98, 99, 101, 102, 103, 107, 108, 113, 115, 117, 121,123: n = A,T,C or G
  misc_feature 124, 143, 466, 486, 492, 496, 497, 501, 503, 504, 530, 625,638, 704, 721, 726, 753, 757, 779, 785, 801, 805, 820, 838,863, 870, 896, 913, 923, 955, 959, 961, 976, 979, 999, 1004,1008, 1010, 1033, 1039, 1040, 1050, 1051, 1059, 1066: n = A,T,C or G
  misc_feature 1069, 1073, 1074, 1081, 1084, 1091, 1092, 1094, 1099, 1104,1111, 1113, 1116, 1119, 1120, 1122, 1124: n = A,T,C or G
cnccaanatnatgnnntnnntntgnnagtcttnnntanntnnnnatgaacttttnntntantntngctnncnngtngngtnnngtnnangntnnnnanntnnntagnngaggntngntggntnnattacttacttcgggcgantagggccctctagatgcatgctcgagcggccgccagtgtgatggatatctgcagaattcgccctttcgagcggccgcccgggcaggtactgtttgatgaggtgtaaaataacacgctttaactggagaatgaacacatttccagatacaatattatcgttctcttctttttcaagtaataatttccaaaagatgaattttaatggactttttgccatttaaccaaagtgaatccttgagtctctgaagttgcccccacttagcacctgcgtattataaccactttaaacaattatttacacctttttggattaaaattcaacnctttatggtctgtttgcagnaatatnaaannttananncaataaaagggtaccttcgggccggngaaccaccgcttaagggggcggaatttcccaggcacaactgggcgggccggttaacttaggtgggatcccggagcttcgggtacccaaagctttngggcgtaaatcantggggccataaggctggttttccctggtggtggaaaattggtttattcccgcctcaaccaatttcnccaccaaccaaccaatnaccgnaagccccgggaaagccatttaaaaagntggnttaaaaaggcccttgggggggnggcccntaaattggaggtggangccnttaaaccttcaacantttaaatttggccgtttngcggccttcaacctgggccccggcntttttcnaagtccgggggaaaaaaccctgggtntggggcccaagccttgncattttaaantggaaattcggggcccaaaccccccccggggnaagnanggccggtttttgcgnttnttttggggccgcctcttttnccgcntttncntggggcttcaacttggacttcgngcttgnngccttcgggnncgttttcngggcttngcnggcnngaggccnggnttttcanncnttcancttcnaaagggncnggntanntncncg

SEQ ID NO: 4683 - DNA, 1218 bp, Homo sapiens
  misc_feature 4, 8, 11, 17, 19, 23, 24, 26, 39, 46, 49, 57, 59, 64, 65,69, 72, 73, 75, 77, 79, 81, 83, 84, 90, 105, 110, 111, 112,117, 119, 121, 122, 129, 133, 137, 145, 148, 209, 222, 225,230, 231, 233, 333, 361, 362, 365, 368, 372, 376, 385: n = A,T,C or G
  misc_feature 398, 402, 406, 407, 411, 439, 467, 473, 474, 481, 482, 485,489, 510, 525, 559, 562, 572, 573, 574, 577, 578, 584, 586,588, 594, 605, 607, 616, 617, 625, 627, 631, 632, 645, 664,682, 684, 698, 712, 717, 720, 727, 729, 730, 753, 755: n = A,T,C or G
  misc_feature 758, 769, 770, 784, 796, 797, 807, 814, 826, 835, 837, 842,845, 847, 852, 857, 858, 862, 863, 867, 868, 872, 883, 884,888, 890, 894, 901, 902, 903, 910, 916, 925, 927, 929, 931,935, 937, 945, 946, 947, 948, 953, 961, 962, 966, 967: n = A,T,C or G
  misc_feature 968, 971, 972, 974, 980, 982, 984, 988, 989, 990, 997, 999,1000, 1004, 1007, 1010, 1022, 1024, 1030, 1032, 1033, 1040,1059, 1067, 1068, 1069, 1078, 1080, 1088, 1093, 1094, 1095,1097, 1104, 1109, 1114, 1126, 1132, 1133, 1139, 1140: n = A,T,C or G
  misc_feature 1148, 1152, 1154, 1155, 1161, 1168, 1175, 1176, 1178, 1185,1186, 1189, 1195, 1202, 1211, 1212, 1214: n = A,T,C or G
tccnaccnccnttatcntntttnntnaagttttgatgtnttattantanataatgtntntcttnntgcnacnncnangntncnncagtcnaccccagcggggggngtctnnntcttntntnnttctatnggcnaatngggccctntanatgcatgctcgagcggccgccagttgtgatggatatctgcagaattcgcccttagcgtggncgcggccgaggtncancatanntnattacgatattttgtgataagtgctgtgttcaggatgttaaagacatgacatgtctgtgtctaatccaatctcaagatccgaggatgggatcaccacggnagagtttcttcaaaaaaggtaagttgcnnttnacncagngtcntttaaatanattaccgggaaanaaanggcnntggntatttgaagaagggatgttggtcctccncacaagaaccaggacttaccaaatgaangtggtnngttatcnnctnggtnttttaaaaagtccaccttccnttcaacttttttgtnaaaggaattgaagacattgggggaagggaagttncanaaaaggtttnnnaanngaattntnanaaaatngaaaaataaangnagggggatnnccccccantnatannaccttgccaaagnaaaaatggtttaaaaaaangaatggaattggaagttntnaaaaattggaaagntttaccttttttgnaaggnccnaaggccnannggaaaaaaagggttgggccaaangnaangggggggctcnngaaaaaaatatttnaaaagggatttnnttaccccctnggaatgnaaccccttgggnttttttttntnttttngtntnagggnttctnnggtnnttcnntagnattttttttgnncttntntgangaaaccnnngaattcntttcgntttctttgntnancncttnanggtcttgnnnnaattngccatacnnggcnnnccnnantccttnantntgtnnnctgggtnanncctntanaantttttccttgtnangtagantnngggaacnttacctggggccattaccnccctcccnnnctccctggngnaaaatccncttannnanccttttnggggnagggngcctatttcgtntttgtnnacctcnntagggtgntttntnnaaaccnactcctngtggggnnancaatttnnttnggaaanaccctgnatttttttnnanaaac

SEQ ID NO: 4684 - DNA, 1179 bp, Homo sapiens
  misc_feature 5, 7, 10, 13, 14, 15, 19, 20, 22, 23, 24, 29, 30, 31, 33,34, 37, 38, 41, 46, 47, 48, 50, 52, 57, 58, 59, 60, 62,64, 65, 67, 68, 70, 71, 72, 79, 81, 85, 87, 88, 90, 95,105, 108, 110, 111, 112, 113, 114, 122, 129, 158, 241, 427,440: n = A,T,C or G
  misc_feature 448, 479, 489, 516, 608, 614, 620, 636, 643, 656, 672, 674,707, 713, 724, 728, 758, 772, 794, 802, 807, 811, 816, 820,823, 833, 835, 838, 855, 870, 881, 889, 891, 898, 901, 915,931, 942, 946, 948, 971, 973, 974, 980, 986, 999, 1000: n = A,T,C or G
  misc_feature 1004, 1008, 1010, 1014, 1016, 1027, 1039, 1074, 1078, 1080,1081, 1088, 1093, 1102, 1105, 1108, 1124, 1146, 1149, 1152,1157, 1159, 1160, 1162, 1167, 1171, 1174, 1177, 1178: n = A,T,C or G
cctcnanatncannnagtnntnnngtcannntnngtnncgnaaacnnntnanacttnnnncnanngnngnnnatataananattncnnanttagngggaagagtnacnannnnnctcgattnactatanggcgaattgggccctctagatgcatgctngagcggccgccagtgtgatggatatctgcagaattcgcccttagcgtggtcgcggccgaggtactgtctccagaatgcacttntctgcccatgtcaactggaatctttgttcttgaagactatactttctaggactcaataccctataactgcttcctaccctcaaacacaaatacacacagaaaacactaagcttccctatccaagtgtatttctggggagttagagcccaccaaatagaaactggaaagtatactcaggcccggggncgtggtggctcangccctgtnaatccccgggcactttttggggaaggcccgnagggcaaggntgggattcaacaaagggttaagggagnatccggaagaacccattccctggggcttaaacaatggggtggaaaaccccccccggaacttcttaactttaaaaaaattaccaaaaaaaaanatttangccccnttggggccgttgggtngggttgngaaccgcccttgntgaagttccccccaancnttaccttcaagggaagggctttgtaaggggcangggaangaaaatggggnggtngaaaacccccggggggaaggggccgggaancctttggcaagatnggaggccccgaaagaaatccancaacccancttgncaanctttngganatnggccaccttncnaangccccttggggggcggnacaagaagaccgaangaaccttcttngtctttananaaaaaanaanaaggaaaaaaaaanggaaaaccttgggaantggaattactncaanantggggggaaagaagaaaagggantnntaaacnccaccnccccctggccttnnaaancttngnaagncnggcccttgaanttttttttgganttggaaaaacctgggggcctttccatttttttttnaaancnntgccaanggggnggacctggnttntanaaaaaaaaggggatgnccacgggggggcttttggtttntcnttnacccntnnanggggnaggnggnttnng

SEQ ID NO: 4685 - DNA, 1140 bp, Homo sapiens
  misc_feature 2, 3, 4, 5, 6, 8, 11, 12, 14, 18, 19, 20, 21, 22, 24, 25,29, 31, 32, 35, 36, 37, 39, 40, 42, 43, 46, 47, 48, 49,50, 51, 52, 53, 56, 58, 59, 61, 62, 67, 69, 71, 73, 77,78, 79, 80, 84, 85, 87, 88, 89, 90, 92, 93, 96, 97, 100,102: n = A,T,C or G
  misc_feature 105, 109, 111, 112, 114, 115, 118, 243, 252, 385, 433, 484,488, 509, 528, 541, 556, 609, 618, 671, 688, 693, 707, 711,733, 735, 750, 756, 760, 762, 793, 799, 835, 839, 842, 846,860, 864, 865, 878, 897, 898, 911, 912, 930, 934, 945: n = A,T,C or G
  misc_feature 947, 949, 958, 960, 966, 980, 998, 1009, 1014, 1018, 1020,1022, 1024, 1030, 1033, 1045, 1046, 1065, 1071, 1088, 1102,1106, 1107, 1108, 1110, 1113, 1114, 1116, 1118, 1126, 1128,1140: n = A,T,C or G
cnnnnncnacnntntttnnnnntnntttntnnatnnnanntnnttnnnnnnnnacntnntnnacatnanangnttannnnttanncnnnntnnatnnggngnttnttgntnntnnacntctcactatagggcgaattgggccctctagatgcatgctcgagcggccgccagtgtgatggatatctgcagaattcgccctttcgagcggccgcccgggcaggtactttttttttttttttttanagacaaggngtcgctttgtcatccaggctggagtgcggtggcgcaatcagagctcactgtagcctcaaactcctggactcagggaattcccgccccctcagcctcctgagtagctgggactacgggcataggccacccgtanacagctaaattttcagcaaacaccttaacacaagaggagcccaggtgntgggccacccaaggtgctcccacctgccccttaaaacaggttagggaaagngggnattttttgggggctaaaaagntgggcaacctcaaaggatnccaggggtaagcnttttgttctaaaaangttaggccccagataaaccaaaatcggaaacccccttggaaaacgggaaaaangattaattntcaaaaaccaccaaggaaaccaaaaaccccattggggcccggtgggcccaaanaaggggccgcccttagnaaaanttttaaaaaacctngggnaaagcccggtggaaaaaatttncnttttggaaatttttntttaangaangnaacttggaccaagaaaaaggtcaattttatngccgcnaaaaaaaaaaaaaattggtttttttccccccaaagntcanctnccancggtttttaaccantttnnttatggaaaaaantaacttttttggttttggnnttgaaaaaaaaannaaccaacggttttttaanggangaaattttttncnantcccccagnanaaaaanaaaattattttttnaaaattgggatttggggnccttcccttgncgggnatgncntntntttgtngangggaaaaaaccnnaggggatttttggaaaggntcacanggaattttttggtggcnaaaacttttaaaangacnnntnttnntngnccaaaaangnattttttgttcn

SEQ ID NO: 4686 - DNA, 1113 bp, Homo sapiens
  misc_feature 1, 2, 3, 4, 5, 6, 7, 8, 9, 10, 12, 13, 14, 16, 18, 19, 20,23, 25, 30, 32, 36, 39, 44, 46, 48, 50, 52, 57, 62, 63,65, 66, 68, 70, 71, 72, 74, 77, 78, 82, 84, 85, 88, 100,105, 107, 124, 515, 543, 579, 624, 635, 642, 767, 789, 800: n = A,T,C or G
  misc_feature 822, 824, 843, 856, 858, 871, 914, 925, 938, 962, 964, 991,1027, 1029, 1038, 1040, 1047, 1054, 1058, 1059, 1064, 1066,1067, 1087, 1107, 1111: n = A,T,C or G
nnnnnnnnnntnnntnannnttngncattncngtcncgntagtngntncnanctttntaggnncnntntnnnanaanntttntnntcnagaaggggtggngcganangcacactatagggcganttgggccctctagatgcatgctcgagcggccgccagtgtgatggatatctgcagaattcgcccttagcgtggtcgcggccgaggtactggataatgcaaaattcactttgaaactttttattagaatatttgcttgcctaattaaagatggaatagagcaatattataataaatgtgcatagcctgaatacaaaggagctaagagataacggaatacatacatacttggccaaagaagacaggaccaccaattataaatatagccctagattatatacaaaagcaaatggtcattgccattaacatattaattgaaaggtgatgaaactgaaagtttttattcaattaaagaaaaacactgccaaggctattattctgggcccccaatttntaaaaaggtaagaaaaaaaaaaatggtnattaatttttatggggttaatggttaattttatgtntttaattttttatggtttaatttttggattaattttccccaagtncccattagggncaccatncccttttaaaaaatttttccattaatggaaacccaccttttggggggaaaaaccattttttttaaaaaggttttttccatttttggaaaactttaaccttccccttccgttcccttcaaaaaatnggcccaagcccaaaaacctggnttcccttgggnttattattaaggaaaaaaccangnttcctttaattcttaaagnaaaatttcccccngnttttaccaattgntggaaaaaagccccttttggcctttaaaaaatttccctttccnttcccttcttncttggttcttggnccttggttgggaaaaatccctttntncattttcctttttaaaggggggtccangaacaatttggggccctttatttttatttggggcangnaccccccantnctttctngaggtcntttnntttgnanncccccttttccttgggattnaaccaaccttctttaaaggncagnag

SEQ ID NO: 4687 - DNA, 823 bp, Homo sapiens
  misc_feature 333, 462, 472, 486, 502, 524, 534, 585, 601, 624, 631, 632,637, 648, 657, 664, 673, 679, 692, 697, 700, 724, 732, 738,741, 746, 748, 758, 759, 761, 764, 785, 793, 798, 816, 821: n = A,T,C or G
tgctcgagcggccgccagtgtgatggatatctgcagaattcgccctttcgagcggccgcccgggcaggtacacaccagctgcctccaatctccctttgataatcctagccacatgccaccgcgggtgctctagtgtaggctggcaccaaccccacccagcaagagccaggatctgcttcttgagggcaggcaggtttatcacacagcggggtgcagaagagtagtattcatcttcctagtgtaaccacttataactacttttcagtgaatcaaatagatttttaagcaagaacattgtaaaaatctgcttaatcaagggtggagcaaaatganttagccagggccaccctagctcagatggggtggtagctgcctctgctccacaatgaggtatttacactttgctccccaccctctcctttgccccatttatcttttagttaaaagggccaagtgcaccanaaacacaggntgcctttggagtangcacccagccaccttnttaagggtcaatagggggaaanagctgttttncttttggggtaaaactggaaggcctcaaataaagggcattaaattgccttnttctgggggtggaaanaaaagatattgcccctttttaanaaatctnntcccnggggtggaatnttaaaaatnaaagttngtaagtctnaaaatngggctttgggcangccanttngcccagtggtgaccaggtaagttntttggatnaaaacnttnaattnanacgttcattnntngangggacaaaccttccaaggaanaaggggantgttnttcccttcgggccccggnaaccncg

SEQ ID NO: 4688 - DNA, 1256 bp, Homo sapiens
  misc_feature 3, 5, 7, 13, 16, 17, 21, 23, 24, 28, 30, 31, 32, 39, 40,41, 44, 47, 50, 51, 52, 54, 55, 57, 58, 59, 60, 61, 63,65, 66, 67, 69, 70, 74, 77, 78, 81, 83, 85, 90, 96, 98,108, 113, 114, 123, 335, 369, 414, 425, 428, 435, 501, 526,554: n = A,T,C or G
  misc_feature 587, 598, 670, 701, 714, 732, 763, 776, 782, 792, 794, 821,865, 892, 960, 963, 997, 1008, 1031, 1035, 1040, 1054, 1055,1056, 1061, 1077, 1105, 1141, 1145, 1148, 1151, 1157, 1180,1193, 1196, 1197, 1204, 1212, 1217, 1219, 1227, 1230: n = A,T,C or G
  misc_feature 1236, 1249, 1251: n = A,T,C or G
ccncncncccctnttnntttntnnttantnnnctctcannnttnagnttnnntnnannnnnantnnnanntctnatnnacncntnagagngcttantntttttatctnacttnnggcgaatgngccctctagtatgcatgctcgagcggccgccagtagtgatggatatctgcagaattcgccctttcgagcggccggcccgggcaggtaccaagactgggaaaaactgaggacactggggtagtgtggccatgcactgtcaatggaggagaggaaacagaaagaaacactggaaaacatattttttcgttcattgtcttgttctcacatgctgntggagaaaatcaaaggacttattttctaaattangaagagggttataagggttaattcttcttaggccgaacctggaangggggccaaanctngaagttnaattccattcttggggatttgaaaaaccttaccttttaccttggggggaaaaaggggttggaattnaaaaaaagcccctggggcccccccntccattttccggttcccaaaggttccanttcaattttccgggaaaatttttggaaaatttngggaaggggtnccctttttttttttccttcccttcttccaataaaagtttggaaaaaacctttctttttcaaaaaggaaccgntttttttttttcaattttaattccaaattcnttcctttggggtnaaaaaaaaaccttttttncccaaggggttttggtttccaattggggggnaatccaacccctntttggnttccttttcntntttttggggggggttccaattcttttngggttaaattaaaaaggaagcccctttaaaagggaaaagggaantttgaaccgaaatccaggccttccccnttgaaaaataaaaaaagaaacctttttttctttaatttttccaatttttttcttcggcccggggttcnaanccttgtgttttggccttcttttttggccaaaaanctttttttgtngggccaagggccaaaaaaaaaantgcnccctngaaccccccttccnnnaaaancccctttttcttttcnaaattaatcctttgaaaaaaacccgggnttccttttaattttgcttttcaaggggaggttaggncccnccnaangttttnggccttcctttttcacccccaanaaaaacaattggnctnnttttccnaaaaaatnaaaananttttcttnggntttatntttaaaagccccntnaattc

SEQ ID NO: 4689 - DNA, 1093 bp, Homo sapiens
  misc_feature 2, 4, 8, 9, 10, 12, 14, 18, 19, 20, 26, 28, 29, 30, 31, 32,33, 35, 36, 38, 40, 41, 42, 43, 44, 49, 52, 54, 56, 60,61, 62, 64, 65, 71, 73, 77, 81, 82, 83, 84, 87, 89, 91,92, 98, 99, 100, 101, 102, 107, 109, 582, 615, 641, 678,679: n = A,T,C or G
  misc_feature 693, 700, 720, 738, 743, 748, 774, 803, 811, 829, 839, 841,863, 867, 868, 876, 891, 892, 906, 917, 950, 951, 977, 980,983, 994, 996, 1000, 1004, 1007, 1011, 1029, 1033, 1047,1049, 1071, 1080, 1086: n = A,T,C or G
ancntttnnntntncatnnntttttntnnnnnntnntngnnnnnggaantcnantntttnnntnnttatgnanattngacnnnnttntntnntaaggnnnnngagtncnactcactatagggcgaattgggccctctagatgcatgctcgagcggccgccagtgtgatggatatctgcagaattcgccctttcgagcggccgcccgggcaggtaccaaatttattgcctgccaggattggaattcatgcagagaggaaggatccatgaaaaaaataatcaaagtcaggaaagtctttttctgtaatcttgtctcatacagtgagttatttttgtctgggtagtttacggggatgtgactccttcagtcatctaaccgtagatgtaagtaaaagtcattttgccagggaaatgaaactccactttgtttactttttttcacttaaaaggctaaatctgattaagccttttaaaaccatttggttcatcctttaatttcagtatttgtatgaatgccctatgggaaagacatatggggatttaaaaataagaaactttggggctagccaatcttaccaataagnagaaaaagtgaagatgcctaaaatccaagaagnaggcagggaaaagtcttattttcaangtaaaaaagcctatttttgaatcctgaaaatacctgnnaaggccagtcttancagaagntatttttaatttgggggaangaatatttgattgcaatngcctnagttnaaaaaagaaagtggtatttttgcctngaatattgggtttgaaaggttatttttantccatttnaaaatttttccttattantaaagttttnangaaagaatggttggggaacctnattnntgaaaaanttttttggaatcccnngtgtaaatttaatnaaatttttttnttttcccttaaaaaaaaaaaaccccttttttgnngggaaaaaaaaaaatttttccgggantanttnttttttttttnanaaancagnggngccnccgttttttttttttttntatngccccgaaaaaccntngaggccccttaaaaaatattcnaaccttttnaaaaantaaaaag

SEQ ID NO: 4690 - DNA, 1183 bp, Homo sapiens
  misc_feature 1, 2, 3, 5, 6, 9, 12, 14, 19, 22, 23, 25, 27, 29, 33, 35,39, 45, 46, 49, 50, 51, 53, 58, 60, 62, 65, 68, 70, 71,72, 73, 74, 75, 76, 87, 88, 90, 91, 92, 95, 97, 103, 106,110, 115, 117, 121, 134, 147, 176, 216, 219, 238, 494, 520: n = A,T,C or G
  misc_feature 566, 576, 591, 601, 602, 604, 631, 661, 662, 664, 698, 700,726, 732, 735, 741, 742, 749, 752, 754, 759, 766, 793, 794,795, 805, 811, 813, 820, 821, 822, 825, 846, 868, 875, 876,877, 878, 887, 888, 893, 897, 901, 904, 908, 911, 913: n = A,T,C or G
  misc_feature 921, 922, 927, 930, 943, 948, 952, 958, 972, 975, 979, 981,983, 992, 993, 1002, 1010, 1014, 1016, 1020, 1026, 1032,1037, 1042, 1048, 1051, 1052, 1061, 1063, 1066, 1076, 1085,1087, 1093, 1100, 1104, 1105, 1124, 1128, 1132, 1138: n = A,T,C or G
  misc_feature 1139, 1145, 1146, 1148, 1165, 1168, 1169, 1170, 1176, 1179,1182: n = A,T,C or G
nnntnntcnttncncctcntcnntntntntttntntcanttccannttnnncncgatntncnatngcntnnnnnnntatttttattnntnnnatntntagttnagngagngtaancncccncaggcgatttgtnccctctagatgcntgctcgagcggccgccagtgtgatggatntctgcagaattcgccctttcgagcggccgcccgggcaggnacncaaatgaaaagtttggagngcatgtcacaagtttggaaataatctaatgttgtattgacttttcagggttctattagtgaaaacacaatcaaactaaattttgatatattaaagacagatgtataaagccctataatttttgaaatcagtatccacctgacatttatctctcattccatcagcttggaaccattttgggataatttgatttctaaatttttggtatttactcaaatataaatggaattatttggactgcccattaaatgaatggncctcaaattgaacaattttccgccangcccccttagaagttaactttaccaaaattaaaagaaaaggtttgnttttaagggncccttttggccaaantttcttattnngncccctgggtgggtttccctttatttgngaaaaatttccttggtcttggccctttttnntnccccaccccttttccttttttgcctttttttccntnggttttccaaatttaaaataaacctntgggcnttnggaaannaaccccnccnangaacncccccanccttggttttaaaaaaattttttttgnnngggtaaaggnccccgnanccccggnnnggnccccccccccccttgtttttncccccacccccttttttggggnagggccnnnngggtggggnncgggnttcncccnaangggnccngngggaaaanncaaanaantttttccctgggnctttngacncggggngaaaaccccccccnttntttncncntttaaaaanntctcccccntctttccnatananttgngcacangatacnaaatnatatntttttnccnntgggggggngnccnccccccctcngggggggantnattttntccccancccnngggggggcgggggtttttntttnggtngtcccnncccccnngnccccaacttggggggantannnatgggngcntanc

SEQ ID NO: 4691 - DNA, 1147 bp, Homo sapiens
  misc_feature 3, 4, 5, 6, 7, 9, 10, 11, 12, 14, 17, 20, 21, 22, 24, 25,30, 32, 33, 35, 37, 39, 41, 42, 44, 45, 46, 47, 48, 53,54, 56, 57, 62, 63, 64, 71, 72, 78, 83, 84, 85, 86, 87,88, 89, 92, 93, 94, 95, 96, 100, 101, 105, 112, 114, 115,281: n = A,T,C or G
  misc_feature 476, 493, 507, 511, 512, 513, 516, 519, 522, 525, 528, 540,543, 547, 549, 552, 567, 568, 571, 572, 576, 595, 605, 606,607, 608, 618, 620, 622, 626, 627, 637, 639, 642, 643, 646,652, 657, 658, 666, 667, 668, 676, 677, 678, 686, 698: n = A,T,C or G
  misc_feature 708, 710, 713, 714, 721, 730, 744, 746, 748, 751, 754, 758,774, 777, 779, 784, 791, 793, 797, 800, 811, 813, 836, 837,840, 842, 880, 881, 888, 891, 893, 900, 902, 913, 922, 925,927, 929, 936, 941, 948, 954, 975, 976, 981, 982, 984: n = A,T,C or G
  misc_feature 989, 1002, 1009, 1015, 1016, 1020, 1021, 1023, 1026, 1027,1039, 1048, 1061, 1073, 1075, 1076, 1077, 1079, 1082, 1095,1110, 1114, 1115, 1121, 1128, 1129, 1135, 1142, 1143, 1146,1147: n = A,T,C or G
ctnnnnntnnnntnttnttnnntnnatttntnngntnantnnannnnnttagnngnnattannnattactnnaatttnttatnnnnnnnttnnnnnaagnnaagnggttaancnnactactatagggcgaattgggccctctagatgcatgctcgagcggccgccagtgtgatggatatctgcagaattcgcccttagcgtggtcgcggccgaggtactttgctacacggtcgggggccattgagactgccatggaagacttgaaaggtcacgtagctganacttctggagagaccattcaaggcttctggctcttgacaaagatagaccactggaacaatgagaaggagagaattctactggtcacagacaagactctcttgatctgcaaataccgacttcatcatgcttgagtttgtgtgcagctgcagccggattcctctgagcgctgtctatcgcattctgcctgggcaaancctcaccttccctgggngattgtccctgggncaannnaanaanaanggnatnaagggcccttanggnatcntncgnggggggggatccccnngannaaanaaaaatttttttttttttngttccccggnnnnggaacccccnangngggnncctccagatnanaannttntttttngtgtnntttttttnnncagggggnnncccttttnttttaataaacncacccccccngngannagaaaanaaccccccnctataaaaatatananancantgngcgnggggggggggtttatnttntnttatnataatgntntggnacnccttttttttnanaaaaggggccccccacaaaaaannttnanacttccgttttttttataaaaaaaaaaaaaaaaaaaannggggggnggngngtataantnacacccccccnttttttttnttnantncaccccnccccnggggggngggttnttttttttttttttgttaaanncaacnncnacaantttggggtttttntttcccncccccnnggannanaanntttttttttatntaaaaaaantttttttttgacnaccccccccggngnnngnggngtttttttttaanggaaaaaatttttcntctnnggtgtnggggtgnnttttantttaaanncann

SEQ ID NO: 4692 - DNA, 1157 bp, Homo sapiens
  misc_feature 1, 3, 4, 8, 9, 10, 11, 14, 21, 22, 24, 25, 26, 27, 28, 29,33, 35, 36, 38, 39, 42, 44, 45, 47, 49, 51, 54, 55, 57,60, 63, 64, 65, 67, 71, 72, 73, 74, 76, 77, 78, 79, 80,81, 82, 83, 84, 85, 86, 87, 88, 89, 96, 98, 99, 101, 102,104: n = A,T,C or G
  misc_feature 105, 107, 108, 116, 130, 500, 501, 525, 572, 584, 590, 639,657, 680, 751, 753, 754, 761, 762, 775, 776, 788, 793, 801,814, 840, 876, 891, 901, 925, 946, 966, 970, 976, 988, 994,997, 1000, 1004, 1009, 1010, 1015, 1024, 1032, 1033: n = A,T,C or G
  misc_feature 1043, 1056, 1057, 1061, 1067, 1075, 1084, 1086, 1087, 1089,1099, 1107, 1127, 1128, 1131, 1152, 1156: n = A,T,C or G
ntnnctgnnnnttnatttganngnnnnnntttntnntnntananntntngnttnnantantcnnngntttnnnntnnnnnnnnnnnnnnagaaggngnngnngnngnnttagggcnaattgtccctctanatgcatgctcgagcggccgccagtgtgatggatatctgcagaattcgcccttagcgtggtcgcggccgaggtaccttgggtggccaaatttaattcaaaacttgggacaatttttcagttacccaagtttacactaatcttagcataaaacttttagctttcacctaggtaaagattaaataaattctgatttaatgtattttctttttgctatttctgtaaaacagcccaaacagtctaaaaagtgatgatacactaataaaagacagattaacccacaggaaaggagctatggtataagtttggactcgccttaatcctagggcttaccattattattatctaaagaattaatttaggatgtaactgnnttcttcttttcttcattaaaaagncaaaatcttttacttctcttccttttattaagccattttaaatttantggttttttcancaagtngccttgggtggtacccctggcccccgggccgggcccgcttcggaaaaangggcccgaaatttcccanccaaccaccttggggccggggcncggtttacttaaggtgggggattccccggaagccttccggggtacccaaaaggcctttggggcggttaaantnnattgggnncaattaagccttnnttttccctgggngtggnaaaatttngtttattccccgncttccacaaattttcccaccaccaancaattaccgaaagcccggggaagcccattaaaaggngggtaaaaggccctnggggggtggnccttaattggaaggtggaagcctnacctcaccattttaatttggnggtgggcgccttcacttggncccncttttnccagtccggggnaaaacnctngtncgtngcccnncctgncattttaantggaaatnnggccccaccnccccccggggggnngagnggcggnttttccgntttttgggncnncnttttttcccncttccctnggcttaacttggacctcgcnntgngccttcggggccgttccgggnttgng

SEQ ID NO: 4693 - DNA, 1176 bp, Homo sapiens
  misc_feature 2, 4, 8, 11, 14, 21, 22, 24, 26, 28, 30, 32, 36, 38, 40,41, 42, 44, 46, 47, 52, 54, 56, 60, 61, 65, 66, 68, 70,75, 78, 80, 82, 83, 85, 86, 87, 88, 92, 95, 96, 101, 105,108, 109, 111, 112, 114, 118, 123, 126, 202, 205, 217, 503: n = A,T,C or G
  misc_feature 537, 550, 565, 576, 583, 584, 586, 593, 615, 621, 622, 624,629, 648, 653, 661, 682, 691, 692, 695, 699, 702, 705, 724,725, 726, 751, 752, 762, 763, 790, 791, 796, 803, 804, 806,813, 815, 817, 822, 823, 831, 834, 837, 840, 843, 858: n = A,T,C or G
  misc_feature 873, 889, 892, 902, 911, 924, 929, 933, 979, 983, 992, 993,994, 995, 996, 997, 998, 1018, 1026, 1031, 1039, 1042, 1048,1049, 1051, 1058, 1071, 1074, 1081, 1086, 1087, 1094, 1110,1111, 1112, 1122, 1123, 1133, 1140, 1142, 1152, 1161: n = A,T,C or G
  misc_feature 1165, 1172, 1173, 1175: n = A,T,C or G
cncncgtntcnttngttcttnntncntnantntttnantnnnananncacantngnagcnngttnntncntagtntantntnncnnnntttnttnntagtnaggnggnntnngnactntcctntanggcgaattgggccctctagatgcatgctcgagcggccgccagtgtgatggatatctgcagaattcgcccttagcgnggncgcggccgaggnaccatgcaatattagcactaaataatttggccaccaaattaaaggaggtattcaaaagaattttatagattcatagtgaattagaagcttggttttgaggcttggctattactcgatactgggactttcattatagcattccctgtagatttgagcaagaaattacatcttccctctctcttgtaacgttcatttacgccattcttttaggtcgttcaccccagtgtttatttgaaaggagcctaccgcctgcaaggtttcccttactgtgggccgggcttggggnggccatgccattcctttcctggggcgttcttaangttggcctttaanaagtttccagtttantggaagggatncaaggtnngntgggggnttaaaaaaaaagttgggagggnaaaaanntngtgtntggttacccccctcctttnaaatngggggggnggggtggccaattttccccancctggggannggngtgncanccnggggttaaggcttttttcnnncttttttccaaattaagggggggtnnattggggttnnaaatgggataccctttttgccccttcnngccanttataannangaaaacnangntaganntttccccnttnttnttnaanaatcccttcaaacgncccaatgggcttttnggtcaaaatattaaanatngccccccccntcaatgggnggggccttttggncttgngtgnatacccttggccccgggggccggggcccgcttttataaaaggggcngaantttcccaannnnnnncttgggcggggcccggtttncttaagtngggantccccgangcntcgggnnancccaaancctttgggggggnaanttcaatntgggnncaataanactgggttccccctgnnnggaaaaatgnntgttttcccncgccacnanaattcccccncataaaatnaccnacccggnnang

SEQ ID NO: 4694 - DNA, 1095 bp, Homo sapiens
  misc_feature 2, 3, 4, 6, 7, 9, 10, 11, 13, 14, 16, 19, 22, 24, 25, 26,27, 28, 29, 30, 32, 34, 35, 37, 38, 39, 40, 41, 42, 43,44, 45, 46, 47, 49, 50, 51, 53, 54, 57, 58, 60, 61, 62,63, 64, 65, 68, 69, 70, 75, 80, 81, 82, 84, 85, 88, 89,90, 96: n = A,T,C or G
  misc_feature 98, 101, 104, 105, 108, 512, 513, 613, 680, 704, 747, 770,775, 783, 795, 809, 815, 829, 851, 852, 868, 887, 889, 920,938, 948, 974, 977, 983, 984, 986, 991, 1009, 1022, 1029,1032, 1036, 1037, 1043, 1053, 1060, 1070, 1074, 1079: n = A,T,C or G
  misc_feature 1080, 1082, 1089, 1092: n = A,T,C or G
annngnngnnntnntnttnttntnnnnnnntntnngnnnnnnnnnnngnnntnnganntnnnnnnatnnntgttntcttnnntnntannngaagantngangannatnactatagggcgaattgggccctctagatgcatgctcgagcggccgccagtgtgatggatatctgcagaattcgccctttcgagcggccgcccgggcaggtactggggcactcattctgcatgctccgagagatgcacttccagtttccgaagaagggtcctagaatgcttttttgcacccggctttttaccctatcatcattcattttcctaggcagttttgttgtttcctttcttctgcaaagccgggtagatgtctctcacagacaagctagaaatgctgaagagcttctgatactctggttttcctgtgcctctgtcttactgtggctaaaaataaaatacttctaactttccttttttgggaaaccattagccaatttatttttcatttgcttttggaannacccttcatacttccctgggtcccccaccccctggcaacatgggaattccctggtgggcttgcttttcttttcccaaaatggcttacaagtggcttcaantggtttggacctttttttcaaaaggaatgaacctcaacattgggtaaaccttaaatggaagggaatncaaagttcaaaattatttttcaangggtgaacctcggtggtttctttggggtggaatggcctgccangtttccccaacaaaggaagttgntggtngccccgtnccctcttggtangttggaaaaaaaanggtttnctaagaaccatggntggtttttcctcttcccagaannaaacctcttgggaaanggccttggcattcccaagnangggggaaaatttaaccccctgggggaaaatnggggaatttttttggggnggaagggccncttttaaggcttaaattcccccttancangttttnngnggagntgggtcccccccggggtnttggttttggganttcatantantttnnttttanttccatttanttttccntaaaaaaccnattnaaggnngnaaccccnccncct

SEQ ID NO: 4695 - DNA, 1220 bp, Homo sapiens
  misc_feature 2, 4, 6, 9, 10, 11, 12, 13, 21, 32, 33, 35, 40, 41, 42, 43,47, 49, 50, 57, 59, 65, 67, 69, 70, 77, 79, 81, 82, 83,86, 87, 88, 89, 92, 94, 95, 96, 98, 100, 102, 103, 108,110, 118, 119, 127, 138, 139, 142, 146, 220, 235, 388, 428: n = A,T,C or G
  misc_feature 451, 458, 482, 493, 498, 502, 503, 513, 524, 531, 562, 563,569, 570, 573, 575, 579, 583, 586, 587, 591, 594, 597, 600,601, 602, 604, 618, 624, 631, 642, 647, 652, 654, 655, 657,658, 659, 670, 681, 682, 691, 692, 696, 699, 704, 712: n = A,T,C or G
  misc_feature 718, 725, 727, 732, 737, 739, 744, 749, 753, 759, 762, 764,781, 787, 796, 804, 810, 815, 816, 830, 862, 866, 867, 872,873, 881, 889, 902, 907, 915, 916, 926, 932, 935, 945, 947,957, 960, 964, 969, 970, 988, 1005, 1008, 1021, 1024: n = A,T,C or G
  misc_feature 1028, 1033, 1034, 1040, 1051, 1054, 1061, 1062, 1066, 1067,1069, 1070, 1071, 1090, 1092, 1102, 1107, 1115, 1117, 1122,1123, 1124, 1125, 1127, 1131, 1134, 1144, 1152, 1169, 1173,1190, 1192, 1194, 1196, 1198, 1200, 1201, 1213, 1215: n = A,T,C or G
  misc_feature 1216, 1217: n = A,T,C or G
cncntntannnnntctaaaanttatattgtanntncttcnnnntatntnnttgtttnanattatntntnntaatgtnangnnnatnnnnttncnnncntncnnagctngngttgaggnnctttggcnccccctatagnncgnaatngggccctctagtatgcatgctcgagcggccgccagtgtgatggatatctgcagaattcgccctttagcggccgnccgggcaggtaccangcactgctctaggtttggaggtagagacattggtgagtaaaaacagacatgggctcaactttctagagcttatagtccagcaagagggacagatattaaccaaatgaatcagacaaatggcactaaaacattaaaattgtggtgagtgttatngataaggttgatttgccccagtcattgggagatccagggncgccgccagttattcaaggtgangaccggnaactggaccaatattgaagggagnttaaaccttangaatngaannaaagggaagnaggaaagaagnggttttnccaaaggacccacttgtggccacaaagggtnnccaaannggntngaanaaanggnnaaantgntgncgnnntnccttttctattccntgaatngggaaanaatggaaaatngcctnctttngnncnnncccaaaaatanttaattttttnnacgggaagnnaganggnttatncctttttnggcccngaaagangncaaanggccntnaactnggggnaaantgtccnttntngttcaacataagggacnaactgngctcccccnggtggggncccacnttttnncatgcatgaaccanattctttggggcctataaatcttttggctgcntttnnccctnnttttcccntgggggcngaaaaaaaccccnggagncccccccnnccccaaaaanacgggncanaatttttcangnaaaccccctnggncggnggtcnnatattttctttaaagggntttcccgggggctccgnttnaacccaaaacctncgngcgntacannatttgngttctttagtntgnggtctcnnttgnngnnnggaaaattttatttatccngnttaaacaatnttttnccgacacncnatttnnnnancccnggnaagcaattanatattgtnaaaaacccctggggggntgcncttaaagaaggtgtgancntncntncnnttataaataggngnnngcc

SEQ ID NO: 4696 - DNA, 1151 bp, Homo sapiens
  misc_feature 1, 2, 5, 6, 7, 18, 20, 23, 24, 26, 27, 30, 36, 39, 40, 41,43, 44, 45, 46, 48, 50, 51, 53, 56, 57, 61, 62, 64, 65,66, 69, 72, 73, 76, 79, 82, 83, 84, 85, 86, 92, 98, 101,102, 107, 108, 112, 114, 124, 200, 441, 494, 508, 525, 537: n = A,T,C or G
  misc_feature 574, 648, 709, 718, 731, 750, 755, 760, 781, 795, 799, 841,858, 868, 872, 878, 882, 899, 903, 911, 914, 927, 928, 931,944, 958, 971, 973, 983, 987, 990, 998, 1002, 1006, 1008,1011, 1015, 1017, 1024, 1037, 1040, 1053, 1071, 1072: n = A,T,C or G
  misc_feature 1084, 1085, 1092, 1102, 1111, 1114, 1116, 1122, 1124, 1135,1137, 1138, 1147: n = A,T,C or G
nnccnnnctgtattcgtnancanncnnctnacctanccnnnannnntntnnantgnntttnntnnntcnatnnttnccngtnnnnnttcagncaaggnggnngaggnncgtntnctatatggcnaattgcgccctctagatgcatgctcgagcggccgccagtgtgatggatatctgcagaattcgccctttcgagcggncgcccgggcaggtacttccatcaagtcgagggagtaacgcaaactattaatagtagccatctattaaggatagttctgaggtttggaatttgtaactgatttttaggagctacgacatgaatatcatatcaggtagaaatactcagagtgatcaccttttatgaaagttagttctatctttcatgtctagggaaaatataacagtggaatgtttgctttttgtatgtttttgtctccaagncagagggaaactgacaagttttatgtttttaagtgcccgaaagtttgtttttntggcttaggccagntttccaagagatttaantcactgggggantgtttaaactttggaattttttttggttcttttaaanaaatggttttttaagaatttttttaaaaaaccgaaaaataatggccttttccccatttatttttcccaaaaacntggaccaaccctttggtggtttcctggggatttaagtttttttttaaggaagaaaaaattngtttttttncccaaaaatttcnttctttggggaatttaacntttgnaaagntcccaatttggatttttttgnaaaaataatttttnaagntattaaagtttttttttttccttttttaaaaaggcttttaantccaaaaaaaaggttangaggggaaangttncccttngggncccgccggacccaccgncttnaaaggggncgnaatttcccaaccnncancttgggccggggnccggttacctaagnggggaatccccanancttccgggtncccnaancctttggncggnaaantnatngggncncaaaagnttgggtttccccnggnggggaaaaaatgngttattcccccgttcacnnaatttccccccnncaataantaacccaagnccgggaaanccntnaaaagntntttaaaacccntnngggtggccntaag

SEQ ID NO: 4697 - DNA, 1132 bp, Homo sapiens
  misc_feature 1, 2, 3, 5, 6, 10, 11, 12, 13, 14, 15, 16, 17, 19, 20, 22,25, 26, 29, 32, 34, 41, 43, 44, 46, 47, 50, 51, 52, 53,54, 56, 64, 67, 68, 70, 75, 78, 84, 85, 86, 87, 88, 89,91, 92, 97, 98, 102, 104, 109, 113, 114, 126, 130, 450,543: n = A,T,C or G
  misc_feature 654, 672, 681, 713, 723, 744, 754, 770, 771, 794, 822, 848,859, 862, 871, 878, 890, 892, 893, 918, 933, 944, 946, 954,959, 965, 978, 999, 1000, 1012, 1018, 1026, 1027, 1032,1037, 1046, 1060, 1074, 1078, 1080, 1082, 1083, 1086, 1087: n = A,T,C or G
  misc_feature 1089, 1095, 1096, 1098, 1099, 1101, 1112, 1122, 1123, 1124,1127, 1130, 1131: n = A,T,C or G
nnntnnctgnnnnnnnntnncnccnnacnttncnccgcctncnncnnacnnnnnanacgatatngcnntntactntgntgcttnnnnnntnnttagnnaagngnggggngtgnnccactcctatanggcnaattgggccctctagatgcatgctcgagcggcccgccagtgtgatggatatctgcagaattcgcccttagcgtggtcgcggccgaggtacccatgttctggagagcttgcccatcaacaccaggcctgacatcctttctgtgggaaacagacacatagagccaaatagcatgtctcggtagtcagtcattaacatgaaatctcatgatcgccattttataaatacaagacagtcatttctacttctttttatcttatttgtagcttcagcctgttctttttctgattttaggattgaggtaggtcctgttaaacaaaagnattagtatacacaacctgattgtctgaaaaggagtttaggaattattataaaaccaagcctttcctaaaaactttaccattttaaaaaaatancaattggcatcatgaattaagaaaatctcttaaacaatggataccaattgattcttcatcacccaaaacaaggggaattttccctggagcccttttcttgggcttaacttngggaatgtttacctggangaaaaatanctttctttccctttttcttcctttaatatttntcccctcccntggtggaaagccattggcttnaattccaggnggtaaaatcccccaannatcaaccttttggtccccccagnttccttcaacaacttaaccttcctttanggggaaccccaggggtaaaaaaaatnggggggggccnagntaataaaanttaattngccaaaggaacntnnaaaccccccctttcccttctttctnggaaccctggccccnggggccggggncnggttttgnaaaanggggcngaaatttcccagnccaccaccttgggcgggcccnntttaccttaagntggganccccgaanncctcngggtnacccaaagnctttggggcgggtnaaatacaattgggnccantnannatnngntttccnngnngnggaaaaatttngtttttcccnnnttnccnng

SEQ ID NO: 4698 - DNA, 1099 bp, Homo sapiens
  misc_feature 1, 2, 6, 7, 8, 9, 10, 23, 24, 25, 31, 32, 34, 35, 40, 41,46, 48, 49, 50, 52, 54, 57, 63, 65, 66, 68, 69, 70, 71,72, 73, 75, 76, 79, 83, 86, 87, 92, 94, 169, 176, 181, 199,262, 321, 466, 467, 470, 501, 502, 516, 538, 554, 561, 577: n = A,T,C or G
  misc_feature 592, 604, 629, 638, 639, 692, 701, 716, 734, 740, 758, 772,776, 788, 790, 805, 815, 820, 821, 842, 845, 848, 852, 860,863, 866, 875, 885, 902, 905, 909, 910, 916, 918, 920, 929,931, 934, 935, 943, 957, 960, 986, 992, 1000, 1009: n = A,T,C or G
  misc_feature 1022, 1026, 1027, 1030, 1033, 1034, 1043, 1045, 1050, 1054,1062, 1063, 1068, 1073, 1082, 1086: n = A,T,C or G
nnactnnnnnctttgcttcattnnntattanngnnggccnngcggnannnangngcnccgacntnnannnnnnannagngggnggnncattngnctattgtccctctagagcatgctcgacggccgccatgtgatggatatctgcagaattcgcccttagcgtggtcgnggccgangtacncgggggagacacattcanaggtgagcccagagcgggtaaagtggactggggagaacttcggaggatgttcatgtccaggancagccccacgccctgtatggtcggtgtctaaagcctcacagcaactaacaccaacccanctctcagaagaaggaatgtcaaaatgtcatgttcaattttacattcagtgcctggaatcttttcttcacaattgaaatgaaatgtgctgaaggaggtgaatccatgcattaattcttcatctcacaaagggaaatacttacatanngangcaagggaaccaccgcaaagagatctacagnntctggatcttccanggattaagtgaaaatggagggngggttgaaatggatanaggggtnttaatttttagaccangctccagtggaaatnaaaattaattcntttggccaaaatggaagccaaggtnttcccccanngacccaccagacttcaaaggaccgggaccattaattggggttttttttttttnggcccattngtccttgggaaaaanaaaaaagggtaccccttncccccnggggccgggggccgcttncgaaaaaaggggcngaantttccccagccntncaaccttgggccggncccgttttcnttaannggggattcccaagccttcggnttnccnaaancccttggngcnggnaattcattnggggccattnagcctggttttcccctnggngtgnnaaaaantngngtaattccngntcnncaaatttncccccaacaaacanttncggaagccccgggaggccttaaaaanggtgtnaaagcccnggggggggnccctaattgaggntgannctnacnnccacctttnanttggnggtnggcgcccnncttgncccgntttttccantttntttcccccccccc

SEQ ID NO: 4699 - DNA, 1263 bp, Homo sapiens
  misc_feature 1, 4, 5, 6, 7, 8, 11, 16, 20, 23, 25, 31, 34, 35, 37, 39,49, 54, 55, 62, 65, 70, 74, 76, 79, 85, 88, 92, 99, 106,108, 109, 110, 111, 113, 115, 117, 120, 123, 125, 127, 146,147, 148, 182, 189, 208, 209, 211, 220, 226, 227, 272, 303: n = A,T,C or G
  misc_feature 344, 354, 400, 427, 444, 447, 451, 514, 516, 522, 528, 531,533, 536, 543, 564, 565, 566, 579, 585, 587, 594, 606, 615,624, 635, 641, 647, 688, 693, 704, 711, 724, 728, 730, 732,747, 757, 762, 789, 796, 797, 799, 806, 821, 833, 837: n = A,T,C or G
  misc_feature 838, 848, 850, 856, 861, 885, 898, 922, 926, 936, 947, 949,952, 954, 959, 960, 974, 975, 987, 989, 990, 996, 999, 1001,1002, 1006, 1012, 1020, 1029, 1031, 1033, 1038, 1040, 1048,1052, 1058, 1059, 1062, 1066, 1068, 1082, 1084, 1090: n = A,T,C or G
  misc_feature 1098, 1104, 1105, 1110, 1111, 1115, 1116, 1118, 1135, 1143,1146, 1147, 1150, 1156, 1160, 1163, 1172, 1173, 1180, 1184,1199, 1214, 1216, 1222, 1229, 1236, 1242, 1256, 1258, 1260,1262: n = A,T,C or G
nccnnnnnccnttctncttnttnanttatanctnntnanatatcccttngacanntaattancangtttncgancnganttaganatnctanttcagtnaagggancnnnnangngnganttntntngggcgaattgggccctctnnnatgcatgctcgagcggccgccagtgtgatggatntctgcanaattcgcccttagcgtggnngnggccgaggnacaaanntctgagtatgggaacttccctccccaagtggtgggaagttacagntaactacagcttactcaactatcacttccanaggtttagtgtttttaatatgggaaagaggagaaatctcangtctaatcanggttctgcccatcagccttttcactgaaactttcaactgtggtttntgttttttgtgttttttttttccatcntttcagattttccttangcntgtngttttggccttttcttccccttccggcggtttcaccttccctcttttattttttggcattttngngggtcnaccctnttncncangcctttncaatggttctccccattgaannnttccaagccttgntaaacncncttggcnaattttttgggngaaaaccangtgaagganggaaaaaaaanacccanaaaggnaaattttttgccttggtaaaaaaaaaaaaaaataaggggcnccagnggttggcccgngttgggnccttctaactacncctngntnaaattttcccaaggncatttttttnggggnaaggggccttggaaaaaattgggggtnggggaanncnacccttnggaaggggttccaanggaaattttccngaannaacccaagcncntggggncccanaccaatgggggttaaaaaaccccnattggttctttcntttattttaaaaaaaattccaaanaaanttttatcccnttggggggccnantgntnggccnncctttggcccttgnnggaaatcccccnanncctttnccntnngggnaagggntttttaanggcataggnananaaatncnccttgggngaancccttnnagnaaangntgggaaaggtcttncnaaattnaaaccccntagaannaattnnccanntnggacaacttttttaagnccccgggnacnnaancaaaancccnaangaacttccnnttttttntaanaaggaaataaaaaanttcttctaaaaattnanttcttnaaggggnaaattgncccganaacaagggcccccncncncnc

SEQ ID NO: 4700 - DNA, 1223 bp, Homo sapiens
  misc_feature 1, 5, 12, 13, 17, 18, 20, 23, 28, 30, 31, 32, 33, 36, 39,40, 41, 42, 45, 47, 48, 50, 51, 53, 54, 60, 61, 64, 67,73, 76, 77, 82, 85, 87, 89, 92, 94, 95, 102, 105, 106, 112,114, 117, 120, 121, 128, 133, 218, 226, 399, 415, 428, 433: n = A,T,C or G
  misc_feature 438, 443, 445, 448, 451, 452, 458, 463, 466, 468, 481, 486,491, 499, 500, 502, 509, 514, 515, 521, 526, 528, 537, 546,549, 551, 560, 573, 587, 616, 618, 619, 628, 629, 650, 656,677, 680, 686, 688, 695, 700, 701, 703, 705, 706, 708: n = A,T,C or G
  misc_feature 712, 713, 716, 718, 721, 730, 732, 734, 735, 741, 745, 748,758, 763, 764, 768, 778, 780, 784, 795, 798, 812, 814, 816,821, 822, 823, 829, 831, 837, 840, 843, 852, 858, 860, 869,878, 879, 882, 883, 887, 896, 897, 908, 914, 916, 924: n = A,T,C or G
  misc_feature 930, 934, 945, 951, 952, 954, 957, 961, 963, 966, 967, 973,977, 982, 983, 988, 997, 1009, 1020, 1026, 1029, 1032, 1035,1043, 1047, 1048, 1049, 1054, 1055, 1057, 1062, 1067, 1071,1079, 1081, 1087, 1088, 1095, 1108, 1109, 1112, 1113: n = A,T,C or G
  misc_feature 1120, 1124, 1128, 1145, 1151, 1152, 1153, 1167, 1177, 1180,1182, 1197, 1200, 1208, 1209, 1210, 1211, 1213, 1214, 1215,1216, 1220, 1222: n = A,T,C or G
ntganccctcgnnatanntnccnaccgnannnngcnttnnnnacncnntnncnntacacnnctngcntgatcnctnntaagnaangncncantnntttctcngcnnaggggngnggnganngtccttngggcnaattgtgccctctagatgcatgctcgagcggccgccagtgtgatggatatctgcagaattcgcccttagcgtggtcgcggccgangccacttnctgtgttttgttaagtcatgaaaattagatttctgattcatctttatttagcatttcactatgtatgtatttgttcctaatattcaaatcacttgctacttgaaattgaatttctgaaggataatactacaatttaaaaatatttattttttgcctatggtaaaaattaatangggagactccattctnctaccccaaagcntaagnacatntagcncnggnaannctgggntggtnacngngcaacattaaccngttantaggnctttgggnnanttacctnaatgnntagggncctcngnggattaaantaagtgtangcntnatgggaacncccctgggtattnccgagcccccaatngccccttaaggaattttttttccaagttnannccattaaannggcccttaatccttccccacnaatttnaattttttggtcgtttttttnatnctaaananccccgtngttanncnannancccnncgncnatnttgatgggntntnngatacntttnaanagaagttaantcctnntaantcctggttcncncccngggtttttggnaanttggctaaatgggntnanccttnnnagctcngngagaanccnccnccttaaagngggccngnaaattttcnaagccaacnnctnngggncggggcccnntttcccttaanttgggnantcccgaanccttcnggtntacccaaaagncttggnncncgnaaantnatnngggtcnaatnagccnnggtantcccttggnggtgaaaaatanggttaattccntttttnacnaanttncccccccnaaannnttccnnanacccnggaangccntaaaggtntnaaaaannccccggnggggggccctaanngannggggggnctcncctncacattataattggcgnattgcnnnctcccttggccccncttttttctnaantngcgggaaaaaccctngcntgggcccnnnntnnnntttnang

SEQ ID NO: 4701 - DNA, 1179 bp, Homo sapiens
  misc_feature 1, 4, 8, 10, 11, 16, 17, 20, 22, 24, 28, 29, 31, 36, 39,43, 44, 46, 51, 53, 60, 63, 66, 67, 69, 71, 74, 76, 77,81, 84, 88, 91, 93, 96, 98, 100, 325, 367, 388, 458, 475,489, 537, 644, 652, 706, 714, 722, 738, 760, 767, 771, 795: n = A,T,C or G
  misc_feature 804, 805, 811, 834, 855, 859, 861, 879, 886, 902, 919, 922,931, 933, 945, 971, 980, 982, 983, 986, 989, 993, 1003,1004, 1008, 1016, 1022, 1025, 1028, 1035, 1050, 1052, 1053,1067, 1071, 1081, 1084, 1089, 1093, 1125, 1134, 1135, 1144: n = A,T,C or G
  misc_feature 1148, 1152, 1163, 1166, 1168: n = A,T,C or G
nccnctcntnntcttnntantncnttanntnacatnatncgtnnantggangnaaatttnttntanntnanatntnncttnctncttnagntnggngngngacagtcatatagggcgaattgggccctctagatgcatgctcgagcggccgccagtgtgatggatatctgcagaattcgcccttagcgtggtcgcggccgaggtacagcatgtgtgctgggctagtttcctggctgctaaagctgcatggtgccctttaatgatgggaaggaggacattaaatgtgttgggcttagtgttttcacttgtgaacatcagggagcanagggcatgcaaactttgcccaaaggctggacacggttttgcnatagaaatgagctgcgtgtantaaataactgaccttggtagatgccgcagcctaagcaacttgattacttaaaggtaaaaaagtgagccgncaacctcaggcccatanggtggagctagggnttgacccagggggaaaaagggctgcgtttcccaaggaggtttcgtctntcccatttggggggcccgctctttaaaaaatggctggaatccctgaattcacacctggtttgaagccaagtggtgcctgtaatggtttggtcctttcacttttggangaattagnaaaacctgcttgtcccatcctttttaattttttattaagaaaatggggaagaanaaaacctngggggttncttcaaggggaaaaangtttttaaattaaaaatttggnccctaanggcncttaccaaaccaagggttaagccnaaaggttanncccaanaaagtccaggggaattttttcanaggtttcccaagggccaggcncttngnccccctttaaaaaaagancctgganggggctttccccttcnttaaccttttgggtttntcnttttaatcntngggggggggggngggaaaacaaaaagaatttttggagnttttgcctngnnaantcntttncccaaggggnnaggnttatttantaaaantangtnattttcnaaaagaaccttaccntnnacttttttttaaangggntaaaacacgnggntgtcnccanattttgccttttttctccctttaagggccccnctaaatttnnatttggccngaanaaantaaagggcccntcnancctttttttat

SEQ ID NO: 4702 - DNA, 1160 bp, Homo sapiens
  misc_feature 3, 9, 11, 13, 14, 18, 21, 22, 23, 25, 29, 32, 34, 35, 37,38, 39, 40, 44, 47, 49, 50, 53, 54, 59, 63, 64, 66, 68,70, 73, 74, 75, 76, 77, 78, 79, 80, 82, 83, 86, 87, 90,96, 97, 98, 99, 100, 118, 417, 427, 490, 494, 586, 602,622: n = A,T,C or G
  misc_feature 671, 695, 760, 761, 783, 784, 799, 814, 855, 895, 908, 936,949, 954, 967, 970, 983, 985, 987, 989, 1001, 1009, 1021,1046, 1048, 1052, 1071, 1072, 1080, 1083, 1087, 1093, 1108,1111, 1114, 1117, 1122, 1124, 1125, 1137, 1140, 1143: n = A,T,C or G
ctngctacntntnngtanttnnntnttanttntnnannnntctnagntnntannttatntctnncntntntcnnnnnnnntnnagnntangggggnnnnntcatatagggcgaattgngccctctagatgcatgctcgagcggccgccagtgtgatggatatctgcagaattcgccctttcgagcggccgcccgggcaggtacctgggtgatggccatactgcgtgccgccatagctcaagccatgtgcctgaggctgtgcatgagggagagaaagaatgtccactcccaaaagaactgattcaggcatgaacagaaccattgcacatcctcaggaggttctagcaaacctgcacatccatgtctgcacttagacaacataaacagagtgagaatgccttcccagagcacagtcagnaagttcaacntgggcaaacgacccaggaagaaatttttcagctcatccttttacaggaaaatgttaaccttcncatnggagaaggacagggagaaattcaagtaccaaaggaccaaggcgggaggactcttttcttttttttctggcacgttggcttgggttacccttnggggcccggcggaacncaccggcttaaaggggccgnaaatttcccaggccaccaccttgggccgggcccgggtttaacttaggtngggaattcccggaggcttcgggtnaccccaaaggcttttggggcggtaaattcattggggtccattaggccttggttttcccttggtgnnggaaaaatttgtttaattcccnncttccaccaaatttnccaccaccaaaccanttaccgaaggccccgggaaagcccattaaaaaagttggttnaaaagcccctgggggggtggcccttaaaatgaagttggangccttaaccttcnacaatttaaatttgggccggtttggccnccttcaacttggnccccngtttttcccaagntcngggaaaaaccctngncngntgcccaagcttngccaattnaaattgaaaatnggggcccaacccgcccccggggggnanaaanggcccggtttttgccggtnntttggggncgncttnttttcnccttttcctttcggnttncanttnaaacntnngggttggggccnttnggntccgtttcggggcttcg

SEQ ID NO: 4703 - DNA, 876 bp, Homo sapiens
  misc_feature 83, 97, 101, 117, 119, 157, 196, 202, 310, 355, 367, 391,402, 412, 441, 444, 460, 465, 474, 490, 498, 515, 519, 529,566, 570, 574, 582, 585, 586, 598, 601, 604, 622, 627, 631,638, 645, 646, 653, 654, 660, 666, 672, 673, 675, 678: n = A,T,C or G
  misc_feature 684, 689, 691, 697, 700, 703, 706, 711, 713, 718, 726, 732,739, 740, 747, 750, 765, 767, 769, 789, 797, 798, 803, 815,818, 821, 822, 823, 824, 826, 827, 829, 832, 833, 841, 843,848, 853, 865, 866, 868, 869, 871, 875, 876: n = A,T,C or G
gactactatagggcgaattgggccctctagatgcatgctcgagcggccgccagtgtgatggatatctgcagaattcgcccttnccagcggccgcccnggcnggcactttgctacacngncgggggccattgagactgccatggaagacttgaaaggncacgtagctgacacttctggagagaccattcaaggcttntggctnttgacaaagatagaccactggaacaatgagaaggagagaattctactggtcacagacaagactctcttgatctgcaaatacgacttcatcatgctgagttgtgtgcanctgcagcggattcctctgagcgctgtctatcgcatctgcctgggnaagttcaccttncctgggattgtccctggacaaganacaaggttaangccttagganctacttggggagtccggaggagcagtctnttntgtcccgctggaaccnatggnccactgaanctcctttatgctactntcactganccattctaagaaatacnccanctgaggaaantttctttgaaatttgcaaggttgtctgggttttaatntctnaaantttgttancanntattcccagaantgnccnacaaagaaatattcaacntggantctnggtaagnaggaaannaaacctnnatgggnggtttnaacttnnanccnattttnatttngnatacanttnccnagnggggntnatggntcaatttnatttgnaaaaccnngtaacanaanttttggcttttcccntntncccgtgtgggaaaatattgncttttttnncaaanctttttatttanccnatnnnncnntnaanngcaattangnggatnatttncatctattttgnntnncntgtnn

SEQ ID NO: 4704 - DNA, 892 bp, Homo sapiens
  misc_feature 15, 17, 18, 19, 548, 565, 568, 594, 597, 600, 605, 606, 619,651, 657, 669, 674, 678, 697, 698, 710, 713, 715, 719, 720,748, 751, 752, 756, 768, 772, 777, 781, 789, 792, 795, 800,803, 804, 810, 811, 812, 819, 827, 828, 836, 847: n = A,T,C or G
  misc_feature 850, 856, 858, 860, 864, 865, 869, 871, 873, 875, 879, 887,888, 890, 892: n = A,T,C or G
tagggggggattgtnannngactcactatagggcgaattgggccctctagatgcatgctcgagcggccgccagtgtgatggatatctgcagaattcgcccttagcgtggtcgcggccgaggtacgcacaatcaacaggacttgacactcagcttatgtgagagaaaaatatacaaatacatttattgtaatcacatttaaatttatggctttggcatagaacgagggaggggaaatgtatttgggaaggaaagagaagatggctaaagccatggacagagtttgaataggcaagtaagaaaacagggtcaagaggccgggtgcggtggctcatgcctgtaatcccagcactttgggaggccgaggcaggtggatcacctgaggtcaggaggtcgagaccatcccagccaacatggtgaaaccccgtctctacaaaaatacaaaaaattagccaggcatggtagtgggcacctctaccccagctacgtgggaggcttgaggtaggagaatcacttgaacctgggaggtggaggttgcagtgagcctganatcgcaccactgcactncangcctgggtgaccagaaccgaggactntgnttnaaaannaaaaaaaaaaagnaaaaaagttccttgcccggggcgggcccgctnctaaanggggcgaatttncaagnacanctggccgggccgttacttnntgggaattccgngcntntggnncccaatgctttgggcgtaaattcatggntcnntaancttggttccctngtgngaaanttgnttatccgngtntanaattntcnnaacaannntaaagancccgaaanncattaaanggggtaaaaanccntggggngngntctnnttgngngnanctcnacctctcnntntn

SEQ ID NO: 4705 - DNA, 869 bp, Homo sapiens
  misc_feature 133, 140, 147, 225, 273, 369, 397, 437, 485, 494, 495, 512,525, 528, 574, 580, 593, 594, 600, 620, 621, 622, 623, 629,649, 651, 654, 660, 666, 675, 678, 681, 686, 689, 695, 704,707, 710, 711, 712, 714, 719, 724, 730, 734, 742, 745: n = A,T,C or G
  misc_feature 747, 750, 751, 755, 757, 758, 762, 766, 775, 781, 785, 786,788, 790, 798, 801, 805, 808, 809, 810, 813, 814, 818, 822,825, 827, 830, 832, 836, 839, 840, 841, 846, 847, 849, 850,851, 853, 854, 855: n = A,T,C or G
tatagggcgaattgggccctctagatgcatgctcgagcggccgccagtgtgatggatatctgcagaattcgccctttcgagcggccgcccgggcaggtacaaggttggtaggaggaagagaagaaatgattgnctcccanaggcttnatgggctcccaattcatgattctttctctgtggctaatttttgttaagtataagaattccaggaatctcttaggaatngtggagactgctttctcctgaaatataaaacatctgctcttggtctgnttggcgctccactgtctgaggggaaaacagggaaaaagaggtaatataaaacagacattgtttcagacaataaatccccctttactcattaatganaaaataaatttagggccagaggcgtcangacttttcaggaggcctctttgttcttttcttttcttttntttaataatttaaaaaaagggtcccacactacactgatgtacctcggncgtgaccannctaagggcgaattccancacacttggcggncgnttactagtggatgcggagctcggttaccaaagcttgggcggcattnaatggnacaataaggcttnnttactnggggtggaaaataggataannnncgtttnccaatttgccacacaaacantnacnatcccngggaangcattaatngtngtnaaagnccngggcgnctggccttnaangannngnagctnaactncaccantaanttggcttnagngnctnnaacngnnccgntttnccaggttgnggaaancctnntncngccaactngcntttnaannnaanngggncaanccncnggngnaaanatnnntttgnntnnntnnncccgtattaccccc

SEQ ID NO: 4706 - DNA, 826 bp, Homo sapiens
  misc_feature 76, 90, 92, 93, 96, 101, 103, 361, 396, 408, 513, 568, 639,661, 664, 673, 675, 693, 698, 701, 707, 712, 717, 719, 738,742, 769, 773, 787, 796, 815: n = A,T,C or G
gggcgaattgggccctctagatgcatgctcgagcggccgccagtgtgatggatatctgcagaattcgcccttagcnggggcccggccgangnncangaatnangaacagctgggaatgaacagcggcaatatcactagaaaggaggggacacatagggaggcaatgaataagttcatttaaaattaaaaaaaaatttgttgtgttttaaaaggaaagcgaagtggagagagaaacacaccactaacaacaacaacaacaacaacaaaagcacagaataggattaggagatttgcctgagacaatgagtgtagtttaatttcatcaagctccagtgtcctgaaatgaaaaaacgtctaaggngtttatgctcacaatggaaacaggctaagcaagtnagccgaagctgnccgcactgctgtctgctacaagaagacaggtaagtgggagggaaaagcgcttcctgctgactccacattctattcctactgttgccaaggttgcctcctgttcanatcccaccacagccacagcactgcaaatggagaagctatgccaccacctgcttgntgggccccactgtctactgggaataattaaagggatggggagacacccgcgtacctgcccgggcggcccgnttcgaaaagggcgaaatttccnacncacttggcngnccgttactagtggaaccnagctntgnacccanccttngcgtnanccattgggacataggcttntttncttgggtggaaaattggtattccggtnaacnatttccacacaacnttacggagnccggaaagccttaaagtgnaaaagccctgg

SEQ ID NO: 4707 - DNA, 929 bp, Homo sapiens
  misc_feature 187, 358, 381, 383, 389, 391, 401, 411, 414, 430, 431, 448,452, 465, 469, 471, 477, 480, 482, 485, 498, 504, 510, 513,526, 527, 528, 532, 535, 536, 547, 548, 555, 556, 558, 570,576, 580, 581, 586, 588, 591, 595, 598, 599, 601, 605: n = A,T,C or G
  misc_feature 616, 617, 627, 630, 634, 639, 646, 664, 665, 677, 684, 688,701, 704, 705, 707, 709, 716, 719, 722, 725, 727, 728, 735,742, 746, 749, 750, 752, 758, 766, 768, 774, 775, 786, 796,797, 798, 802, 804, 805, 807, 813, 834, 843, 846, 850: n = A,T,C or G
  misc_feature 856, 859, 861, 870, 873, 876, 879, 884, 890, 893, 895, 897,905, 908, 916, 917, 918, 923, 926: n = A,T,C or G
acgctactatagggcgaattgggccctctagatgcatgctcgagcggccgccagtgtgatggatatctgcagaattcgccctttcgagcggccgcccgggcaggtactttaagaagtaatgcccttgagttagaaaatcatcattttaaaatctctgatgatataatggatttaggcaataatcatnaaaaaactaagttaagactacaacctgtcaaccaaataccatgtgtagaccttgtttggatattgacttaagcaaataaccctacaaagacacttttacaatcaagaaaaactgaatggggctgcgcatggtggctcatgcctataatcccagcactttgggaggcaggtnaattgcttgagcccagaagtttntngactancntgggcaacanggctagtagnctngctctaatataatttnnaaaaaagaaaaactgantgtnaactgaatagttntacnantataanagnantanattttttggttgnggcctncaaacnatnaaaaaagaggggnnngggnatnnttttttttggnntgggganntnccaaaaaccttntaaagnaaannggtgntnccntcanggnngnaaanctttttttacnnccttgtgaanggnggtnaaaanccccccnaaatggggggtaccttgnntatatacccccnaaatgcntttnaaaaattttgggnccnncntntttcccnttngtngancnnccatttntgcccangggnggnntnaaaaancgtccatncntccccnncctgaaaaatntttttagggnnnaaananntntttccncaataaaaaaaaaaaaaaaanaaaattccnttncccnggccgnccncntcctaaaanggnggnaanttttncccacnctntngngggggggntanttaatggnnntcccnccncca

SEQ ID NO: 4708 - DNA, 999 bp, Homo sapiens
  misc_feature 1, 15, 113, 116, 120, 125, 126, 128, 130, 132, 136, 139,142, 145, 192, 273, 346, 350, 388, 392, 394, 395, 404, 411,430, 435, 447, 461, 468, 472, 473, 485, 491, 502, 525, 526,545, 550, 553, 555, 556, 559, 560, 563, 568, 570, 576: n = A,T,C or G
  misc_feature 578, 585, 589, 595, 598, 599, 601, 607, 608, 611, 615, 616,618, 621, 631, 634, 636, 637, 643, 652, 654, 655, 658, 660,665, 666, 667, 671, 679, 682, 690, 697, 700, 702, 705, 717,718, 731, 733, 735, 737, 738, 742, 745, 752, 754, 755: n = A,T,C or G
  misc_feature 756, 760, 771, 772, 778, 780, 781, 791, 803, 805, 806, 809,811, 812, 814, 831, 833, 835, 836, 839, 841, 842, 844, 845,846, 848, 849, 851, 852, 862, 863, 870, 874, 883, 884, 899,904, 906, 915, 917, 918, 920, 921, 923, 929, 932, 934: n = A,T,C or G
  misc_feature 940, 943, 944, 948, 950, 951, 952, 957, 960, 965, 967, 968,972, 978, 979, 981, 983, 987, 988, 989, 990, 993, 994, 996,997: n = A,T,C or G
ntttagggggggggngggaattgtaatacgactcactatagggcgaattgggccctctagatgcatgctcgagcggccgccagtgtgatggatatctgcagaattcgcccttnagngggnccccnngnangnactntgntanacngccgggggccattgagactgccatggaagacttgaaaggtcacgtanctgagacttctggagagaccattcaaggcttctggctcttgacaaagatagaccactagaacaatgagaaggagagaattntactggtcacagacaagactctcttgatctgcaaatacgacttcatcatgctgagtttgtgtgcagatgcaanggantccttatgaagcgctgtctatcgcatcttgccctgggnaagntnnacccttacnctgggantgttcctgggacaaggagnacaangtagaaggcccntttagggatcctantgggggngaannttccggcaaggnacccanttttatttttngtccccacattgggaaaccccanngggccccaacttgaaagtnttccnttnannggnnacntttananctgtancnatccctnttgnaaattncanncnttcggnnganaaanntnccnttggaaaaanttncnncaaagntatgtctcngnngcntntaatnnnctanaaacactntgnatccaaancctattnccnanaanatgctccccccnntacacatttctanantncnnattnctntgcacanannntaanataaacccttnntgtggngnnacacatgganaccccatttttnannacntnnanatttaacactgagcatnanannccncnnannntnngnnaaacgcatgnnctaaaantttncatatttgnnttttaacccgtgagnataantncgcattcancnntnnancatctnacntngccccntannctancnnntccgnctnactgngnncatntattcnntntncaannnnttnnanncc

SEQ ID NO: 4709 - DNA, 860 bp, Homo sapiens
  misc_feature 112, 118, 146, 165, 186, 359, 428, 455, 462, 476, 481, 485,488, 494, 498, 506, 508, 543, 577, 588, 591, 601, 602, 616,622, 624, 629, 643, 644, 660, 678, 679, 684, 700, 712, 731,736, 737, 739, 745, 748, 750, 753, 759, 761, 764, 765: n = A,T,C or G
  misc_feature 773, 776, 779, 780, 781, 783, 789, 795, 811, 813, 817, 820,822, 829, 833, 834, 841, 842, 843, 847, 851, 857, 858, 860: n = A,T,C or G
gtaatacgactcactatagggcgaattgggccctctagatgcatgctcgagcggccgccagtgtgatggatatctgcagaattcgccctttcgagcggccgcccgggcaggnacttgncactgtcacccttgcctttgaataattnatattcttatttttcttgntcccagactttgtccttcagngcactgagtcaaagctttacactaacaggcagtcttatttgttgaatgaatgcatgaaaggctggttttatgaaagcaaaaatgtttttcataattagtatttgaaaagatgtgtttttcaagtaacttgcatgttaatagcctttttttatgatgatggcctttgataagtntggcagtaagaaaaagaaagtcaccaaatctgaacgattgaagctgctacaagaggaggaggagagacnactgaaagaggaaggtacctcggtcgngaccacnctaagggcgaattncacanactngcngcgttnctantggatccnanctcggtaccaaacttggcgtatcatggtcattagntgttttcctgtgtgaaaatttgctaatcccggtnacaaatttcanaanaaaataccannccggaaagtattanagtgtnangcctnggggtgccctaaannagttgaggctaacttnacatttaaattgcgtttnncgctnaactggccctgctttntccagattgggnaaaacttgttccgggccangcctnncntttaantananttnggcccnanccnnccgggggnagnagnnngntttgcntatttngggcggcttttatccncntttnctncncttaaantggnnttgtttnnncttngtancttatnngn

SEQ ID NO: 4710 - DNA, 507 bp, Homo sapiens
  misc_feature 5, 347, 359, 363, 382, 395, 422, 424, 427, 446, 449, 463,466, 483, 485, 489, 495, 507: n = A,T,C or G
gactnctatagggcgaattgggccctctagatgcatgctcgagcggccgccagtgtgatggatatctgcagaattcgccctttcgagcggccgcccgggcaggtactcccccagcaaaaaccaaatgccagacacattttatataagaatgaacaattaatctgaataataaaaataaggcttatttataaaggttaagttgaatagtatatacatgcacatatatgcaaatatatataattcagatattttatctttcttaatgcttacatgactctaaactctcacaattttaaattaaaacataaatatgacataattgtaaatttttcagctttatacatcancattttaccatnatgnggaaaagatatttcttttncttctttctaatnccccaaagttaaatatttaaaacattngnttnctataaaaaaattatcaanaanttatgcactgaatnaantgttctttatttctagntnattntatttnaaaagtctgttn

SEQ ID NO: 4711 - DNA, 492 bp, Homo sapiens
  misc_feature 79, 95, 101, 110, 340, 345, 355, 365, 370, 385, 397, 402,405, 406, 417, 422, 450, 457, 458, 459, 473, 483, 491, 492: n = A,T,C or G
gaattgggccctctagatgcatgctcgagcggccgccagtgtgatggatatctgcagaattcgcccttagcgtggtcgnggccgaggtacaaagnctaacnttttgtcancacataatcaattgaaaccacactctaaagttaaattagttccttccaaatggggcagacacgtgctgaccaattaagaggcccaaagacttgggagtagaggatgaacaggaataaattgagaaattatgcaggaaaattattgaaggaagaatgaagacgagaattctcaatgctaagttctggaagatgctggaagagaactgaatccaaaacaaatatatttatgncaacnccatcattgnttacattttntaganttaacagagcagatnctttgaattctntacgnaanntgaaaagcctnttctnagtatacaagcagggagagcattatgantcgtcannntaaaagggacacangtcctagcanagaaccann

SEQ ID NO: 4712 - DNA, 493 bp, Homo sapiens
  misc_feature 390, 399, 491: n = A,T,C or G
tagggcgaattgggccctctagatgcatgctcgagcggccgccagtgtgatggatatctgcagaattcgcccttagcgtggtcgcggccgaggtacacacaggcattcacacccccaatacacacttcctccttctatctccctgtctgatttccactcatccattctcagctcctgtttgtctgaggccacatgcaactggatttgtcaagcccccttttcacaacttgttgtcacagtccattaccaaattgcatatagttatatattccactaattaggcttctaaaatatcattaacatgtctcttgatcattagcataacgtatgaggcgacgtcgttaggcacgactcgagtttgttaacgtggtaatgaaaggcacaaggcangctctgcangaaccaagaagcacaagagaagtggggaatatccaagcaccaagatgctagccacaaaggcatagacagagacacagagagaccaaaggcangc

SEQ ID NO: 4713 - DNA, 500 bp, Homo sapiens
  misc_feature 390, 392, 403, 413, 418, 422, 436, 472, 486, 492, 493, 499: n = A,T,C or G
ctatagggcgaattgggccctctagatgcatgctcgagcggccgccagtgtgatggatatctgcagaattcgcccttagcgtggtcgcggccgaggtacaagatttttacttttccagccgctgtaggcaaagaaaggcagggagagagagccttaggagtggatgctgagtcagccagttgcagtgtctgccccagaaccatcctataaaagccattttcaaactttattcattgtatgtgaacatgtttcaacatctttcacaagtggcttttaaatcgttgttagtcatgggagctttgattagatgaactcttgtgagggaacctggcatggtgggcataccacgacaccagctctcagagactcagatggagggagccaggctgngntgtcgtggaanccccttgaanctaantgangagggtatttggcnaagagtagttgtaaattgaaaacttttcatttttanttgaacataagatntcagtnntagttnc

SEQ ID NO: 4714 - DNA, 509 bp, Homo sapiens
  misc_feature 367, 400, 440, 473, 479: n = A,T,C or G
cgactactatagggcgaattgggccctctagatgcatgctcgagcggcccgccagtgtgatggatatctgcagaattcgcccttagcgtggtcgcggccgaggtactttgctacacggccgggggccattgagactgccatggaagacttgaaaggtcacgtagctgagacttctggagagaccattcaaggcttctggctcttgacaaagatagaccactggaacaatgagaaggagagaattctactggtcacagacaagactctcttgatctgcaaatacgacttcatcatgctgagttgtgtgcagctgcagcggattcctctgagcgctgtctatcgcatctgcctgggcaagttcaccttncctgggatgtcccttggacaagaagacaagganaaggccttaggatctactgggggagtccggaggagcagtntcttcttgtccccgctggaacccatgggtccanttgaanttccttatgctactttcacttgagcatccc

SEQ ID NO: 4715 - DNA, 463 bp, Homo sapiens
  misc_feature 460, 462: n = A,T,C or G
gggccctctagatgcatgctcgagcggccgccagtgtgatggatatctgcagaattcgccctttcgagcggccgcccgggcaggtacaatgatcctattttcctgaacagaaccctggctgaacggtattaaaattcaggttccaaaatgagccagtggtaaagaagaaatagagtggaaatttaacacatccatttattatacactgcaaaatgcaacagggacagatgccccatgatatttctcctcagctgtgatcactttctctacaatgttgaactagtggctcttgctctagggactatctggacaattacctgcagcttggagtcattacggagatgatccgtcaaggaactggctcatttgggttacactcactgctctgttcctaactttcctgtgtaaacaactctggagcttaaacttttcttatctatattataaaaatatgcaaaanang

SEQ ID NO: 4716 - DNA, 845 bp, Homo sapiens
  misc_feature 431, 434, 441, 517, 535, 551, 595, 622, 641, 647, 655, 659,666, 672, 689, 693, 719, 732, 738, 754, 756, 767, 768, 769,778, 779, 781, 789, 793, 797, 814, 830, 840, 841, 845: n = A,T,C or G
ggcgaattggagctccaccgcggtggcggccgcccgggcaggtactgtgatatccacatatttttgagaaaaattcccaagccaggcgaatgtggattggaataaagacataggcagtgtataccaccatagcaataatggttagtaagatggtgttaaacatagatcgctcccagggctctaaaacagcacagcagctaatgatttggtattgatagtagagccaggagaaatattccttcacacgcctcaaatccatggttggctccttcaagctgcagtaagtttgtcctaagaaagtccaggtctggttcttcagccttgctccttcgcgaaatgatcctgtgtgggttagttctcctctctgggttgctgtttcctcatctcccagttgggtgtatctccctgcggcttaagtgagcgccgaggcnttngctcctncccagctgctgcgacctcggccgctctagaactagtggatccccccggctgcagggaatttcgatatcaaagcttntcgattcccgtcgacctntagggggggccccggnaccccaactttttggtcccttttaatggaggggtttaattggcnccgcttgggcggtaattcaattggggnataagctggtttttcctgntggggnaaaatttngttnttccgcntccacnaaatttccccacaaacnatancgaggcccggggagccataaaaagtngtaaaaagccctngggggngccctaaatggagggnangcctaaccccnnnattttattnngngtttgggnctcnctgngcccccttttccaattngggggaaaacctggtnggtgcccaanntgcn

SEQ ID NO: 4717 - DNA, 639 bp, Homo sapiens
  misc_feature 406, 512, 523, 535, 579, 591, 605, 614, 625, 632: n = A,T,C or G
gcgtaatacgactcactatagggcgaattggagctccccgcggtggcggccgcccgggcaggtacgcgggtggtgattaaatgcaaccaaaatacgggtagtttctatgaattaggagttcatagcatcttctaaagcacagaattctgaatagaactcatccaggtgagaagcagaacattctaaagcagctttcagtttctttaacttggagtctccaactccaattcagaattattcttcctcatgccagtctccaggagcagcctggcccaggcttcaagagtaatacctcaagtctactttcaaaagattcccaaagactgttttttccctcacttgttttgattggatctcatttcaaaagagggcctttttctaagactgcttgatgtttttttatggnaaatctgctttaagtttctaatgaaagtgaccaagaagtttgcccattcagccctttcttttgggccatacaaagtctggcagccaaaactggatccttgcacctngtgggaccctnggcccgctctanaaactaggtgggatccccccgggcctggcaagggaattcgatantcaaagccttantcgattaccggccnacctcagangggggggggcnccggtanccccact

SEQ ID NO: 4718 - DNA, 919 bp, Homo sapiens
  misc_feature 323, 462, 465, 472, 522, 560, 563, 567, 572, 573, 590, 607,611, 615, 672, 674, 678, 681, 682, 686, 689, 694, 703, 704,708, 710, 713, 722, 725, 727, 732, 735, 739, 757, 759, 761,763, 766, 767, 769, 773, 774, 777, 780, 784, 785, 787: n = A,T,C or G
  misc_feature 789, 800, 801, 803, 813, 821, 832, 833, 835, 840, 841, 843,848, 852, 856, 857, 859, 862, 865, 870, 873, 880, 882, 887,889, 892, 893, 897, 898, 906, 907, 909, 910, 913, 918: n = A,T,C or G
cgcccgtatcgactcactatagggcgaattggagctccccgcggtggcggcccgaggtaccactgcacaccagcctgggcaacagagcaagactctgtctgcagggaaaaacaaaacaaaacaaaacaaaactgtcaaaatctagaggagcctaaagagatataataattaaatgtggagttatggagaaaacaacagtaggtaaaaactaaggcaattcataaaatatggactcttaataattacatattaggccaagtgcagtggctcacgcctgtatcctagcactttgaggggctgaggcaggcagatcacgaggtcangggttcaagaccagcctggccaatatggtgaaaccccgcctctacttaaaaatacaaaaattagctgggtgtggtggtgtgtgcctgtagtcccagctactcaggaggcttgaggcaccaagaatcgctttgaacccangangccgganggttgccaagaatcgcgcccacttgcacctccaaccttgggcgaaaagantgatgactccctttttaaaaaaaaaaaaaaaaaatttnaanaacntttgnnttttaccactggttttnccgcagtaccttgcctnggcnggcngtttttaaaactaagtgggatcccccgggcttggtgggatttcgattattaactctntngatnccnnccgnccnttaanggggggccnngggntnccncgctttttnttncntttanggngggntaatttgcgccttggctnantntnggnnanaggnnttnccnggtnnananttggtattcgnntncaaatttttnattttttnctgatctctgnncnattanntnttatncttngggnncncantgntgggnttntttaatntntttgngngtnncttnntttttttnntnnttnggtanc

SEQ ID NO: 4719 - DNA, 899 bp, Homo sapiens
  misc_feature 505, 511, 535, 570, 588, 601, 623, 624, 648, 652, 653, 668,670, 676, 687, 691, 694, 695, 700, 702, 710, 714, 715, 729,741, 751, 752, 758, 783, 784, 787, 790, 793, 800, 803, 808,809, 811, 812, 817, 833, 844, 859, 862, 863, 873, 894: n = A,T,C or G
  misc_feature 896: n = A,T,C or G
gcgcgtatacgactactatagggcgaattggagctccaccgcggtggcggcccgaggtacaccagaacacccagtaaactgctaaggcatttgacctaaatacctggctccaaggcagcatgtctggacatgcctcggtcctggtagaaatcactgccctgaaaggaaacgctttgggaaacacctggtacctgcccgggcggccgctctagaactagtggatcccccgggctgcaggaattcgatatcaagcttatcgataccgtcgacctcgagggggggcccggtacccagcttttgttccctttagtgagggttaattgcgcgcttggcgtaatcatggtcatagctgtttcctgtgtgaaattgttatccgctcacaattccacacaacatacgaaccgggagcataaagtgtaaaagcctggggtgcctaatgaagtgagctaactcacattaatttgcgttgcgctcatgcccgctttccagtcggggaaacctgtcntgccancttgcattaatgaatcgcccaacncccggggagaggccggtttgcgtattggggcgctnttccgctttcttgcttanttgacttcgctgngcttggccgttcggctggcggnngagcggttttaagctaattcaaangcgnnattacggttttcccnanaaatcnggggatacccnaggnaannacatntngagcaaanggcnngcaaaaaggcccgnaacctgtaaaanggcccgtttnntggggntttttcataaggcttcgccccctgnncangcntanaaaaatngcnccttnnanntaaangggggaaaaacccccnggggttttaangaaaccaagggtttnccnnggaaaattcntgggcctttctttttcaaccntncct

SEQ ID NO: 4720 - DNA, 419 bp, Homo sapiens
  misc_feature 5: n = A,T,C or G
gagcnccgccgtaatacgacctcactatagggcgaattggagctccaccgcggtggcggccgggggccattgagactgccatggaagacttgaaaggtcacgtagctgagacttctggagagaccattcaaggcttctggctcttgacaaagatagaccactggaacaatgagaaggagagaattctactggtcacagacaagactctcttgatctgcaaatacgacttcatcatgctgagttgtgtgcagctgcagcggattcctctgagcgctgtctatcgcatctgcctgggcaagttcaccttccctgggatgtccctggacaagagacaaggagaaggccttaggatctactgggggagtccggaggagcagtctcttctgtcccgctggaacccatggtccactgaagttcct

SEQ ID NO: 4721 - DNA, 868 bp, Homo sapiens
  misc_feature 2, 4, 12, 19, 20, 22, 25, 26, 31, 35, 40, 88, 435, 509, 523,534, 546, 590, 616, 629, 633, 643, 650, 657, 665, 666, 674,677, 680, 693, 695, 701, 705, 710, 715, 719, 720, 726, 727,730, 737, 738, 741, 742, 745, 746, 748, 752, 753: n = A,T,C or G
  misc_feature 763, 768, 769, 771, 777, 779, 780, 786, 791, 797, 805, 806,813, 817, 818, 821, 822, 824, 826, 828, 831, 836, 837, 838,842, 843, 845, 850: n = A,T,C or G
tngncactcgtnatcgacnncnatnnggagntccnccgcngcggcggccgcccgggcaggtacattggtgcatgttttataaacccanacacagatagctaaaaccataattagtttttctatacccagagctttgaattaaaaacagatgctttttttttccccaagagcagacagttctacattcctaacattaggaattggtgatacgagaagcaggatccagaattcagaatgatttagcgagactcggtgaaaaaaatgcattttcccctggctgtttgaaaatttacttatttgcagataagtctagatttagccttggagatcaaagtcttttatattttaaaaacttattctttatattgatcaaacatggcatatgttagagaaccacttcttctgtcatgtttatgtattttggaattaagttgnttgcattcactttcaaaatctgcccatttctgtttatgtgcacttaccacagatgtgtcgggactttgccttangggagagggacttnagaccattctncttccccatggncttggtgctgaagttggtatggcacctgcccattccagttccangaatgggcttaggatcaaagggtggntatcactccaaancttnaccacacgangcaaganggaaacnggcccccnnaagatganctnccntgctaattccttnanaagggnccantctgnaaatncccnntgggcnnggnatgaccnnggnnttnngncccnnaatttttggnttccnncncacaancnnggcccnggaangggccncccccaanntccctgncttnnggnntngntngtncccannnaaannanttggnccccggggccctgggaaa

SEQ ID NO: 4722 - DNA, 404 bp, Homo sapiens
cgtatacgactcactatagggcgaattggagctccaccgcggtggcggccgggggccattgagactgccatggaagacttgaaaggtcacgtagctgagacttctggagagaccattcaaggcttctggctcttgacaaagatagaccactggaacaatgagaaggagagaattctactggtcacagacaagactctcttgatctgcaaatacgacttcatcatgctgagttgtgtgcagctgcagcggattcctctgagcgctgtctatcgcatctgcctgggcaagttcaccttccctgggatgtccctggacaagagacaaggagaaggccttaggatctactgggggagtccggaggagcagtctcttctgtcccgctggaacccatggtccactgaagc

SEQ ID NO: 4723 - DNA, 852 bp, Homo sapiens
  misc_feature 11, 14, 18, 21, 25, 471, 501, 509, 517, 530, 546, 550, 557,576, 589, 599, 610, 612, 642, 647, 651, 666, 670, 671, 706,714, 736, 738, 765, 768, 790, 799, 800, 805, 806, 815, 816,826, 832, 840, 846: n = A,T,C or G
ccgtatggacnatngacntantatngggctgattggagctccccgcggtggcggccgcccgggcaggtacaccctcaaagggagttccagggttgttggccatcttctgccaaaggcgctgctcttccccctgagagtccatccaatccacgttcttcccatggctcacaccacttccagaattcaaacgaactcctcccagaaagatgttgctggaaaaggcctccttgtcccagatagtaagttctaggcaaacattctttatatcctggggatggatgccactgaacatgaatgtatgattccactgagggttaacactcttttttattaccagagttttgtgcttggtggttttgctatcatcagggagcaggtaagcccttcacaaagctatcagaagtgcctcctgacttcactgctgtcaaattctttgcctctttgatgaacacttctagtattcctccaganattacaggtgactccttcttctttcccttnttaaaaantcttattnccttggagtggtnctggtggaagcatcangttntcttctnggggaatgtaacgtaaaanactgtaagctctntttgttttgnaagccaatatnangagccaacttcaactttggtttgaagcacnaaccnactnattaattggattttnaaanntccattaggtcaaaaaggaatttttctttccccgnggaacctnttccgttccaaattgatataangnccgacttgaaactttcaaaaattttgnttnccactggggaatagggtgatanggtaccccnnccggnntaaaaatannggattccccngcttgngggaattnattttnagcttt

SEQ ID NO: 4724 - DNA, 875 bp, Homo sapiens
  misc_feature 1, 5, 10, 11, 12, 132, 151, 152, 205, 216, 259, 261, 280,281, 291, 295, 302, 303, 304, 311, 315, 316, 388, 398, 419,422, 427, 428, 445, 464, 483, 487, 496, 497, 498, 514, 531,533, 548, 555, 570, 571, 572, 581, 598, 607, 626, 633: n = A,T,C or G
  misc_feature 656, 665, 666, 668, 677, 680, 708, 722, 736, 742, 745, 747,756, 766, 770, 771, 787, 810, 814, 819, 821, 822, 826, 828,830, 842, 848, 849, 850, 871, 873: n = A,T,C or G
natgngtatnnnactagtatgcggcgcgtaatacgactcactatagggcgaattggagctccaccgcggtggcggcccgaggtacctacaagacatcttaaattctaccatgagcaaatttccaaagaaganaaaaggattttggaaccannatctccactcccagcacgcctgatggctcgaatgaacatttcagccagccagnatgaagaccancaaaacccatcaagcgagcccaccaacttggggacagatcagnangctgacccaccttgcacannataacctganaacncaacaannnccactancctnnagtaacctgatggtagctatgattgcggtaattaccatggtgtctgcacatgcggaagatgcctctggaganagaccagacnccacgaacaagtcttattatnagnggcanntttaaaaaataaaaaangggggcatgttgggaaaanggcttacagggtgcctgcnttanctggccatnnnaacatgggacagtttnttgtggaacgcctcctnangactctgaggagganagccttnttatctccattaagnnnccatgctcntaacccaacctgctgtnttatttatnaacccttgggctcaaaaanaaagacncttcctttgaagccttggaatgngggttaaanntncccgcttcnaangtaagcccactcccaccacttactaaanatcggttggtttanccccaaggaaatcncttaanccncnctggtgccnatatgtgttnaaanncctgcccggccggcgntttaaactttggatcccccggcntgcnggaantnnaaanancntatggtaccgtnaacctnnnggggggccggtcccccttttntnct

SEQ ID NO: 4725 - DNA, 916 bp, Homo sapiens
  misc_feature 601, 608, 635, 679, 681, 688, 703, 708, 710, 731, 756, 762,763, 765, 778, 781, 783, 784, 790, 825, 828, 829, 848, 856,859, 871, 875, 900, 910, 915: n = A,T,C or G
tacgatacgactactatagggcgaattggagctccccgcggtggcggccgcccgggcaggtacaggagccctgatagccatactcgcctgtgtcttgacattattggtgttgatcctccttatcgtcactatgagaagacggaaaaaagagccccttatttttgacgaagaaagagacatcagagaaaatattgtgagatacgatgacgagggcgggggagaggaggacacggaagcgtttgacatggctgcactgagaaacctcaacgtcatccgagacaccaagacccggagggatgtgactccagaaattcaattcctgagtcgaccagcttttaaaagcatcccagataatgtcatctttagggaatttatttgggaaagattaaaagaagcccgatgttgatcctggtgctcctccttatgactccctgcagaccatatgcttttgaaggaaatggctcaatttgctgaaatcactcagctctttagattccatcagctcaaactctgatcagaactatgactacctaagtgactgggggacctcgctttaaacgactcgcggacatgtatggggactggcccagaaagtttggtnccttggnccgttctagaactagtgggatcccccnggctgcaaggaatttcgatattcaagcttatcggattcccgccnanccttganggggggggcccggtncccancnttttggttccctttaagtgangggttaattggcgcgccttgggggntaatcnntngggcatagcttgnttncnngggggnaaattgttttccggttcacaattccacacaacatnccnngcccggggggccttaaaangttaaagnccngggggggcctantggngggagcctacctccaatttaattgngttgggcccnactgnt

SEQ ID NO: 4726 - DNA, 910 bp, Homo sapiens
  misc_feature 2, 341, 342, 343, 344, 345, 346, 347, 348, 349, 350, 351,352, 353, 354, 355, 356, 357, 358, 359, 360, 361, 362, 363,364, 365, 366, 367, 368, 369, 370, 371, 372, 373, 374, 375,376, 377, 378, 379, 380, 381, 382, 383, 384, 385, 386: n = A,T,C or G
  misc_feature 387, 388, 389, 390, 391, 392, 393, 394, 395, 396, 397, 398,399, 400, 401, 402, 403, 404, 405, 406, 407, 408, 409, 410,411, 412, 413, 414, 415, 416, 417, 418, 419, 420, 421, 422,423, 424, 425, 426, 427, 428, 429, 430, 431, 432, 433: n = A,T,C or G
  misc_feature 434, 435, 436, 437, 438, 439, 441, 442, 443, 444, 445, 446,447, 448, 449, 450, 451, 452, 453, 455, 456, 457, 458, 459,460, 461, 462, 463, 464, 465, 466, 467, 468, 469, 470, 471,472, 473, 474, 475, 476, 477, 478, 479, 480, 481, 482: n = A,T,C or G
  misc_feature 483, 484, 485, 488, 489, 490, 491, 492, 493, 494, 495, 496,497, 498, 499, 500, 501, 502, 503, 504, 505, 506, 507, 508,509, 510, 511, 512, 513, 514, 515, 516, 517, 518, 519, 520,521, 522, 523, 524, 525, 526, 527, 528, 529, 530, 531: n = A,T,C or G
  misc_feature 532, 533, 534, 535, 536, 537, 538, 539, 540, 541, 542, 543,544, 545, 546, 547, 548, 549, 550, 551, 552, 553, 554, 555,556, 561, 562, 563, 565, 566, 567, 568, 569, 570, 571, 572,573, 574, 575, 576, 577, 580, 581, 582, 583, 584, 585: n = A,T,C or G
  misc_feature 586, 587, 588, 589, 591, 592, 593, 594, 595, 596, 597, 598,599, 600, 601, 602, 603, 604, 605, 606, 607, 608, 609, 610,611, 612, 613, 614, 615, 616, 617, 618, 619, 620, 621, 622,623-717, 719, 721-771, 773-774, 776-910: n = A,T,C or G
gngacgcgcgtaatacgactactatagggcgaattggagctccaccgcggtggcggcccgcccgggcaggtactgaaaccagccggctgctttggcgccagagggctcaacctccactcactcagacccactgcgttctgcccctcgcaggagggagtgcgcatatgagtgggtgccggaacggcgtctagaactagtggatcccccgggctgcaggaattcgatatcaagcttatcgataccgtcgacctcgagggggggcccggtacccagcttttgttccctttagtgagggttaattgcgcgcttggcgtaatcatggtcatagctgtttcctggannnnnnnnnnnnnnnnnnnnnnnnnnnnnnnnnnnnnnnnnnnnnnnnnnnnnnnnnnnnnnnnnnnnnnnnnnnnnnnnnnnnnnnnnnnnnnnnnnntnnnnnnnnnnnnnannnnnnnnnnnnnnnnnnnnnnnnnnnnnnnaannnnnnnnnnnnnnnnnnnnnnnnnnnnnnnnnnnnnnnnnnnnnnnnnnnnnnnnnnnnnnnnnnnnnggggnnncnnnnnnnnnnnnnttnnnnnnnnnntnnnnnnnnnnnnnnnnnnnnnnnnnnnnnnnnnnnnnnnnnnnnnnnnnnnnnnnnnnnnnnnnnnnnnnnnnnnnnnnnnnnnnnnnnnnnnnnnnnnnnnnnnnnnnnnnnnnnnnnnnnnnnnnangnnnnnnnnnnnnnnnnnnnnnnnnnnnnnnnnnnnnnnnnnnnnnnnnnnnannannnnnnnnnnnnnnnnnnnnnnnnnnnnnnnnnnnnnnnnnnnnnnnnnnnnnnnnnnnnnnnnnnnnnnnnnnnnnnnnnnnnnnnnnnnnnnnnnnnnnnnnnnnnnnnnnnnnnnnnnnnnnnnnnnnnnnn

SEQ ID NO: 4727 - DNA, 893 bp, Homo sapiens
  misc_feature 2, 9, 12, 412, 556, 586, 587, 594, 637, 662, 687, 697, 701,722, 756, 761, 765, 768, 776, 777, 780, 797, 818, 821, 823,833, 835, 838, 841, 844, 845, 848, 850, 852, 853, 872, 878,879, 890: n = A,T,C or G
tnatagcgnctnctatatcgactactatagggcgaattggagctccccgcggtggcggccgtccgggcaggtacgcgggatgccaagattctcctgaaaagacaagatcccaaaagtgctgttagccacaaaatccttgaatcctgggttggtcgaggacttgtgaccctggatggttctaaatggaaaaagcaccgccagattgtgaaacctggcttcaacatcagcattctgaaaatattcatcaccatgatgtctgagagtgttcggatgatgctgaacaaatgggaggaacacattgcccaaaactcacgtctggagctctttcaacatgtctccctgatgaccctggacagcatcatgaagtgtgccttcagccaccagggcagcatccaagttggacagtacctcngccgctctagaactagtggatcccccgggctgcaggaattcgatatcaagcttatcgataccgtcgaccttgaagggggggcccggtacccacttttgttccctttagtgaggggttaattgcgcgcttggcgtaatcattggncataagcttgtttcctgtggtgaaaattgnnattccgntcacaatttcacacaaacatacgagcccggagcataaaagtgntaaagcctggggtgcctaatgaggngactaacttacattaattgcgttgngctcaactgnccgnttttccagtcgggaaaacctngcgtggccaacttgcttaaatgaatcgggccacncccgngganaangcggtttnngtnttggggcgctttttccncttacttggttaattaattanttngncttcggtctntnggnttnggnnaancngnnttaacttcaattaaaaggngggaanncggttttcccnaat

SEQ ID NO: 4728 - DNA, 921 bp, Homo sapiens
  misc_feature 372, 374, 402, 431, 466, 468, 532, 631, 640, 647, 657, 675,678, 698, 702, 724, 725, 735, 740, 741, 760, 779, 792, 794,805, 809, 810, 814, 843, 853, 863, 866, 867, 870, 886, 887,889, 896, 903, 909, 910: n = A,T,C or G
cgaattggagctccacccgcggtggcggcccgcccgggcaggtacgcgggtgatgattaaatgcaaccaaaatacaggtagtttctatgaattaggagttcatagcatcttctaaagcacagaattctgaatagaactcatccaggtgagaagcagaacattctaaagcagctttcagtttctttaacttggagtctccaactccaattcagaattattcttcctcatgccagtctccaggagcagcctggcccaggcttcaagagtaatacctcaagtctactttcaaaagattcccaaagactgttttttccctcacttgttttgattggatctcatttcaaagagggccttttctaagactgcaggtgntngttttatggtaatctgcttaagtttctnatgaagtgacaggagtttgccattcaccngtctttggccatacaaagtctgcaacaagactgancnttgcactgttgtacctcggccgctctagaactagtggatcccccgggctgcaggaattcgatancaaagcgtatcgatcccgtcaacctcgagggggggcccggtacccagcttttgttccctttagtgaggggtaattggcccgcctggcgtaatcattggncatagctgnttcctgngtgaaattgnttttccgcttcacaattnccncacaacaatacgagcccggnagcntaaaagtgtaaaagcccggggnngcctaatggngtganncttacctcacatttaattngcgttggcgcctcacctgnccgcttttccagncngggaaacccgntcgnngccnacctgcattaattggattcggccaacccnccggggagangcgggtttgngtnnttnggcgcttttccccttnntngttaatnaattccntggctnngtcgtctggtg

SEQ ID NO: 4729 - DNA, 900 bp, Homo sapiens
  misc_feature 7, 10, 372, 471, 477, 511, 530, 542, 550, 592, 593, 602,625, 649, 682, 686, 703, 729, 742, 746, 747, 755, 756, 764,765, 780, 790, 794, 803, 804, 833, 841, 842, 843, 853, 855,877, 883: n = A,T,C or G
acgactnacncgcgtatacgactactatagggcgaattggagctccaccgcggtggcggcccgcccgggcaggtacttaactagggttagccgaggtcaggagggtggatgccttattatgggattagtgcccttctaagagggacagtagagggcttgttcatgctctctctctccatgcacaagaaagagcacacagtgagaaggaaagaggccctcaccagaacctgaccatgctggcaccgtgattgcagacttccagcctccaggattgtgagaagataaatatctgtggtttaagtcaccaagtctgtggtgtgttttatggcagcacaagggaacccagatgatgcttttcaccactgggtggtncagccctttcatggaagctgtcagctccccagccttgtaaaaaatgcttgctggtcactctctttggtcctttcaaaatcctttcttaagtggtgcctntaccangcccttgacttcatccttttctgtcaaaaggaangggtgagtaaaagacctcnggccgctcttanaactagtnggatccccccgggcttgcaggaattcgatttcaaacttatcnntacccgccnacctctaagggggggcccgggancccaacttttgttcctttaatgangggtaaattgccccccttggggtaaataatggncaanacctgttttcctgtggngaaaatggttattcccttacaaattncacaccaacatanccanncccgggannaataaaanngtaaaaacctggggnggcctatgangggncttacccannaataaattggtttgggctcacctggcccnctttttannngggaaaactntntggccactttatttataaaatncccacnccccgggaaagggggtt

SEQ ID NO: 4730 - DNA, 896 bp, Homo sapiens
  misc_feature 390, 503, 583, 604, 608, 619, 643, 668, 704, 719, 722, 741,748, 750, 758, 774, 792, 798, 809, 815, 816, 830, 832, 833,855, 865, 871, 876, 886: n = A,T,C or G
gcgcgtaatacgactcactatagggcgaattggagctccaccgcggtggcggcccgcccgggcaggtaccagaggaggagatggatgatcagagccctgcacctgtttcctgcaccccctgcccactggttctatggccacaaggagttttacccagtaaaggagtttgaggtgtatcataagctgatggaaaaatacccatgtgctgttcccttgtgggttggaccctttacgatgttcttcagtgtccatgacccagactatgccaagattctcctgaaaagacaagatcccaaaagtgctgttagccacaaaatccttgaatcctgggttggtcgaggacttgtgaccctggatggttctaaatggaaaaagcaccgccagattgtnaaacctggcttcaacatcaagcattctgaaaatattcatcaccatgatgtctgagagtgttcggatgatgctgaacaaatgggaggaacacattgcccaaaacttcaccgttntggagcttcttttaacatgtcttcctgatgaccctggacagcatcatgaagtgtgcctttaaccaccaagggcagcattncagttggacagtacctcgggnccgntctaaaactangtgggatccccccgggcttggcangaatttcaatattcaagccttttcnatacccgccgaccctccaagggggggggccccggtnccccaactttttttnttnccttttaattgaagggttnaattgcncncctttggnggtaaatcatggggcnttagcctggttttccttnggttgnaaaattgttanttccgnntcaacaattttccncnncaaacatacccaaacccggggngccattaaangtgttnaaagncctggggggngccttaatga

SEQ ID NO: 4731 - DNA, 886 bp, Homo sapiens
  misc_feature 475, 484, 498, 499, 500, 503, 504, 507, 580, 588, 596, 597,603, 604, 618, 623, 627, 646, 650, 658, 670, 677, 680, 684,686, 692, 693, 698, 703, 707, 717, 723, 725, 727, 733, 742,744, 749, 754, 759, 764, 777, 785, 787, 792, 803, 833: n = A,T,C or G
  misc_feature 836, 851, 852, 857, 868, 874, 884: n = A,T,C or G
gactcactatagggcgaattggagctccccgcggtggcggccgcccgggcaggtaccatatcagtggagagctgcagcaaggtggcccctagagccacgcaccagcccgcacattgcctctccatacggcagccctttatttggaaacttcctaaatcactttgctgtgtgtgtttacacgggtgggttttgctttacttgccctgagagcacacgggagtgcagcacacaccccaacccacatcaactgccattaaagaaaagaaatttcagcccagaatttcatgtccagcaaaattaagcatcataagtgaaggagaaataagatccttttcagacaagcaagtgctgagggaatttggtatcaccagatctaccttacgagagctcctgaaggaagcactaaatatggaaagaaaagatcatcacctgctactacaaaaacacactgaagtacctcggccgaggtactttnatttctttntttttttttttttnnnggnnttngtttttaaaaaatcgatctcttttaatttttaggccaattttgagtagtcaaaagtcagacaggtcaattttntgtttgtngagccgannacacanncttgcaaaaaaccntgttntganggtgtcccggggggagggngggnagcccgancttcttggggantaatcanccntgcntnggggannggccnccctngttnagggattcanggccanantncccctngcaaaaaantnttttnaaaanttcanacctnccttttttggggnggggcccncntatgngtttttggagnaaaaaaaccccggggggcccccccaaaccnggntttttttaaaaaacnnccccnttttttttccnccctgngggggggggngg

SEQ ID NO: 4732 - DNA, 928 bp, Homo sapiens
  misc_feature 16, 20, 393, 517, 569, 570, 590, 628, 629, 636, 638, 649,662, 687, 691, 699, 706, 716, 731, 744, 759, 772, 774, 779,780, 782, 783, 786, 791, 792, 797, 798, 799, 801, 806, 809,817, 818, 819, 834, 841, 842, 847, 868, 870, 874, 875: n = A,T,C or G
  misc_feature 878, 879, 881, 884, 887, 892, 893, 906, 907, 909, 915, 925,928: n = A,T,C or G
tatagggcgaattggngctncaccgcggtggcggccgcccgggcaggtacaaaggaatatgacgtgcttttctccagaatctgagggtcaaaaagtcccagtgactcaggatacattacagaggagtgtagcataaagatgattggttatccatctaaaagagacgggaaaaagtgtcccttagtccctctctgtcttccagggaaaacccagtgtgtgtgatggagagaagaaaagtgtcctctttttccttccattcttatatcgctgagtctggcgactctgtgtacctcgaccgctctagaactagtggatcccccgggctgcaggaattcgatatcaagcttatcgataccgtcgacctcgagggggggcccggtacccagcttttgntccctttagtgagggttaattgcgcgcttggcgtaatcatggtcatagctgtttcctgtgtgaaattgttatcccgctcacaaattccacacaacattacgagcccggggagcataaaagtgtnaaagcctgggggtgccctaaatgagtgagctaaacttcacaatttaatttgnngttgcgccttcacttgcccnggcttttcccagtccggggaaaaccctgtccgtgcccnngccttgnanttaaatggaantccggccccaacncccccggggggaagaaaggcccggntttngcgtattnggggccnctctttcccnctttccttcggcttnaacttgaacttcnatttgcgcctcgggncgttcccgggttngngggcnnannggnttttnngcttnnntncaaanggngggttaannncgggtttttccccanaaattcnnggggnaaaaacccccggggaaaaaancntggnntgnnanaanggncccgnnaaaaagggccaannancccttnaaaaaggccnttn

SEQ ID NO: 4733 - DNA, 411 bp, Homo sapiens
  misc_feature 8, 12, 15, 25, 26: n = A,T,C or G
cgcgtatngacntantatgttggcnnattggagctccaccgcggtggcggccgggggccattgagactgccatggaagacttgaaaggtcacgtagctgagacttctggagagaccattcaaggcttctggctcttgacaaagatagaccactggaacaatgagaaggagagaattctactggtcacagacaagactctcttgatctgcaaatacgacttcatcatgctgagttgtgtgcagctgcagcggattcctctgagcgctgtctatcgcatctgcctgggcaagttcaccttccctgggatgtccctggacaagagacaaggagaaggccttaggatctactgggggagtccggaggagcagtctcttctgtcccgctggaacccatggtccactgaagttcctt

SEQ ID NO: 4734 - DNA, 927 bp, Homo sapiens
  misc_feature 3, 121, 374, 564, 658, 722, 724, 738, 739, 752, 761, 762,765, 766, 778, 794, 796, 806, 811, 813, 814, 819, 820, 832,843, 847, 850, 860, 878, 889, 896, 902, 905, 908, 913, 917,921, 925: n = A,T,C or G
acncgactactatagggcgaattggagctccaccgcggtggcggccgcccgggcaggtacccgagaacctatgttggttgttactggtggcctgattcttgggcctcaaggcggcttgctnagatgccagtagtggcaggggtagaggggttctcaggctcctagatagctgctgtggcatgggcaatagcagtagccatggcaagatgatttctctgggtcctaatctgtgtgcattgatattggcagtaagctgtgatgggctgggcgggcctgtctccaggtccacagttggtgcttgcaggtatataccagctgaggaggtacctcggccgctctagaactagtggatcccccgggctgcaggaatttcnatatcaaagcttatcgataccgtcgacctcgagggggggcccggtacccagcttttgttccctttagtgagggttaattgcgcgcttggcgtaatcatggtcatagctgtttcctgtgtgaaattgttatccgctcacaattccacacaacatacgaagccgggagcataaagtgtaaagcctggggtgnactaatgaagtgagctaactcacattaattgcgttgcgcctcactggccgcttttccagtccgggaaacctgtcgtgccaacttcatttaatgnaatcggccaaccccccggggaagaggccggtttgcgtattggggcgcttttttcgctttccttngnttaacttgacttcnnttggcttcggccnttcgggttnnggnnaaccgtattaancttacttaaaaaggcngnaataccggtnttcanannaatcnnggggttaacccnggaaaaaaacntttnaancaaaaggccncaaaaggcccggaacctnaaaaaggcccntttttgntttttncanagntcccncccntganaaantt

SEQ ID NO: 4735 - DNA, 874 bp, Homo sapiens
  misc_feature 162, 373, 378, 454, 458, 520, 525, 532, 544, 554, 556, 558,569, 574, 587, 597, 604, 606, 621, 632, 645, 656, 664, 673,675, 684, 687, 697, 706, 717, 725, 730, 771, 782, 786, 791,798, 799, 803, 805, 808, 817, 821, 843, 854, 858, 870: n = A,T,C or G
tggccttatccactactatagggcgaattggagctccaccgcggtggcggccgttccggcacccactcatatgcgcactccctcctgcgaggggcagaacgcagtgggtctgagtgagtggaggttgagccctctggcgccaaagcagccggctggtttcantacctgcccgggcggccgtctagaactagtggatcccccgggctgcaggaattcgatatcaagcttatcgataccgtcgacctcgagggggggcccggtacccagcttttgttccctttagtgagggttaattgcgcgcttggccgtaatcatggtcatagctgtttcctgtgtgaaattgttatccgctcacaattccacacaacatacnaaccnggaagcataaaatgtaaagcctgggggtgcctaatgaagtgaacctaactcacattaattgcgttgcgctcactgnccgntttccagtcgggaaaaccttgtcgtgccagctgcattaatgaatcggccaacccccgggaanaggcngtttgcntattggcccctnttccgtttcntncntaattgacttngttgncctcggtccttcngcttgcggcnagcggtntnacttactcaaaggcngtaataccggntttccaaaaaatnaggggataacncaggaaanaacattttnancaaaaggcngcnaaagggccangaaccctanaaaggccccgntgcttgcnttttnccataagctccccccccctgacaagcttaaaaaaattgacncttaaagtaanaggnggggnaaacccnnaggncnttnaaaaaaccnggcntttccccctggaaacctccctntgcccctttcntttnccaaccttcccnttat

SEQ ID NO: 4736 - DNA, 818 bp, Homo sapiens
  misc_feature 2, 3, 4, 5, 7, 658, 664, 683, 696, 733, 740, 763, 809, 818: n = A,T,C or G
gnnnncncgcgtaatacgactcctatagggcgaattggagctccaccgcggtggcggccgaggtacaagaaacagaaatacgtctttatgttaactgttagtgaggcaaagcaacgcccatgaagacctaagggaaaacctaaagggaaaaaaaggaaacccaacctaaaagaaaaaaaagataggggaggcaagaggaggcaaagagagacaaaggaagacaccacagagaacaggaaagcaaaagaaaaggagaaaatacaggagaattggtagaagaaattataggtaaaataaatgtgaggaactgaatgtgggaggctacagagtgccaaaagaaattagcttaaatagccaggcaaggtggtgtgtgcctgcagtcccagccactccaggggctgaagcaggagaatcagaccacaggcatgcaccaccatgcccagccaattttttttttttgtatctttagtagagacaggccttcaccatgccggccaggctggtctcaaactcctgacctcaagtgatgcgcctgcctcagcctcccaaagtgctgggattacaggcgtgagccaccgccccagcctctgtctcatttttaaaataaaaatgtaaaaaaaaaaaattattcaaagaaattggcttaagtacctgcccnggcggncgctctaaactagtggatnccccgggctgcangaattcgatttcagcttttcgattccgcgacctcganggggggnccggtcccacttttgttccttantgagggtaattgcccctggcgtaatcatggcatactggttcctggngaaattgtn

SEQ ID NO: 4737 - DNA, 865 bp, Homo sapiens
  misc_feature 605, 637, 655, 707, 717, 726, 733, 734, 749, 762, 765, 773,775, 792, 820, 840, 852, 855, 856, 859: n = A,T,C or G
gcgcgtaatacgactcactatagggcgaattggagctccaccgcggtggcggccgcccgggcaggtacggagagtggatggcccttctcactagtatttctttttgaaagatgtatgtggccgggcacagtggctcacacctgtaatcccagcactttaggaggccaaggtgggcagatcacctgaggtcagaagttcaaaaccagcctggccaacatggcaaaacccaatgtctattgaaaatacaaaaattagcagggcgtggtggtgggtgcttgtaatcccagctacttgggaggctgaggcaggagaatcgcttgaacccggggggtggaggttgcagtgagccgagattgcaccactgcactccagcctgggcaacaagagcgaaactccatctcaaagaaaaaaaagatgtatgcttcattttgtgacttacagagaatttactttggtttttgcctgctcatggtttttggcttttggcaaaaccatttcctgtgtggcttttcctgatgtgcctttcttgttcctgtgactgtttgggtggaactattagaggagtgtctcttccagtccacctaatcaaaatcactgaaaatgangcctaaagggtttcatttaaaacaaaccaccnaaaaaaaaaaaaaaaaanggaaaaaggaaaaagttccctcgggcccgcttcttaaaaactaagtgggatncccccgggcnttgcaaggnaatttcnnatattcaaacctttnttcgattacccgnccnaaccttcnanggggggggcccccggtnccccaacctttttgtttcccttttaatngaaggggtaaattggccccncttggccgtaancannggncaataa

SEQ ID NO: 4738 - DNA, 599 bp, Homo sapiens
  misc_feature 599: n = A,T,C or G
gtaatacgactcactatagggcgaattggagctccaccgcggtggcggccgaggtaccaggatggactgcaggcggtatttgactgggtagatagtgcaggtggtaaattagcttcaatgtctccaattggaacagatctcgaaactgtcaagcagcagattgaagagctaaagcaatttaagtctgaggcctatcaacagcagatagaaatggaaagactgaatcatcaagcagagcttttgctaaagaaagtaacagaagagagtgacaaacacactgttcaagacccattaatggaactgaaattgatatgggatagcctggaggagagaatcatcaacagacagcataaactggagggtgctctattagccttgggtcagttccaacatgccctggatgagctcctggcatggctgacacacaccgagggcttgctaagtgagcagaaacctgttggaggagaccctaaagccattgaaattgaacttgccaagcatcatgtgctccaaaatgatgtattagcccatcagtccacagtggaagccgttaataaagcaggaaatgatctaattgaatcaagtgcagggagaagaan

SEQ ID NO: 4739 - DNA, 658 bp, Homo sapiens
  misc_feature 530, 549, 551, 552, 555, 569, 577, 600, 619, 640, 645: n = A,T,C or G
ctcactatagggcgaattggagctccaccgcggtggcggccgaggtacgaatgctctcttctcctcttaccagcatcatccgaacactctcagacatcatggtgatgaatattttcagaatgctgatgttgaagccaggtttcacaatctggcggtgctttttccatttagaaccatccagggtcacaagtcctcgaccaacccaggattcaaggattttgtggctaacagcacttttgggatcttgtcttttcaggagaatcttggcatagtctgggtcatggacactgaagaacatcgtaaagggtccaacccacaagggaacagcacatgggtatttttccatcagcttatgatacacctcaaactcctttactgggtaaaactccttgtggccatagaaccagtgggcagggggtgcaggaaacaggtgcagggctctgatcatccatctcctcctctggtacctgcccgggcggccgctcggctctagaactagtggatcccccgggctgcaggaattcgatatnaagcttatcgataccgggngnnctnaaggggggggcccngtcccagnttttggtccctttaaagagggcnatttgcgcgctgggaaccngtcatggccatatgcttttantctantgtggacaacgcc

SEQ ID NO: 4740 - DNA, 738 bp, Homo sapiens
  misc_feature 479, 482, 565, 580, 617, 629, 641, 643, 651, 657, 737: n = A,T,C or G
gactcactatagggcgaattggagctccaccgcggtggcggccgcccgggcaggtacttaagccaatttctttgaataattttttttttttacatttttattttaaaaatgagacagaggctgggcgcggtggctcacgcctgtaatcccagcactttgggaggctgaggcaggcgcatcacttgaggtcaggagtttgagaccagcctggccggcatggtgaaggcctgtctctactaaagatacaaaaaaaaaaattggctgggcatggtggtgcatgcctgtggtctgattctcctgcttcagcccctggagtggctgggactgcaggcacacaccaccttgcctggctatttaagctaatttcttttggcactctgtagcctcccacattcagttcctcacatttattttacctataatttcttctaccaattctcctgtattttctccttttcttttgctttcctgttctctgnggngtcttcctttggctctctttgcctcctcttgcctcccctatcttttttttcttttagggtgggtttcctttttttccctttangtttttcccttaagncttcaatgggccgttgcttttggcctcactaaacagnttaacataaaanaccgtatttctngnttctttgnaccttnggcccgcttctaaaaactaagtgggaaccccccgggctgcaaggaatttcgaatattcaaaccttaatcgaaacccggcna

SEQ ID NO: 4741 - DNA, 594 bp, Homo sapiens
  misc_feature 384, 451, 486, 492, 500, 501, 502, 510, 513, 517, 540, 545,570, 575, 579, 587, 590: n = A,T,C or G
gggcgaattggagctccaccgcggtggcggccgcccgggcaggtacttttagtggagacggggtttcaccgtgttggccaggatggtctcgatctcctgaccttgtgatctgcccgcctcagcctcccaaagtgctgggattacgggtgtgagctgccgcacccggccgctctagaactagtggatcccccgggctgcaggaattcgatatcaagcttatcgataccgtcgacctcgagggggggcccggtacccagcttttgttccctttagtgagggttaattgcgcgcttggcgtaatcatggtcatagctgtttcctgtgtgaaaattgttatcccgctcacaatttccacacaacatacgagcccgggagcataaagtntaaagcctggggtgcctaatgagtgagctaactcacattaattgcgttgcgctcactgcccgctttncagttcgggaaacctgtcgtgccagctgcattaangaattnggccaacnnnccggggangangccngtttgcgttatatgggccgctcnttacngctttactaggttaactgacttcgnttgcncttncggtacgnatnccgg

SEQ ID NO: 4742 - DNA, 850 bp, Homo sapiens
  misc_feature 4, 6, 7, 17, 22, 23, 35, 39, 659, 700, 751, 766, 770, 783,788, 809, 816, 822, 825, 832, 849: n = A,T,C or G
agtngnngagccgcgcnttatnngacttacttttnggcngattggagctccaccgcggtggcggccgcccgggcaggtacaaaagaaccaaatggaggccaggcacagtggctcacacctgtaatcccagcacttcgggaggccgaggcaggtggatcaccagatcaggaaatcgagaccatcctggctaacacagtgaaaccccgtctctactaaaaatacaaaaaattagccgggcatggtggcgggcacctgtagtcccagctactcgggaggctgaggcaggagaatggcgtgaacccgggaggcagagcttgcagtgagcagagatcgcgccactgcactccagcctgggcaacagagcaaagagtctgtctcaaaaaaacaaaacaaaacaaaacaaaacaaatggaaattaaacaactgaaaaatacaaaaaccaaaacgaaaactcattggacaagctcaacagtagactgcatatggcagaaaaaaagaatcagctgaaaaaaagtcaacagaaattaaccaatatgaaaaaaagggaaaaatagaccagaaaaagggggtaaacatgaaagcccaagagacctctgagacagtaacaaaaagctctccattcttatccagagaggagaaagagttgggatgaaaaaatntttcagaaatatggttaaaattcccaaatttggcaaaggcntaacctacaattcaaaagcttaccaaaacccaccttgttccctcaaaaaantccttttcacccctntaanccaacttttgaancttcnaaaaaacaaaacctttgaacncggttgntaaaanggnccttttnacttgggacaatggttna

SEQ ID NO: 4743 - DNA, 896 bp, Homo sapiens
  misc_feature 341, 365, 370, 385, 424, 450, 451, 453, 456, 459, 487, 498,517, 568, 579, 586, 588, 591, 594, 596, 612, 631, 634, 668,683, 685, 692, 721, 722, 729, 738, 757, 759, 763, 784, 785,786, 797, 808, 829, 838, 839, 842, 847, 849, 852, 853: n = A,T,C or G
  misc_feature 856, 872, 873, 875, 880, 881, 887, 888: n = A,T,C or G
tatagggcgaattggagctccaccgcggtggcggccgaggtacttatataatgtggagcacacttgtggcaccacagccccccactaccagcttctgaagcagggagagagctttgccgtgcacacttgcaagagcaaatccacgaggaaccctctccttaagtggacggtgggcgagggggccctcaacgagtttgctttctccccagatggcaagttcttagcgtgcgtgagccaggacgggtttctgcgggtgttcaactttgactcagtggagctgcacggtacctgcccgggcggccgctctagaactagtggatcccccgggctgcaggaattcnatatcaagcttatcgataccgtcnacctngagggggggcccggnacccagcttttgttccctttaatgagggttaattgcgcncttggcgtaatcatggtcatagctgnntnctntgngaaaaatgttatccgcttacaattccanacaacattacnaagcccggggagcataaangtggtaaagccctggggttgcctaatgagtggagcctaactttacaatttnatttgggtttngcgcttnanttngancngggtttttccagttcngggaaaaaacttgtccttnccnaacctgcaatttaattgaaattctgtccaaaccncccccggaaaaaggncnggatttnccgtatttggggcgccttttttcagattnnttgcctncaatttaanttggctttgggctttgggncntttnggatttgagggggaaaccggnnnttaaatttcancttaaaaaggngggtgaataccggttttttcncaaaaaatnncangggantnacnncgnaaaaaaaccatttttnncnaaaanngcctcnnaaaaaggg

SEQ ID NO: 4744 - DNA, 909 bp, Homo sapiens
  misc_feature 496, 581, 596, 611, 662, 678, 696, 700, 706, 712, 725, 728,733, 735, 743, 745, 746, 758, 772, 782, 784, 789, 809, 815,816, 820, 822, 823, 824, 828, 832, 834, 836, 838, 841, 843,844, 851, 854, 870, 878, 880, 885, 887, 889, 894, 901: n = A,T,C or G
  misc_feature 907: n = A,T,C or G
atggggccgcgtaatcgactcactatagggcgaattggagctccaccgcggtggcggccgaggtacccagccaggatgcaattttaaatagggggttcgagctcagtaagaagggcatgttgaacaaagacagaagaagatgagcaagtgggccaagggtgtgagggaaggagagtcccacaaacagaagagcaagtataaaggtccacagtagggcctgtgcccagcgtgtctgaggaactgcagggaggcccatatggctggagaagagtgaggaatagggagaggagcagggatggggtcagagacaggatgagatggcagagtgtgcaggaggatgggagtgatcagtcagagttttgtggccatcgtaagaactttggatttttctctgaaatgggagtgattgtaggattttgagtaaaggagggacttgatctgacttagatatgaaatgagatctttggctcctctgtgtcaagaactgtgaaagttntgcttacaagctaacagcctgctgcagtttcacagatactagcagagacacggggcttcctggtcagagacaaaggacttttgtnaccacaacacagcanacagcgtgagccttnttatttccatccatccccccctttgctcccgtgagttcccattagggggtnggtttttggaagccancccttgtgggggtctttntgtnaataancttganggaacttctttantcntttangnaaaccccntnntttttttccaanggggaacttccttnacccaaattntngcccntaaacttttcccctgggaantaaagnnaaanannntttnattntncncngcncnnggaaaanaanaaaatttttttttccnaaaaaaantnacctntncnggggngggcccnttttanaa

SEQ ID NO: 4745 - DNA, 983 bp, Homo sapiens
  misc_feature 288, 339, 354, 370, 388, 390, 397, 429, 431, 432, 441, 451,454, 456, 460, 468, 470, 471, 477, 478, 481, 487, 490, 494,501, 506, 513, 514, 533, 536, 541, 542, 544, 546, 559, 562,571, 572, 579, 581, 588, 590, 594, 595, 598, 599, 600: n = A,T,C or G
  misc_feature 606, 607, 608, 609, 627, 631, 640, 641, 642, 644, 646, 661,671, 672, 674, 678, 683, 707, 713, 717, 718, 721, 733, 734,742, 751, 756, 759, 763, 765, 766, 769, 774, 779, 785, 793,797, 801, 804, 807, 808, 815, 817, 818, 821, 822, 823: n = A,T,C or G
  misc_feature 824, 825, 829, 838, 843, 844, 848, 852, 857, 867, 868, 875,887, 888, 892, 894, 900, 910, 911, 914, 919, 920, 921, 924,925, 926, 927, 928, 935, 936, 956, 960, 962, 964, 970, 971,975, 980, 981: n = A,T,C or G
gactactatagggcgaattggagctccaccgcggtggcggccgaggtaccacgttatctatcgcgagtgataaaccgcctctaaactttgtgacttcaaaaacacatattttgtttctgattctgcatgtcagcaatttaggttgggctcagaagggcagtgcttatcctattctgggtctcttatgtgtttgcagtcaactgcagattggcagggagggtttgcttcaggaggttggctggctgtccaccggggtccctcagttctctggcatgtatctttcacctncagcacgccagcctgggcttgttcatgatggcagtatttcggacagcaagnaaagtgcaggtggtnacaacacatactaccncgggatggcacattgcancncaagtangttctacaaagacgctaccttcccctttcatngnnggggccttntcaccttttnttngnttcncccccttnannaaaggnnttnattcgnacncctngggcccnaaatncttggtnnacccctttttccccccgcnttnaaaanngngnaatttcccgttanaanaatttcccnncccaaanancccttancngggnngannnaacggnnnnaaaaacccctggggggcncccnaaaattttnnngngngcataaactttcccnttaaatggcnntngggngcccncacttgccccatatttaacaaagntggggnaaannctntccccccccctnnaaaaaaanaaaaaaatngcccnaancttntnntcnctccncgggngggggntttattanaaanaaanttnttnnccccccncnnggnnnnngaanatttttatnactannattnattntaccncccccaaccnngggtggngttcccccccannccgncntttttntgtttttttnnaanagatnnnggnnnnncccccgnnagaaataattttttttaaantcgncncntttaanngtgntttanncc

SEQ ID NO: 4746 - DNA, 878 bp, Homo sapiens
  misc_feature 581, 611, 664, 690, 691, 710, 732, 735, 737, 739, 751, 768,769, 772, 773, 774, 786, 792, 797, 799, 814, 816, 818, 819,826, 827, 840, 842, 844, 849, 851, 852, 858, 859, 868, 871,875, 877: n = A,T,C or G
attggagctccccgcggtggcggccgaggtactaaatttacaaaatatctctgccaccaccaaaaccacaaaagtatgcttaatcttgctcttctaacatataagagtgacccagccatgagaaaaatgttgaatcatccatatttctatatcatgcctgtgtttaacgtcgatggataccattttagttggaccaatgatcgattttggagaaaaacaaggtcaaggaactcaaggtttcgctgccgtggagtggatgccaatagaaactggaaagtgaagtggtgtgatgaaggagcttctatgcacccttgtgatgacacatactgtggcccttttccagaatctgagccggaagtgaaggctgtagctaacttccttcgaaaacacagaaagcacattagggcttatctctcctttcatgcatatgctcaagatgttactgtatccctattcttacaaatatgcaacaattcccaattttagatgtgtggaatctgcagcttataaagctgtgaatgcacttcagtcagtatacggggtacctgccccgggcgggccgctcttagaaactaggtggntccccccgggcttgcaagggaattcgaatntccaagctttatcggatacccggccgaccctcgaaggggggggcccccggttnccccagctttttgtttcccctttaanntgaggggtttaattgcgcncctttgggcgtaaatcatgggncanangntggtttcctggngggaaaattggtatccnnttnnnaatttccccccnaaaatncaaancnggggagcataaaagngntnnaaccccnngggggggcctaangngnggagncnnacctcnntttatttgngtntggngnc

SEQ ID NO: 4747 - DNA, 423 bp, Homo sapiens
  misc_feature 2, 11, 329, 350, 368, 381, 396, 415: n = A,T,C or G
tncttagggcnaattggagctccaccgcggtggcggccgcccgggcaggtactactggcctctaggaggcagaggtcagagatgttgctaaaatacgcaagacagtcctacacgaccaagaatcatctgatctaaagtgtcaatagctccaagattgagaacccttggtctgtgtacctcggccgctctagaactagtggatcccccgggctgcaggaattcgatatcaagcttatcgatacccgtcgacctcgagggggggcccggtaccccagcttttttgttccctttagtgaggggttaatttgcgccccttgggcgtaatcatngggcatagctggtttccttgngtgaaattgtttttcccnttcacaaattccncacaaaaataccaancccgggagccttaaagggntaaaagcc

SEQ ID NO: 4748 - DNA, 347 bp, Homo sapiens
  misc_feature 1, 4, 6, 9: n = A,T,C or G
nggncnccntgccaagtggaaactctgttctgcttcagcaatatgcttcattttcatgattgcagaggtcgtgggtgggcacattgctgggagtcttgctgttgtcacagatgctgcccacctcttaattgacctgaccagtttcctgctcagtctcttctccctgtggttgtcatcgaagcctccctctaagcggctgacatttggatggcaccgagcagagatccttggtgccctgctccccatcctgtgcatctgggtggtgactggcgtgctagtgtacctcggccgctctagaactagtggatcccccgggctgcaggaattcgatatcaagcttatcgata

SEQ ID NO: 4749 - DNA, 787 bp, Homo sapiens
  misc_feature 14, 53, 72, 73, 74, 455, 496, 504, 509, 525, 542, 548, 570,620, 623, 654, 673, 688, 703, 717, 725, 730, 742, 753, 780,782, 786: n = A,T,C or G
ggccgaggtcccangccaggatgcaattttaaatagggggttcgagctcagtnagaagggcatgttgaacannnacagaagaagatgagcaagtgggccaagggtgtgagggaaggagagtcccacaaacagaagagcgagtataaaggtccacagtagggcctgtgcccagcgtgtctgaggaactgcagggaggcccatatggctggagaagagtgaggaatagggagaggagcagggatggggtcagagacaggatgagatggcagagtgtgcaggaggatgggagtgatcagtcagggttttgtggccatcgtaagaactttggatttttctctgaaatgggagtgattgtaggattttgagtaaaggagggacttgatctgacttagatatgaaatgagatcttttggctcctctgtgtcaagaactgtgaaagttctgcttacaagctnacagcctgctgcagtttcacaagatactagcagagacccgnggctcctngtcangagacaaaggactttntgaccacaacacagcangacagngtgagccttcttattcacattncatcccccttgctccgtgagtcccataaggggtggttttggagcaacccntgnggggtctgtgtcattagctgaaggaactctngatccttaagaaaaccccntactttttttcaaangggacttactaccanattcttgccccttnactttttnccctngaagttaagtcnaattttctttntttttccctgctcaagaaacaaattcngnttant

SEQ ID NO: 4750 - DNA, 827 bp, Homo sapiens
  misc_feature 652, 654, 700, 728, 730, 737, 757, 786, 788, 793, 819: n = A,T,C or G
ggagctccaccgcggtggcggccgaggtacgcctatgccaagtggaaactctgttctgcttcagcaatatgcttcattttcatgattgcagaggtcgtgggtgggcacattgctgggagtcttgctgttgtcacagatgctgcccacctcttaattgacctgaccagtttcctgctcagtctcttctccctgtggttgtcatcgaagcctccctctaagcggctgacatttggatggcaccgagcagagatccttggtgccctgctctccatcctgtgcatctgggtggtgactggcgtgctagtgtacctgcccgggcggccgctctagaactagtggatcccccgggctgcaggaattcgatatcaagcttatcgataccgtcgacctcgagggggggcccggtacccagcttttgttccctttagtgagggttaattgcgcgcttggcgtaatcatggtcatagctgtttcctgtgtgaaattgttatccgctcacaattccacacaacatacgagccgggagcataaagtgtaaagcctggggtgcctaatgagtgagctaaactcacattaattgcgttgcgctcactgcccgctttccagtcgggaaacctgtcgtgccagctgcattaatgaatcggccaacccncnggggagaagccggtttgcgtattgggccgcttttttccgcttcctngcttaactgacttcgcttgcgcttcggncnttcgggntgcggcgagccggtattaancctcacttcaaaaggcggggaataccggntntttcnacaaaaattcagggggataaacccanggaaaaat

SEQ ID NO: 4751 - DNA, 810 bp, Homo sapiens
  misc_feature 1, 2, 6, 7, 9, 12, 13, 15, 21, 26, 27, 28, 34, 35, 36, 38,46, 47, 51, 54, 59, 60, 62, 63, 66, 69, 76, 80, 84, 85,86, 88, 93, 94, 96, 97, 99, 101, 109, 110, 117, 118, 126,225, 234, 236, 459, 485, 507, 516, 519, 534, 567, 585, 597: n = A,T,C or G
  misc_feature 626, 630, 655, 667, 713, 756, 759, 787, 789, 805, 807: n = A,T,C or G
nncttnntnaanntnttttgngtaannnttttcnnnantttttctnnaaanatntttgnntnnatnttntgcttanaatntttnnnanaattnntnntngnggttggtnntattttnnctcatatntggcgaattgggtaccgggccccccctcgaggtcgacggtatcgataagcttgatatcgaattcctgcagcccgggggatccactagttctagagcggncgccactcncngtggagctccagcttttgttccctttagttgagggttaattgcgcgcttggccgtaatcatggtcatagctgtttcctgtgtgaaattgttatcccgctcacaattccacacaacatacgagccggaagcataaaagtgtaaagcctggggtgcctaaatgagtgagcctaactcacattaattgcgtttgccgctcacttgcccgcttttcccagtcggggnaaaccctgtccgtgcccagcttgcanttaatggaaatcggcccaacgncgccggggnagnaggccgggttttgcngtatttggggccgccttcttcccgctttccttngctcactgactcgcctgncgcttcgggtcngttttcgggcctggcggcagaagccggtnattnaagcttcaacttcaaaagggccggnttaaataaccgngttttattcccaccaagaaaattcaagggggggaattaaccgccangggaaaaagaaaccattggttgaggccaaaaaaagggcccaangcnaaaaaaaggggcccaagggaaaccccgntnaaaaaaaaagggcccntnggt

SEQ ID NO: 4752 - DNA, 910 bp, Homo sapiens
  misc_feature 4, 5, 7, 11, 399, 516, 520, 543, 552, 555, 564, 616, 618,619, 627, 630, 635, 638, 647, 652, 658, 660, 668, 678, 683,691, 704, 708, 709, 724, 732, 740, 741, 745, 759, 764, 767,768, 774, 778, 779, 780, 786, 793, 796, 799, 803, 805: n = A,T,C or G
  misc_feature 807, 814, 827, 829, 830, 831, 832, 836, 837, 839, 843, 844,850, 852, 860, 862, 867, 870, 872, 875, 876, 877, 878, 880,881, 885, 892, 893, 895, 896, 900, 903, 905, 908: n = A,T,C or G
tagnngnacgnctcactatagggcgaattggccctctagatgcatgctcgagcggccgccagtgtgatggatatctgcagaattcgcccttagcgtggtcgcggccgaggtaccgcagtatggttggccatgggattatccttcattacatcaaatgaggtatggtggacaatcttgtttataacatcacctgaccaagttttctccaagaattccaacaccttgtggatctcatgttttggattttttttaatatcctcgtagaagaggtagaggatccggtgcatgtcttttgcagcccaccatcctttcacatggtcaaaccaggacccgccaacaacttttccggacatgaatttctcataaaattcctctaagttctgaggatcaagcataaangaagccatcctgtgaaaagtggtaagtagggacaccaggcaatcctttgggatttcttggccacaatagacaaatcttggcaagttttcttttccagataagattggtgggaatcanaatnttaaagggagaatgtggttttantcaattggnggngaaggacantttaaagaacgaactttcaaatcttggtttttctttattgggggaaattttnanntttaaggnaangccgnggnctaatttanaattnctgggncnttttttgnattttttccncaatnaccccatnttttaaaaaatantggnnaaaaattttattgcnttcattgnttggaccnncccnggggggactttttnaaaanggnnaaattncgtnnntttgtnggcctgntanttntggntncnaacctcnggaaccaaccttngnnnnaaannangggnnaaactngntttctgtngngaaanttntnttnnnngnncaantttttcnnannattnatnanccnaa

SEQ ID NO: 4753 - DNA, 856 bp, Homo sapiens
  misc_feature 22, 28, 384, 498, 527, 533, 556, 580, 594, 647, 655, 665,690, 708, 711, 712, 745, 751, 759, 760, 768, 782, 787, 789,798, 800, 801, 802, 805, 807, 810, 822, 828, 842, 844, 849,852: n = A,T,C or G
atactactatagggcgaattgngccctntagatgcatgctcgagcggcccgccagtgtgatggatatctgcagaattcgcccttagcgtggtcgcggccgaggtaccgcagtatggttggccatgggattatccttcattacatcaaatgaggtatggtggacaatcttgtttataacatcacctgaccaagttttctccaagaattccaacaccttgtggatctcatgttttggattttttttaatatcctcgtagaagaggtagaggatccggtgcatgtcttttgcagcccaccatcctttcacatggtcaaaccaggacccgccaacaacttttccggacatgaatttctcataaaattcctctaagttctgaggatcangcataaaggaagccatcctgtgaaaagtggtagtaggacaccaggcaatccttgggatttctggccacatagacaatcttgcagttttcttttcagatagatggtggaatcaanatgtgaaagggagatgtgtttttatcaantgtggngaggacattttaagaaccaactncaatctgggttttctttattgggnaatttcagttcaanggaagcgtgtctatctaaaagctgggctctttttgcattttttcccattaccntcatttanaaacattgtnttaaaatttatgccttcattgttgnacctggcccgggcggccnttnnaaagggcgaaattccacccacttggcgggccgntcttangggatccnncctcgggnccaaaccttggggnaaatnangggcaaaantnnnttncntgngggaaaattgtnttcccnttccaattcccccnanaaaanaanccgg

SEQ ID NO: 4754 - DNA, 901 bp, Homo sapiens
  misc_feature 625, 652, 656, 667, 676, 701, 722, 730, 759, 766, 767, 770,772, 786, 791, 796, 798, 799, 801, 805, 811, 816, 818, 822,824, 833, 834, 836, 840, 841, 849, 851, 853, 855, 859, 860,864, 866, 867, 873, 874, 875, 877, 878, 881, 894, 895: n = A,T,C or G
  misc_feature 898, 901: n = A,T,C or G
taggtatacgactcactatagggcgaattggccctctagatgcatgctcgagcggcccgccagtgtgatggatatctgcagaattcgcccttagcgtggtcgcggcccgaggtaccgcagtatggttggccatgggattatccttcattacatcaaatgaggtatggtggacaatcttgtttataacatcacctgaccaagttttctccaagaattccaacaccttgtggatctcatgttttggattttttttaatatcctcgtagaagaggtagaggatccggtgcatgtcttttgcagcccaccatcctttcacatggccaaaccaggacccgccaacaacttttccggacatgaatttctcataaaattcctctaagttctgaggatcaggcataaaggaagccatcctgtgaaagtggtagtaggacaccaggcaatccttgggatttctggccacatagacaatcttgcagttttctttccagatagatggtggaatcagatgtgaagggagatgtgtttttatcagttggtggtgaggacatttcaagaaccaacttccaaatctgggtttttctttatgggggaaatttcagttcaaggaaaagccgtgtctatctanagtctgggctcttttggcttttttccncatnccatcatttanaatcatgtntaaaaattcatgccttccatgttgnaccttgcccgggcggccgttnaaagggcnaattccacccactggcggccgttactagnggatccnnctngnaccaactttggcgnaatangggcntnncngttncctggngaaantntttncnttaaaattnncnaaanncaacccgnancntnaagnnaaancnnggggcnnntnnggnccaacccaataannggnggn

SEQ ID NO: 4755 - DNA, 918 bp, Homo sapiens
  misc_feature 609, 676, 691, 700, 704, 728, 749, 756, 758, 762, 776, 778,782, 799, 815, 816, 820, 823, 829, 842, 844, 851, 853, 860,862, 865, 866, 869, 878, 881, 883, 885, 888, 889, 890, 895,898, 900, 902, 906, 907, 910, 914: n = A,T,C or G
agcactactatagggcgaatgggccctctagatgcatgctcgagcggcccgccagtgtgatgggatatctgcagaattcgcccttagcgtggtcgcggcccgaggtacaacatggatgcatgaaattttagacatgattctaaatgatggtgatgtggagaaatgcaaaagagcccagactctagatagacacgctttccttgaactgaaatttccccataaagaaaaaccagatttggagttcgttcttgaaatgtcctcaccacaactgataaaaacacatctcccttcacatctgattccaccatctatctggaaagaaaactgcaagattgtctatgtggccagaaatcccaaggattgcctggtgtcctactaccactttcacaggatggcttcctttatgcctgatcctcagaacttagaggaattttatgagaaattcatgtccggaaaagttgttggcaggtcctggtttgaccatgtgaaagggatggtgggctgcaaaagacacgcaccggatcctctacctcttctacgaggatattaaaaaaaattcaaaacatgagatccacaaggtgttggaattcttggagaaaactttgtcanggggatgttataaacaagaattgtccaccatccctcatttgatgtaatgaaaggataattccatggncaaccatactggggnacctggccnggcnggccgttcaaagggcgaaattcanccactggcggccggtactagnggatccnancctnggacccaacttggngnaatnatgggcatagctggttncttgggggaaattgtnntccnttncaattnccccccacatccnanccggaancnttaaagngnaannccnggggggccnaangngnggnnnacctnaantnantggnntgncctnctgc

SEQ ID NO: 4756 - DNA, 899 bp, Homo sapiens
  misc_feature 542, 551, 580, 588, 592, 617, 619, 625, 633, 648, 682, 719,726, 738, 762, 769, 777, 778, 798, 832, 842, 854, 855, 862,864, 870, 888, 894, 898, 899: n = A,T,C or G
tagattgtatacgactcactatagggcgaattgggccctctagatgcatgctcgagcggcccgccagtgtgatggatatctgcagaattcgcccttagcgtggtcgcggccgaggtacaacatggatgcatgaaattttagacatgattctaaatgatggtgatgtggagaaatgcaaaagagcccagactctagatagacacgctttccttgaactgaaatttccccataaagaaaaaccagatttggagttcgttcttgaaatgtcctcaccacaactgataaaaacacatctcccttcacatctgattccaccatctatctggaaagaaaactgcaagattgtctatgtggccagaaatcccaaggattgcctggtgtcctactaccactttcacaggatggcttcctttatgcctgatcctcaaaacttaaaggaattttatgagaaattcatgtcccgaaaagttgttggcgggtcctggtttgaccatgtgaaaggatggtgggctgcaaaagacatgcaccggatcctctacctnttctacgangatattaaaaaaaatccaaacatgaaaancacaaggngttngaattcttggagaaaacttgggcangnggatgntataaacnagaatgtcccccttncctcattttgatggtaatgaaaggataatccctnggccaaccatactggggtacctggcccggccggccgntcgaaanggcgaatttcancacactgggcgggcggtacttgtnggttccnaactcggnncccagcttggggggatcatnggcatactggttcctgggggaaaatggtttccgntacaatttcncccacatacgannccggaancntaaagngtaaaacctgggggcctnatgagnaacnn

SEQ ID NO: 4757 - DNA, 917 bp, Homo sapiens
  misc_feature 1, 4, 435, 483, 514, 521, 547, 608, 616, 621, 634, 667, 686,708, 731, 734, 786, 799, 802, 803, 806, 816, 828, 832, 838,851, 863, 871, 874, 875, 882, 883, 886, 906, 915: n = A,T,C or G
natnattactatagggagtcgacccacgcgtccgcctctcatggttcattgtcaccatgtccctgctgtgcccactgctgctggctttagccctggtggctgtccctggtgcccatggcaattgcccggtgcccgcagacctgaagaagtcagatgggacgcgtacgtgcgccagactctatgagaagagtgatccatactatgacaactgctgccaggggcccgtgttgtctgtggagccaggtactgacctgccctatctgccctcgggctggtctaacactgcatcgtctctggtagtgggccagcgctgtgagatcactgtgtggtctctccccggtaagcatggcaagacccgcaagttcaccgcgggttcttgcctccctggaaaaagtaccgcaaaggcatctttggagactggtccgactccatctntgcctctactgcaaagtgctattgatgccttgaggctctgtctaccancctggccttgggaattgctgtacttcaaaanccaggangcaagatgaccccacgacctgctctnatagcttcctgtaatacagccctttcaaaagttaaaaaaaaaaaaaaaaagggcgggccgntagactantctanagaaaaaaccttncaaaaccttcccctgaactgaaacataaaaagnaatgcaattggtggtggtnaacttggttattggaacttatnatgggttccaaataaagccattnccntcacaaatttacaaataaagcatttttttcactggattttaaattgggggtnggccaaacttatnatnnttnttattatgtntggatccccggntccnagctcnaataattcttttncgtttcttgttnattaaatnttnncctgggnnttnggttgggggagggggataanttattaaangg

SEQ ID NO: 4758 - DNA, 897 bp, Homo sapiens
  misc_feature 2, 3, 12, 16, 40, 57, 75, 76, 77, 87, 126, 127, 144, 166,176, 180, 294, 376, 460, 474, 543, 557, 571, 584, 585, 625,691, 711, 723, 724, 736, 752, 754, 773, 791, 819, 831, 832,856, 869, 877, 878, 882, 890, 891, 897: n = A,T,C or G
annttaggggtngccncgcgtccgaggctgcctggatccnacctggtcctggtgctnactctctcctgtctgctnnncctctccctntggagacaaaactctgggagagggaagctccctcctggnnccacccctttcccaatnattggaaacatccttcatatanatataaagancatnagcaaatcttcaactatttctcaaaagtctatggccccgtgttcactctgtactttggttcaaagcctactgtggtggtacatggatatgaagcagtaaaggaagctctggatnaccttggagaggagttttctgggaggggtagttttcaaatttttgaaagaataaataatgatctgggggtgattttcagcantggaacaaaatggaaggagcttcgcgcttctcaatcatgaccttgaggagttttgggatggggaaaaaggagcatcgaggatcncattcaagaagaancatcctgcttgtggaagaactaaaaaaaagcaaatggttcactctgggatccccattcatcctgactgngctccctccaatgngatctgttcagttnttttccacaatcnntttgattataaagatgagaagtttcttaaccttgatgganagactcatgaaaactttaaaatcttgaactcccatggatgcaggtctcaatgctttgcctaccctnataatttttttcccgggggncataacaaagtnnttaaaaattttnctgaaataaaaagttncnttttgggggcgagtgaaanaaccccggaacacttganatggccatcctcggactttatttgctgnttctgttcaaanngaacaggaaaacccattcccttcngagttaccatttnaagcctgnngccncgggaccnnattttn

SEQ ID NO: 4759 - DNA, 901 bp, Homo sapiens
  misc_feature 3, 437, 465, 675, 686, 699, 717, 730, 734, 738, 743, 751,762, 783, 788, 789, 790, 804, 807, 814, 820, 822, 825, 830,833, 846, 859, 868, 875, 881, 882, 884, 891: n = A,T,C or G
tantatacgactactatagggcgaattgggccctctagatgcatgctcgagcggcccgccagtgtgatggatatctgcagaattcgcccttagcgtggtcgcggcccgaggtaccgcagtatggttggccatgggattatccttcattacatcaaatgaggtatggtggacaatcttgtttataacatcacctgaccaagttttctccaagaattccaacaccttgtggatctcatgttttggattttttttaatatcctcgtagaagaggtagaggatccggtgcatgtcttttgcagcccaccatcctttcacatggtcaaaccaggacccgccaacaacttttccggacatgaatttctcataaaattcctctaagttctgaggatcaggcataaaggaagccatcctgtgaaaagtggtaagtaggacaccangcaatccttgggatttctggccacatanacaatctttgcaagttttctttcctgatagatggtggaatcagatgtgaaagggagatgtgtttttatcaagttggtggtgaggacatttcaagaaccgaactccaaatctggtttttctttatggggaaatttcaagttcaaaggaaagcgtgtctatctaaaagtcttgggctcttttgcattttttccacattaaccatcatttaanaatcatgtttnaaaatttcatgcnttccatgttgtaacctgncccggccgggccnttcnaaangggcnaatttcancacacctggcnggcggtactagtggatcccanctcgnnnccaaacttgggggnaancatgggnataacntnttnccgtntgnaaatgttttccgntacaaattcccanaaattccanccggaanctaaanngnaagcccnggggcctaat

SEQ ID NO: 4760 - DNA, 961 bp, Homo sapiens
  misc_feature 20, 23, 27, 117, 176, 281, 308, 309, 322, 375, 378, 394,396, 404, 412, 430, 431, 437, 441, 448, 498, 521, 523, 539,541, 553, 557, 562, 564, 566, 571, 574, 575, 582, 585, 606,620, 626, 631, 644, 647, 653, 661, 665, 673, 679, 680: n = A,T,C or G
  misc_feature 682, 684, 685, 688, 691, 696, 697, 698, 699, 703, 708, 709,711, 716, 718, 728, 730, 745, 752, 760, 762, 763, 770, 772,777, 780, 781, 783, 785, 788, 789, 792, 797, 798, 809, 810,814, 818, 819, 823, 828, 829, 830, 831, 836, 837, 845: n = A,T,C or G
  misc_feature 851, 852, 866, 871, 872, 874, 877, 886, 887, 889, 901, 905,909, 910, 915, 917, 919, 922, 923, 929, 931, 932, 934, 935,936, 942, 943, 955, 959: n = A,T,C or G
gaggtatacgactactatanggngtanggcgaattgtgccctctagatgcatgctcgagcggcccgccagtgtgatggatatctgcagaattcgcccttagcgtggtcgcggccgangtaccgcattatggttggccatgggattatccttcattacatcaaatgaagtatggtgnacaatcttgtttataacatcacctgaccaagttttctccaagaattccaacaccttgtggatctcatgttttggattttttttaaatatcctcgtacaagaggtngaggatccggtgcatgtcttttgcagnnccaccatcctttnacatggtcaaaccaggacccgccaacaactttttctggaccatgaattttctnatnaaattcctctaagttntnaggatcangcataaangaagccatcctgtgaaanntggtantaangaccacnttgcaaattcttggggaatttctgggccacataagaccaatctttgcagnttttctttcccagatagaatggngngaatcatgatgttganangggagattggtntatntattnangntggtnggnngaggganatntttcaagaaacttaatccccnaaaattctgggttntttttntaatnggggaaaattttnatntgcaangggaaaancctngattatcncaatanntntnngcnttntttcnnnntttnttctnncntttcncnttcattttgntnacttttgttttaaantttaatngccttccntnntttcacncngcctntgnngntncgnntcntaaanngtcgaatttcnncacntttnngggncggtnnnnattgnnttctcatncttttnntccaaatcttggcnttatnntngtnagactatanncnttgtgagaatantaanctcnntaaanantngcnnataatnannannnggtaannttatcttaaatnttcntt

SEQ ID NO: 4761 - DNA, 969 bp, Homo sapiens
  misc_feature 301, 311, 323, 345, 371, 393, 399, 408, 412, 415, 417, 421,433, 439, 448, 452, 460, 463, 465, 466, 472, 495, 500, 505,508, 509, 510, 516, 522, 527, 531, 537, 540, 548, 562, 564,573, 579, 591, 592, 593, 595, 597, 600, 609, 611, 615: n = A,T,C or G
  misc_feature 619, 627, 628, 631, 634, 638, 642, 643, 647, 648, 649, 653,659, 662, 663, 664, 667, 671, 675, 677, 680, 681, 682, 683,684, 691, 692, 693, 694, 698, 699, 703, 704, 705, 709, 710,711, 717, 718, 719, 720, 725, 726, 729, 732, 738, 739: n = A,T,C or G
  misc_feature 747, 751, 757, 758, 759, 762, 766, 770, 771, 773, 786, 793,794, 795, 799, 801, 802, 803, 806, 817, 819, 820, 822, 824,825, 826, 828, 837, 844, 852, 857, 863, 865, 866, 867, 868,874, 875, 879, 882, 885, 887, 890, 892, 893, 896, 897: n = A,T,C or G
  misc_feature 899, 901, 903, 904, 905, 908, 914, 916, 917, 923, 924, 926,928, 934, 935, 937, 939, 940, 942, 946, 950, 953, 956, 957,958, 961, 964, 966: n = A,T,C or G
gggcgaattgggccctctagatgcatgctcgagcggccgccagtgtgatggatatctgcagaattcgcccttagcgtggtcgcggccgaggtactcattggaggatcagctcacctgctttgctctcgatgtagcctagctgggtttagagccttcccttgaatgaagaaccctccccagctggaaggggatgctcttgaaagctcagctgacaacacacatgggcatcaagtcattggccacattcatgcctcaagtgtcctaaaaccgaatatgatcaaaagaaaactgctgtttcaancaagtggganactggcatgcanattccctggccttgcaaacctnattgttaaaaaagataccaaaaactngctgggaaagaaatgaaaaaanggatgnaaagggatntcantcnanaganagttttttttcnactttnattgggganatancctaaaancancnnaaaggncaggtttcaaagattcaaaaccnccacnccccnccnnngggatncctttngaatngganaaatgnggnaccttaanaaacccaattaaantngccggttgntttganttttaaaccccnnncnanccnttccttttngntttngganataaaggnnctntgncccntttnntccnnnccantatttntgnnnaancttntggntncannnnnccttgtnnnnaggnnagtnnnaccnnntaaaannnngttcnntancanttacannctgtgtgnggancctgcnnnatngggntttnncngtagcgtgacccnaaacttnnnatanannncanggtattataantnngngnnncngggggggtngaaaatntctctaantatgnattgtntnnnngctttnnacanatnctntnatntnntcnngntntnnntanatacantnnaaatanntnanctcttnnantnntnactnttanatncannntcnatntnttc

SEQ ID NO: 4762 - DNA, 832 bp, Homo sapiens
  misc_feature 601, 659, 679, 699, 703, 720, 732, 745, 750, 758, 760, 777,805, 807, 816, 819, 826, 832: n = A,T,C or G
tatagggcgaattgggccctctagatgcatgctcgagcggccgccagtgtgatggatatctgcagaattcgcccttagcgtggtcgcggccgaggtacaacatggatgcatgaaattttagacatgattctaaatgatggtgatgtggagaaatgcaaaagagcccagactctagatagacacgctttccttgaactgaaatttccccataaagaaaaaccagatttggagttcgttcttgaaatgtcctcaccacaactgataaaaacacatctcccttcacatctgattccaccatctatctggaaagaaaactgcaagattgtctatgtggccagaaatcccaaggattgcccggtgtcctactaccactttcacaggatggcttcctttatgcctgatcctcagaacttagaggaattttatgagaaattcatgtccggaaaagttgttggcgggtcctggtttgaccatgtgaaaggatggtgggctgcaaaagacatgcaccggatcctctacctcttctacgaggatattaaaaaaaatccaaaacatgagatccacaaaggtggtggaattctttggagaaaaacttggtcanggggatgttataaacaagaatggccccatacctcatttgatgtaatggaaggataatnccatgggccaaccatactgnggaccctggcccggcggccnttcnaaagggcgaaatttcancaccacttgggnggcggtacttagnggatnccagctcngnacccaaactttgggggnaaacatggggccatagctgggttcctgngnggaaaatgnttntcccctncccaan

SEQ ID NO: 4763 - DNA, 840 bp, Homo sapiens
  misc_feature 527, 584, 604, 614, 631, 667, 674, 679, 683, 685, 695, 714,717, 728, 744, 747, 760, 772, 773, 777, 785, 797, 802, 812,815, 817: n = A,T,C or G
cgaatggggccctctagatgcatgctcgagcggccgccagtgtgatggatatctgcagaattcgccctttcgagcggccgcccgggcaggtacagtggtgctgctggaaagaataaataatggagaatgaaacattactggaaaatctaagcagaccatggggaccacagagtttcatttgacatcttagactacaaagcttatctacctttcctcataaaaggggagatggagtggtccataatgctggtgggcaaagtggtatagttggtcattgggttttgcttcattacatcaaaggaggtgtgatagatgattttattcagaatttcctctgatatgtctttttccaggaacttcagtatcttctcaatttcccgctttgggtcctagtttgttgttgttcctctcagatctccaggcagaagttcagtgtggaccctgccatcttcttttcataatgcttatcaaagttctcattcaaagccccagtaaagtggttctttcagtctccaggcattcctttnctcataaattttgagatgggagtgattgaatatgtgagcaggtccttgggccgggancacgctaaggcgaatttcancacactggcnggcgtttctagtggatnccagcccgggtcccaacctttggcggaaatcatggncatagcnggttnccgngnggaaatggtntttccggtcccaatttccnccnaacataccaanccggaagcctaaaagngtnaaagcccgggggngccctaatgggnngggntaaccccncatttaaattgngtttngccccctggnccncntttccaatcggggaaacccttgg

SEQ ID NO: 4764 - DNA, 836 bp, Homo sapiens
  misc_feature 584, 603, 615, 688, 690, 695, 697, 704, 722, 733, 738, 745,747, 755, 765, 767, 778, 789, 804, 806, 811, 823, 835: n = A,T,C or G
gcatgctcgagcggccgccagtgtgatggatatctgcagaattcgcccttagcgtggtcgcggccgaggtactttttctttttttctttttttaaagattttgataagaacacaacatgaaatccatcctcttcataaatttgtaactgcacagtacagtattgttaactataggtaaaatgttgataccagtagacggtgataagtcacatatgtacattgtattgccaagggcaaccgctaagaaaactttatatagtaatacactcagaaactctataaattaatcaagatggaatcataaaaatattctaataaccccagaaaagcaagaaaaaacagaggaacaaggaacagaagaaacaaacacaaaacaaataataaaatagcaaacttatggcctgacagaagtatttactttaaaaggatacaatatgaagaaaaggaaaaattgaccatgaaaaaaagatttgtctatgaaaatgatttttttttacatgaggtattcctgttgtcatttgggagatatttatgaggtagattctaattaccttgtatttggtaaaagtgaaaggtcacactgntactctcaagtaaaattgngattggtctttnctaatttcaaccagtttttaaaccagtattggaggaaaagggttacttgccaaacaaaaaattggtttttggngnggggntnccatttngaatatggtaaatttttnttaaggggacnttttnggaatcncnatttttcnggggaatttnanatttaaaaacngcaatttaganggttttttttgcctntncaaanagggggttaaantaaaattctaang

SEQ ID NO: 4765 - DNA, 805 bp, Homo sapiens
  misc_feature 687, 699, 746, 750, 751, 767, 782, 784, 786, 802: n = A,T,C or G
tatagggcgaattgggccctctagatgcatgctcgagcggccgccagtgtgatggatatctgcagaattcgcccttagcgtggtcgcggccgaggtaccgcagtatggttggccatgggattatccttcattacatcaaatgaggtatggtggacaatcttgtttataacatcacctgaccaagttttctccaagaattccaacaccttgtggatctcatgttttggattttttttaatatcctcgtagaagaggtagaggatccggtgcatgtcttttgcagcccaccatcctttcacatggtcaaaccaggacccgccaacaacttttccggacatgaatttctcataaaattcctctaagttctgaggatcaggcataaaggaagccatcctgtgaaagtggtagtaggacaccaggcaatccttgggatttctggccacatagacaatcttgcagttttctttccagatagatggtggaatcagatgtgaagggagatgtgtttttatcagttgtggtgaggacatttcaagaacgaactccaaatctggtttttctttatggggaaatttcagttcaaggaaagcgtgtctatctagagtctgggctcttttgcatttctccacatcaccatcatttagaatcatgtctaaaattcatgctccatgttggacctgcccggcnggcgctcgaaanggcgaattccagccactggcggccgtactagtggatccgactcggtncaanncttggcgaaacatggncatactggttcccgngngnaaatggtatcccctcncaa

SEQ ID NO: 4766 - DNA, 843 bp, Homo sapiens
  misc_feature 393, 454, 505, 516, 550, 572, 579, 589, 596, 606, 627, 649,653, 680, 681, 683, 714, 723, 729, 732, 748, 750, 760, 763,764, 769, 770, 773, 774, 777, 783, 787, 793, 798, 812, 813,819, 831, 834, 835, 840, 842: n = A,T,C or G
gggccctctagatgcatgctcgagcggccgccagtgtgatggatatctgcagaattcgcccttagcgtggtcgcggccgaggtacaacatggatgcatgaaattttagacatgattctaaatgatggtgatgtggagaaatgcaaaagagcccagactctagatagacacgctttccttgaactgaaatttccccataaagaaaaaccagatttggagttcgttcttgaaatgtcctcaccacaactgataaaaacacatctcccttcacatctgattccaccatctatctggaaagaaaactgcaagattgtctatgtggccagaaatcccaaggattgcctggtgtcctactaccactttcacaggatggcttcctttatgcctgatcctnaagaacttagaggaattttatgagaaattcatgtccggaaaagttgttggcgggtcctggnttgaccatgtgaaaggatggtgggcttgcaaaagacatgcaccggatcctntaccttttttncgaggatatttaaaaaaatccaaaacatgagatncacaagggtgtttggaaatttnttggganaaaacttggntcagggnggattgtttnttaaaacaagaattgttcccncccattacccttcattttgaanggtnaatggaaaggattaattccccattggnncnaaacccattacttgggggtaccttggccccngggccgggncgcttnaanggggcgaaatttccangnaccacttggnggnncggtnnctnngtngggatncccnacttcnggtanccaaagctttgggnntaaccntgggcattagcncgnnttccntng

SEQ ID NO: 4767 - DNA, 835 bp, Homo sapiens
  misc_feature 512, 530, 600, 623, 631, 650, 660, 684, 693, 724, 732, 738,748, 749, 764, 769, 773, 776, 782, 804, 805, 817, 824, 826,828, 831, 834: n = A,T,C or G
gggcgaattgggccctctagatgcatgctcgagcggccgccagtgtgatggatatctgcagaattcgcccttagcgtggtcgcggccgaggtaccgcagtatggttggccatgggattatccttcattacatcaaatgaggtatggtggacaatcttgtttataacatcacctgaccaagttttctccaagaattccaacaccttgtggatctcatgttttggattttttttaatatcctcgtagaagaggtagaggatccggtgcatgtcttttgcagcccaccatcctttcacatggtcaaaccaggacccgccaacaacttttccggacatgaatttctcataaaattcctctaagttctgaggatcaggcataaaggaagccatcctgtgaaagtggtagtaggacaccaggcaatccttgggatttctggccacatagacaatcttgcagttttctttccagatagatggtggaatcagatgtgaagggagatgtgtttttatcagnttgtggtgaggacatttnaaggaacgaactccaaatctgggttttttcttttatgggggaaaattttcagttcaaagggaaagcgtgntctattctaagagtctggggctnttttgcanttttcttccacatcacccnttcattttangaatccatgtcctaaaaatttttnatggccatncatggttgtaccctgccccgggcgggcccgnttcgaaanggggcnaaatttccanncaccccttgggcggnccttnactnagnggggantccggagctccggtacccaaannttgggggtaaancatgggncntnagnctnt

SEQ ID NO: 4768 - DNA, 830 bp, Homo sapiens
  misc_feature 442, 649, 657, 669, 675, 703, 713, 714, 719, 736, 737, 741,746, 747, 753, 756, 758, 761, 772, 773, 784, 790, 800, 804,814, 825, 827: n = A,T,C or G
ggcgaattgggccctctagatgcatgctcgagcggccgccagtgtgatggatatctgcagaattcgcccttagcgtggtcgcggccgaggtaccgcagtatggttggccatgggattatccttcattacatcaaatgaggtatggtggacaatcttgtttataacatcacctgacaaagttttctccaagaattccaacaccttgtggatctcatgttttggattttttttaatatcctcgtagaagaggtagaggatccggtgcgtgtcttttgcagcccaccatcctttcacatggtcaaaccaggacctgccaacaacttttccggacatgaatttctcataaaattcctctaagttctgaggatcaggtataaaggaagccatcctgtgaaagtggtagtaggacaccaggcaatccttgggatttctggccacatanacaatcttgcagttttctttccagatagatgggtggaatcagatgtgaagggagatgtgtttttatcagtggggtgagggacatttcaagaaccaactccaaatctgggtttttctttatggggaaatttcagttcaagggaaaagcgtgtctatctagagtctgggctctttttgcattttctcccaccatcaccatcatttttanaaacatgntctaaaaatttnaatggnatccctggttgtaccctggccccgggcngggccgcttnnaaaangggcgaaaatttccaannccanctggnnggccgnttncntangtgggatcccnnagcctcgggancccaanccttggcggnaaancatgggccanaagctggtttncntgg

SEQ ID NO: 4769 - DNA, 811 bp, Homo sapiens
  misc_feature 552, 573, 630, 681, 723, 725, 740, 770, 782, 792, 794, 810: n = A,T,C or G
atagggcgaattggagctccaccgcggtggcggccgcccgggcaggtacaacatggatgcatgaaattttagacatgattctaaatgatggtgatgtggagaaatgcaaaagagcccagactctagatagacacgctttccttgaactgaaatttccccataaagaaaaaccagatttggagttcgttcttgaaatgtcctcaccacaactgataaaaacacatctcccttcacatctgattccaccatctatctggaaagaaaactgcaagattgtctatgtggccagaaatcccaaggattgcccggtgtcctactaccactttcacaggatggcttcctttatgcctgatcctcagaacttagaggaattttatgagaaattcatgtccggaaaagttgttggcaggtcctggtttgaccatgtgaaaggatggtgggctgcaaaagacacgcaccggatcctctacctcttctacgaggatattaaaaaaatccaaaacatgagatcccacaaggggttggaattcttggagaaaactttgtcagggngatgttataaacaagattgtncaccatacctcattttgatgtaatgaaggataatccccatggggcaacccatactgngggtaccctcgggccgctcttagaacctagtgggatccccccgggctgcanggaatttcgatatcaaagccttatcgatcccgtcgaccctcnanggggggggcccggtnccccaactttttggttcccttttaagtggngggttaaattgngccccttggngnaaatcattgggcatang

SEQ ID NO: 4770 - DNA, 812 bp, Homo sapiens
  misc_feature 2, 3, 4, 8, 9, 10, 11, 12, 13, 624, 665, 666, 667, 668, 669,670, 674, 675, 676, 677, 678, 679, 680, 681, 682, 683, 685,686, 687, 688, 689, 690, 691, 693, 695, 696, 697, 699, 700,701, 702, 703, 704, 706, 708, 709, 710, 711, 713: n = A,T,C or G
  misc_feature 714, 715, 716, 717, 718, 721, 722, 723, 724, 725, 726, 727,728, 729, 730, 731, 734, 735, 736, 737, 738, 739, 740, 741,742, 744, 745, 746, 747, 748, 750, 751, 752, 753, 754, 755,756, 757, 758, 759, 760, 761, 762, 763, 764, 765, 766: n = A,T,C or G
  misc_feature 768, 769, 770, 771, 772, 773, 774, 775, 776, 777, 778, 779,780, 781, 782, 783, 784, 785, 786, 787, 788, 789, 790, 791,792, 793, 794, 796, 797, 798, 799, 800, 801, 802, 803, 804,805, 806, 807, 808: n = A,T,C or G
gnnnaggnnnnnncgcgcgtaatacgactcactatagggcgaattggagctccaccgcggtggcggccgaggtacaacatggatgcatgaaattttagacatgattctaaatgatggtgatgtggagaaatgcaaaagagcccagactctagatagacgcgctttccttgaactgaaatttccccataaagaaaaaccagatttggagttcgttcttgaaatgtcctcaccacaactgataaaaacacatctcccttcacatctgattccaccatctatctggaaagaaaactgcaagattgtctatgtggccagaaatcccaaggattgcctggtgtcctactaccactttcacaggatggcttcctttatgcctgatcctcagaacttagaggaattttatgagaaattcatgtccggaaaagttgttggcgggtcctggtttgaccatgtgaaaggatggtgggctgcaaaagacatgcaccggatcctctacctcttctacgaggatattaaaaaaaatccaaaacatgagatccacaaggtgttggaattcttggagaaaacttggtcaggtgatgttataaacaagattgtccccatacctcatttgatgtaatgaangataatcccatggccaaccatactgcggggaccccctcggnnnnnnaaannnnnnnnnncnnnnnnntnannnannnnnncnannnncnnnnnnaannnnnnnnnnnttnnnnnnnnntnnnnntnnnnnnnnnnnnnnnnntnnnnnnnnnnnnnnnnnnnnnnnnnnntnnnnnnnnnnnnngggc

SEQ ID NO: 4771 - DNA, 808 bp, Homo sapiens
  misc_feature 6, 8, 9, 11, 13, 14, 15, 18, 19, 20, 21, 29, 150, 532, 556,584, 606, 611, 640, 655, 671, 688, 690, 701, 715, 759, 777,778, 784, 807: n = A,T,C or G
agtatngnnantnnnccnnnntactactnctatagggcgaattggagctccaccgcggtggcggccgcccgggcaggtacaacatggatgcatgaaattttagacatgattctaaatgatggtgatgtggagaaatgcaaaagagcccanactctagatagacacgctttccttgaactgaaatttccccataaagaaaaaccagatttggagttcgttcttgaaatgtcctcaccacaactgataaaaacacatctcccttcacatctgattccaccatctatctggaaagaaaactacaagattgtctatgtggccagaaatcccaaggattgcctggtgtcctactaccactttcacaggatggcttcctttatgcctgatcctcagaacttagaggaattttattgagaaattcatgtccggaaaagttgttggcaggtcctggtttgaccatgtgaaaggatggtgggcttgcaaaagacacgcatcggatcctctacctcttctacgaggatattaaaaaaaaatncaaaacattgagatccacaagggngttggaatttcttggagaaaactttgtnaggtgatgttataaaacaaganttgtnccaccattacctcattttggatggtaatngaaaggaataaattnccaatgggcccaaccnatactgcggggtacccntngggcccgcttntaaaaaacttagtngggatcccccccgggccttgcagggaaattccgataatcaaagnctttattcgataccccgnnccaccntctgaaggggggggcccccggtnt

SEQ ID NO: 4772 - DNA, 994 bp, Homo sapiens
  misc_feature 4, 55, 70, 80, 86, 500, 515, 574, 608, 610, 614, 625, 686,698, 704, 729, 761, 762, 766, 767, 770, 774, 778, 780, 783,788, 802, 806, 825, 828, 871, 881, 885, 893, 897, 898, 907,908, 912, 918, 927, 929, 931, 936, 941, 950, 952, 956: n = A,T,C or G
  misc_feature 965, 971, 981, 984, 986, 990, 994: n = A,T,C or G
gttnggctttgaaaactcctcactttttggcaaatttccgctccaccgcggtggntgccgaggtacattntggatgcttnaaattntagacatgattctaaatgatggtgatgtggagaaatgcaaaagagcccagactctagatagacacgctttccttgaactgaaatttccccataaagaaaaaccagatttggagttcgttcttgaaatgtcctcaccacaactgataaaaacacatctcccttcacatctgattccaccatctatctggaaagaaaactgcaagattgtctatgtggccagaaatcccaaggattgcctggtgtcctactaccactttcacaggatggcttcctttatgcctgatcctcagaacttagaggaattttatgagaaattcatgtccggaaaagttgttggcgggtcctggtttgaccatgtgaaaggatggtgggcttgcaaaagacatgcaccggatcctctacctcttctacgangatattaaaaaaaanccaaaacatgaggatccacaaaggtgtttgggaattctttgggaagaaaaacctttggncaagggtgaatggttataaaaacaaagaatttgntnccancccataccctnaattttggatggttaatggaagggataaattccccatgggcccaaacccatacctggcggntaccctggcccnggggcnggcccgtttcttagaaacctaagtnggatcccccccggggccttggcaaggaaattnngatnntcnaaancttnantcngattncccgtcccaacccncaangggggggggccccgggttnccnaacttttttgtttcccttttagtggagggggtttaatattccncccccttggnccgnaaaacaangggnnaataagctnntttncttggntgaaaattngnantccgnttccnaaattcccnanaaanaaaccaaancccggnacccataaangtntnaaancccn

SEQ ID NO: 4773 - DNA, 908 bp, Homo sapiens
  misc_feature 530, 555, 561, 577, 582, 585, 599, 606, 609, 614, 618, 634,657, 679, 681, 685, 690, 712, 722, 725, 729, 737, 739, 773,774, 799, 816, 820, 827, 835, 839, 843, 846, 847, 848, 852,855, 870, 874, 888, 901, 906: n = A,T,C or G
ggagctccaccgcggtggcggccgaggtacaacatggatgcatgaaattttagacatgattctaaatgatggtgatgtggagaaatgcaaaagagcccagactctagatagacacgctttccttgaactgaaatttccccataaagaaaaaccagatttggagttcgttcttgaaatgtcctcaccacaactgataaaaacacatctcccttcacatctgattccaccatctatctggaaagaaaactgcaagattgtctatgtggccagaaatcccaaggattgcctggtgtcctactaccactttcacaggatggcttcctttatgcctgatcctcagaacttagaggaattttatgagaaattcatgtccggaaaagttgttggcaggtcctggtttgaccatgtgaaaggatggtgggcttgcaaaaggacacgccccggatcctctaccctctttctacgagggatattaaaaaaaaaatcccaaaaccattgagatcccacaagggtggttgggaaattctttngggagaaaaaccttttgtccagggnggatgnttattaaaacaaaganttggnccncccatacccttcantttggantgnaaatngaangggattaatccccatngggcccaaccattacctgggggnaccctgcccgggccggggccgntntaanaactngtgggaatccccccgggcttgnaagggaattnganatcnaagcttantngattcccgtcgaacctcgagggggggggccccgnncccccacctttttggttccctttangggaggggttaaattgnggcncttgggnggtaaatnatgnggcntannnctgnttncctggggggaaattngtanacccgttaaaattnccccaccacatgnccgancc

SEQ ID NO: 4774 - DNA, 916 bp, Homo sapiens
  misc_feature 593, 621, 629, 640, 658, 663, 674, 681, 683, 703, 709, 715,730, 744, 746, 748, 749, 750, 751, 753, 756, 758, 759, 760,761, 762, 763, 764, 765, 766, 767, 768, 769, 770, 772, 774,775, 777, 778, 779, 780, 782, 785, 786, 787, 788, 789: n = A,T,C or G
  misc_feature 790, 791, 793, 795, 796, 797, 798, 799, 800, 802, 803, 804,805, 806, 807, 808, 809, 810, 811, 812, 814, 816, 817, 819,820, 821, 822, 823, 824, 825, 829, 831, 835, 836, 837, 839,843, 845, 846, 847, 848, 849, 852, 853, 854, 855, 856: n = A,T,C or G
  misc_feature 857, 858, 859, 860, 862, 863, 864, 865, 866, 867, 868, 869,870, 871, 872, 873, 874, 875, 876, 877, 878, 879, 880, 881,885, 886, 888, 891, 892, 893, 894, 895, 896, 897, 898, 899,900, 901, 903, 905, 906, 908, 909, 912, 913, 914: n = A,T,C or G
gaccacgcgtccggcgcccggagactgtcgaaggtcaccaaatcagtgaccatcgttgtcctgtccttcttcctgtgttggctgcccaaccaggcgctcaccacctggagcatcctcatcaagttcaacgcggtgcccttcagccaggagtatttcctgtgccaggtatacgcgttccctgtgagcgtgtgcctagcgcactccaacagctgcctcaaccccgtcctctactgcctcgtgcgccgcgagttccgcaaggcgctcaagagcctgctgtggcgcatcgcgtctccttcgatcaccagcatgcgccccttcaccgccactaccaagccggagcacgaggatcaggggctgcaggccccggcgccgccccacgcggccgctagactagtctagagaaaaaacctcccacacctccccctgaacctgaaacataaaatgaatgcaattgttgttgttaacttgtttattgcagcttataatggttacaaataaagcaatagcatcacaaatttcacaaataaagcatttttttcactgcattctagttggtggtttgtccaaacttcatcaatggtatcttatcatgncttggatcccccgggtcccgagcctcgnaaataaanttccttctttnccgctttcttcgcttcanttganttcgcctgggnctcgggncntttcgggcttgccggcggangcgggnattcancttcaacttaaaaanggggggaaataaancngnnnntnacncnnnnnnnnnnnnnanannannnntnttnnnnnnngngnnnnnngnnnnnnnnnnngngnnannnnnnngtgnanaaannngngtgngnnnnngannnnnnnnngnnnnnnnnnnnnnnnnnnnnaagnngngannnnnnnnnnnangnnanngannngg

SEQ ID NO: 4775 - DNA, 847 bp, Homo sapiens
  misc_feature 550, 616, 627, 634, 638, 639, 641, 642, 643, 645, 646, 647,648, 650, 651, 652, 656, 657, 658, 660, 661, 662, 663, 664,666, 667, 668, 669, 670, 671, 672, 673, 675, 676, 677, 678,679, 681, 682, 683, 685, 686, 687, 688, 689, 690, 692: n = A,T,C or G
  misc_feature 693, 694, 695, 696, 698, 700, 701, 702, 703, 704, 705, 706,707, 708, 709, 710, 711, 713, 714, 715, 716, 717, 718, 719,720, 721, 722, 723, 724, 725, 726, 727, 728, 729, 730, 734,735, 736, 739, 740, 742, 743, 744, 745, 746, 747, 748: n = A,T,C or G
  misc_feature 749, 750, 751, 752, 754, 755, 756, 758, 759, 760, 761, 764,765, 766, 767, 768, 769, 770, 771, 772, 773, 776, 777, 778,780, 781, 783, 784, 785, 786, 788, 789, 790, 791, 792, 793,794, 797, 800, 801, 802, 805, 806, 809, 813, 814, 816: n = A,T,C or G
  misc_feature 818, 821, 822, 824, 825, 827, 828, 829, 832, 833, 834, 835,838, 839, 843, 845, 846, 847: n = A,T,C or G
tatagggcgaattggagctccaccgcggtggcggccgaggtaccgcagtatggttggccatgggattatccttcattacatcaaatgaggtatggtggacaatcttgtttataacatcacctgacaaagttttctccaagaattccaacaccttgtggatctcatgttttggatttttttaatatcctcgtagaagaggtagaggatccggtgcgtgtcttttgcagcccaccatcctttcacatggtcaaaccaggacctgccaacaacttttccggacatgaatttctcataaaattcctctaagttctgaggatcaggcataaaggaagccatcctgtgaaagtggtagtaggacaccaggcaatccttgggatttctggccacatagacaatcttgtagttttctttccagatagatggtggaatcagatgtgaagggagatgtgtttttatcagttgtggtgaggacatttcaagaaacgaacttccaaatctggtttttctttatgggggaaatttcagttcaaggaaagccgtgtctatctangagtctgggctcttttgcatttcttcacatcaccatcatttagaatcatgtctaaaatttcatgcntccatgttggnacccctnccgnncnnnannnntnnntggnnntnnnnntnnnnnnnntnnnnntnnntnnnnnngnnnnntngnnnnnnnnnnnntnnnnnnnnnnnnnnnnnnattnnnaanntnnnnnnnnnnntnnntnnnnttnnnnnnnnnnaannntnnannnngnnnnnnnganatnnngtnnttngggnnantnctnnanntnnnaannnnggnnaatngnnn

SEQ ID NO: 4776 - DNA, 913 bp, Homo sapiens
  misc_feature 111, 404, 420, 451, 472, 495, 504, 513, 516, 543, 549, 588,610, 622, 624, 640, 644, 646, 648, 651, 653, 675, 678, 701,708, 724, 737, 738, 746, 750, 753, 756, 761, 786, 790, 791,796, 800, 822, 827, 831, 835, 838, 844, 846, 848, 850: n = A,T,C or G
  misc_feature 853, 857, 858, 861, 866, 877, 878, 879, 882, 883, 888, 892,898, 905, 908, 910, 911: n = A,T,C or G
tagggcgaattggagctccaccgcggtggcggccgaggtacaacatggatgcatgaaattttagacatgattctaaatgatggtgatgtggagaaatgcaaaagagcccanactctagatagacacgctttccttgaactgaaatttccccataaagaaaaaccagatttggagttcgttcttgaaatgtcctcaccacaactgataaaaacacgtctcccttcacatctgattccaccatctatctggaaagaaaactgcaagattgtctatgtggccagaaatcccaaggattgcctggtgtcctactaccactttcacaggatggcttcctttatgcctgatcctcagaacttagaggaattttatgagaaattcatgtccggaaaagttgttggcgggtnctggttttgaccatgngaaaggatggtgggctacaaaaagacatgcnccggatcctctacctcttctnccgaggatattaaaaaaaatccnaaacatganaatccacanggngttggaatttttggagaaaactttggnccaggngatgtttttaaacaaagatttggtcccaccatacccctnaatttggatgtaaatgaaaggnataaatcccccntnggggccaacccattanttgntngntancntgccccggggcggggccggttnttnaaaaactaggtgggatccccccnggggctngaaaggaaatttccanaatccaaagcttnntccgatanccanccnaanctttngaggggggggggccccgggaccccnaacnnttttngttnccccttttaggggagggttaanttggncccncctnggncccaantnantnggncttnnttnttttnttgggggaaannngtnnttccncttntaaaantcccaanaanannct

SEQ ID NO: 4777 - DNA, 898 bp, Homo sapiens
  misc_feature 526, 603, 607, 632, 640, 650, 666, 672, 678, 685, 694, 705,714, 717, 723, 728, 735, 736, 744, 746, 747, 748, 754, 755,756, 767, 768, 785, 786, 795, 800, 802, 803, 804, 808, 817,824, 830, 833, 836, 846, 847, 849, 853, 858, 864, 865: n = A,T,C or G
  misc_feature 868, 873, 874, 876, 880, 881, 893: n = A,T,C or G
gcgcgtaatacgactcactatagggcgaattggagctccaccgcggtggccgagcggccgcccgggcaggtacgcgggtgaaattttagacatgattctaaatgatggtgatgtggagaaatgcaaaagagcccagactctagatagacacgctttccttgaactgaaatttccccataaagaaaaaaccagatttggagttcgttcttgaaatgtcctcaccacaactgataaaaacacatctcccttcacatctgattccaccatctatctggaaagaaaactgcaagattgtctatgtggccagaaatcccaaggattgcctggtgtcctactaccactttcacaggatggcttcctttatgcctgatcctcagaacttagaggaattttatgagaaattcatgtccggaaaagttgttggcaggtcctggtttgaccatgtgaaaggatggtgggctgcaaaagaacacgcaccggatcctctacctcttctacgaggatattaaaaaaaatccaaaacatnagatccacgaggtgttggaaattcttggagaaaacctttgtcaggtgatgttattaaacaagattgtccccccatancctnatttggatggttaatgaaaggattnattcccantgggcccaancttacctggggggttncctttnggccgntttttanaaactagtnggattcccccngggccttgnaangaattnttttnttccaanncttttttngnnnccccgnnnggcccttttannggggggggggcccccgnnccccaaacnttttngnnncccntttaggggnggggttnaaattnggngcncctggggggnnantttntggtnaaaaanntgnttttnntngggnnaaaaattttttnccccg

SEQ ID NO: 4778 - DNA, 1012 bp, Homo sapiens
  misc_feature 23, 102, 255, 278, 318, 347, 348, 355, 380, 386, 391, 400,419, 420, 424, 427, 429, 435, 438, 443, 462, 466, 469, 471,483, 498, 506, 511, 512, 523, 538, 562, 577, 578, 580, 584,587, 594, 596, 601, 603, 608, 614, 622, 624, 630, 632: n = A,T,C or G
  misc_feature 636, 638, 642, 644, 657, 659, 663, 664, 666, 668, 671, 673,676, 697, 707, 712, 713, 721, 727, 729, 733, 737, 742, 748,752, 756, 758, 760, 775, 778, 781, 792, 794, 798, 799, 801,802, 815, 825, 826, 829, 838, 844, 849, 851, 865, 870: n = A,T,C or G
  misc_feature 874, 877, 886, 894, 896, 900, 902, 907, 913, 919, 922, 923,925, 929, 930, 934, 936, 944, 946, 947, 960, 973, 977, 983,985, 988, 989, 996, 999, 1000, 1001, 1003, 1004, 1005, 1006,1007, 1008, 1009: n = A,T,C or G
atcactactatagggcgaattgngccctctagatgcatgctcgagcggcccgccagtgtgatggatatctgcagaattcgccctttcgagcggccgcccggncaggtacaggagccctgatagccatactcgcctgtgtcttgacattattggtgttgatcctccttatcgtcactatgagaagacggaaaaaagagccccttatttttgacgaagaaagagacatcagagaaaatattgtgagatacgatgacnagggcgggggagaggaggacaanggaagcgttttgacatggctgcactgaaaaaaccttaacnttcatctcgaaacaccaagacccggaggnnttgtgantccagaaattcaattcctgagttcnaccatnttttnataagcatnccagattatgtcatctttnngggnaantnatttgnggnaatanttaaatgaaagcccatggntggntcntnggtgcctccttntatattgactacctngccaaganatatnncttttttaaangaaaaatggcttcanatatgctttaaatcactccaactnttttaaaattccatnnancttnaancttcttnantcatnanttatngacctncctttaantnttctgngnggancntctntntttttaaacgaantntgcnngncnatntnatnggaatttggccaaaataaaanatttgtactntgggnnattaacancccttnangggngaanttttnaagatntaantgtngngntggtgatacttatgntgngancctaagctttngnaacnnannctatgtaggtttnaacaattatnnaanttcttgctntcattnttatngnatttgttttttacnttatntcanttntataagacntatattcnanatcnantaaantaatanaattgnaannanttgnnggtncncttatatntnntaagcattccttntatatatatattntatnacgctntnttnnctctttntannnannnnnnnaag

SEQ ID NO: 4779 - DNA, 909 bp, Homo sapiens
  misc_feature 3, 582, 603, 623, 667, 672, 691, 698, 702, 711, 712, 748,754, 755, 760, 770, 789, 811, 813, 824, 826, 847, 848, 857,881, 889, 903, 904, 908: n = A,T,C or G
tcnctactatagggcgaattgggccctctagatgcatgctcgagcggcccgccagtgtgatgggatatctgcagaattcgccctttcgagcggcccgcccgggcaggtacaggagccctgatagccatactcgcctgtgtcttgacattattggtgttgatcctccttatcgtcactatgagaagacggaaaaaagagccccttatttttgacgaagaaagagacatcagagaaaatattgtgagatacgatgacgagggcgggggagaggaggacacggaagcgtttgacatggctgcactgagaaacctcaacgtcatccgagacaccaagacccggagggatgtgactccagaaattcaattcctgagtcgaccagcttttaaaagcatcccagataatgtcatctttagggaatttatttgggaaaagattaaaaagaagcccgatgttgatcctggtgctcctccttatgactccctgcagacatatgcttttgaaggaaatggctcagttgctgaatcactcagctctttagattccatcagctcaaactcttgatcagaactatgactacctaantgactgggggacctcgctttnaaacgacttgcgggacattntatggggacttggcccaagaaagtttgttctttggcccggaacnccctnaggggcgaattccaatcanaactggngggncgttcttannggatccaaacttcggatccaactttggcgttaattnatgggnnttaanctgtttcctnggtgaaaaatggttttccnctcccattttcacaaaaaaatncnagcccgggaancntaaagggaaaagcccgggggnncctaatggnggggctaacttcacttatttggtnggggttanttgcccgttttcanngggng

SEQ ID NO: 4780 - DNA, 808 bp, Homo sapiens
  misc_feature 434, 495, 519, 521, 540, 581, 599, 605, 608, 631, 636, 649,674, 679, 682, 683, 688, 689, 697, 701, 706, 712, 713, 725,726, 728, 729, 741, 744, 749, 763, 768, 769, 770, 775, 782,786, 789, 791, 795, 797, 803, 805: n = A,T,C or G
gggcgaattgggccctctagatgcatgctcgagcggccgccagtgtgatggatatctgcagaattcgcccttagcgtggtcgcggccgaggtacggaaacaacacggagcctttgatcaccttggagggaagcatatccttcagatttacttcagaaggaatgaataccatcacagtgcaggtctcagctgggaatgccatcctacaagacacaaagaccatcgcagtatatgaggaattccggtctcttcgcttgcccttttctccaaacctggatgactacaacccggacatccctgagtggaggagggacatcggtcgagtcatcaaaaaatccctggtggaagccacaggggttccaggccagcacatcctggtggcagtgctccctggcttacccaccactgctgaactcttttgtcctaccctatcangatccagctggagaaaacaaaaggtcaactgatgacctggagcagatatcagaattgcttntccacacgctcaaccaaaactcantncctgcccgggcggccgttngaaaagggcgaattccaatcaacactggcggccgttactanggggatccgaaccttggnccccangcnttgggcgtaatcatgggtcatangctgntttcctgggtggnaaaattgtttttccgccttaacaantttcnccnnccaannataacaangccnggganggcttnnaagtggtaaaanncnntggggggtgccnctnttttngggggaacccaaantttcnnntttanttttggntttngtncntccntncccccncnctt

SEQ ID NO: 4781 - DNA, 622 bp, Homo sapiens
  misc_feature 82, 106, 108, 157, 190, 370, 451, 463, 484, 490, 532, 535,560, 561, 599, 611, 612: n = A,T,C or G
tatggcgaattgggccctctagatgcatgctcgagcggccgccagtgtgatggatatctgcagaattcgcccttagcgtggncgcggccgaggtacggaaacaacncngagcctttgatcaccttggagggaagcatatccttcagatttacttcanaaggaatgaataccatcacagtgcaggtctcanctgggaatgccatcctacaagacacaaagaccatcgcagtatatgaggaattccggtctcttcgcttgtccttttctccaaacctggatgactacaacccggacatccctgagtggaggagggacatcggtccgagtcatcaaaaaatccctggtggaagccacaggggttccaggtcancacatcctggtggcagttgctccctggcttacccaccactgctgaactcttttgtcctaccctatcaggatccagctgganaaaacaaaaggncaactgatgacctgggagcanattatnagaatttggttgatccacaccgctcaacccaaaaacttcaantancctgccccgggggcggggcggttcnnaaaggggcgaaatttcccagccaacacttggggcgggnccgtttacctanntgggattccc

SEQ ID NO: 4782 - DNA, 853 bp, Homo sapiens
  misc_feature 544, 553, 599, 617, 618, 626, 629, 652, 675, 682, 697, 702,711, 724, 728, 731, 736, 739, 745, 755, 767, 783, 785, 790,793, 801, 803, 805, 808, 830, 834, 840, 844, 849, 853: n = A,T,C or G
actcctatagggcgaattgggccctctagatgcatgctcgagcggccgccagtgtgatggatatctgcagaattcgccctttcgagcggccgcccgggcaggtacgcgggacctagctcgggaccggcctggagatggagttcgactgcgagggcctgagacggctgcttggcaagtttttaaagatagttctcagaaagacctgctgaattttactggcacaattcctgtgatgtatcagggtaatacatataacataccaattcgtttctggattttggattctcaccctttcgctccccctatttgcttcttgaagccaactgcaaatatgggaatcttagtcggaaaacatgtggatgctcaaggcagaatatatttgccctatctccaaaactggagccatcctaaatctgtcattgttggattaattaaagaaatgattgccaagtttcaagaggaacttcccatgtattctctatcatcatctgatgaggcacggcaggtagacttgctagccctatattgcaaaaatcacttgaangggtttcanatacaaaattcaaaagagcttgggccaaatcatgagaattaaaacngtccattaaaattactgnnggttgganggnggagaactcggtattggcctgcncattaccatttcagccaagggtnttggcanacaggctttttcctnttaanacctttcanaaagggactaaangggnccnccatnggnccttgnaatctttaanccttcctaatgnggggaatcaacaaaananttttnccnccttttgntnanttnccaagggggggggatctttaanaagncaactntttnggggnggtn

SEQ ID NO: 4783 - DNA, 691 bp, Homo sapiens
  misc_feature 110, 236, 400, 404, 414, 417, 427, 429, 439, 453, 457, 465,476, 479, 480, 506, 512, 568, 575, 587, 599, 601, 612, 613,621, 627, 634, 652, 661, 666, 688: n = A,T,C or G
gactactatagggcgaattgggccctctagatgcatgctcgagcggccgccagtgtgatggatatctgcagaattcgcccttagcgtggtcgcggccgaggtactagcanaattcagctcctgcagtgataggactgaggtccctgtttccttgttggctatcaactggggtttgctctgggctcctggatactgctgcattccttgccaggtagtcctctccatctccaagccancaacagcacataaacccctctcctgcttcgaatctcttacctcctcagcttctgacctctaaatacaggtttaaagggctctggcaaatgggtcaagcccactgacaataaattcccttctcgaagtcaactgtgccatatattaaacattaatcacaggagtntaanccacccctantcncacaggcccntnggataatgcnataatattactggntaanagggggtnttacctggganggnncaatttaagaaattttttacccttanccacanattttacaaaggggaaaaaaaaccaaaaaaaaccttgggccattcaaattaaaagnaaatttntttaatggggcnccctaaatttangnaaaaatgcaanntcttgganaatttnttttaantttttcaaatcccctggngaaggcaangaatnaacccaaaaaaaaaaattcttntgg

SEQ ID NO: 4784 - DNA, 613 bp, Homo sapiens
  misc_feature 488, 566, 578, 611: n = A,T,C or G
atgctcgagcggccgccagtgtgatggatatctgcagaattcgcccttcgagcggccgcccgggcaggtaccagaggaggagatggacgatcagagccatgcgcctgtttcctgcaccccctgcgcactggttctatggccacaaggagtcttacccagtaaaagagtttgaggtgtatcctgagctgatggaaaaatacccatgtgccgttcccttgtgggttggaccctttacgatgttcttcaatatccatgacccagactatgtcaagattctcctgaaaagacaagatcccaaaagtgctgttagccacaaaatccctgaatcctgggttggtcgaggacttgtgaccctggatggttctaaatggaaaaagcaccgccagattgtgaaacctggcttcaacatcagcattctgaaaatattcatcaccatgatgtctaagagtgttcggatgatgctgaacaaatggggaggaacacattgnccaaaactcacgtttggagctctttcaacatgtctccctgaagaccctggacagcattatgaagtgtgccttcagccnaccaaggcagcnattccagtttggaccaggtacttcggcccgcgnat

SEQ ID NO: 4785 - DNA, 612 bp, Homo sapiens
  misc_feature 83, 390, 450, 454, 485, 541, 584, 597: n = A,T,C or G
atgctcgagcggccgccagtgtgatggatatctgcagaattcgccctttcgagcggccgcccgggcaggtacgcgggacctanctcgggaccggcctggagatggagttcgactgcgagggcctgagacggctgcttggcaagtttttaaagatagttctcagaaagacctgctgaattttactggcacaattcctgtgatgtatcagggtaatacatataacataccaattcgtttctggattttggattctcaccctttcgctccccctatttgcttcttgaagccaactgcaaatatgggaatcttagtcggaaaacatgtggatgctcaaggcagaatatatttgccctatctccaaaactggagccatcctaaatctgtcattgnttggattaatttaaaagaaatgatttgccaagtttttcaagaaggaacttccccatgtanttcntctatcatcatcctgatgaaggcacgggcanggtaaacttgcttagccctatatttgcaaaaaaatcaccttgaaaggtgctttcangataccaaatttcaaaaagaggcttgggcaaaattcatgaagnaattaaaaaccangtccaattaaaaatt

SEQ ID NO: 4786 - DNA, 599 bp, Homo sapiens
  misc_feature 164, 271, 329, 348, 436, 456, 479, 498, 515, 532, 592: n = A,T,C or G
atgctcgagcggccgccagtgtgatggatatctgcagaattcgcccttagcgtgggcgcggccgaggtacggaaacaacacggagcctttgatcaccttggagggaagcatatccttcagatttacttcagaaggaatgaataccatcacagtgcaggtctcanctgggaatgccatcctacaagacacaaagaccatcgcagtatatgaggaattccggtctcttcgcttgtccttttctccaaacctggatgactacaacccggacatncctgagtggaggagggacatcggtcgagtcatcaaaaaaaatccctggtgggaagatncagctggagaaaacaaaangtcaactgatgacctggagcagatttcagaattgcttgatccacacgctcaacccaaaactcagtacctgcccgggcggcccgctccnaaagggcgaaatttccagcnccactggccggcccgttactagntggatccgagcttcgggtncccaagcttgggcggtnatcattggtcataagcntggtttccttgtggtgaaaatttgttatcccggcttcaacaaatttccccacaaacattnccgaacc

SEQ ID NO: 4787 - DNA, 892 bp, Homo sapiens
  misc_feature 580, 592, 596, 638, 658, 687, 695, 752, 776, 778, 784, 788,792, 793, 801, 803, 806, 807, 809, 814, 815, 817, 819, 820,823, 828, 837, 840, 841, 842, 845, 846, 848, 849, 851, 856,857, 861, 869, 871, 872, 875, 876, 881, 882, 883, 885: n = A,T,C or G
  misc_feature 886, 887, 888, 889: n = A,T,C or G
actcctatagggcgaattgggccctctagatgcatgctcgagcggccgccagtgtgatggatatctgcagaattcgcccttagcgtggtcgcggccgaggtacctgtaaatctctcagctaagttaagctataaatttgattaggttgacttgggcaaatgcaccataaagtcctttccagagaaggagttcacttttcataggttctacttgaaggaattgtccaagaaggtttactgtataaaggaaattgaacacagaaggaatgaaaagtaaaaattaaacctaaaatttgcagaagaaaacactacagaaaatttttgtgacctggggtttggcaaagatttcttaaatatgacaccagaagcacagtctataatgaacgtattagtttattgggttaatcaaaatgtaaaacttctgctcttcaaaagacagttattaagagaataaaaagagaaaccacaagattgataatctttgtaagccatgtatcttgatcaaggacattgtagaatatataaagaacttctgaaagctcaatagtaaggaaaacaaatggcttgggtgccggaggctnattcctgtaatnccancaccttttggggagggctgagggcaaggtgggattcattganggtttgggaggttcaaagancaagccttggcccaagattgggtgaaaanccccattntttaactaaaaaatgcaaaaaaattaacttgggctgttggttggccaggcccccttntaaaccccaagcttgcttttgggnanggcttnaagnctannaaaaaaangntcnntnctttnngnanngcntaaancttttttgnttnnnccnntnnanctggnnctanttggtacncnntanntttgnnnannnnnccg

SEQ ID NO: 4788 - DNA, 403 bp, Homo sapiens
gattgtatacgactcactatagggcgaattgggccctctagatgcatgctcgagcggccgccagtgtgatggatatctgcagaattcgcccttagcgtggtcgcggccgaggtacgcgctctccttcgaagtccggaggagtttcctggatttggcactctcgtgcaaagcggtcatatgctgcagagtgtctcctctgcagaagtctgagatagtggatgtggtgaagaagcgggtgaaggccatcaccctcgccatcggagacggcgccaacgatgtcgggatgatccagacagcccacgtgggtgtgggaatcagtgggaatgaaggcatgcaggccaccaacaactcggattacgccatcgcacagttttcctacttagagaagcttctgttggttcat

SEQ ID NO: 4789 - DNA, 467 bp, Homo sapiens
gaattgggccctctagatgcatgctcgagcggccgccagtgtgatggatatctgcagaattcgcccttagcgtggtcgcggccgaggtactagcagaattcagctcctgcagtgataggactgaggtccctgtttccttgttggctatcaactggggtttgctctgggctcctggatactgctgcattccttgccaggtagtcctctccatctccaagccagcaacagcacataaacccctctcctgcttcgaatctcttacctcctcagcttctgacctctaaatacaggtttaaagggctctggcaaatgggtcaagcccactgacaataaattcccttctcgaagtcaactgtgccatatattaaacataatcacaggagtataagccaccctagtcacacagtcccatggattatgcaatatatactggtagtgggtctactggaggtcatttagaattctat

SEQ ID NO: 4790 - DNA, 841 bp, Homo sapiens
  misc_feature 234, 396, 420, 468, 477, 503, 510, 519, 523, 533, 536, 551,626, 637, 640, 641, 645, 652, 653, 657, 660, 661, 676, 678,686, 693, 706, 713, 722, 733, 735, 738, 740, 749, 777, 782,783, 784, 794, 795, 798, 802, 808, 810, 813, 815, 819: n = A,T,C or G
  misc_feature 820, 821, 822, 825, 826, 827, 833, 835, 837, 841: n = A,T,C or G
atgctcgagcggccgccagtgtgatggatatctgcagaattcgccctttcgagcggccgcccgggcaggtacctggatcaaggtggagtcctggttgctatgaaacacacatctctcccaattcgacatctttggttgagttttgatgaagggagatcttggagcaaatacagtttcacatctattccactttttgtggatggggttctgggtgagcctggagaagagactctnatcatgacagtgtttggacacttcagccaccgctctgaatggcagctggtcaaagtagattacaagtccatttttgatagacggtgtgccgaagaggactacagaccttggcagctgcacagtcagggggaagcattgtatcatggggaacaaaaaaggatntataaagaaagccgaaaaaatcanaaccggaaagtgtattgccaaaggaaaaataccccagggagcttttgngaattctgnaaccctgtgtctgcactgggggctgnatttttnaattggcgnactnttggtttttngancgacacaatcaaatnggcccaattgccctgccccggcaatttttgggtttcaaatcccattcctttttcttgtcaaaagggatttgcagnctttgggggancannaagntaacctnnaaantanntaaccttggggcccngngaccaccncttaaangggcggaattttncaagcancactttggncgggcccgttncntangngggattccnaaggcttcgggtacccaaaaacttgggngtaannnatggggcaannagntgtnttcctngnggngnaaannnngtnnnttcccncnancaan

SEQ ID NO: 4791 - DNA, 813 bp, Homo sapiens
  misc_feature 431, 598, 612, 632, 638, 647, 648, 663, 678, 684, 685, 687,690, 698, 702, 705, 717, 720, 723, 724, 725, 728, 729, 737,739, 744, 745, 751, 757, 759, 767, 772, 773, 786, 791, 795,796, 799, 801: n = A,T,C or G
gggccctctagatgcatgctcgagcggccgccagtgtgatggatatctgcagaattcgcccttagcgtggtcgcggccgaggtacggaaacaacacggagcctttgatcaccttggagggaagcatatccttcagatttacttcagaaggaatgaataccatcacagtgcaggtctcagctgggaatgccatcctacaagacacaaagaccatcgcagtatatgaggaattccggtctcttcgcttgtccttttctccaaacctggatgactacaacccggacatccctgagtggaggagggacatcggtcgagtcatcaaaaaatccctggtggaagccacaggggttccaggtcagcacatcctggtggcagtgctccctggcttacccaccactgctgaactctttgtcctaccctatcaggatccanctggagaaaacaaaaggtcaactgattgacctggagcagatatcagaattgctgatccacaccgctcaaccaaaactcagtacctgcccggggcggcccgcttcggaaagggcgaatttcagcacactggcgggccgttacctaagtggatcccgaagctcgggtancccaaagctttggnggtaaatcaattgggcatangcttgntttcccttnnggtggaaaaatttgnttattcccgcttcanaaattnncnccncaacaatnaccnagncccggaaagccntanaannnggnnaaaagccntnggggnngccctnattggngnggagcctnaactnncccaattaaattngccgnttgnnccncncttgcccccctt

SEQ ID NO: 4792 - DNA, 845 bp, Homo sapiens
  misc_feature 4, 561, 630, 646, 654, 717, 758, 765, 766, 768, 770, 788,790, 807, 817, 830, 842, 843, 844, 845: n = A,T,C or G
tagngggggattgtaatacgactcactatagggcgaattgggccctctagatgcatgctcgagcggccgccagtgtgatggatatctgcagaattcgccctttcgagcggccgcccgggcaggtacaaagaaacagcttcaatccttttggggaatggcagggttttgcagaatatgtgttccaaatttggggtcatagcaaaacccctttataaagcaacaagggggccagaaaatgagtcaatggagtgggccctagaaatgaggggaaactttgccaagttaaaacaggctcttaacaaagctcccactcttggcatcccaaacttcattaagcatttttccttgtatatagcaggaaaaaaagggcataactgtgggaatactaacccagaaattgggatcagaacccataccaaccatctacttttcaaagaaattgaacagagtagcctcacagtgaccaagcttgcctgcaggcaatagcagccactgttattttagtggaagaagccactaaaatcaccctgggtcaaccactgaaagtgttaactccacatnaggtaaggtcagtcctgggaataaaaggacatatctgaacgatggggagaaagggtaaccaaataacangctatattcctagatnatccagangttaccccttaaaacctgtaacacccttgaatcccagcttcattggttggccacaggcccagngactggatcacttctgcaggcagggtcatttacatacacantattggnnancnttgacctcatttaaaaanancaaccccttcccaaaanttaaaagganaaatgggtttacnaaacaaaaaatnnnn

SEQ ID NO: 4793 - DNA, 448 bp, Homo sapiens
  misc_feature 253, 340, 347, 399, 403, 415, 425, 435: n = A,T,C or G
atgctcgagcggccgccagtgtgatggatatctgcagaattcgccctttcgagcggccgcccgggcaggtacaaagaaacagcttcaatccttttggggaatggcagggttttgcagaatatgtgttccaaatttggggtcatagcaaaacccctttataaagcaacaagggggccagaaaatgagtcaatggagtgggccctagaaatgaggggaaactttgccaagttaaaacaggctcttaacaaagctnccactcttggcatcccaaacttcattaagcatttttccttgtatatagcaggaaaaaaagggcataactgtgggaatactaacccanaaattgnggatcagaacccataccaaccatctacttttcaaagaaattgaacagagtancctnacagtgaccaanctgcctgcangcaatagcanccactgttatttt

SEQ ID NO: 4794 - DNA, 840 bp, Homo sapiens
  misc_feature 1, 6, 13, 14, 16, 48, 62, 63, 64, 78, 83, 93, 117, 118, 138,150, 164, 169, 170, 171, 177, 180, 181, 183, 198, 199, 200,212, 219, 238, 239, 241, 251, 253, 273, 274, 277, 282, 285,289, 290, 308, 315, 332, 369, 370, 374, 375, 376: n = A,T,C or G
  misc_feature 377, 378, 381, 384, 386, 390, 400, 401, 405, 412, 416, 417,426, 433, 450, 454, 456, 466, 469, 472, 479, 494, 499, 515,517, 519, 524, 532, 551, 552, 559, 566, 588, 607, 611, 627,630, 635, 638, 641, 644, 667, 671, 672, 678, 687, 692: n = A,T,C or G
  misc_feature 695, 701, 706, 718, 762, 766, 770, 780, 783, 784, 795, 806,808, 810, 811, 815, 835: n = A,T,C or G
ncgttnccacttnncnccacccggtccggggaaattgccccggcggcngccgaggtactgannnatgaagagaaaggnacccntatacccaanagattttaaaaactactgaactgnnacctaggggaacaaccctgnagagtatttgcngcccgccagtacangaatnnncgatangtnngnctatatgcgcggctnnncagaagaaatgnaatcagnggggcagaaaaaaaaacgnnanatgggagctnanactttatatgaaaaaaaaannatnggccnttnaaanncttttcccccatcccccnccaaagnctggatagcaaagcganattttggggggagaaacggggaaaaccctagccactnngggnnnnnggngcngncgcnggaggagaannatanaaggcangcanncaccaaaanaaaaaantaaaaaaacccccggcntgcnanacaaagggangcngangggcaanggagcccgcactacngggcnggaccccgggcccgcncnanaaacnagggggancccccgggctgcagggaannccaaaancaagccnaacgaaaccggccgaccccganggggggccccggacccaancttnggccccaaaaaggganggncaaangcnccnctnggccggaaacaagggcaaagcanggannccgggngaaaaaggnaaccnccnccaaanccccncacaaaaccaanccgggaaacaaaaaagggggaaaaccccggggggcccaaaaggngggnaccnaccccacaanaanngcgggggcccnccaccgggccncntnncaangccgggaacccgggcgggcncgccg

SEQ ID NO: 4795 - DNA, 873 bp, Homo sapiens
  misc_feature 3, 5, 9, 32, 33, 41, 43, 48, 51, 78, 79, 87, 94, 99, 112,118, 127, 172, 180, 181, 183, 193, 206, 222, 242, 245, 249,268, 272, 280, 283, 287, 302, 328, 333, 337, 344, 356, 374,379, 382, 383, 384, 386, 396, 426, 474, 480, 484, 495: n = A,T,C or G
  misc_feature 501, 513, 519, 537, 548, 550, 553, 570, 572, 586, 589, 598,604, 612, 616, 622, 625, 626, 635, 638, 651, 655, 665, 673,678, 690, 694, 716, 717, 730, 732, 748, 749, 751, 755, 768,781, 791, 800, 807, 808, 822, 837, 850, 852, 855, 865: n = A,T,C or G
cgngntggnacttttgaaaacccccctttgcnnataccggngnaaaanagnccccccgcccggccaggtaccaccagnnttggccancaaaacncaganttctggcacgatntttaanagaggcctncctgcaggaggcccagggcatgaagaagctgaggcatgagaagcnggtgcagnngnatgctgggancagaggagcccanttacatcgcacggagnacctcggccgctctagaacnagnggancccccgggctgcaggaatncganatcaagcntancganaccggcgacctcganggggggcccgggcccaacttttggtncctanaagngaggggnaaaaagcgcgcntggcggaaacaagggcanaagcnggnnncngggggaaaanggtaatccgctcacaaatccacacaacaanacgaagcccgggagcaaaaagggggaaaaggccggggggggccaaagngggagncaanccacaataaanggcggngcggcccactgncccgcnttacaaaacgggaaaccnggcggccaacngnaanaaaagaaacgggccaancnccggggagaaggcnggnagcggaaanggggcncccttccncgtncctcgncannggaaacgcnggngccccgggcgggnccgnaggggggaanccgggaanaaacncaaacaaaaggngggnaaaacgggaaacccaaaaaaannagggggaaaaccncnggaaaaaaaaaggganncnaaanggccaccaaaaanggccaggaacggnaaaaaagggncgcgggggnggggggnnttacaaaaggggcngccccccggacaagnaaaaaaaaaaaangngcnccaagaaaangggggggg

SEQ ID NO: 4796 - DNA, 770 bp, Homo sapiens
  misc_feature 8, 12, 61, 63, 75, 77, 85, 98, 100, 107, 108, 109, 110, 112,113, 115, 116, 117, 119, 120, 124, 127, 135, 142, 143, 150,151, 153, 156, 157, 160, 165, 169, 174, 176, 177, 179, 182,184, 185, 187, 189, 193, 194, 195, 198, 206, 212: n = A,T,C or G
  misc_feature 214, 215, 216, 223, 230, 231, 233, 235, 236, 237, 240, 241,243, 244, 245, 249, 254, 255, 262, 266, 274, 276, 278, 287,338, 345, 354, 377, 387, 413, 424, 430, 436, 439, 443, 445,448, 459, 479, 508, 511, 531, 541, 560, 562, 568, 577: n = A,T,C or G
  misc_feature 578, 584, 586, 587, 594, 601, 602, 603, 608, 612, 615, 646,647, 648, 653, 658, 659, 665, 673, 674, 675, 681, 685, 687,692, 694, 695, 696, 697, 700, 706, 709, 710, 713, 715, 719,720, 721, 724, 725, 726, 731, 732, 740, 741, 742, 743: n = A,T,C or G
  misc_feature 744, 746, 749, 753, 754, 755, 759, 763, 765, 767, 768, 770: n = A,T,C or G
gattgttntacntctcctatagggcgaattggagctccccgcggtggcggccgaggtaccntnctgatgtgcatngnattatgangcttccaacgcanantgctttnnnncnnannncnnctgnagncctatgcngattacnnaaacacnncntgnntgnaagtncatntaatncnnanacngnncnanccannnacntcatggcngaaaancnnnacatatntgctagnngncnnnatnnannnattnagggnntacttgnactntaatgaancntnaagcagagntagtgtttttccacttcaaatcaatcatatttctgtcatctccaacctaanatatttnttagattgnctccctattctttgattcaaaanccaattacanaaactatgaacttgacctaaatctgntttttgaccantttttnaacatnaantaananaanttccaagccanttcttttcttttgcacactnaccattttttaattacatcatcctctatnatnatagtactttcacaactacnacttctcctntatatcaaaaatcattctnantttccnaattaaatnnaccaanannaaatttnccttcannntctanaaancantttacttttcaactcctttaatttcctatannntaaanaaaannattccncatataannncctttnaacntnttaantnnnnaanttcccntcnnaancncctnnnccnnnctttnnatttaaannnnnanaancctnnntatntttntncnncn

SEQ ID NO: 4797 - DNA, 756 bp, Homo sapiens
  misc_feature 2, 3, 7, 665, 673, 676, 679, 691, 697, 714, 732, 739, 744,756: n = A,T,C or G
gnnacgntatacgactactatagggcgaattggagctccccgcggtggcggccgaggtacttcttacccgtttgattatgatgaacttttatgggagcagaatgctctggacatgccttggaagttctattatcttctaaagttgtatttgaatctaccatatccactaacgcaacactcagattcacacgtaatgcatacacaatgaagaaaccaaaaaaggccaaaattgctaagttgtaacgagcagagcagcacactggagcggcttcggcccgtggggcgcccggtagaagaggcgtgcggtccgtgctctcctcgccatcgttccgggccaggtctcgaaccggagacctcatgacgcctacgtgagcaggtgtacctgccgggcggccgctctagaactagtggatcccccgggctgcaggaattcgatatcaagcttatcgataccgtcgacctcgagggggggcccggtacccagcttttgttccctttagtgagggttaattgcgcgcttggcgtaatcatggtcatagctgtttcctgtgtgaaattgttatccgctcacaattccacacaacatacgagccgggagcataaagtgtaaagcctggggtgcctaatgagtgagctaactacattaattgcgttgcgctcactgnccgctttncantcnggaaacctgtcntgccancttgcattaatgaaatngcccaacccccggggaanaggcggnttgcntattgggccccn

SEQ ID NO: 4798 - DNA, 879 bp, Homo sapiens
  misc_feature 435, 557, 558, 560, 562, 570, 571, 575, 578, 579, 580, 581,583, 584, 586, 588, 595, 596, 600, 604, 608, 609, 612, 613,614, 616, 617, 618, 619, 622, 623, 625, 626, 627, 629, 630,631, 632, 635, 638, 639, 640, 641, 642, 643, 644, 645: n = A,T,C or G
  misc_feature 646, 647, 648, 649, 651, 652, 659, 660, 661, 662, 663, 664,665, 669, 670, 671, 672, 673, 675, 676, 677, 679, 680, 682,683, 684, 685, 687, 688, 690, 691, 692, 693, 694, 695, 696,697, 698, 699, 700, 701, 702, 703, 704, 705, 706, 707: n = A,T,C or G
  misc_feature 708, 709, 710, 712, 713, 714, 715, 717, 721, 722, 723, 730,731, 732, 733, 734, 735, 736, 737, 738, 739, 740, 741, 742,743, 744, 745, 746, 747, 748, 749, 750, 751, 752, 753, 754,755, 756, 757, 758, 759, 760, 761, 762, 763, 764, 765: n = A,T,C or G
  misc_feature 766, 767, 768, 769, 770, 771, 772, 773, 774, 775, 776, 777,778, 779, 780, 781, 782, 783, 784, 785, 786, 787, 788, 789,790, 791, 792, 793, 794, 795, 796, 797, 798, 799, 800, 801,802, 803, 804, 805, 806, 807, 808, 809, 810, 811, 812: n = A,T,C or G
  misc_feature 813, 814, 815, 816, 817, 818, 819, 820, 821, 822, 823, 824,825, 826, 827, 828, 829, 830, 831, 832, 833, 834, 835, 836,837, 838, 839, 840, 841, 842, 843, 844, 845, 846, 847, 848,849, 850, 851, 852, 853, 854, 855, 856, 857, 858, 859: n = A,T,C or G
  misc_feature 860, 861, 862, 863, 864, 865, 866, 867, 868, 869, 870, 871,872, 873, 874, 875, 876, 877, 878: n = A,T,C or G
gcgtatacgactactatagggcgaattggagctcaccgcggtggcggccgaggtacaagtcctgggcacctcctctttgcctccctcctgcccctttcctgctggtgggggcagatcctgtacacacagacacagcgtctgcccccgagccattccctggagaccctgggtctaccccaggtggtcgtcatctgggccatttgccttacttctctggagcatacccaccctcagttacgtgccagacctggaccgcattctcctgccctgtcctggagctggcccctgctgcctggaggaccctgggtaggtcctgagggtgggatggagaagagggcactgctgtggtgtgggagcagtcctggggcttcctggtggctgtgaccaagttgaggggctgttcctgggtggggtggcaatgggaggacaggtcanagcgccctcatttgtggggctgcccctccgggtttctcatcctgtccttggtgcctttttctgcccaacaagtccagggaaggccgaggtctcagactcctgggtaggggtggggttttganntnangaccaaanngccntannnncnntnanaacacanncccnccangggnncannncnnnnttnncnnntnnnntanggnnnnnnnnnnnnannaaggggnnnnnnncccnnnnngnnnanncnnnngnngnnnnnnnnnnnnnnnnnnnnngnnnnangggnnngggggannnnnnnnnnnnnnnnnnnnnnnnnnnnnnnnnnnnnnnnnnnnnnnnnnnnnnnnnnnnnnnnnnnnnnnnnnnnnnnnnnnnnnnnnnnnnnnnnnnnnnnnnnnnnnnnnnnnnnnnnnnnnnnnnnnnnnnnnnnnnnnnnnnnnc

SEQ ID NO: 4799 - DNA, 874 bp, Homo sapiens
  misc_feature 465, 494, 510, 551, 567, 577, 618, 627, 686, 702, 704, 706,734, 735, 740, 742, 746, 754, 756, 803, 809, 812, 813, 818,820, 830, 835, 836, 837, 838, 839, 841, 848, 854, 856, 863,866, 867, 872: n = A,T,C or G
gagcgctaatcgactactatagggcgaattggagctccccgcggtggcggccgaggtacttgggacagttacaggcatgctgctattgccatgatcttcgggaagctgaagtgatgagcagcagtgtgtgattctgaggacacagagggctggggtctaggagctatctcaggtgggctcagtcagtgccatcctcccttttggtgcctccctagaagtgctgagaagatgcaaaaccaaaagcttttactccaacattgcttagccaagctaagcacatgcattccctatgattcagcaattctgctcctagcatgtatcccagagaattgtcccatgggtccataggggcatataagaatggccattgcagcaaagttctggttggggtagggggagctgaaagtcatctggtgtccacaactggaggaatggatggataaaatgggatggatacacaagtangcacacagatgggtgaaaggatggtcaanccttacatggaccagnttccttattcttaagctaaggattagcaatcttccaggccnaaaaaaaaacgttttntggatttccnttgcccactgggagttcccgtggaaagaagagaaatggaantccactaantgaggtgtccttttgaaggatattggatgggagggacacaggggccaaaggaagtttgnttttgggggccccaancntngaagatttttaagttctttttgcacaannaccangncttntggctttngnggttttaaggagccaagaatggcaattccaccccattttccaagggnccaaanccnnctttntnggttcttaanagggnnnnnangcctganagaaantntttgggnggnnattanat

SEQ ID NO: 4800 - DNA, 911 bp, Homo sapiens
  misc_feature 4, 5, 6, 608, 679, 700, 704, 740, 762, 789, 796, 873, 875,884, 900, 909: n = A,T,C or G
cgcnnngcgcgtaatacgactcactatagggcgaattggagctccccgcggtggcggcccgcccgggcaggtactattgtagtagctatcagagtgcagtttaccaaacagtaatttatcctacacataaactgcagacctaaacaataatacatatacatagttattctttgcaccattgtttgcaaacaacctaaataccagtcacctctatggcattcctcctccaaaatttgtattccctcatctaaatcatgagaaaagacaaaaccaaactgaaaaaggacttctacaaaatacatcaccagccgtcttcaaaagcatcaaggtcatgaaaaacaaggcagaaaaactccagagtggaggagaccaaggaggagtaggttcttggagaagaccaaaggccatttggggcaatctaaagtctggagttcacttaacagtatcaacccaatgttaatttcttagtttgatgaatgcatcgtgattatataacattagaggaagctggatgaaaggtctcaacctcagcaccactggacattgaggggcagatcattcttggttgtggagactgtcctgtgcattgcaggatgtttaattgcatncctggcctcgactcactggagtgcctatagtcctcggccgctctagactagtgggatcccccgggctgcanggaattcgatattaaactttntcgnataccgtcgacctcgagggggggccccgggacccancttttggttcccctttagtggngggttaatttgccgccttggcgtaatnaatgggncatgctgtttcctggggggaaaaatggtattccgcttcacaatttccccccaacataccgagcccgggagccttaangngtaaagccntggggtgcctaatganggtgacttnct

SEQ ID NO: 4801 - DNA, 816 bp, Homo sapiens
  misc_feature 4, 5, 7, 11, 16, 20, 30, 33, 34, 38, 54, 56, 59, 60, 62,78, 84, 88, 89, 93, 96, 99, 101, 102, 103, 104, 110, 111,117, 118, 123, 273, 327, 328, 331, 339, 341, 372, 381, 413,424, 435, 440, 442, 460, 472, 480, 483, 529, 548, 579, 582: n = A,T,C or G
  misc_feature 600, 606, 620, 628, 637, 648, 649, 660, 677, 683, 688, 702,717, 723, 734, 740, 771, 780, 782, 794, 801, 803: n = A,T,C or G
catnnantttnaatanattnttcattaatntanntttntttttttgaaatcttntnttnngnttccattatttatatntttttnttannattnttnatnannnnattagnnaggggnnataanatcactatagggcgaattggagctccaccgcggtggcggccgaggtacttgcctgggagaaggcagcggacgcatcacttgcacttctagaaatagatgcaacgatcaggacacaaggacatcctatagaattggagacacctggagcangaaggataatcgaggaaacctgctccagtgcatctgcacaggcaacggccgctnntanaaactaantnggattcccccggggcttgcagggaaatttcnattattcanagccttatccgattacccgttcagaacccttnggagggggggngggcccccggntaacncncaagactttttttgtttncccctttttaanttggaagnggntttaaaattttggccggcggccttttggggccggttaaaattccanttggggttccattaaaggncttggttttttcccctgggtggttggaaaanaantttggttttaattccccngccttncaaccaaaattttnccccaccnaaccaaaanctatttaaccnnaaggccccggnggggaaggcccatttanataagnttggnttaaaaaagggccnctttggggggggttngccccnttaaatatggnaaggtntggaaaggcctttaaaacctttccaaccaanttttaaaantnttgggccggttnttggccngnccttccaaccttg

SEQ ID NO: 4802 - DNA, 438 bp, Homo sapiens
  misc_feature 5, 102, 150, 209, 268, 332, 357, 395, 424, 434: n = A,T,C or G
gagcnccgcgtaatacgactcactatagggccgaattggagctccaccgcggtggcggccgaggtacgtctgttcagttttctttgtttttgagcaaagtantcagcccgggcagtgctagctcgcgattccaggatgtagttaacctanaaacaagagggcacagcccggtcaccttgccagccgctccctacccacccagggcatcngagggggtggcagggaaggccctgacctgggccgggtgcctcagggccaggtgctgtcntgtggaaggagtccagtcatcacagcaacctggcagcggctgggcccagagccgctgctctacnatgggaaaacagaggcttggagaanccaagtggccagtccaggcttcccagtcagtgagcggngagctcttcaggttccggagcccatgctnccttctggcntgag

SEQ ID NO: 4803 - DNA, 427 bp, Homo sapiens
gcgtaatacgactcactatagggcgaattggagctccaccgcggtggcggccgaggtactgctgccatttttattggtgtttgattattggaatggtgccatattgtcactccttctacttgctttaaaaagcagagttagatttttgcacattaaaaaattcagtattaattaaacattacttattctaccctcttttttggcaaggaggacaaatacgcaatgttggaaaaccttggatggatatcttctctttaaaaaaatgtaaagataatttggtcttgagggtttaaacggttgataatgcctctacaacaacaagaaaaaagataaaatactaggatagaatcatggtgggcacagtggcttctcaggaggctgaggaggggagggtttgcttgagtccaggagttggagaccagcccag

SEQ ID NO: 4804 - DNA, 433 bp, Homo sapiens
  misc_feature 2: n = A,T,C or G
gnttcgcgtaatacgactcactatttggcgaattggagctccaccgcggtggcggccgaggtacgtctgttcagttttctttgtttttgagcaaagtagtcagcccgggcagtgctagctcgcgattccaggatgtagttaacctagaaacaagagggcacagcccggtcaccttgccagccgctccctacccacccagggcatcggagggggtggcagggaaggccctgacctgggccgggtgcctcagggccaggtgctgtcgtgtggaaggagtccagtcatcacagcaacctggcagcggctgggcccagagccgctgctctacgatgggaaaacagaggcttggagaagccaagtggccagtccaggcttcccagtcagtgagcggcgagctcttcaggttccggagcccatgctccctcctggcgtg

SEQ ID NO: 4805 - DNA, 906 bp, Homo sapiens
  misc_feature 2, 4, 611, 635, 664, 709, 723, 732, 749, 754, 780, 835, 837,852, 859, 863, 866, 868, 881, 883, 889, 905, 906: n = A,T,C or G
gngnggcgccgtaatacgactcctatagggcgaattggagctccccgcggtggcggccgaggtactaccccaaataactttcttattgctctgaaagaagaaaagcaatgtaaatcactatgattattgcacaaacaaccagaattctccaacaattttaagtaatctgatcctcttcttggagaaaattgttacctaatagtttttccttatgaatgttattactactggtataaatcaaatttctataaatttcctacttaagtcttaagaactgggttcttcctttgatgttattcatgttcagaaaggaaacaacactttactcttttaggacaattcctagaatctatagtagtatcaggatatattttgctttaaaatatattttggttattttgaatacagacattggctccaaattttcatctttgcacaatagtatgacttttcactagaacttctcaacatttgggaactttgcaaatatgagcatcatatgtgttaaggctgtatcatttaatgctatgagatacattgttttctccctatgccaaacaggtgaaccaaacgtaggttgttttttactgatactaaatgttggctcccgngattttatagtatgcacatgtcanaaaaaaggcaagacaaatgggcctcttgnacctcggcccgctcttagaactaggtgggaatcccccccggcctngcaggaaatttcgnatatcaagnctttatcgaatacccgnccgancctcgaagggggggggccccgggtancccaaccttttggttccccttttagtggaaggggttaaattgcccccccttgggngnaaaccatggggcaanagccggngttnccngngggggaaaattgntntttccnctcacaaattcccccnn

SEQ ID NO: 4806 - DNA, 623 bp, Homo sapiens
  misc_feature 441, 447, 454, 458, 474, 485, 526, 542, 547, 566, 568, 586,588, 589, 591, 592, 594, 601, 604, 611, 615: n = A,T,C or G
gactcactatagggcgaattggagctccaccgcggtggcggccgaggtacaagtcctgggcacctcctctttgcctccctcctgcccctttcctgctggtgggggcagatcctgcacacacagacacagcgtctgcccccgagccattccctggagaccctgggtctaccccaggtggtcgtcatctgggccatttgccttacttctctggagcatacccaccctcagttacgtgccagacctggaccgcattctcctgccctgtcctggagctggcccctggctgcctggaggaccctgggtaggtcctgagggtgggatggagaagagggcactgctgtggtgtgggagcaatcctggggcttcctggtggctgtgaccagttgaggggcttgttcctgggtggggtggcaaatgggaggacaggtcaagaacgccctnatttgnggggctncccntcccggttttctcatnctgtccttggngcctttttctgcccaacaagttcagggaaggccgaggtctnaaactccctgggtaanggggntgggggggttttgagtttnangggacccaaaagtcgccnannannanacttttnagnaacaacnaatnccccttcc

SEQ ID NO: 4807 - DNA, 871 bp, Homo sapiens
  misc_feature 529, 531, 556, 573, 595, 636, 646, 688, 690, 697, 701, 725,726, 728, 738, 742, 766, 780, 794, 805, 809, 814, 815, 823,839, 842, 843, 845, 853, 857, 864, 869: n = A,T,C or G
actatagggcgaattggagctccaccgcggtggcggccgaggtacgtctgttcagttttctttgtttttgagcaaagtagtcagcccgggcagtgctagctcgcgattccaggatgtagttaacctagaaacaagagggcacagcccggtcaccttgccagccgctccctacccacccagggcatcggagggggtggcagggaaggccctgacctgggccgggtgcctcagggccaggtgctgtcgtgtggaaggagtccagtcatcacaagcaacctggcagcggctgggcccagagccgctgctctacgatgggaaaacagaggcttggagaagccaagtggccagtccaggcttcccaagtcagtgagcggcgagctcttcaggttccggagtccatgctccctcctggcgtgagccactcccggaaggctgtgccctgggctgcctggctatgcctcccacctgctgtgtgacacctgcccggggcggcccgctcttagaactaagtgggatcccccgggcttgnanggaattcgatattcaagctttatcngataccgtcggacctcnaaggggggggcccggtacccanctttttgtttccctttaaatgaggggttaattgcgcgcttnggcgtaaatnatgggcaatagcttgtttccttgtggggaaattggttatccncntcacaantttncacacaaacattacgaacccgggnncnataaaagtgnaaangccttggggtggcctaaatgaagngaagcttaacttcncatttaattggggnttgcgcctcanttgncccgnnttttcaantcggggaaacacctgntcnngncaacttgnattnatgaaantgggncg

SEQ ID NO: 4808 - DNA, 885 bp, Homo sapiens
  misc_feature 415, 567, 627, 650, 652, 666, 673, 688, 690, 692, 694, 700,703, 708, 709, 713, 714, 717, 721, 722, 723, 724, 731, 732,736, 738, 742, 743, 747, 748, 753, 762, 767, 772, 775, 784,787, 791, 800, 804, 812, 814, 815, 817, 818, 819, 826: n = A,T,C or G
  misc_feature 833, 835, 843, 848, 853, 854, 855, 861, 872, 876, 882: n = A,T,C or G
cgtaatacgactactatagggcgaattggagctccaccgcggtggcggccgcccgggcaggtgtcacacagcaggtgggaggcatagccaggcagcccagggcacagccttccgggagtggctcacgccaggagggagcatgggctccggaacctgaagagctcgccgctcactgactgggaagcctggactggccacttggcttctccaagcctctgttttcccatcgtagagcagcggctctgggcccagccgctgccaggttgctgtgatgactggactccttccacacgacagcacctggccctgaggcacccggcccaggtcagggccttccctgccaccccctccgatgccctgggtgggtagggagcggctggcaaggtgaccgggctgtgccctcttgtttctaggntaactacatcctggaatcgcgagctagcactgcccgggctgactactttgcttcaaaaacaaagaaaactgaacagacgtacctcggccgctctagaactaagtggatcccccgggctgcaggaattcgatatcaagcttatcgatccgtcnacctcgagggggggcccggtacccagcttttgttcctttaattgaggggttaaattggcncgcttgggcggaaaataaatggncnatagcttgttttcntttgggngaaaattggtttttncngntnaacaanttnccacnnccannatnaccnnnnccggggnngccntntaanngggnnaaaanacttggggnggccntaaantgngggggcccnacntacnaatttaaantggngtgtgggncnncnnngggcccntttttcnanaagggganaaacnttttnnncccctnttcttttaaanaaantccgcnccg

SEQ ID NO: 4809 - DNA, 892 bp, Homo sapiens
  misc_feature 4, 13, 15, 26, 475, 569, 612, 622, 632, 635, 640, 642, 648,654, 659, 660, 681, 682, 697, 700, 703, 707, 716, 717, 721,726, 729, 735, 736, 742, 748, 751, 753, 756, 759, 763, 765,766, 767, 768, 770, 776, 780, 782, 784, 789, 790, 800: n = A,T,C or G
  misc_feature 801, 805, 807, 809, 815, 816, 817, 819, 820, 821, 823, 824,825, 826, 827, 828, 833, 834, 835, 838, 839, 841, 843, 844,848, 850, 857, 858, 859, 863, 866, 867, 871, 872, 875, 877,884, 886, 887, 888, 892: n = A,T,C or G
gttnggcgtcgcncntaatacgactnactatagggcgaattggagctccaccgcggtggcggccgcccgggcaggtacaggtctggagaggagatggcttctgaggcccataacaaggtgtggcctgtggctgtgctgaactttatgcctctaccctaggcatgaacaaaggcggggttctggctggggtcatcggagcccggaaaccacactacgacatctggggcaatacagtcaatgtagccagcaggatggagtccacgggggtcatgggcaacattcaggtatgtccagtggcacagctggcacgtgctcagactcggcatgagaacaaaaccggaacagtgctttcccacgtgcccctgcctcccaccctggccctgaacagtaagtccagaggcatagacgtggggcaagtggaaaagaatctctgcaatagctagcctcagcacaggaagaaacacttccacccatncacaaaatctgggctgaagttctagatgcatatggcctacctttgggtatgaaccttctaataccttgtgatctgtctcagtggcgtctggcanaaaagctccacgaaagggggccaagggacaagaaaaaccaggnagtgggcagntttcaaggtnaanagggntngccccncagggngaccnntggccctttccttaggaagannagttttttttggatnganaangggngggcccccnncccnttacnttntcgggnntttttntttttnccncncanttntttngnnnnangggggngggngngnggttnngccctctggnngggnantngggggnnngnnntnnnnnnatttnnngtnntntnnaaananatgtgtnnncccncgnngttnngtngnaaataanannnatan

SEQ ID NO: 4810 - DNA, 853 bp, Homo sapiens
  misc_feature 584, 598, 638, 646, 655, 660, 664, 684, 694, 708, 715, 727,752, 759, 770, 772, 807, 812, 813, 818, 839, 840, 847, 848,852, 853: n = A,T,C or G
gggcgaattggagctccaccgcggtggcggccgaggtactgctgccatttttattggtgtttgattattggaatggtgccatattgtcactccttctacttgctttaaaaagcagagttagatttttgcacattaaaaaattcagtattaattaaacattacttattctaccctcttttttggcaaggaggacaaatacgcaatgttggaaaaccttggatggatatcttctctttaaaaaaatgtaaagataatttggtcttgagggtttaaacggttgataatgcctctacaacaacaagaaaaaagataaaatactaggatagaatcatggtgggcacagtggcttctcaggaggctgaggagggaggtttgcttgagtccaggagttggagaccagcccaggcaacatagcgtaaaccctatctctaaaacaatttttagccaggtgcggtggctcacgcctgtaatcccagcactctgggaggccgaggcgggtggatcatgaggtcaggagatcgaagaccatcctgcctaacaaggtgaaaacccccgtctctacttaaaaatacaaaaaaaattancccgggccgccggntggccgggcccccttggtagtccccagcctactccgggangcttgaanggccaggangaatnggcntggaaccccccgggaagttngagccttgcnagtggaagcccganaattgcnccccttgcagtncggcaggtccgggctttgggccganaaaaccnagacttccttntncaaaaaaaaaaaaaaaaaaaaaaaaaaaaaaaagnttggnnccttnccccgggcgggccggtttttnnaactaanngggnn

SEQ ID NO: 4811 - DNA, 712 bp, Homo sapiens
  misc_feature 4, 5, 8, 9, 11, 13, 16, 18, 19, 23, 27, 35, 39, 43, 47, 49,50, 61, 76, 78, 84, 88, 93, 94, 96, 104, 105, 108, 109,112, 341, 360, 386, 395, 413, 417, 455, 457, 465, 469, 478,493, 506, 511, 514, 528, 619, 629, 677, 688, 691: n = A,T,C or G
ttannatnntntnatntnnattntttnctaaaaanaatnctantaantnntaattattatnttttatattatctantnatatantttnttttnngncgagtggnntanntcntatagggcgaatggactccaccgcggtggcggccgaggtacatgacctggacaaattacctccacgggaaggcttcctagagagcttcaaaaaaggctggaaaaatgctgaaatgacgcgtcagctgcgagagcgtgaacaacgcatgcggaatcagttggagctagcagccaggggtcctttacgacagacctttacccacaaaaccctttttcctaacaacccttgngaaaaaggggataaacccncttcccaaattatcccttagccaagncatgctagncaaaaaccccaaaaggtncaanagttattccccttgggccaccgaacaacaactttgggncntggacctntatngtttactgntgccgccaatttctnggccagggaaatntcctngtnctcttttcagaagnacttcaatcccttcaaaaaacaaggacctttgacacctggtgttcccttggcccccaagttccttaggggaactggtgggccacaccaggnaggatgtttncaatttttttaaaaaaaaccgggattttcattggaaaaacaacttctntggtaccctcnggncccgcttcttaggaaacctag

SEQ ID NO: 4812 - DNA, 661 bp, Homo sapiens
  misc_feature 5, 10, 11, 13, 18, 31, 200, 249, 399, 480, 559, 594, 637,642, 645, 647, 648, 649, 650, 651, 652, 653, 654, 655, 656,657, 658, 659, 660, 661: n = A,T,C or G
ttagnccttnncncgacntcgacttactatntggctgattggagctccaccgcggtggcggccgaggtctcgcagcagctggggaggagccaaagcctcggcgctcacctaagccgcagggagatacacccaactgggagatgaggaaacagcaacccagagaggagaactaacccacacaggatcatttcgcgaaggancaaggctgaagaaccagacctggactttcttaggacaaacttactgcancttgaaggagccaaccatggatttgaggcgtgtgaaggaatatttctcctggctctactatcaataccaaatcattagctgctgtgctgttttagagccctgggagcgatctatgtttaacaccatcttactaaccattattgctatggnggtatacactgcctatgtctttattccaatccacattcgcctggcttgggaatttttctcaaaaatatgtggatatcacantacctcggccgctctagaactagtggatcccccgggctgcaggaattcgatatcaagcttatcgataccgtcgacctcnagggggggcccggtcccagcttttgttccctttantgagggttaattgcgcgcttggcgtaatcatggtcatagctgnttttnggngnnnnnnnnnnnnnnn

SEQ ID NO: 4813 - DNA, 405 bp, Homo sapiens
  misc_feature 1, 4, 42, 263, 274, 371, 372, 384, 388, 399: n = A,T,C or G
nctnctatagggcgaattggagctccccgcggtggcggccgngtacatttttaacttctgatgattaccctataaagaactattattattcctaattttactaatgagaaaacaggctttgaaagattaaggagcttgcccatggtcacagagctgggtaaattgtggaatcaagatttaaatccagatctatctgctcatggtttatctattcatcagtttggtagaactaaaatatttgaaaaaccactagtcattttttnaagtattaatngcttacagagttaatttatctttgaaagggaaaacacatagccattctactctagtggatggaaatagagtgttcctaatttaaactaatggtctcnnaaagccaaatanaatnctgttgatggncaggct

SEQ ID NO: 4814 - DNA, 751 bp, Homo sapiens
  misc_feature 5, 7, 11, 13, 16, 21, 23, 27, 33, 34, 43, 44, 47, 49, 51,63, 64, 69, 74, 80, 83, 85, 91, 93, 97, 102, 106, 107, 109,117, 118, 120, 129, 321, 326, 345, 383, 390, 400, 404, 420,423, 450, 457, 471, 473, 477, 485, 490, 498, 501, 502: n = A,T,C or G
  misc_feature 524, 544, 578, 583, 585, 588, 593, 608, 633, 682, 699, 731,739, 749: n = A,T,C or G
tttantnaatntnttnaatgntnaatntaaatnnttgttctannttntncncgtactatatcnnatatntttgntctatnagntnttaatntnacantttanattnntngattagcnngnactttcgcnctcatactactcactatagggcgaattggagctccaccgcggtggcggccgaggtacaacactgtctctgaaggaactcactttctagagacaatagagactccaagacctggaaaactcttccccaaagatgtaagcagctccactccacccagtgtcacatcaaagagccgggtgagcccggctggcctngttanggaaaaaccaaattgaatnctgtgagttgagctcccgaaaaaggccttttatggtanttccagnaaaccacaanatgnaaaaatacctccaggnagntggttatcaaatgccatccaaaagtcntacttgnacaatccttcatgngncatnggggcatncccangggtttcncgnntggaaatggccaaccatgaagnttcaaacctattccttcctngttcccaggccccattccattccaaccccaaaantttgnantgncttangaattcttttgtccntggaattttcattaaccaaaaggtngaaaaaaaaggaaaaggggcttggaaaaaattcccccttcccaaaaagnaaccccttaatttccanttttaaccaaaaattaaggccccttggggggnttggggtngggggtttanaa

SEQ ID NO: 4815 - DNA, 826 bp, Homo sapiens
  misc_feature 1, 2, 3, 6, 7, 8, 9, 12, 14, 15, 16, 21, 22, 23, 26, 28,32, 34, 36, 38, 40, 41, 48, 51, 56, 58, 60, 70, 72, 77,79, 80, 85, 100, 102, 107, 108, 113, 119, 129, 232, 328,337, 350, 351, 352, 356, 373, 390, 401, 410, 413, 426, 479,482: n = A,T,C or G
  misc_feature 493, 494, 508, 510, 517, 523, 528, 531, 541, 545, 575, 580,581, 583, 588, 602, 625, 629, 653, 655, 659, 665, 670, 678,682, 683, 691, 694, 697, 698, 699, 713, 719, 735, 759, 765,775, 776, 779, 780, 790, 792, 807, 809, 813, 815, 816: n = A,T,C or G
  misc_feature 817: n = A,T,C or G
nnntannnnatntnnnatttnnntcntnttcnantntntnntactgtnttnctaantntntaatttgttntntatanannttacntgaattttttttatnanttccnnttagnattagngacttttccnctttacgactcactatagggcgaattggagctccacccgcggtggcggccgaggtacttagaattattaatgagccaactgctgcctattgtttacggcttanacaaaaaggttggagcagaaagaaacgtgctcatctttgacctgggaggtggcacttttgatgtgtcaatcctcactattggagggatgggaaatncttttgaangtccaagttcttnnnaggncttgggtagaacacccncacctttgtgggttggnagaaatgaatntttttgtancanacccccggaattngggttccaaaacccaatttttttaatttggccttggaagtttttttaaaaagnctnccaaaaggccnntttaaaagtaaaangnggaaccnaattcnaaggnttntatgtaaaanccanatgtaaggtaagtcctttgtgttaataagnaaacnngnccccnttctaccggtttancctctttctgtgggaccccggcntttnctttaaggaaaaaaccttaaagtntngggntaattnccccnctccccgnggtnnccctttgntcnaannngaaaaaatttttcntcgaantaatttcaaaaggccntttaattcctggaattacccccgnttcttnactctttccnnaanngggggggggngncccccccgggttaancncccnannnctttttttg

SEQ ID NO: 4816 - DNA, 766 bp, Homo sapiens
  misc_feature 2, 3, 6, 11, 14, 17, 19, 20, 21, 22, 25, 26, 32, 33, 35,37, 41, 43, 49, 52, 55, 58, 62, 67, 75, 77, 79, 80, 81,86, 87, 89, 90, 98, 106, 114, 115, 118, 322, 327, 332, 363,378, 394, 411, 418, 442, 452, 457, 487, 504, 519, 522, 532: n = A,T,C or G
  misc_feature 537, 566, 584, 585, 625, 644, 653, 659, 680, 682, 702, 704,705, 720, 721, 728, 729, 746, 758: n = A,T,C or G
tnntgntgatntgnttntnnnnttnnttaatnntntnaatntntttaanttntcnctntttnctatnttttccangntnnngtttnnannatcttttnactttttntattgggnncgntgcctatacgactcactatagggcgaattggagctccaccgcggtggcggccgaggtactatgtgactatcattgatgccccaggacacagagactttatcaaaaacatgattacagggacatctcaggctgactgtgctgtcctgattgttgctgctggtgttggtgaatttgaagctggtatctccaagaaattgggcaagnacctnggagnaggcattgcccccttcttggcttaccacacntgggggtgttgaaanaccaacctaaatttgntcgggtgttaaaccaanaaatggnatttccacttggaaggctcaaccnccttaccagnccctngtaaaagtaaggattaattgtagtggaaanaatttgggtttaaaagngggaaaaggtttcangtncaaccttttnaccantttttataaggaaaaaaaatttttggggnccttaaccaaaacccccnncgggaaccaaccaaggttaatggcccaatttttttggttntcccccaaaattttttccntgggggttntggggnaaaaattggggttgggaaccnanaaccaatttgggcctttggngnnaaggccccaaaaggnnggccttnnaaaccaaattggccccntttgggggtttntccaaaag

SEQ ID NO: 4817 - DNA, 767 bp, Homo sapiens
  misc_feature 1, 2, 3, 9, 10, 12, 17, 19, 20, 21, 22, 28, 30, 34, 37, 45,54, 58, 63, 64, 65, 67, 80, 82, 83, 84, 87, 95, 96, 98,99, 100, 107, 110, 111, 120, 130, 321, 344, 347, 378, 420,425, 461, 471, 481, 486, 493, 498, 501, 502, 523, 539, 567: n = A,T,C or G
  misc_feature 568, 573, 576, 585, 587, 606, 637, 639, 652, 666, 684, 699,701, 740, 751, 763: n = A,T,C or G
nnngacatnncntcttntnnnntttttntntttnttnaaattttngccatttcnttgntttgnnntnttttataattttntnnnttntggtactnnannnttttaanagnntttgggttnttaacgctcntatagggcgaattggagctccaccgcggtggcggcccgaggtacagaagcatattcccaatctgatgagcaatatgcttgccatcttggttgccagaatcagctgccattcgctgaactgagacaagaacaacttatgtccctgatgccaaaaatgcacctactctttcctctaactcttgggtgagggtnaatttctgggagttggaccatgnatnggaacttcccgccaccaggagctttcattanaccttcttcatgggacctttttttattctttcataggcccgnaatgnaccggggaaaaaaaataaggtttattattttcccangtcctaaagnccccagtaanattcncaaggtnacccnttnngggccccggccttccttaagnaaaacttaaggttggnggatttcccccccccgggggggccttgnncaatnggnaaaattttncngaattaattccaaaatggnccttttaatttccggaatttaaccccgggtncnggaaacccctttnttaagggggggggnggggggccccccccgggnttacccccccaaggncntttttttttgggttttccccccttttttaaggttggaanggggggttttnaaattttgggcnggcc

SEQ ID NO: 4818 - DNA, 724 bp, Homo sapiens
  misc_feature 6, 9, 13, 14, 15, 24, 25, 27, 29, 30, 33, 37, 40, 41, 43,46, 49, 50, 61, 66, 71, 81, 83, 84, 87, 88, 90, 98, 103,105, 112, 316, 323, 333, 336, 343, 370, 371, 406, 407, 415,418, 434, 437, 458, 461, 471, 476, 477, 479, 482, 485, 518: n = A,T,C or G
  misc_feature 527, 531, 542, 543, 547, 553, 556, 563, 572, 607, 637, 639,648, 653, 676, 682, 695, 711, 714: n = A,T,C or G
attttnganattnnnaaattattnntnannttncttnttnntnctnttnnttacttgtttngtgtntcttnccgattcttncnnttnntntttttatnagttntngggccgntatcgctactatcactatagggcgaattggagctccaccgcggtggcggccgaggtaccgagcaggattaccatggcaacaacacatcatcagtagggtaaaactaacctgtctcacgacggtctaaacccagctcacgttccctattagtgggtgaacaatccaacgcttggtgaattctgcttcaccaatgaatagggaaangagcccnacatcggaanggntcaaaanaagcagaccgttcgcttattgaaccgnnttggctcgccccactaagaccagtttaatcccctnntgggttanacnttttttcttgaccacnctncctggctttaataacccccanaanaagggttcangaaanngnatnccnttgaaggggccccccgtctttttcaccggggtncttggttanttcngtttacccttnngggnccggcnttncttaagnaaacctaangtttggggaattccccccccctgggggcctttggncaaagaggaaaatttttccggaattaattncnaaaagtccnttttnatttcgggaaattcacccccggnttcccntaaccccttttgnaaaggggggggggggnggncccccccggg

SEQ ID NO: 4819 - DNA, 756 bp, Homo sapiens
  misc_feature 2, 3, 6, 10, 18, 21, 24, 25, 26, 29, 30, 31, 33, 36, 39,52, 57, 59, 60, 63, 64, 70, 73, 78, 81, 85, 91, 99, 100,101, 107, 109, 110, 115, 116, 117, 118, 127, 131, 321, 329,346, 350, 358, 361, 383, 397, 412, 448, 449, 467, 476, 495: n = A,T,C or G
  misc_feature 515, 517, 528, 530, 533, 537, 548, 553, 556, 563, 571, 597,603, 609, 620, 622, 624, 636, 642, 643, 650, 655, 657, 658,659, 661, 671, 673, 676, 691, 693, 702, 705, 709, 712, 713,717, 724, 727, 728, 731, 733: n = A,T,C or G
tnnatntttncacaattntcnttnnnttnnntnttnttnaacttctgtaatnatttncnntcnnaaaaantgnttctnttnttanaatttnatttttcnnntatttncnnttagnnnngggtccctntacnctcatatagggcgaattggagctccaccgcggtggcggccgaggtacacccagtggctcatatttaacttcccccagcttcccaattcaaactggggggaaaaaaactaaatcattgggagttacttgccaacttggaagttgatatttctttactttgttccatttctaagactttaagttcctctggncatggagntttatctgcaaattcantaanacctaatncanttttgctctaatacccccaccnccaccaattcccanacccgtttaaacaanggctcacttgctcaacctataatatggccccaaatnntttttgcccctcttcccncttttttanataaaaaaacctttttttnatatggaaaagttttcaacnanttttattttgngntanaaanacattttaaanccttntcnaataccnattttttnggggcctccttaacctttccaaaagnccttcntttttncttgggaaaangntnttccttcccctngggaannaattggnaaccntnnnanaaattaattngnganaaccccaataaaaangnccttgggcnaancctnggnntggncctatgnttnnccncntttggccccccgggggggcccgg

SEQ ID NO: 4820 - DNA, 401 bp, Homo sapiens
  misc_feature 172, 393, 400: n = A,T,C or G
ggagctccccgcggtggcggccgaggtccgcagctggggaggagccaaagcctcggcgctcacctaagccgcagggagatacacccaactgggagatgaggaaacagcaacccagagaggagaactaacccacacaggatcatttcgcgaaggagcaaggctgaagaaccanacctggactttcttaggacaaacttactgcagcttgaaggagccaaccatggatttgaggcgtgtgaaggaatatttctcctggctctactatcaataccaaatcattagctgctgtgctgttttagagccctgggagcgatctatgtttaacaccatcttactaaccattattgctatggtggtatacactgcctatgtctttattccaatccacattcncctggcng

SEQ ID NO: 4821 - DNA, 420 bp, Homo sapiens
cgcgtaatacgactcactatagggcgaattggagctccaccgcggtggcggccgaggtctcgcagcagctggggaggagccaaagcctcggcgctcacctaagccgcagggagatacacccaactgggagatgaggaaacagcaacccagagaggagaactaacccacacaggatcatttcgcgaaggagcaaggctgaagaaccagacctggactttcttaggacaaacttactgcagcttgaaggagccaaccatggatttgaggcgtgtgaaggaatatttctcctggctctactatcaataccaaatcattagctgctgtgctgttttagagccctgggagcgatctatgtttaacaccatcttactaaccattattgctatggtggtatacactgcctatgtctttattccaatc

SEQ ID NO: 4822 - DNA, 464 bp, Homo sapiens
  misc_feature 1, 2: n = A,T,C or G
nnatcactacttagggcgaattggagctccccgcggtggcggccgcccgggcaggtacctgttctatagtgatcatcattgctaacagctaaaaaacttccatttaggcaaccagaggaagaaaacgttccatctatctcattggctatctccacaggaaaccttccagaaggatagctcagccatttctgaattagagcttcattcactgtccagatctgctttgtcggattgggacatctgaagtcatctggtggcccacagttctggggactagagtaatgtgaaaagctttgatctccccctgagaaaattctttttacacagaaatattcttcagaatcaatatctggtagacactgcccattataggggtacctcggccgctctagaactagtggatcccccgggctgcaggaattcgatatcaagcttatcgataccgtcgacctcgaggggggggc

SEQ ID NO: 4823 - DNA, 455 bp, Homo sapiens
ctatcactacttagggcgaattggagctccccgcggtggcggccgaggtcgcagcagctggggaggagccaaagcctcggcgctcacctaagccgcagggagatacacccaactgggagatgaggaaacagcaacccagagaggagaactaacccacacaggatcatttcgcgaaggagcaaggctgaagaaccagacctggactttcttaggacaaacttactgcagcttgaaggagccaaccatggatttgaggcgtgtgaaggaatatttctcctggctctactatcaataccaaatcattagctgctgtgctgttttagagccctgggagcgatctatgtttaacaccatcttactaaccattattgctatggtggtatacactgcctatgtctttattccaatccacattcgcctggcttgggaatttttctcaaaaatatgtggatatc

SEQ ID NO: 4824 - DNA, 423 bp, Homo sapiens
  misc_feature 5, 34, 78, 114, 239: n = A,T,C or G
attgnagctccccgcggtggcggccgaggtgcancagctggggaggagccaaagcctcggcgctcacctaagccgcanggagatacacccaactgggagatgaggaaacagcancccagagaggagaactaacccacacaggatcatttcgcgaaggagcaaggcttgaagaaccagacctggactttcttaggacaaacttactgcagcttgaaggagccaaccatggatttgaggcngtgtgaaggaatatttctcctggctctactatcaataccaaatcattagctgctgtgctgttttagagccctgggagcgatctatgtttaacaccatcttactaaccattattgctatggtggtatacactgcctatgtctttattccaatccacattcgcctggcttgggaatttttctcaaa

SEQ ID NO: 4825 - DNA, 673 bp, Homo sapiens
  misc_feature 1, 3, 4, 8, 9, 10, 17, 18, 20, 22, 25, 31, 36, 38, 40, 41,48, 49, 50, 54, 59, 63, 65, 68, 69, 72, 77, 84, 89, 98,101, 106, 112, 113, 115, 117, 120, 124, 317, 354, 384, 403,411, 415, 422, 423, 453, 462, 507, 517, 536, 555, 580, 611: n = A,T,C or G
  misc_feature 635, 648, 650: n = A,T,C or G
ncnncgannnctcttanntntnttntttctnttccntncnnatccttnnnttcnacctntttntntcnnttntttcntttttcncagtntcttttttnacntcctntagttnncncnctntacnctcctatagggcgaattggagctccaccgcggtggcggccgaggtacacataagtgtgtgtgtctcaggaagtaggaaataaaaatggaagctattatgacctcaaaaaaaaaagccaactttgagctaggataaaaattgggtaaaggacatttgcttacctgcaaatgaatcaacttgtggaaattgtgantcttcccatatcattcaagaaaacttgtctttctggnatgaaattactgggcagaaaataataatgnagcaactcttggcaggtgnagcctaanattngatcccnnaaattagaggttttttctggctttaagcangaccagganagggtattaaatctttttttggacaacccctttttccccaccctnggatggcccntaatgcttagggccttggnccctggaggaaacattccnctcaggttaaacctttgaatatttncaccattggacccttacccaggggaatggtncccccatttcttgccaggggggcntggaagtttccangnttttgggggggaaaaccaccccc

SEQ ID NO: 4826 - DNA, 842 bp, Homo sapiens
  misc_feature 1, 3, 5, 6, 8, 9, 589, 642, 672, 684, 714, 716, 740, 782: n = A,T,C or G
ngngnncnnacccgtaatacgactactatagggcgaattggagctccccgcggtggcggcccgaggtactgtgatatccacatatttttgagaaaaattcccaagccaggcgaatgtggattggaataaagacataggcagtgtataccaccatagcaataatggttagtaagatggtgttaaacatagatcgctcccagggctctaaaacagcacagcagctaatgatttggtattgatagtagagccaggagaaatattccttcacacgcctcaaatccatggttggctccttcaagctgcagtaagtttgtcctaagaaagtccagatctggttcttcagccttgctccttcgcgaaatgatcctgtgtgggttagttctcctctctgggttgctgtttcctcatctcccagttgggtgtatctccctgcggcttaggtgagcgccgaggctttggctcctccccagctgctgcgagacctcggccgctctaagaactaagtggatcccccgggctgcaggaattcgatatcaagcttatcgataccgtcgacctcgagggggggcccggtacccaacttttgttncctttagtgagggttaattgcgcgcttggcgtaatcatggtcatagctggttnctgtgtgaaaatggtatccgctcacaattncacacacatacnagccgggagcataaagtgtaaagctggggngnctatgagtggactactccatttantgcgttgcgcttactggccgcttttcaatcgggaaaccttcnggccaactgcattaatgaaacggccaacccccggggaaaaggcggttgcgtatttggccc

SEQ ID NO: 4827 - DNA, 742 bp, Homo sapiens
  misc_feature 1, 2, 3, 4, 5, 12, 13, 14, 16, 17, 18, 22, 23, 26, 27, 31,37, 39, 40, 48, 51, 55, 58, 61, 65, 66, 67, 69, 72, 73,74, 76, 88, 92, 94, 101, 106, 111, 116, 300, 303, 306, 326,329, 342, 354, 391, 427, 446, 531, 533, 539, 544, 559, 561: n = A,T,C or G
  misc_feature 563, 564, 565, 571, 582, 586, 604, 633, 645, 646, 649, 657,662, 664, 666, 672, 678, 681, 682, 686, 690, 702, 708, 718,720, 723, 724, 731, 732, 733, 739, 740, 741, 742: n = A,T,C or G
nnnnnaataatnnnannncgtnntannatcntatatntnnaatatatnccnatanaanttntatnnnanttnnnantattaacatttnactncntattatnagtanaggtnaaccnaaacgatcactatagggcgaattggagctccaccgcggtggcggccgaggtacccttccagtgcaacctccacgatagcaccctcattgggcttagcatagccttcaccgcgagtctgtattctgcgaatgattccgccatcttcctcttccgtcagatcttctcccttaaacttcaaaacaanctncanccttaaaaatacaaagccgntgngccatatgggggnggaaatctttgnaagggacctgcctgctgtaacccgataggcaatattnatggattttgcagggttgatgttgggcaacaccctntcccccaccttcaatgggntgggctaatgggcaaattgttccccaaaagcccctttgtattgaaccctcccccccttatttccccaaggggttccaaaaagggnangaaaanttttnggttcccttttggcngnannncccaantaaccttgggnaagnttcaaaaaaacctttttngttggccccaatttctttaaaataaaggnctcaagaccccnngtntggttatntttgngnanacaaanaaaggnaannttcngggngtccccccccanataaancaatgggggngnctnntatcatnnnttctgnnnn

SEQ ID NO: 4828 - DNA, 435 bp, Homo sapiens
  misc_feature 435: n = A,T,C or G
actactatagggcgaattggagctccccgcggtggcggccgaggtacagtatttaatgtagatttaccatgccgtgtgaagtcttcccaattgggaattatcagcaataaacagacgcataccagcgccatagtgaagccacagtctagctcctgttcctatatctgccagcactgccttcgtccaccttggagacattgctcgatacagaaaccagaccagccaggcagagtcctactataggtatgcagctcagcttgtcccctccaatgaagcattgctgtgaagttccctttcccagctgcctccactaatctgcaaaaagcactttctaaagcactggaaagcccgagatgaggtggaaaaccaagtgggggtgtttctgactttcattcaaggcccttttattaaaattccacggtcatgttgttaccn

SEQ ID NO: 4829 - DNA, 439 bp, Homo sapiens
  misc_feature 76, 96, 117, 149, 213, 218, 220, 235, 280, 295, 319, 375,390, 421, 427, 435: n = A,T,C or G
tagggcgaattggagctccaccgcggtggcggccgaggtacttattggcacaaattcgggcagcctccagggctanggtagggagaagaaaagcancaaagtgagagaagataatanagaaacattcaccacgactatctccagctcangggaactgtgttggcctgaagttttttgtaaaggctcatgtttcatcaaactcccaattccagntgcantngtatgtgggtggggntgagggagcacggaggaaggactggggggtgacgaacaaagaatnctgccttaccttcanaggacagctgctcatattcatctnacaccatgtggccacaaagcggaaactcatccactttttgcctttttccgcccccnggtcaaaaaatgcgnaatctttggcatctaaaaggatttggggttnaagtgntgccaggngggg

SEQ ID NO: 4830 - DNA, 425 bp, Homo sapiens
  misc_feature 128, 162, 311, 314, 371, 397, 419, 420: n = A,T,C or G
ggcgaattggagctccccgcggtggcggccgaggtgctcgcagcagctggggaggagccaaagcctcggcgctcacctaagccgcagggagatacacccaactgggagatgaggaaacagcaacccanagaggagaactaacccacacaggatcatttcgcngaaggagcaaggctgaagaaaccagacctggactttcttaggacaaacttactgcagcttgaaggagccaaccatggatttgaggcgtgtgaaggaatagttctcctggctctactatcaataccaaatcattagctgctgtgctgttntanagccctgggagccgatctatgtttaacaccatcttactaaccatttattgcttatgnggtggaaatacacctgcctaatgtcntttatttccaaattcaccattnngcccc

SEQ ID NO: 4831 - DNA, 765 bp, Homo sapiens
  misc_feature 5, 8, 9, 10, 17, 19, 23, 29, 40, 41, 42, 43, 49, 53, 55,56, 65, 71, 72, 77, 78, 79, 80, 82, 88, 92, 97, 98, 101,103, 104, 106, 107, 114, 253, 257, 272, 275, 277, 294, 297,299, 320, 347, 348, 353, 363, 375, 384, 392, 396, 401, 404: n = A,T,C or G
  misc_feature 406, 438, 441, 456, 457, 460, 467, 469, 480, 493, 518, 538,542, 566, 591, 593, 597, 599, 603, 608, 610, 630, 633, 643,650, 652, 655, 663, 669, 671, 683, 689, 693, 709, 713, 721,724, 729, 740, 761, 764: n = A,T,C or G
aatanatnnntagtatncnatanattttntaaaatgtaannnntaaatntatnannatggatttntttatnntttannnntntttttnttantattnntgnanntnnagattgngggccctatacgatcctatagggcgaattggagctccaccgcggtggcggccgaggtacagatgcaaaacaaaagtggttacttctgactggtatatctgcacagcaaaatcgtgtggtgggagctatgcagctatatnctgnagataggaaagtgtnttnancccattgaaggacatgncanantagctttttgcacaaggtttnaagaattgggaagggaaaaattgccannaaagnaaattcaacnggtatatttttngttttttgncaggttcntggngcccnagncntgggtagggggaaagctttaccattattttanttngaaaagttttgggcnncancacaacncnttaccaagggnggtatacccaagnctcccttttttcccaaaaagaatangggccaggatggggcaatgnttcnttttcttttttccccttccccaangaaaaggccaaccaaaaaaaattgnantttntnttcnccttngnttttggccaataattgggcnaanaaatcccaanatttggnanaanaaaaggcnaatagnanatggtttggggncttggntttntctttttggaattaanaacntcaaaagnatnagttnggggtttttanttaattccccaacccccttcnttna

SEQ ID NO: 4832 - DNA, 432 bp, Homo sapiens
  misc_feature 432: n = A,T,C or G
ggccgcgatcgactactatagggcgaattggagctccccgcggtggcggccgaggtgctcgcagcagctggggaggagccaaagcctcggcgctcacctaagccgcagggagatacacccaactgggagatgaggaaacagcaacccagagaggagaactaacccacacaggatcatttcgcgaaggagcaaggctgaagaaccagacctggactttcttaggacaaacttactgcagcttgaaggagccaaccatggatttgaggcgtgtgaaggaatatttctcctggctctactatcaataccaaatcattagctgctgtgctgttttagagccctgggagcgatctatgtttaacaccatcttactaaccattattgctatgggtggtatacactgcctatgtctttattccaatccacattcgcctn

SEQ ID NO: 4833 - DNA, 833 bp, Homo sapiens
  misc_feature 11, 22, 26, 497, 509, 567, 579, 598, 676, 751, 794, 813,814, 828, 830, 833: n = A,T,C or G
ggttcactacntaaacgactcntatntggcgaattggagctccccgcggtggcggccgaggtactgtgacacctcacagtcacttaccagatacctgggcctttcctagtgacatccttctactgatgctaactggaccctggccacatcaatcgtctcatcagagggtttgtggagtctgtccactaagggtctgaggacaaaagcagcccacagatgtgcaagtgaacttttttgagaacacatcactctgacaggccacatcagcctattttgccctttctgaacacctaaaacaattctaactagcagtctgaaggctcagactgcattacgtaactctgatccaccaggaaagttccagaaactacttcagtagaaaggtagataggaaaaccctcctaaacaaagaaatgtaccttggccgctctagaactaagtggatcccccgggctgcaggaattcgatattaaagcttatcgataccgtcgaccttnaaggggggcccngtacccaacttttggtccctttagtgagggttaattgcgcccttggcgtaatcatggncatagctgtttnctgtgtgaaattggtaatncgctcacaattcccacaacatacgaacccgggagcataaaagtgtaaagcctggggtgcctaaatgagtgagctactnacatttaattgcgttgggcttactggccgcttttcaatcgggaaacctgttgtgccacttgcattaatgaatcgnccaccccccgggaaaagcggtttgcgtattgggcgcttttcgntttcttggttaattgactnnttggcctcggtcgntnggn

SEQ ID NO: 4834 - DNA, 850 bp, Homo sapiens
  misc_feature 16, 95, 248, 526, 534, 564, 598, 601, 655, 683, 709, 723,762, 832, 845: n = A,T,C or G
ttgctattttgacgcncgtaatacgactactatagggcgaattggagctccccgcggtggcggccgaggtactgtgatatccacatatttttganaaaaattcccaagccaggcgaatgtggattggaataaagacataggcagtgtataccaccatagcaataatggttagtaagatggtgttaaacatagatcgctcccagggctctaaaacagcacagcagctaatgatttggtattgatagtanagccaggagaaatattccttcacacgcctcaaatccatggttggctccttcaagctgcagtaagtttgtcctaagaaagtccagatctggttcttcagccttgctccttcgcgaaatgatcctgtgtgggttaagttctcctctctgggttgctgtttcctcatctcccagttgggtgtatctccctgcggcttacgtgagcgccgaggctttggctcctccccagctgctgcgagacctcggccgctctagaactagtggatcccccgggctgcaangaatttcnatatcaagcttatcgataccgtcgacctcnaagggggggcccggtacccaacttttgttccctntantgagggttaaattgcgccgcttggcgtaaatcaatggtcatagctggttcctgngggaaaattggtattccgctcacaattncacacaacataccgagcccgggagcntaaagtggtaaagncctgggggggccctaatgagtgagctaactcacattaantgcgtttgcgcctcactggcccctttccaatccgggaaaacctggcctggccagcttgcatttaatgaantcggccaaccccncgggg

SEQ ID NO: 4835 - DNA, 862 bp, Homo sapiens
  misc_feature 1, 2, 549, 561, 645, 648, 688, 727, 739, 749, 753, 756, 758,777, 780, 790, 815, 819, 824, 828, 837, 843, 844, 853, 856,861: n = A,T,C or G
nncgcttatcgactactatagggcgaattggagctccaccgcggtggcggcccgaggtcagcattaaatcgggatccagttcttccagcatcccagagtctcagtcaaaccactccaatcagtctgatagcggagtttctgacacccagccagcaggacacgtccgttcccagagcattgtgagctccgtattctctgaagcctggaaacgaggcactcagttggaagagtccagcaaggccagaatggagtctatgaatcggccctacacttcacttgtgcctcctgcagcagcagaagacggctcgaagcaacatggacaacatgttcgagagctacatcaacaaccttaggcggcagctggagactctgggccaggagaagctgaagctggaggcggagcttggcaacatgcaggggctggtggaggacttcaagaacaagtatgaggatgagatcaataagcgtacctcggccgctctagaactagtggatcccccgggctgcaggaattcgatatcaagcttatcgatacccgtcgacctcganggggggcccggncccaacttttgttccctttagtgaggggtaattgcgcgcttggcgtaatcatggcatagctggttcctgggtgaaattggtatnccnttacaattcccacaacataccaacccgggagccttaaagngtaaagcctggggtgcctaatgagtgagcttaactcacnttaatgggttgnctcactgccntttncancngggaaacctggcggccagntgnttaatgaatnggccaccccccggggaaaagggggnttgngtttngggngcttttccnttcttnnttaattgantgnttggnc

SEQ ID NO: 4836 - DNA, 632 bp, Homo sapiens
  misc_feature 1, 24, 62, 65, 70, 72, 84, 92, 97, 101, 108, 109, 112, 114,117, 135, 136, 139, 141, 143, 148, 150, 151, 155, 156, 166,178, 181, 182, 185, 186, 187, 190, 195, 196, 219, 239, 245,271, 330, 389, 421, 457, 510, 585, 590, 597, 598, 599: n = A,T,C or G
  misc_feature 600, 601, 602, 603, 604, 605, 606, 607, 608, 609, 610, 611,612, 613, 614, 615, 616, 617, 618, 619, 620, 621, 622, 623,624, 625, 626, 627, 628, 629, 630, 631, 632: n = A,T,C or G
ncgaatacgacttactatatggcnaattggagctccaccgcggtggcggccgatgtacaacnagngaatncncaggactacgtnaattaaanatgantctnatcgatnnacntnganctcggacggggggcccgnnacncngnttttntnncctnnagtgagggcnctttgcaccctnagnnttnnnatngtcanngctattatctgattaacaatgtnaccatatggaagcaactttntttggngtctcaaaggaataactgcagcttgntttgaaatttgtacaataatgtaaatcctaaaagcaccactattttagcataataaaanaaagtccaaagagctcctatatagactactccagataacttcgcttctttgatacttgnagcttattgtaattttttttaaaaaattcaanggcattattattgtacctcggccgctctaaaactantggatccccccggctgcaggaattcgatatcaagcttatcgatccgcgacctngaaggggggccccgtacccaacttttgttccttttaatgaagggtaattgcccctttgcgtaatcatgggcatanctggnttcgggnnnnnnnnnnnnnnnnnnnnnnnnnnnnnnnnnnnn

SEQ ID NO: 4837 - DNA, 398 bp, Homo sapiens
  misc_feature 1, 4, 182, 203, 327: n = A,T,C or G
nctntagggcgaattgggccctctagatgcatgctcgagcggccgccagtgtgatggatatctgcagaattcgcccttagcgtggtcgcggccgaggtacttttttttttttttttttttttttttgctctaatctttgtttatagaaggagtaaataatcgaaacaaagaacattccagtntgcagtgctgatggttacacngataaggcagggccaggcaccaacactaagactggctatctatgaaggtgaaaacacataactttgataatgaagctgtctcctgatttatagaagctaggctgtcttaactcttgggattcanagccaaccaaggtctggagaaaactctgcctggagggagagagccgaatatgcagccaggatttaaagaga

SEQ ID NO: 4838 - DNA, 652 bp, Homo sapiens
  misc_feature 84, 92, 244, 652: n = A,T,C or G
cgcgcgtaatacgactcactatagggcgaattggagctccaccgcggtggcggccgggggccattgagactgccatggaagacnggaaaggncacgtagctgagacttctggagagaccattcaaggcttctggctcttgacaaagatagaccactggaacaatgagaaggagagaattctactggtcacagacaagactctcttgatctgcaaatacgacttcatcatgctgagttgtgtgcngctgcagcggattcctctgagcgctgtctatcgcatctgcctgggcaagttcaccttccctgggatgtccctggacaagagacaaggagaaggccttaggatctactgggggagtccggaggagcagtctcttctgtcccgctggaacccatggtccactgaagttccttatgctactttcactgagcatcctatgaaatacaccagtgagaaattccttgaaatttgcaagttgtctgggttcatgtctaagcttgttccagctatccagaatgcccacaagaattcaactggatctggaagaggaaagaaactgatggtgttaactgaacccattttgattgagacctacacagggctgatgtcattcattggaaaccgcaacaaacttggctattcccttgcccn

SEQ ID NO: 4839 - DNA, 644 bp, Homo sapiens
  misc_feature 83, 88, 552, 598: n = A,T,C or G
cgcgtaatacgactcactatagggcgaattggagctccaccgcggtggcggccgcccgggcaggtacattttaaacgggtgcnttgtntggtatgtaaatcatacctcaaaaaagctgttacataaatggtgcctagagagcatatacatgttctaaactcatccggagagtcagggaagattttactgaagaaattaactaggagttgagagtgaaggaatgagttaaatacattagggagaggtagaagtagaaggtgtgagacttgggggttgagggcattctagacacaaagggaaaagaagtacacacaagtccagtgttgccaaggagctttgtttatagaaagaagcttggtcccctcagttctatgctgttgtgtggcctggttggtacctcggccgctctagaactagtggatcccccgggctgcaggaattcgatatcaagcttatcgataccgtcgacctcgagggggggcccggtacccagcttttgttccctttagtgagggttaattgcgcgcttggcgtaatcatggtcatagctgnttcctgtgtgaaattgttatccgctcacaattccacacaacatacnagcccggagcataaagtgtaaagcctggggtgcctaatgagtgaac

SEQ ID NO: 4840 - DNA, 662 bp, Homo sapiens
  misc_feature 9, 16, 89, 90, 95, 218, 247, 564, 568, 570, 617, 632, 647,649, 653, 656: n = A,T,C or G
gagcgcgcntaatacnactcactatagggcgaattgggagctccaccgcggtggcggccgaggtacctagataggagaaatatccaacnnccatntgtcacagtgtcctcagttggggaaggggataggcattggggcagctagctgtcctgtaacttctcctgaactgactccgggctgggtcagccctttatgactgtagctcgcaaactgcttancgtccctggccttctgggctgctcaggcngggatccagagagtcgcaggtcagagccaccacgtgtctgaaaggtcttccttccttcgtaaccccttgggagatctcatcctggtgtgggccaggtctggtagtcaggaacttcctccgtcaatggggtgaggtggttcccttttacatatagatactatttcatatttcctcattgctaattctccagattaaaatgtctgttttcttttttgtgtttcttccccaaggtctttaagtggagtggagaaaattcatactttatcaatgggagacataagttctttagaacttggtggtggagggtaagggttttnttgntnttggtttccttattggtattttaccaccctgaccctgagtggggtcntgtttttgacctacntagttaaaaacttcngngtcnggntatttt

SEQ ID NO: 4841 - DNA, 672 bp, Homo sapiens
  misc_feature 88, 90, 248, 249, 453, 460, 482, 484, 490, 492, 526, 530,541, 550, 570, 587, 591, 661, 668: n = A,T,C or G
gagcgcgcgtaataccgactcactatagggcgaattggagctccaccgcggtggcggccgctctccactgcattttcaatctctagcngngtctgatggggtaacaaagagacagcaatataataaaagagtctttcactgactgcctgggaacaagcacaacctgcatggccatcaaaaacccccaaaagcatccctctggtctgcaagcaggttgctgcacttctccggtcctcaatgggtgcatnngcaggcagctgattgctgtcaaatccaaggatagaactgacatttttgtcgtcaaattctggcactttgaaactgtattcattagctttaaggatgctattgacttgtggaggtgtgaggtaaaatttctgtggtgtggaagcatatctccttccttgggtgtacctcggccgctctagaactagtggatcccccgggctgcangaattcnatatcaagcttatcgataccgncnacctcnanggggggcccggtacccagcttttgttccctttantganggttaattgcncgcttggcntaatcattggtcatagctgnttcctgtgtgaaattgntatnccctcacaattccacacaacatacgaacccggaacataaagtgtaaagcctggggtgcctaatgagtganctaactnacat

SEQ ID NO: 4842 - DNA, 656 bp, Homo sapiens
  misc_feature 3, 88, 247, 639, 644: n = A,T,C or G
gcnccccgtaataccgactcactatagggcgaattggagctccaccgcggtggcggccgcccgggcaggtacagatacagtttttaancctaaagttactggtgaaacaagcttgctattactgagatgtataatgaatgtcttaaagctataaatccactcatcgttgtgtttaaggaggaactgaagcacaattgttaagaacaagtgaattaggtgaatatacattgacaaaaggttgataatnaagttgtcagaatttcaaaaataatttagtgtgacttgaaatcttaaaatcatgttatattaaattaagtaacactttactgatttaatatttgagtcatttctaaggaaaatactgaaatatcaattgcttaacagaagtttaaaatatacgtaatttggcatcttggtttcacatgttatggaaaagctaaacatatttgggcctgttaattaaaggcataaaaattattttatgagatggtgttcatctgcaaaatactaacatgatgcacttcaaaatgcttactaattttcactagaaattaaggttactaagagttaattaaaattaatattagagtaatttaaactagaaataattgaagggaaacaaatctgtacctcggccgntctanaactagtggatc

SEQ ID NO: 4843 - DNA, 622 bp, Homo sapiens
  misc_feature 571, 599: n = A,T,C or G
agcgcgtatcgactactatagggcgaattggagctccccgcggtggcggccgggggccattgagactaccatggaagacttgaaaggtcacgtagctgagacttctggagagaccgttcaaggcttctggctcttgacaaagatagaccactggaacaatgagaaggagagaattctactggtcacagacaagactctcttgatctgcaaatacgacttcatcatgctgagttgtgtgcagctgcagcggattcctctgagcgctgtctatcgcatctgcctgggcaagttcaccttccctgggatgtccctggacaagagacaaggagaaggccttaggatctactgggggagtccggaggagcagtctcttcttgtcccgctggaacccatggtccactgaaagttccttatgctactttcacttgagcatcctatgaaaatacaccagtgagaaattccttgaaatttgcaagttgtctggggttcatgtctaaacttgttccagctattcagaatgcccacaaagaattcaacttggatctgggaaagaagaaagaaaactgatggnggttaactgaacccattttttgattganaaccttgcacaaggggcttgatt

SEQ ID NO: 4844 - DNA, 646 bp, Homo sapiens
  misc_feature 85, 86, 88, 90, 245, 621, 626: n = A,T,C or G
cgcgcgtaatacgactcactatagggcgaattggagctccaccgcggtggcggccgcccgggcaggtaccagacccgacaggacnngngnatctataacaccacctacctgaatgtccagcgggaaaatgggaccatctccagataccgtgggaggccaagagcatttcgctcacttgctgatcctcagggacaccaagacctacatgcttgcttttgacgtgaacgatgagaagaactgggggntgtctgtctatgctgacaagccagagacgaccaaggagcaactgggagagttctacgaagctctcgactgcttgcgcattcccaagtcagatgtcgtgtacctcggccgcccgggcaggtaccacgtccatggagaagatctggacaagctccacagagctgcctggtggggtaaagtccccagaaaggatctcatcgtcatgctcagggacactgatgtgaacaagagggacaagcaaaagaggactgctctacatctggcctctgccaatgggaattcagaagtagtaaaactcgtgctggacagacgatgtcaacttaatgtccttgacaacaaaaagaggacagctctgacaaaggccgtacctcgggccgntctanaactagtggatcccccgggc

SEQ ID NO: 4845 - DNA, 650 bp, Homo sapiens
  misc_feature 82, 242, 638: n = A,T,C or G
cgcgtaatacgactcactatagggcgaattggagctccaccgcggtggcggccgaggtactgttgcagtgagctcaagtgtngggtgtatcagctcaaaacaccatgtgatgccaatcatctccacaggagcaatttgtttaccaagaatctaagaattaaatcttagaatgtattaatgttaaatttctgtgagattatattgtagtcacgtagaatgtcctgacttgtaggaatacccanttttttttctgatgctttactaacttcatcttttagatttaaatcattagtagatcctagaggagccagtttcagaaaatatagattctagttcagcaccacccgtagttgtgcattgaaataattatcattatgattatgtatcagagcttctggttttctcattctttattcatttattcaacaaccacgtgacaaacactggaattacaggatgaagatgagataatccgctccttggcagtgttatactattatataacctgaaaaaacaaacaggtaattttcacacaaagtaatagatatcatgacacatttaaaatagggcactactggaacacacagataggacatccaggttttgggtcaatattgtagactttttggtgggatganatatgcaggttg

SEQ ID NO: 4846 - DNA, 606 bp, Homo sapiens
  misc_feature 1, 35, 44, 65, 92, 94, 95: n = A,T,C or G
ngccgtatcgactactatagggcgaattggagctnaccgcggcngccgcgcggtggccagtgagnctgccatgtgctgacttgaaaggtccntnnctgagacttctggagagaccattcacggcttctggctcttgacaaacatagaccactggaacaatgattaaggagagaattctactggcacagacaagactctcttgatctgcaaatacgacttcatcacgctgagttgtgtgcagctgcagcggattcctctgagcgctgtctatcgcatctgcctgggcaagttcaccttccctgggatgtccctggacaagagacaaggagaaggccttaggatctactgggggagtccggaggagcagtctcttctgtcccgctggaacccatggtccactgaagttccttatgctactttcactgagcatcctatgaaatacaccagtgagaaattccttgaaatttgcaagttgtctgggttcatgtctaagcttgttccagctatccagaatgcccacaagaattcaactggatctggaagaggaaagaaactgatggtgttaactgaacccattttgattgagacctacacagggctgatgtt

SEQ ID NO: 4847 - DNA, 639 bp, Homo sapiens
  misc_feature 5, 6, 10, 12, 14, 17, 20, 35, 45, 68, 83, 89, 135, 156, 163,203, 225, 226, 240, 242, 303, 306, 383, 404, 407, 416, 424,435, 440, 441, 446, 452, 463, 465, 484, 485, 487, 488, 506,508, 511, 512, 515, 516, 517, 518, 519, 525, 529: n = A,T,C or G
  misc_feature 538, 543, 562, 563, 564, 567, 570, 571, 574, 575, 576, 577,585, 587, 593, 594, 595, 598, 601, 602, 603, 606, 607, 613,626, 627, 630, 631, 632, 633, 634, 636, 637, 638, 639: n = A,T,C or G
aagtnncgtnananccnccnatattttaatggaancccacccccntggcggccgcccgggcaggtacnttttatctgaagggnagaggnagccccacctttagtatgtgaatatctgatgaaacgattcaatggntttgtagcattggattcaatntcagggntgggctcctttctaggaatagaggaatattcttatctcangaaaaaaaattcatagtgcggnnttttctcggggggnanatggtggaaaaaggaatcattgacccaacaaaggttgtgagaactgctttattggatgccnctngtgtggcctctctgttaactacagcagaagttgtagtcacagaaattcctaaagaagagaaggaccctggaatgggngcaatgggtggaatgggaggnggnatgggaggnggcatgtnctaactcctanactanngcttnaccttnattaatgaacngngacaggaagcccaaggcanngnncctcaccaataactccananaanncannnnnagaaangaanaaaaaggcnggctnaaaacactataaccatcannnacnggnncannnnacaaaaananaagggnnnacngcnnncanngcccancccaccaaaaaannaannnnnannnn

SEQ ID NO: 4848 - DNA, 706 bp, Homo sapiens
  misc_feature 648: n = A,T,C or G
cgtaatacgactactatagggcgaattggagctccaccgcggtggcggccgaggtaccagatacccagcagggccagcaagacgggggcgttcttctccaggggcgtcgtgcggaagtgctggtccatccagtgagcccccgagagcagctgctcgaagttgtcaaaacccacgtgcagggcaatggagagtccgatggccgaccacagcgagtagcgtcctcccacccaatcccagaactcgaacatgttttgagggtcaattccaaactccttcactttggttgtgttagtagacagggcaacaaagtgcttcgccactgcagaaggatccttggccgcctggagaaaccactccttcgccgtctctgcattcgtgatggtctcctgggtagtaaaggtcttggaggcaatgatgaacagggaggactcggggttcagctgggccagggttttggcaacccgcgtacctgcccgggcggccgaggtacaacgcagagcaggtcctgagttgggagccagtggccctgagcaatagcacgaggcctgttgtctaccaagtgcaggtttaaatacaccgacagtaaatggttcacggcccgctctagaactagtggatcccccgggctgcaaggaatttgatatcaancttattgatacccgtcgacctcagggggggcccggaccccaacttttgttccctttaa

SEQ ID NO: 4849 - DNA, 605 bp, Homo sapiens
  misc_feature 65, 93: n = A,T,C or G
gcgcgtatacgactactatagggcgaattggagctccccgcggtggcggccgaggtacaccccangagttcacttcttcccacctgtggcttnttcctgagctttgtcccctgccttgaaagctcagccaaatcctgtcttgagaaatagcctggtgtgacctctgtgaagtctctctgaccactcagcctggtgtttctctccctgctgaatcctttaagctcctaacctcattcttcctagatgagctaaataaacttccttcttgctactatcttttcatgcatataattttcccccaactacaccatgaactcattgaggacaaagaccaaatgtcatgatttttatacattcaacatggtctaggacagttctctctgcctaaggacattcgataaatacttactgaatgaagtgattaatttcttccttttcattatgttttactctttctatgaaatatcttaaccaaattttattcctttctaagttttccttacaggacgtgataggctgcatgcaagaggcatacagaaaatgggaaatagtatttcgctgtcctgaaactttcagtgaaagagatcacccaacatcaataactt

SEQ ID NO: 4850 - DNA, 844 bp, Homo sapiens
  misc_feature 722, 742, 746, 776, 808, 822, 826, 832, 833, 837: n = A,T,C or G
gactactatagggcgaattggagctccaccgcggtggcggccgcccgggcaggtaccctggactcatacctgaaagcagtgttcaaccttagcaaaatctccaaccagcgcatgaacaattttctacatcacaacgacctggttttcaaattcagttctcaaggccaaatcttttctaaatttaaccaagaacttcatcagttcacagagaaagtaatccaggaccggaaggagtctcttaaggataagctaaaacaagatactactcagaaaaggcgctgggattttctggacatacttttgagtgccaaaagcgaaaacaccaaagatttctctgaagcagatctccaggctgaagtgaaaacgttcatgtttgcaggacatgacaccacatccagtgctatctcctggatcctttactgcttggcaaagtacctcggccgctctagaactagtggatcccccgggctgcaggaattcgatatcaagcttatcgataccgcgacctcgagggggggcccggtcccagcttttgttccctttagtgagggttaattgcgcgctttggcgtaatcatggtcatagctgtttcctgtgtgaaaattgttatccgctcacaattcccacaacatacgaacccggggagcataaagtgtaaaagcctggggtgcctaatgagtgagctaacctcacaattaattgcgttgcgctcactggccgcntttccattcgggaaacctgncgtngccaacttgattaatgaatcggccaacgcnccggggagaggcggttgcggttttgggcgctntttcgctttcttgntaantgactnnttgngctcggt

SEQ ID NO: 4851 - DNA, 863 bp, Homo sapiens
  misc_feature 609, 619, 659, 671, 730, 738, 795, 815, 828, 837, 852: n = A,T,C or G
gcccgtatacgactcctatagggcgaattggagctccccgcggtggcggccgaggtacaaggtgttcttgtgcttaaaggtcatgttcttgtgataaaacgcactgcagagacaacacagtttaattggctgaggcaggtgactccctttaagcatcagggtggaacaaactacacgacaaaatgtaattttaaagaccactctcattcaaatgtaataatatcaaagcacccttaactcattaatgagtgaaacaatgagtgtcatggtctgaactgtgttcccctccccaaacccgtatgttcaagccctaacccctagttatacacataaggtaaatgaaacctcatttggacacaaagtttttgcagatgtaatcaagctaaaattatctctgtaggtgggacttaaaataacatgggttgtctttataagaagagggaacagaaacagataggatgtggagaggaccatgtgaagagagaagctgagactgaaaaggatttatgtattaatattgacagaagccaaggaacaccatctgaagttctgacggcaacatcagaagctaagagaaaggcatggaaaagattcttcacctagagcatncagaggagangttggtcctgcaaacaccttgttttctgacctctgacctncgcaactgtganggaagaaaatttctgttgctttaaagacacaccagcttgtggtaccctgcccggccggncgctctanaactagtggatcccccgggctgcaggaattcgatttcaacttatcgattccctcganctcgaggggggggcccggtncccaactttgttncctttaagngagggtaattgcccncttggcgtaat

SEQ ID NO: 4852 - DNA, 854 bp, Homo sapiens
  misc_feature 2, 565, 570, 571, 572, 573, 574, 582, 584, 585, 586, 587,601, 613, 633, 681, 700, 702, 723, 735, 737, 754, 756, 795,805, 806, 807, 817, 819, 830, 836, 842, 845, 851: n = A,T,C or G
tntggccgtaatacgactactatagggcgaattggagctccccgcggtggcggccgaggtactaccctgcgtgcggcggtgggaagagctgtgagcctggaggactcggggatgacctgtgttctctgcttccgttgtccccagtgtgctttgcaaagcatgttcccaggatgtgggacctgaggaataacttagcagtggccagcatctgaagctatgtgtgtgagcctaggacttttgctagatccctgatcagctcttaaagtaacaggaccccaaaagggaagggaaattcagatttaagtgggctagataatggtttctctggtgccacgctgcttgggttcagatgccagctccagcttttactagctgtgtgacattggggaagttgtctaacctctctgggccttattttctttacctgtaaaacaaggctgctgggcacggtggctcacgcctgtaatcccagcactttgggaggctgaggcaggcagatcacatgaggtcaggagttcaagaccagcctggccaacatgggtgacactccgtcttttactaaaantccannnnnaaaaaaanannnnaaaagtcctgcccnggccggccgctntaaaactagtggatcccccnggcctgcaggaattcgatatcaacttatcgatcccgccgaccctcgangggggggcccggtacccancnttttggtccccttttattgangggtaaattgcncnccttggccgtaatcatngncaatagctgtttcctggggtgaaaattgttatccccttnaaaatttcannnaaccataacnanccccgggagcntaaagnttaaanccntggggngct

SEQ ID NO: 4853 - DNA, 851 bp, Homo sapiens
  misc_feature 2, 3, 8, 12, 13, 15, 16, 29, 30, 487, 651, 679, 737, 799,806, 850: n = A,T,C or G
gnnagtgncgcnnanncgactactatagnntatagggcgaattggagctccaccgcggtggcggccgaggtactttcacagcaacatttagactagtgtttgaccaacaactgggcaccacggtcaagccaagttggcatatagaattagccagcaaacttggtattcacaatctgtcattatagtcttatctataaacctaaggtttagagaaacgctggtcattctgaacaattccctgtgaatgcagagatcaaggagcctccccttaactgggtaggcagtgtgaaatacctgcagtgtgcttgaccttactgttcacccactggcagctgttcctacagcttggcttcagatatataatattacattggctaacttcaaagagcattgttttccaaggatagagatggtgatggtgtatattacttttaccagccccagacctgtaagaggttctcatctcttttgtttaagattttgttgnttttttttaatgctcaataaaagaagctttattctttcattaaaaaacaaatctcaaaagaacagggaagaaaagggtagcctatgaaagtgtgattggtatttgataccatcgtgacttaacttggtttcacctaagactctgagaatctattctggttatgngagaatttgggctgagtcaactactatncatattaactgaatcattaaacaattaatccatcatctgggtacattttggggggganggggccttttacacacacttaagccccattttttactttttttttttttgcggcaaatggcntaactgnttggttttacaccatgcccattaaaaccttttggtttagagggnt

SEQ ID NO: 4854 - DNA, 858 bp, Homo sapiens
  misc_feature 1, 4, 7, 612, 624, 689, 714, 721, 725, 727, 730, 751, 765,774, 792, 796, 804, 807, 808, 822, 850, 857: n = A,T,C or G
ntgncgncgcgcgtaatacgactactataggggcgaattggagctccaccgcggtggcggccgcccgggcaggtaccacaagctgtgtgtctttaagcaacagaaatttcttccctcacagttgcggaggtcagaggtcagaaaacaaggtgtctgcaggaccaacctctcctctggatgctctaggtgagaatcttttccatgcctttctcttagcttctgatgttgccgtcagaacttcagatggtgttccttggcttcattttcttgtagggggattcccctgggtctgtgccactcctgggtgaatggttgatctgtctcactcttctccgtgatccgaaggtcacactatgtcactgatgaatccttatgtgtccacctggatgttccggttgaagagctagtgtctcaccactctttctgctatttgtgagagtggtacacactaactgcttctagtcaaccatcttggccccacctcactcacttttctcaagtaaatcaaagaacttttgagaagtgggagatgaaatgttttgaattgccccttcgttttgcattcctggaaatttcaacacctaaaaatgcacagggagccaagaaagcatntttaagttcatngggagggtaaatgaatgctggtcttctagaacatgtttcaaggagctggacacgtttcttaccanggggagactacactgcagatcatanttctganccangnaanaagtgagaagttccattgcancttgtgggaacctntttccttcnaaagtgtccccgcggtancttnggccggtntannaactaggtgggatncccccgggctggaaggaatttgatattnaaccttnt

SEQ ID NO: 4855 - DNA, 863 bp, Homo sapiens
  misc_feature 2, 693, 699, 801, 823, 833, 847, 850: n = A,T,C or G
gncgcgcgcgcgtaatacgactactatagggcgaattggagctccaccgcggtggcggcccgaggtacccttctgggtcatttcaatgcatgtgtgtagggatgagcgtaggaactcataatgcaacttcaggggacccctttcttgagctccctcctctttgtggtttccccaacactcttagacaccagggggcgctttctctcccctccggctggcaagctggggtttgagcctctctgctctgtcttgtatctcccacaactaggtcttcttctggggcaaaggggtaaaagaaaagaaagaaaaacaagtaacaggaattctctcacactctttgaaccccaggggttcctttactcagtttctctggccaaagagaaggactctgaggtacctgcccgggcggccgctctagaactagtggatcccccgggctgcaggaattcgatatcaagcttatcgataccgtcgacctcgagggggggcccggtacccagcttttgttccctttagtgagggttaattgcgcgcttggcgtaatcatggtcatagctgtttcctgtgtgaaattgttatccgctcacaaattccacacaacatacgagccgggagcataaaagtgtaaagcctggggtgcctaatgagtgagctaactcacattaattgcgttggcgctcactgcccgctttncagtcnggaaacctgtccgtgccacttgcatttaatgaatcgcccacgcgcggggaagaggcggttgcgtattgggcgctttttccgctttcttggtcaactgactcnttggcttcggtcggtcggttgnggggagcggnattaacttaactcnaanggcggtaataccg

SEQ ID NO: 4856 - DNA, 860 bp, Homo sapiens
  misc_feature 1, 4, 5, 269, 516, 649, 765, 787, 792, 850, 860: n = A,T,C or G
ntgnnggcgcgcgtaatacgactcactatagggcgaattggagctccaccgcggtggcggcccgcccgggcaggtacgtttaaatgggattgtttgtttttcacttgttgatttttttaagttcaccagatgcactgtgctggggttctgtgatagtccctaattgctgtgcaccctcccaagcctgagagcagcaggagggagggttgcgagacagcaaaaaggtggactgcctctctctttgggagctgcatgccggagaagtgtanagctgctcccagctggagaactcaggaggactagggtggcctcactagcatcccaggctagtgggtcttatcctacaaggttcaagtggtggtgaggtctgcagtctatcactgctcagccccatggacttggccccttttctggggagcgtgcaagaaaacttggccttcccaattgctggagctgcagcccctggttttggggtacctcggccgctctagaactagtggatcccccgggctgcangaattcatatcaagcttatcgataccgtcgacctcgagggggggcccggtacccagcttttgttccctttagtgagggttaattgccgcgcttggcgtaatcatggtcatagctgtttcctgtgtgaaattgntatccgcttcacaattccacacaacataccaacccgggagcataaagtgtaagcctggggtgcctaatgagtgagctaactcacataattgcgttgcgctcactggcccgtttcantcgggaaacctggccgtgccanctganttaatgaatcggccacccccggggaagaggcggtttgcgttattgggcgcttttccgntttcttgctn

SEQ ID NO: 4857 - DNA, 853 bp, Homo sapiens
  misc_feature 3, 731, 774, 817, 838, 853: n = A,T,C or G
agncgcgtatacgactcctataggggcgaattggagctcccccgcggtggcggccgaggtacagatacagtttttaaacctaaagttactggtgaaacaagcttgctattactgagatgtataatgaatgtcttaaagctataaatccactcatcgttgtgtttaaggaggaactgaagcacaattgttaagaacaagtgaattaggtgaatatacattgacaaaaggttgataataaagttgtcagaatttcaaaaataatttagtgtgacttgaaatcttaaaatcatgttatattaaattaagtaacactttactgatttaatatttgagtcatttctaaggaaaatactgaaatatcaattgcttaacagaagtttaaaatataccgtaatttggcatcttggtttcacatgttatggaaaagctaaacatatttgggcctgttaattaaaggcataaaaattattttatgagatggtgttcatctgcaaaatactaacatgatgcacttcaaaatgcttactaattttcactagaaattaaggttctaagagttaattaaaattaatattagagtaatttaaactagaaataatgaagggaaacaaatctgtcctcggccgctctagaactagtggatcccccgggctgcaggaattcgatatcaagcttatcgataccgtcgcctcgagggggggcccggtcccacttttggtccctttagtgangggtaattgcgcgcttggccgtaatcatggtcatagctggttnctgggtgaaaatggtatccgctcacaattccaacaacatacanccggggcataaagtggaaagnctggggggcctaatn

SEQ ID NO: 4858 - DNA, 859 bp, Homo sapiens
  misc_feature 1, 6, 8, 620, 715, 736, 774, 826, 830, 840, 854: n = A,T,C or G
natacnancgcgcgtatacgactcactatagggcgaattggagctccccgcggtggcggccgcccgggcaggtacaatgaactatttcagtgtagaatgaattacaaaacagtaatatgaaggaaggtttgattgtaagcacagcagcagcaaatcctccaacatttaccccattatcatttggtgagaggggaaccttaactctaacccttttactgttgttgctctctaccattttgctttttcataaaagttctacatcaaaactgttactccctcttccacaacagcactgaaaactgtatttccttagagctatactgtccccaaaattggaatacagacttcatgagagaatattttatctctgcctaccacagcatgtgaaaaaaaaggaattttttaaaatttaaatgttaaaaattttccaattctaccaatacctaccaacttacaaaactctagagaactcagaaatacacaaacacacattccattaaccaccagagtgatgatgctgtcgcgtcatagagcctctggaaaaccccactgtataactggtgagagaaacagagggaaaaaggcaaacaacttgagaagaattacttaacaagacatangggaagaggtaatcactaaatcctcaataacacaatttccaattctatttagaatttggtatttgggcccagtgtggtggctcacagcagtaatnctaacactttgggaggccaangcaggaagatgtcttggccccagagttcgagaatcggnctgggcacacagtgaggacccccttttttacaaaaattttttataaaagtantcangcatggtggngcacccctgtagtnccact

SEQ ID NO: 4859 - DNA, 450 bp, Homo sapiens
  misc_feature 256, 380: n = A,T,C or G
agccgccctatcgactactatagggcgaattggagctccccgcggtggcggccgaggtacaagttgtctttatgctgcgagataagtcctctcttggtttgagctcccaccttttcagtgaactcttacattttgggggatctgctcttgtaaaggacatcctttctggtctttgattacttgagaaaagtgagtgaggtggggccaagatggttgactagaagcagctagtgtgtgccactctcacaaatagcanaaagagtggtgagacactagctcttcaaccggaacatccaggtggacacataaggattcatcagtgacatagtgtgaccttcggatcacggagaagagtgagacagatcaagccattcacccangaagtggcacagacccaggggaatccccctacaagaaaaatgaactcaagctccatgaggagatgtttca

SEQ ID NO: 4860 - DNA, 459 bp, Homo sapiens
  misc_feature 2, 3, 12, 25: n = A,T,C or G
gnntatgccggnccgaatacgactnctatagggcgaattggagctccccgcggtggcggccgaggtaccaccatttgtttttcaatttgtccaaaagcccctgctcgttcagttttaacactgccaggtttactggatttctttaaaaacgaataaataacactcgatgagtaacaggtggagaacactcagcaagtcacgtgacccaagggatcggtgaatcagctccattacccagcctgccaggttgccctttgacctgaggatgccctgcccccaacatcactgcaggaattgggggatggagccaaggcataagtctccatcattgactcccattatggagaggcgtcattgtaacctaagttttcagaagttgggtattttgaaagcaatggccccaatagttttcccctcctgtctgcttttatagaatttctttttcttttctttttttct

SEQ ID NO: 4861 - DNA, 457 bp, Homo sapiens
  misc_feature 2, 3, 4, 15: n = A,T,C or G
gnnnagccgccctancgactacttagggcaattggagctccccgcggtggcggccgatatgggcttttcaccccaggctgagacagaacaactcaaagaagaaagctcagggctgagatccgggctgagatccagacttcgtgtgagaggacacagctgtgaaagacagaggtttgctgaggctgtggagttgcagctggagaaggtgctgggcttggggcactttgcagagaagggaccttgtgcatgtcaagggaagccattcatgtgggggtacctcggccgctctagaactagtggatcccccgggctgcaggaattcgatatcaagcttatcgataccgtcgacctcgagggggggcccggtacccagcttttgttccctttagtgagggttaattgcgcgcttggccgtaatcatggtcatagctgtttcctgtgtgaaattgttatccgc

SEQ ID NO: 4862 - DNA, 936 bp, Homo sapiens
  misc_feature 1, 3, 4, 5, 6, 7, 10, 25, 44, 53, 55, 58, 66, 92, 94, 102,106, 237, 267, 318, 335, 488, 492, 502, 509, 527, 532, 535,540, 544, 549, 559, 610, 618, 675, 699, 704, 710, 716, 760,763, 768, 815, 847, 905, 921: n = A,T,C or G
ngnnnnnganggcgcgcgtaatacnactctacttatataggggngcgaaatgngnaantctccacncgcggggtggggcgggcccgaagggntncccggggnttgnatgcgggcaaagccgctgggccgtggcctccaagaaatcttttggcttggttaaggcccaagtttttggggttttggtggcccacaagggccccaagaaatccccttcccaaaacccttgtggggccaagnaagggggttcccaagggctttggaccaagnaagaaactaaccttcttccccttttggcttgaaaagaaagggcctttgggnaagggttggttccaagntggggaaacaaggaaaggttggaaaagccaagcctttaaggccccttttggaaggggcaaagccaaagcccaaccaattggaacccaattgtttcaatttcaaccccttctttggcccaaaacccttccccaagggggaacccccttctttcnttcnttgggggggnaaggggnccaaaagggggaattggnaaggnccnttggnaccnttaanttgggggccntttgggttggccccgggggaaaaaaggggggaaagggcccttaaaaacccngggggttnggggggcctttgggttggaaaaggggggggaaacccccctttgggcctttggggggnccccccccaaaatttggggggaanccttngggttnaaattnggccccccttttcccccttttccccccccccaaagggggggggnaanttggnaaaagggcccccccttttttgggtttttttaaaatttggggggcccntttcccccttttaatttttggggccctttttngggtttttttgggtttttgggcccccaagggccccccttttttcttttcccctttccngggggccccccccccnaaggaaagggggcct

SEQ ID NO: 4863 - DNA, 401 bp, Homo sapiens
gcgtaatacgactcactatagggcgaattggagctccaccgcggtggcggccgaggtacagccacaggtggaaaagaaacttggactttctcaaggcggtagacacgaaccgagcaagcgtcggccaagactctcctgagcccagaagcttcacagacctgctgctggatgatgggcaggacaataacactcagatcgaggaggatacagaccacaattactatatatctcgaatatatggtccatctgattctgccagccgggatttatgggtgaacatagaccaaagggaaaaagataaagtgaagattcatggaatattgtccaatactcatcggcaagctgcaagagtgaatctgtccttcgattttccattttatggccacttcctacgtgaaatc

SEQ ID NO: 4864 - DNA, 408 bp, Homo sapiens
  misc_feature 5: n = A,T,C or G
gagcnccccgtaatacgactcactatagggcgaattggagctccaccgcggtggcggccgcccgggcaggtacaagttgtctttatgctgcgagataagtcctctcttggtttgagctcccaccttttcagtgaactcttacattttgggagatctgctcttgtaaaggacatcctttctggtctttgattacttgagaaaagtgagtgaggtggggccaagatggttgactagaagcagctagtgtgtgccactctcacaaatagcagaaagagtggtgagacactagctcttcaaccggaacatccaggtggacacataaggattcatcagtgacatagtgtgaccttcggatcacggagaagagtgagacagatcagccattcacccaggagtggcacagaccca

SEQ ID NO: 4865 - DNA, 871 bp, Homo sapiens
  misc_feature 2, 3, 11, 20, 21, 24, 30, 34, 36, 37, 44, 46, 53, 426, 457,621, 624, 637, 638, 642, 648, 657, 679, 688, 693, 711, 718,720, 723, 728, 733, 734, 739, 743, 746, 748, 749, 752, 755,758, 759, 762, 770, 771, 776, 777, 779, 804, 805, 811: n = A,T,C or G
  misc_feature 818, 824, 832, 841, 847, 848, 849: n = A,T,C or G
annccgcgacncgcgtcaannacnactatngggngnnccccgcngnggcggcncgcccgggcaggtacttttttttttttttttttttttttttggaaattgcctcagacagggattgatgtcaggaggcttcaaggagagaaatatacatgaatgggagaccccaggttgcaggcaacaagagtcacaggtatgggagaaaccaggaagtctgtgccatgttaactttgctcatctcatcgggctttgtactcagataagaatatcatccaaaaacacagcatgttacttcttgtaagtgagtcttactgttccacaaaacccgcgtacctcggccgctctagaactagtggatcccccgggctgcaggaattcgatatcaagcttatcgataccgtcgacctcgagggggggcccggtacccancttttgttccctttagtgagggttaattgcncgcttggcgtaatcatggtcatagctgtttcctgtgtgaaaatggtatccgctcacaattccacacaacataccagccgggagcataaagtgtaaagcctgggggtgcctaatgagtgagctaactcacattaattgcgttgcgctcactggccccttttccantcngggaaacctgtcnngccnacttgnatttaatgnaatcggcccaaccccccggggnaaagcgggnttggntaatgggccccttttccncttcctngnttnacttnaattnnttgcncttnggncnntcnggntgnnggngaaccggnnttaanntnacttaaaagggggggaaaaccgggnnttcccnaaaaacngggggntaaccccnggaaaaaancttttnnnccaaaggccccaaaaaggccct

SEQ ID NO: 4866 - DNA, 848 bp, Homo sapiens
  misc_feature 1, 2, 10, 15, 22, 23, 32, 36, 38, 43, 61, 62, 66, 68, 70,72, 73, 74, 76, 78, 83, 84, 86, 88, 109, 118, 125, 130,133, 160, 285, 292, 294, 327, 365, 491, 536, 547, 560, 563,569, 587, 594, 599, 653, 655, 671, 686, 691, 701, 703, 711: n = A,T,C or G
  misc_feature 724, 725, 736, 741, 742, 745, 747, 748, 750, 752, 762, 765,767, 770, 774, 787, 788, 792, 798, 801, 803, 804, 805, 806,811, 812, 813, 817, 818, 822, 830, 831, 832, 842: n = A,T,C or G
nngccgcganccctnaactacnnctattgggngctncnccgcngcggcggccgaggtactnnggtntntntnnntntnagctnntnanctggtttttactgactgattnatttttgtncattttncaagnaancttgtaatgagcatgcataacatccangccagaaagggaggggcaagagggtgggcatcctgtcaggcactcaaacttttctgaaatttgtgccactggacatatttaataattaactttgggattgaatttggattctgtgtggttaaaanagaatantncgaaaggaccctgatgtaaagccagaagcaganatgccatggaaaagtaaggctgaacttagcacatcaanttcctgggggttaacagaaggtggctgaggctgttaatgggccattcatcccctgattcaaaatctgaacagacttcacttattctgctccctggtgatgctaaaaaattatcagcctatcattantcatgggaaaggagtggaagaggagttggtagaacattccgtgcnggtacctgccngggccgggccgtntanaactantggatccccccgctgcangaattcnatttnaacttatcgataccggccaacctccaggggggggccccggacccaactttttgntncctttaatgaggggtnaatgcccccttggcngtaancaaggggcanancttttttnctgggggaaaatnnttttcctttcncaatnnccncnnananccaacccggnacntntanggtnaaaagcctggggnncctntgaaanccnannnngcctnnntggnngggntttattannntttccccccnggaaat

SEQ ID NO: 4867 - DNA, 411 bp, Homo sapiens
  misc_feature 5, 411: n = A,T,C or G
gagcnccgcgtaatacgactcactatagggcgaattggagctccaccgcggtggcggccgaggtacaatcaggccacgccaaccttccaccagtggcgagatgcccgccaggtctacggcttaaactttgcaagtaaagaagaggcaaccacgttctccaatgcaatgccgtttgccctgaacatcatgaattcccaagaaggaggtaagtagggctttgtcttggcctgatgctgagaccctctcttgttctacctctgccctcccacagctctggctctccgggtaccctagcactgtcactgcattgagctgaggttgcatgtgttctcagagaaacctgctgcctgcctttagatttagagatattaacaattcagaggaggaaagaatggagtttgtatctctttn

SEQ ID NO: 4868 - DNA, 406 bp, Homo sapiens
  misc_feature 5, 62, 63, 78, 79, 85, 92, 112, 114, 115, 120, 125, 126,129, 130, 139, 167, 169, 172, 175, 176, 177, 178, 179, 184,189, 190, 196, 197, 199, 212, 216, 220, 221, 224, 230, 231,256, 268, 270, 300, 336, 379, 396: n = A,T,C or G
gagcnccgcgtaatacgactcactatagggcgaattggagctccaccgcggtggcggccgtnnaacatgtgtcactgnncaggcngtacctntaatactggtgatgctagangnnatgtntatgnncannaggcagggncctgattgtgctgcagtgacaattcacntnttngannnnnacttnatcannatgccnntnacagggtttgacntggntgtnnacnttgacnngtctataactatgtggatcccccgntctgcatgaatncnatatcaagcttatcgataccgtccacctcnagggggggcccggtacccaacttttgttccctttantgagggttaattgcgcgcttggcgtaatcatggtcatagctgnttcctgtgtgaaattgntatccgctca

SEQ ID NO: 4869 - DNA, 399 bp, Homo sapiens
cgcgtaatacgactcactatagggcgaattggagctccccgcggtggcggccgaggtacaccaaaaatggatcataagctaggccttaaacaagttttaatacattttaaaataactgtaagcatattgactatgttctcttacaataactgtattgaattagaaatcatcaacaataatatttctaagaagttgttctgtgcaggaaatgcacaaggggaaaggaaaagacacacacaatacttttaagggtaaacagtctttatcccaagtatatggcaatacagatataataaacaaatcatataataagcaaatcatatgataagcaaatcatgtaataagcaaattgcaatgggaaggggagaagggaaaatatatatatatttacactcacca

SEQ ID NO: 4870 - DNA, 865 bp, Homo sapiens
  misc_feature 74, 205, 359, 418, 446, 456, 460, 462, 484, 518, 541, 547,561, 565, 575, 576, 585, 588, 589, 595, 611, 612, 621, 622,624, 625, 633, 640, 645, 653, 666, 667, 680, 682, 686, 687,688, 695, 696, 699, 701, 703, 712, 717, 720, 721, 723: n = A,T,C or G
  misc_feature 732, 738, 741, 742, 746, 757, 762, 763, 777, 787, 788, 789,800, 802, 805, 808, 814, 815, 840, 841, 847, 851, 853: n = A,T,C or G
tagggcgaattggagctccaccgcggtggcggccgcccgggcaggtacttttttttttttttttttttttcttnggtctctccagtctttgattgtcccgcaacagtattacaaacaaaaggcattaggcaaagcatgctgaattgattggagtcccttggtcaaaggtattattgattgacggcaatcagatccactccctcanaaaggatttgagtaggcctcttctgtccatctgcagaaggttccccaaaaggggcagaggacggggccctggtgggagggtgccatgggagttagggtgacgctgaaccaggagtagcaagaggcctgtgaggagtgcaaggaagaggaggacnctgagctccatggttccagtctgactgccctgcaccccccccgcgtcctcggcccgctntagaactaagtggatccccccgggctgnaaggaatttngatntnaagcttaatcgatcccgtcgancttgaagggggggccccggttcccaaatttttgnttccctttaaatgaggggttaantggcgncgccttggccgtantcantggccataannttggttccntgnnggaaantggttaatcccgcttnnaaaattccnncnnaaaattanaaacccngggancataaaantggtaaaagcctnnggggggcctaatnangggnnnccaaccnnacnantnaattggggntgggngcnnanattggcccnttttcnaanngggnaaacctttcgngcccnnttgtatttaaaagnaaattggccnnncccccggggananggnggnttttgnnattgggggccttttcccctttcttnntaaatnaatntngtgtggccttgg

SEQ ID NO: 4871 - DNA, 859 bp, Homo sapiens
  misc_feature 2, 522, 596, 618, 626, 628, 633, 644, 655, 672, 688, 698,705, 716, 735, 743, 746, 749, 755, 757, 758, 762, 765, 767,773, 774, 776, 777, 783, 789, 801, 804, 806, 808, 811, 816,818, 819, 829, 830, 832, 833, 834, 835, 837, 838, 845: n = A,T,C or G
  misc_feature 851, 853, 854, 855, 859: n = A,T,C or G
cnccgagcgcgcgtaatacgactcactatagggcgaattggagctccccgcggtggcggcccgcccgggcaggtactattccctcccttattcaagactttgcttaaatgtcacctgtgtaatggaatctttcccaatttgtcaatttgtcccattagacaaatagatcaatagttcactgatctattcccagtgctgataacaatacctggcatagagtagatggtcaatgaatatgtgttgaatgaataaatgagcaacgtgggtcagccaccccatgaagttagctggaggttttacaacatcaacagagtgaggtaagagcacgggagacaagccaccatggtcactgtaaaccaggctgccaaactgatttcaattactgcttacaaggaggaagaacaaggatcccatgtggtgcctaggaagtcaacaaagttaataaagcagagttttctagagcctgaggatcaagtatccagtaggaaagctgcccttttacttttcagaaacatctatccnaggcctcgcaacacaggctgacacacccgcgtaccttgggccgctctagaactagtggatccccccggctgcangaattcgatatcaaagcttatngataccgncnacctngagggggggcnccgggacccanctttttgttccctttantggagggttaattgcnccccttggcngtaatcnatggccatagntggtttcctgggggaaaanggtatccnctnacnattccnannacanacnancccggnncnntaaagngtaaancctgggggcctnaangngnganctaantnncattaattgnngnnnncnnaatgccncttttnannngggn

SEQ ID NO: 4872 - DNA, 905 bp, Homo sapiens
  misc_feature 418, 472, 476, 478, 484, 498, 535, 539, 551, 581, 582, 590,595, 599, 605, 615, 625, 626, 629, 631, 638, 641, 651, 652,653, 657, 658, 659, 670, 671, 672, 678, 680, 681, 682, 685,687, 692, 694, 695, 696, 705, 709, 715, 716, 723, 728: n = A,T,C or G
  misc_feature 732, 734, 742, 743, 745, 754, 760, 765, 766, 796, 801, 814,816, 817, 828, 840, 842, 844, 846, 848, 851, 853, 857, 864,866, 869, 871, 872, 877, 878, 887, 888, 890, 893, 894, 895,898, 903, 905: n = A,T,C or G
cgcgcgtatacgactactataggggcgaattggagctccccgcggtggcggcccgcccgggcaggtaccaagattgaagccccttaacattcagttcaagtgttggttccacttgcctgagcacaagttggaagtagctttgttaggattctagccggcatccttgctgtcactactggttcttgtatagtcaagccccactctgtgcagagcaaatctttgctcagttaagcgagcgtcagtcactggtaagcttggctgccggcccggggttgttaggcttttccatgctacacctgaatgagatattgacgagacattgctacctaaacagagttgagaaactgggataaataaataaattaattaaattgtcacagggctgagagaataattttgaaaatgcaacttacacttncagtgcagaaacagaatcaagggaagtcctcggcccgcccggccaggtactttnctgnanaacccnattttcttatttgnaaaatgaactaacatggtttgttacttgcgaaaaatnaaantgaataaatgcnaaagttcttaattgcccaattttggcccgnnaggggggntcttntatnaaaaantggttggtgnaaactgatannttnantttttanaanagtttccttnnngtannncatgggggggnnngcatgngnnnaananttggncnnnttaaaaaanaaangggttnncccgggnagcantggntntgcttttnngntttttgganccttgnccccnnggggggggcccaaccccccctttttttttnttttnggggggtaaaaangnncccttgggggnaaatagggggtnantnangntantngggngaaaaananttncnntacanntcccccaanntnaannntgngtgcnan

SEQ ID NO: 4873 - DNA, 863 bp, Homo sapiens
  misc_feature 4, 5, 441, 443, 469, 479, 497, 504, 506, 516, 522, 531, 535,543, 545, 547, 553, 567, 569, 572, 578, 582, 584, 586, 587,593, 595, 596, 597, 602, 603, 604, 605, 611, 616, 618, 620,622, 624, 625, 630, 635, 637, 639, 640, 641, 643: n = A,T,C or G
  misc_feature 646, 648, 650, 652, 653, 654, 655, 656, 657, 662, 663, 667,668, 669, 675, 678, 680, 682, 683, 684, 685, 686, 687, 688,689, 690, 695, 696, 698, 699, 700, 703, 704, 706, 707, 709,710, 712, 714, 715, 716, 717, 719, 721, 722, 723, 724: n = A,T,C or G
  misc_feature 725, 728, 729, 731, 738, 739, 740, 744, 745, 746, 747, 748,749, 752, 753, 754, 755, 756, 757, 759, 760, 761, 762, 763,765, 767, 768, 769, 771, 773, 774, 775, 776, 777, 780, 781,782, 784, 785, 786, 787, 788, 789, 790, 792, 793, 795: n = A,T,C or G
  misc_feature 796, 797, 798, 799, 800, 801, 802, 803, 805, 806, 807, 808,809, 812, 813, 814, 815, 816, 817, 818, 819, 820, 821, 822,823, 824, 825, 826, 827, 828, 829, 830, 833, 834, 835, 836,837, 840, 841, 842, 843, 844, 845, 846, 848, 849, 851: n = A,T,C or G
  misc_feature 852, 853, 855, 856, 857, 858, 859, 863: n = A,T,C or G
tgcnncgacgcgcgtaatacgactactatagggcgaattggagctccccgcggtggcggcccgaggtacaagttgtctttatgctgcgagataagtcctctcttggtttgagctcccaccttttcagtgaactcttacattttgggggatctgctcttgtaaaggacatcctttctggtctttgattacttgagaaaagtgagtgaggtggggccaagatggttgactagaagcagctagtgtgtgccactctcacaaatagcagaaagagtggtgagacactagctcttcaaccggaacatccaggtggacacataaggattcatcagtgacatagtgtgaccttcggatcacggagaagagtgagacagatcaaccattcacccaggagtggcacagacccaggggaatccccctacaagaaaatggtgagtgagtganangtcccgtgggatgcatatttctgccncgaacctttnaatcctgggctcaagaanatacccnanctggggtctncagacnaaaacaganaacnctgttggntntngggtanagctgctttttagnanggngtggantccnantnncatttngnnncctgnnnncccttnctccnancngncnntttanaatcnanannntnccncngntnnnnnnaattnnaatnnnaaattntanantnnnnnnnnnatcgnngnnnggnnanncnnanannnnantnnnnnttnnantaatggnnnattnnnnnnctnnnnnntnnnnnancnnnanannnnntannngnnnnnnnannannnnnnnnntnnnnnatnnnnnnnnnnnnnnnnnnnaannnnnaannnnnnnanntnnnannnnnaaan

SEQ ID NO: 4874 - DNA, 918 bp, Homo sapiens
  misc_feature 2, 3, 562, 564, 569, 572, 587, 623, 633, 639, 667, 673, 674,677, 680, 686, 690, 691, 694, 700, 705, 710, 721, 727, 728,734, 739, 752, 753, 760, 772, 774, 775, 778, 779, 782, 788,789, 796, 802, 814, 819, 820, 840, 841, 853, 865: n = A,T,C or G
  misc_feature 866, 867, 874, 877, 878, 880, 881, 886, 889, 891, 892, 894,895, 905, 906, 907, 910: n = A,T,C or G
tnncgactactatagggcgaattggagctccaccgcggtggcggcccgcccgggcaggtaccgtgatgtgactctggagaacctggcacttatgtcctccctgggtaagttgctcacactcaccctgtgacttgagctagtctctgttttcccctgtctttccccattggcaagactttctatgtcaggagcatggacacagcttcctgcttcagttctatgggtaggttcttggttgtaggactgaggtgtacctcggccgctctagaactaagtggatcccccgggctgcaggaattcgatatcaagcttatcgataccgtcgacctcgagggggggcccggtacccagcttttgttccctttagtgagggttaattgcgcgcttggcggtaatcatggtcataagctgttcctgtgtgaaattgtatccgctcacaattccacacaacatacgaccgggagcataaaagtgtaaagccttggggtgcctaatgaagtgagctaactcacattaattgcgttgcgctcactggccgttttccaatcgggaaaacctgtcngnccacntgncattaaatgaaatcngcccaccccccgggggagaaggccggttttgcgtantggggcgctnttccgnttttcttgggtaaattgacttcgctggncttcgnnccnttnggcttncggnnaancctgtnttaantttanttaaaaggcgngaatannggttantcccnaaaaatatggggnntaacgcnggaaaaaaaaantnnaannaanagggcnncataaangcccgnacccgtaaaaanggccnnttgtctgactttttttatanngttccgcccccnttgcgagcattnnnaaaaatngcnntnnaattntantnngnntgtaaacctnnnggnattaaatt

SEQ ID NO: 4875 - DNA, 936 bp, Homo sapiens
  misc_feature 468, 478, 558, 566, 601, 606, 607, 621, 633, 647, 651, 653,661, 674, 688, 690, 701, 711, 712, 714, 717, 719, 723, 724,730, 731, 744, 751, 755, 765, 766, 767, 768, 779, 786, 787,793, 795, 798, 806, 815, 823, 837, 844, 845, 846, 851: n = A,T,C or G
  misc_feature 857, 871, 881, 892, 894, 895, 898, 900, 905, 912, 914, 918,920, 922, 923: n = A,T,C or G
gtccgtaatacgactcactatagggcgaattggagctcccccgcggtggcggcccgaggtacccacagctgggagagagctagtgagctccagggagggtcagctgggggagtttcaccattggctgtgtcagccaatggcaaggtgtgtgaacagggaactcctgtgttgagcagagagaggaagaagatgcgtccgagatggagttggggaaggcagcacttgcgtgtttgtgtgtccagagtcgagcggccgcccgggcaggtacgcgggtaaacacatccataaaaagaggaaactagctgaaggaagagaaaaaaccatgagttcagacgatgaagactgttcggcgaaaggaagaaaatcgtcacattgtagtcaataaagccgaacttgctaactccactgaagtgttagaaagctttaaatttggccatgggagagctgggaagttgctctattccctanaattcctttnacaaagaatttcaaggattttgcttggcctggaaagaccggatactttgcttttggttaaaaaattttcctcactgattntgatcatntaatcagggtcaatataaaaaaggcgaaagcccancctgnnattactttatccancttttccagggnttcctttttttaanccantnaatcacanggggcaagggganccctttgagccttnanaagggcccttnttccaatttnngnacngntccnntttttnnccttggggaagtncccttgncccnttttaaaacnnnnggattcccccnggctttnnaggaantnctnttttaaancttataganaacctgtngacctcaagggggngccccgnnncccantttttnttccctttttagangggttaattnccccctttggncnnatntntggtnctaactntntccntngnnaaaattttttccg

SEQ ID NO: 4876 - DNA, 904 bp, Homo sapiens
  misc_feature 4, 12, 35, 360, 361, 364, 419, 535, 552, 573, 618, 642, 671,675, 677, 682, 697, 709, 717, 721, 742, 743, 745, 755, 758,763, 780, 787, 802, 807, 810, 822, 834, 837, 844, 854, 856,861, 862, 872, 881, 892: n = A,T,C or G
cgcnctacttanggcgaattggagctccccgcggnggcggccgccgggcaggtactgactccgaaacattaataccaccagaaactagcaaaatagaatttcactgctttgacacaggagttggctggctgactttttcttaaagggccagatagtaaatattttaggtaaaatttaagctatcatgtaggtatttgcataaccatttaaaatttaaccatctgaaaatgtaagaatcatcttaattgctttagtttgtcaaaccctgctttcatatgccctttaaaaaaatctcagctatggttcattattactagctcagcttttaattctttaaattggttgaattattctctatgnnagntatttttattgaccagttttggaatattttgttcatttatcagggagtatgcggntaatgaagttgtggcaagggataaaagaatacttcaaccgtaatggtggggtactcaagggccagcacgctcctgctcatgcgggataagccactcagagcagacccagctggaanggatcagggatctggancaaagccaagtttacttaaanctaaacccacttgttcctgggtcaagccagtttgttttctaatangcatcattccctgatcattagaancaaggggattgaatgcctcctttgggaangaananggggntctgccccctggganagtgttgctcantggtttgnggtncctccaatgacaaaatggacnncnacttttttgnttnaaccnaatccctgggccccccngggcagngtacccgggggggtnccggnggnggccctttttantggggggggganaantgggggnggttggtggnanaatcnnccccaaaagnggggaaatntgggggttttnggataaatgggg

SEQ ID NO: 4877 - DNA, 406 bp, Homo sapiens
  misc_feature 5, 259, 285, 297: n = A,T,C or G
gagcnccgccgtaatacgactcactatagggcgaattggagctccaccgcggtggcggccgcccgggcaggtacttttttttttttttttttttttttttttggctttttagtactagcacactttctcttcaattctaatttgaagctcctagttgcagtgggcttgggagccagataacaaaaaagttgtattaaaatgtatgaaatataaggatgaataaggttgagggaaactctaaagctattttttttgttanaaaaatctgtttacattatggatacnctgacttgccanaaatctatgattctaaacagatattaatatgtgtgtgcattttttaaagtaataagcaatttttttctgttcaacaattggataattaatgaaaagattacaaaatgaa

SEQ ID NO: 4878 - DNA, 405 bp, Homo sapiens
  misc_feature 5, 134, 160, 174, 200, 263, 265, 287, 314, 377: n = A,T,C or G
gagcnccgccgtaatacgactcactatagggcgaattggagctccaccgcggtggcggccgccgggcaggtacttttttttttttttttttttttttttttatttttttttttttttttttggctggttttaantttattttgatggaacttttgataanaaatctcaaattanacttttaaaagcctttcaagggtcanaagtcaaaggagggcgaacatcaaattttggctgcagtatctaaaaatctgcatgaatttctntnttcttgaggtctccaatatatntggaggttcctggccattttcttgtanggggattcccctgggtctgtgccactcctgggtgaatggctgatctgtctcactcttctccgngatccgaaggtcacactatgtcactgat

SEQ ID NO: 4879 - DNA, 818 bp, Homo sapiens
  misc_feature 41, 54, 80, 453, 487, 550, 560, 566, 574, 622, 634, 650,671, 683, 689, 695, 703, 723, 748, 750, 756, 763, 778, 780,784, 805, 806, 812, 816: n = A,T,C or G
agcgcgtatacgactcactatagggcgaattggagctcccncgcggtggcggcncgcccgggcaggtactaaaatacagngatttgatctagaaaaggtgatgctaaaaatgcatgtagataaaacctaatttttttcagacaccaaaatgaaaaattattagtatgccatgacacatgaacacttttatattccacaaccactgtgctctccttttggtgttcatttgcaatggatggaatgtttatgtcccttccaaatttgtatgttgaaatgctaactctcaagatgatggtattaggaggagaggctgttgagaggtgattaggccatgagggtggaaccctcaagaaaaggattagtgccctcagcaaagaggcctaggagagctagcttgctcttccagcatttagggacacagcaagagggtgccgtctgtgaactagaaagcangccctcaccagatccaaatttgccaatgccttgnccttggactttccagccttcagaaccatgagaagtaaatttctgttgtttataagccacctantctatagtgngtttgntttaacangctgaatggactaaaggcattatttattatgagttctattcacccatngaacattatgtnggcctatgtgtccctngcacttgaggcaggaactgancaaaagtacctnggccgnttttanaactagtnggatccccccgggcttgcanggaattcgaatttaagccttttcgntncccgtngcccttnaggggggggccccgngncccnagctttggttcccttttaagnnggggtnaatncc

SEQ ID NO: 4880 - DNA, 835 bp, Homo sapiens
  misc_feature 599, 626, 664, 675, 680, 683, 706, 721, 723, 729, 730, 734,735, 754, 763, 775, 793, 802, 809, 811, 812, 821, 827, 828: n = A,T,C or G
gcgctaatacgactactatagggcgaattggagctccaccgcggtggcggccgaggtaccttgcacatctctgcctgcgctgctcacccactgtcaagaaagaaaggtagagcctggtgctctccctaagcactgtgggcctcacagttcgggcgggagcccccagcacctggctcttctgcatggaaagcttggtttcactcttcagaggtggtggcaacatccccagaaaaccggtaggcgtgggcacagtggctggaggccgagggctcctcgccatagcagaagcacggccgctctagaactagtggatcccccgggctgcaggaattcgatatcaagcttatcgataccgtcgacctcgagggggggcccggtacccagcttttgttccctttagtgagggttaattgcgcgcttggcgtaatcatggtcatagctgtttcctgtgtgaaattgttatccgcttcacaattccacacaacatacgagccgggagcataaagtgtaaagcctggggtgcctaatgagtgagctaactcacattaattgcgttgcgctcactgcccgcttttcagtcgggaaacctgtcgtgccanctggcattaatgaatcggcccaacccnccggggaagaggcggtttgcgtaattgggcgctttttncgcttttcttnggttnaantgaacttcgttgggcctcggtcngtttcggcttgcggnangccggnnttanncttaacttcaaaaggcggnaaataccgngtattccacaanaattcagggggaataccncagggaaanaaacatntnnaccaaaaanggcccnnaaaaagg

SEQ ID NO: 4881 - DNA, 826 bp, Homo sapiens
  misc_feature 503, 531, 539, 572, 580, 617, 619, 661, 686, 752, 763, 765: n = A,T,C or G
gcgcgtatacgactactatagggcgaattggagctccaccgcggtggcggccgcccgggcaggtacgcgggggcagtgggaagctcgcagcagctggggaggagccaaagcctcggcgctcacctaagccgcagggagatacacccaactgggagatgaggaaacagcaacccagagaggagaactaacccacacaggatcatttcgtgaaggagcagggctgaagaaccagacctggactttcttaggacaaacttactgcagcttgaaggagccaaccatggatttgaggcgtgtgaaggaatatttctcctggctctactatcaataccaaatcattagctgctgtgctgttttagagccctgggagcgatctatgtttaacaccatcttactaaccattattgctatggtggtatacactgcctatgtctttattccaatccacattcgcctggctttgggaatttttctcaaaaatatgtggatattcacagtacctnggccgctctagaactagtggatcccccnggctgcangaattcgatatcaaagcttatcgatacccgtcnacctcganggggggccccggacccaagcttttggttcctttagtnangggttaattgcgccccttggcgtaatcatgggcataagctgntttcctggggtggaaaatggttatncgcttaaaaattccacaccaacataccaagccgggagccataaagtggtaaagcccggggggggcntatggaggtgncntaacctcacatttaattgggttggcgctcactggccccttttccaagtccggggaaaacct

SEQ ID NO: 4882 - DNA, 863 bp, Homo sapiens
  misc_feature 2, 6, 8, 9, 11, 12, 608, 632, 696, 701, 704, 709, 715, 751,766, 768, 769, 774, 776, 778, 782, 797, 808, 820, 822, 827,830, 839, 841, 843, 847, 849, 851, 852, 855, 857, 862, 863: n = A,T,C or G
tntgcncnntnngggcgcgcgtaatacgactactatagggcgaattggagctccaccgcggtggcggcccgggggccattgagactgccatggaagacttgaaaggtcacgtagctgagacttctggagagaccattcaaggcttctggctcttgacaaagatagaccactggaacaatgagaaggagagaattctactggtcacagacaagactctcttgatctgcaaatacgacttcatcatgctgagttgtgtgcagctgcagcggattcctctgagcgctgtctatcgcatctgcctgggcaagttcaccttccctgggatgtccctggacaagagacaaggagaaggccttaggatctactgggggagtccggaggagcagtctcttctgtcccgctggaacccatggtccactgaagttccttatgctactttcactgagcatcctatgaaatacaccagtgagaaattccttgaaatttgcaagttgtctgggctcatgtctaagcttgttccagctatccagaatgcccacaagaattcaactggatctggaagaggaaaagaaaactgatggtgttaactgaacccattttgattgganacctacacagggctgatgtcattnattggaaacccgaacaaactttggcttttcccttgcccgtgggaagtttgggtttttgaaagtnttttnggnacctnggcccnttttaaaactatggatcccccggcctgaaggaattnatttcaaccttttcnanncccgncnanctcnaaggggggggccggnccccacttttngtccctttaatngngggtnaantgccccctngngnaaantngnnatngnttttnn

SEQ ID NO: 4883 - DNA, 870 bp, Homo sapiens
  misc_feature 2, 6, 7, 9, 11, 13, 540, 580, 622, 641, 658, 672, 691, 701,727, 744, 748, 756, 765, 766, 777, 779, 780, 785, 790, 791,796, 804, 816, 818, 830, 847, 848, 854, 856, 861, 865, 867,868: n = A,T,C or G
tntgcnncntngncgcgcgtaatacgactactatagggcgaattggagctccaccgcggtggcggcccgcccgggcaggtaccctggactcatacctgaaagcagtgttcaaccttagcaaaatctccaaccagcgcatgaacaattttctacatcacaacgacctggttttcaaattcagctctcaaggccaaatcttttctaaatttaaccaagaacttcatcagttcacagagaaagtaatccaggaccggaaggagtctcttaaggataagctaaaacaagatactactcagaaaaggcgctgggattttctggacatacttttgagtgccaaaagcgaaaacaccaaagatttctctgaagcagatctccaggctgaagtgaaaacgttcatgtttgcaggacatgacaccacatccagtgctatctcctggatcctttactgcttggcaaagtaccttcggccgctctagaactagtggatcccccgggctgcaggaattcgatatcaagcttatcgatcccgtcgacctcganggggggccccggtacccagcttttggttccctttagtganggttaattgcgccgcttggcgtaatcatgggcataagctggnttcctggggtgaaaatggntattccgcttccaattncacaccaacatacnaacccgggagcataaaagngtaaagcctnggggggctaatgagtggagcctactnacattaattgggttggnctantggcccgnttttccagnngggaaaccctntnngccancttgnnttaanaattggcnaaccccccgggnanaggcgggttggngttttgggggcttttcnnttcttngntaaanggantnngg

SEQ ID NO: 4884 - DNA, 879 bp, Homo sapiens
  misc_feature 22, 25, 26, 36, 39, 41, 45, 46, 48, 52, 177, 184, 340, 517,532, 543, 549, 550, 554, 560, 614, 640, 657, 659, 660, 663,669, 690, 694, 696, 698, 703, 704, 709, 714, 715, 720, 726,737, 739, 744, 760, 768, 779, 784, 786, 789, 791, 793: n = A,T,C or G
  misc_feature 794, 800, 801, 807, 808, 816, 819, 820, 822, 823, 827, 828,832, 838, 841, 843, 844, 847, 850, 853, 854, 855, 863, 868,869, 875, 876: n = A,T,C or G
gagcgtatcgactactatcgtntanngggagctgcnccntntagnngnccgntgtactttactcacccttcctctgacagaaaaggatgaagtcaagggcctggtagaggcaccactaagaaaggcatctgaaaggaccaaagagagtgaccagcaagcattttttacaaggctgangagctanagcttccatgaaaggctggaccacccagtggtgaaaagcatcatctgggttaccttgtgctgccataaaacacaccacagacttggtgacttaaaccacagatatttatcttctcacaatcctggaggctggaagtctgcaatcacggtgccagcntggtcaggttctggtgagggcctctttccttctcactgtgtgctctttcttgtgcatggagagagagagcatgaacaagccctctactgtccctcttagaagggcacttaatcccataataaggcatccacccttctgacctcggctaaccctagttaaagtacctgcccgggcggnccgtctagaactagnggatccccctngctgcnngganttgttntcatagcttatcgatcccgcgacctcgaggggggccccggtacccagcttttgntcccttttaaaggagggttaatttcncgctttggcgaaaaacnannggncatagntggttcctggggttaaaatanaaangngnttaanntttgnaacanngatancaaccnggaaccttaangntaaancctggggggcctattnagggagcntacttatattnattgntntcncntnntgcccnntttccnntgggaaanctnntnngccnnttgnttttanaantnngcnccnccnnnggaagggngtttnntatttnnccc

SEQ ID NO: 4885 - DNA, 892 bp, Homo sapiens
  misc_feature 345, 358, 364, 380, 381, 382, 384, 387, 390, 392, 393, 394,395, 396, 401, 403, 404, 405, 406, 409, 410, 412, 414, 418,420, 421, 422, 424, 425, 427, 430, 431, 433, 436, 437, 438,439, 442, 443, 444, 445, 447, 448, 449, 454, 455, 456: n = A,T,C or G
  misc_feature 457, 458, 459, 460, 462, 463, 464, 468, 470, 472, 473, 475,477, 479, 480, 481, 484, 487, 492, 493, 494, 496, 498, 499,501, 503, 504, 506, 507, 508, 509, 510, 511, 512, 516, 517,518, 521, 523, 524, 526, 527, 529, 533, 535, 536, 540: n = A,T,C or G
  misc_feature 542, 543, 547, 548, 549, 550, 553, 554, 559, 562, 563, 565,569, 571, 572, 573, 574, 575, 580, 581, 583, 585, 587, 588,590, 591, 593, 596, 597, 598, 599, 600, 601, 602, 603, 604,606, 607, 608, 610, 612, 613, 614, 615, 616, 618, 619: n = A,T,C or G
  misc_feature 620, 623, 626, 627, 629, 631, 632, 633, 636, 638, 639, 641,643, 645, 647, 648, 649, 650, 651, 653, 654, 655, 661, 662,663, 664, 665, 667, 668, 669, 670, 674, 675, 677, 679, 682,690, 692, 694, 695, 700, 701, 702, 703, 704, 705, 706: n = A,T,C or G
  misc_feature 707, 708, 709, 710, 711, 712, 713, 714, 715, 717, 719, 723,724, 726, 727, 728, 730, 731, 733, 734, 735, 736, 738, 739,741, 742, 743, 744, 745, 746, 747, 748, 753, 754, 756, 757,758, 761, 763, 764, 766, 769, 771, 772, 774, 780, 782: n = A,T,C or G
  misc_feature 783, 785, 788, 790, 792, 793, 794, 796, 798, 802, 803, 804,807, 809, 811, 812, 815, 821, 825, 826, 827, 828, 830, 833,834, 837, 842, 843, 845-847, 848, 850, 852, 854, 855, 859, 864,867, 869, 873-874, 877, 880, 882, 884, 886, 889, 891-892: n = A,T,C or G
gagcgcgtatacgactcactatagggcgaattggagctccccgcggtggcggcccgcccgggcaggtacaggaaacctcatacgacgggtgcatgttatccagtgatcttccttccttccttcaacaaatatgtattgaaccccttccatgtgccaagccctgtgatattaaaatgacgattaaaatagagtgatcaatgccatgataggcggtgtgaatgcattgcagggagctctccctagtttagaggtcagggatgactccagaggatgggacatttaacatttaagctaagatatttatcagattatctagttgagagtggggaggaaggtgggagttanagtttggccattnggagcnaggaggtggggatggnnnantgnggnannnnntccgntnnnnttnntntnggancnnngnntnatnngnatnnnnatnnnngnnntattnnnnnnntnnntttngngnngngngnnntgnttnatatnnntngnnantnntnnnnnnnggannnaangnnannantttngnnttantnntctnnnnatnnatatnggnngnaaantnnnnngggannanananngnngnatnnnnnnnnnannngnannnnnannnttnganntntnnngtngnntntntntnnnnntnnnattttnnnnntnnnngtcnngntntgnttaggtgnananntttannnnnnnnnnnnnnnntngntgtnntnnntnntnnnnanntnnnnnnnngattnntnnnttntnntnaantnntngatatntnntnttntntnnngntnaatnnngtngntnnatnttgttnttannnnantannatnggggnnannnntntngnngaanttatntgntngtgnnaantgntngntnggntnn

SEQ ID NO: 4886 - DNA, 674 bp, Homo sapiens
  misc_feature 5, 459, 512, 515, 586, 607, 612, 644, 659, 661, 672, 674: n = A,T,C or G
gagcnccgccgtaatacgacttcactatagggcgaattggagctccaccgcggtggcggccgaggtacaagttgtctttatgctgcgagataagtcctctcttaggtttgagctcccaccttttcagtgaactcttacattttgggggatctgctcttgtaaaggacatcctttctggtctttgattacttgagaaaagtgagtgaggtggggccaagatggttgactagaagcagctagtgtgtgccactctcacaaatagcagaaagagtggtgagacactagctcttcaaccggaacatccaggtggacacataaggattcatcagtgacatagtgtgaccttcggatcacggagaagagtgagacagatcaaccattcacccaggagtggcacagacccaggggaatccccctacaagaaaatgaagccaaggaacaccatctgaagttctgacngcaacatcagaagctaagagaaaggcatggaaaagattctcacctaaagcatncanaggagaaggtgggcctgcagacaccctggtttctgacctctgacctccgcaactgggaaggaagaaatttntggtgcttaaaaacacacaancttgngggacctggcccggccgccgtttaaaactaanggatcccccggcttnangaattcaattnan

SEQ ID NO: 4887 - DNA, 656 bp, Homo sapiens
  misc_feature 5, 457, 482, 493, 509, 515, 530, 532, 534, 535, 538, 541,547, 553, 570, 572, 576, 577, 581, 595, 596, 599, 600, 601,603, 607, 608, 613, 614, 617, 622, 631, 632, 633, 638, 642,644, 646, 648, 650, 651, 652, 653, 654: n = A,T,C or G
gagcnccgccgtaatacgacctcactatagggcgaattggagctccaccgcggtggcggccgcccgggcaggtactttttttttttttttttttttttttggtttaagcttctctgaccaggaaaatcatctttttaactgagaaggtcgagggaaagaaaggctgatattaggtcaagaaattgaaagcaggtttctaactattttttgaaaactaaactgaaccagcaagtaagcaggtttctcggtgttctaacatgagtgtatgcctccttttccaaaataattctatcccaatgagggaaatcttaataggagagaatgccacaccaccatggtaagcttaagaaactttggaagactgaagaaaaacacatactgaactgattttgttaaaagaaataaaggtgatttctacagctattttaaaacattctcagatggatagcctatgganagaggcatttttttttgagacagantctcactctgncaggttggagtacagnggcacnatcttgactccctgnancnncanctnctgggntcaagngattcttctgcctcaancncccnngtanctgggattacaggnnccnnncnctgnncacanntanttttngatttttannnaaacngggntnancntnnnnncc

SEQ ID NO: 4888 - DNA, 712 bp, Homo sapiens
  misc_feature 549, 551, 562, 569, 600, 625, 643, 658, 669, 674, 677, 678,682, 683, 693, 699, 706: n = A,T,C or G
gagcgcgcgtaataccgacctcactatagggcgaattggagctccaccgcggtggcggccgcccgggcaggtacagatcaaaagcttgccttagtgaggcagctgcagggggataaagttagcaggaggcctcaaagatcttaagtcaggcctgatgttgaactttgcagggatttcatcgctctggaatacgaatgtggcaaaaaatcccattgtgtctagtgggggcgaaagagaataacaggcaagcagcaaatgcttgtcagctttctcatagggtagctttccttttaacacgtgtttatccatgacagtttctgcttcatacttgaaggcattgttgaggaggagaggatcctgaagatggtgaatctactgtattacctttagtgagtgtttcagacgtggccaaactataaatattagtgtttttggaatggccatggagagctaaaatgtggccataaaggtgctcagatttactgccataactggtaatcacatctctcctgcaaagtgctcaagatatccaggaagtgagtgggtatnanccctggctatncatctgnccctcatgtaattaaaaaaccagaacagctntttaaaaaaaaggaaagaaaaaaanggattggaacagttaatncaaagaagaaactcngtccccaaagnggttnatnnccanncttctacctntaccantggatgngttctg

SEQ ID NO: 4889 - DNA, 429 bp, Homo sapiens
  misc_feature 5: n = A,T,C or G
gagcnccgcgtaatacgacctcactatagggcgaattggagctccaccgcggtggcggccgaggtacaagttgtctttatgctgcgagataagtcctctcttggtttgagctcccaccttttcagtgaactcttacattttgggggatctgctcttgtaaaggacatcctttctggtctttgattacttgagaaaagtgagtgaggtggggccaagatggttgactagaagcagctagtgtgtgccactctcacaaatagcagaaagagtggtgagacactagctcttcaaccggaacatccaggtggacacataaggattcatcagtgacatagtgtgaccttcggatcacggagaagagtgagacagatcaaccattcacccaggagtggcacagacccaggggaatccccctacaagaaaatgaac

SEQ ID NO: 4890 - DNA, 935 bp, Homo sapiens
  misc_feature 297, 347, 351, 359, 382, 395, 402, 424, 441, 458, 459, 461,462, 471, 476, 477, 510, 520, 521, 541, 550, 555, 557, 577,584, 586, 624, 627, 631, 632, 638, 640, 641, 650, 651, 664,677, 695, 696, 705, 706, 711, 728, 733, 735, 757, 758: n = A,T,C or G
  misc_feature 759, 762, 767, 773, 775, 776, 779, 780, 788, 790, 806, 815,825, 832, 834, 842, 843, 849, 850, 858, 862, 865, 871, 873,874, 878, 880, 881, 882, 890, 896, 898, 899, 926, 933, 934: n = A,T,C or G
cgaattggagctccacccgcggtggcggccgcccgggcaggtacacaaagggaaaaaaaaaaaaaaagcagaatcagagctgagttcccctttaaaagccaaacgcctacatctagaaggaggctcccctacctgagagccctagccctattggggttcccactgtggaaaccctcaggtctcaaggttagttacagggcagccaggtagggtaaggctggctgtaggtgactggaggatgggcaacgtagtagttgctgaagtttgccatcactgacgtaaggggccggctggtantaacaggtgacgttggtggcactgggggatgatgttttgttccgccagcncacncaaggcangagggagatgaggttcaaaagtntgcctgcgttcangccccantgaaacacaactggggcttctngttcaccacccctgccnaaggaatcattgaggtnngnnttacccttnggccnntctaagaactaggtgggattcccccgggcttgnagggaatttnnataatcaagcttatttgatncccgttganctttnanggggggccccggtaccccancttttgntnccttttagtgagggttaattgtgcccttggcgtaattnatngggnnttagcntnnttcctgtgnnaaaatgttttccntttacaatttccnacaactttcttacctggnngcttaaatnntaaancctgggggggcccttantgtgngnggcctaactcccaatttaattnnngtntgtgncttacngnnccnntttataanantgggaaaaccctgttntggccatgnttttttaatnatttgtnanctcccccnngggatnnagggtgtnttgntgnatttgntnntttntnnnttattttngtaaantnntttctatttgctatgggtgttatgatntttgtanng

SEQ ID NO: 4891 - DNA, 429 bp, Homo sapiens
  misc_feature 5: n = A,T,C or G
gagcnccgccgtaataccgactcactatagggcgaattggagctccaccgcggtggcggccgcccgggcaggtaccactaaagcaaaaaaagaaaactctctaacagcaggacctctgatctggaggcatattgaccataaatttacgccaccccatgagagctcaaaggctgtgctgttctcgtcctctctcagtccccatttccaggtgatcaagcttgggcttagggtagtggcagtgtggctttagctgtcagccatcaccatggaagagcaggaggtttaggggccttcataacctttcaagtgttggtttccgttggaagtagttgaatatctccaccccacccatgcccctgagagaaagccgggaagaggggccaccatcgggggctcagcacctgcaagcccaatgctgacatgaaggct

SEQ ID NO: 4892 - DNA, 418 bp, Homo sapiens
  misc_feature 3: n = A,T,C or G
gcnccgccgtaataccgacctcactatagggcgaattggagctccaccgcggtggcggccgcccgggcaggtactttttttttttttttttttttgctggttttaagtttattttgacggaacttttgataagaaatctcagattagacttttaaaagcctttcaagggtcagaagtcaaaggagggcgaacatcagactttggctgcagtatctaaaaatctgcatgaatttctctcttcttgaggtccccaatatatctggaggttcctggccattttcttgtagggggattcccctgggtctgtgccactcctgggtgaatggctgatctgtctcactcttctccgtgatccgaaggtcacactatgtcactgatgaatccttatgtgtccacctggatgttccggttgaagagc

SEQ ID NO: 4893 - DNA, 422 bp, Homo sapiens
cgcgtaataccgactcactatagggccgaattggagctccaccgcggtggcggccgaggtacccattaaccatccccacctcctcgctccaaatggccaactctaactcccaccttcctccccactctcaactagataatctgataaatatcttagcttaaatgttaaatgtcccatcctctggagtcatccctgacctctaaactagggagagctccctgcaatgcattcacaccgcctatcatggcattgatcactctattttaatcgtcattttaatatcacagggctcggcacatggaaggggttcaatacatatttgttgaaggaaggaaggaagatcactggataacatgcacccgtcgtatgaggtttcctgtacctgcccgggcggccgctctagaactagtggatcccccggc

SEQ ID NO: 4894 - DNA, 423 bp, Homo sapiens
  misc_feature 5: n = A,T,C or G
gagcnccgcgtaatacgactcactatagggcgaattggagctccaccgcggtggcggccgaggtactttcacagcaacatttagactagtgtttgaccaacaactgggcaccacggtcaagccaagttggcatatagaattagccagcaaacttggtattcacaatctgtcattatagtcttatctataaacctaaggtttagagaaacgctggtcattctgaacaattccctgtgaatgcagagatcaaggagcctccccttaactgggtaggcagtgtgaaatacctgcagtgtgcttgaccttactgttcacccactggcagctgttcctacagcttggcttcagatatataatattacattggctaacttcaaagagcattgttttccaaggatagagatggtgatggtgtatattact

SEQ ID NO: 4895 - DNA, 441 bp, Homo sapiens
  misc_feature 5, 20, 402, 403, 404, 405, 406, 407, 408, 409, 410, 411,412, 413, 414, 415, 416, 417, 418, 419, 420, 421, 422, 423,424, 425, 426, 427, 428, 429, 430, 431, 432, 433, 434, 435,436, 437, 438, 439, 440, 441: n = A,T,C or G
gagcnccgcgtaatacgacnttcactatagggcagaattggagctccaccgcggtggcggccgaggtacagctggcaagaatccagggcaacgtggttccctcgctcacggtcccggaaatgtccagggaagcaggtctgagcctgctgctgttagtgcattcagtcgcctgcctcagtctctctgtagagcctggggctgggtgcagaggaggcgagcgcactcctccgcggaagcgtattaaacgtcacccctcctctcccaagcccctgccaaagatcactgacaagctctcatagcaaatgaacaaggagggaaagcaccgcgctcgcacggctttgtccgtgctacaaagcagcctgttaaactattggaactaatgcgccgcccccgcgtacctgnnnnnnnnnnnnnnnnnnnnnnnnnnnnnnnnnnnnnnnn

SEQ ID NO: 4896 - DNA, 432 bp, Homo sapiens
gtaatacgactcactatagggcagaattggagctccaccgcggtggcggccgaggtacgcgggggcagtgggaagctcgcagcagctggggaggagccaaagcctcggcgctcacctaagccgcagggaggtacacccaactgggagatgaggaaacagcaacccagagaggagaactaacccacacaggatcatttcgtgaaggagcaaggctgaagaaccagacctggactttcttaggacaaacttactgcagcttgaaggagccaaccatggatttgaggcgtgtgaaggaatatttctcctggctctactatcaataccaaatcattagctgctgtgctgttttagagccctgggagcgatctatgtttaacaccatcttactaaccattattgctatggtggtatacactgcctatgtctttattc

SEQ ID NO: 4897 - DNA, 872 bp, Homo sapiens
  misc_feature 35, 67, 100, 656, 679, 731, 745, 746, 750, 759, 768, 771,772, 774, 785, 787, 800, 807, 823, 833, 838, 841, 853, 867: n = A,T,C or G
ttcctttgaaacgactactatagggctttttgganctccccgcggtggcggcccgcccgggcaggtncagcctaccgaaaatacttcaggataatctttngatccttaacttaattacatctgcaaagaccctttttccaaataatgccacctccacagattctaggcacaaggatctggatatatcttgtgtaaagccaccattcagctcactacactagaaagaggaaaaacaacaacgatgtaacaagaggcgcagaagaaagaacagatgcagcttgtgtggcagtggccatcaaggcaggctggggtaaaattgtgtcaacagaagccccagatggaactcaagtgcggccgctctagaactagtggatcccccgggctgcaggaattcgatatcaagcttatcgataccgtcgacctcgagggggggcccggtacccagcttttgttccctttagtgagggttaattgcgcgcttggcgtaatcatggtcatagctgtttcctgtgtgaaattggtatccgctcacaattccacacaacatacgaaccgggagcataaagtgtaaaagcctggggtgcctaatgaagtgagctaactcacattaattgcgttgcgctcactgccgcttttcaagtcgggaaacctgtcgngccaactggattaatgaatcggncaacgccccggggagaggccggtttgcctattgggcgctttttcgctttctnggttaattgacttnnttgncttgggccnttcggttgnggnnanccggttcaacntnactcaaaggcggnaattccnggtttcccagaatcanggggataacnccggnaanaacttgtgaccnaaaggccccaaaanggcct

SEQ ID NO: 4898 - DNA, 867 bp, Homo sapiens
  misc_feature 8, 16, 17, 20, 70, 89, 103, 484, 523, 533, 634, 664, 666,747, 757, 784, 788, 809, 831, 832, 840, 843, 854, 865: n = A,T,C or G
gagagccnttttaaannacnactatagggctttttggagctccccgcggtggcggccgcccgggcaggtncatgtttagggagatgaantgggctccctgctnacagccctcagggagactgtctagagccactccttcattcgttgtcctgccacattgctaagtgggccctctggctatgagtattaccttcttttttttactagctttagagttctaagatatattgcaaagtaataatataaacagtataactctttggaaaaggtgtggtttttgagactgaggtgtcaaggaggacatcctatttcctgaggattaatgaacttacatctttctttaacctttaaatataattatgtttgtcaattgttagacttttttaaggcttggtttccagtaattatggtatgtagtctccagtccaaacaacaggctctgtacctcggccgctctagaactagtggatcccccgggctgcangaattcgatatcaagcttatcgataccgtcgacctcganggggggcccngtcccaacttttgttccctttagtgagggttaattgcgcgcttggccgtaatcatggtcataactggttcctgggtgaaattgttattccgctcacaattncacacaacataccaacccgggagcataaangngtaaaaccctggggtgccctaatgaagggacctaactcacatttattggcgttgcgcctcactggcccctttcaatcgggnaaaccttcgngccactgcatttaatgaatcggccacncccngggagagggcggtttggcgtnttgggcgcttttccctttcctnnttaattantcnttggctcggcngttcggttggngg

SEQ ID NO: 4899 - DNA, 915 bp, Homo sapiens
  misc_feature 1, 5, 374, 455, 460, 499, 512, 539, 557, 584, 598, 630, 659,686, 713, 741, 753, 765, 779, 780, 786, 792, 803, 830, 831,843, 846, 858, 862, 868, 872, 876, 877, 882, 889, 895, 899,905, 909, 911: n = A,T,C or G
naggngcgcgtaatcgactcactatagggcgaattggagctccccgcggtggcggcccgaggtacacttctggaaattttctgagtattggcaaaatgtaatattgtttagaaaagtatcaactttaagaacactagatcgctgctattctccctgtatgctctgatcatgttcacatttaatataagtatgctctgtgcccaataaacagttttttgtttttttttttctaatcaagtttacagtcacacaagtggacttacatcttcttcttgcgatggatgaactatttccacaagcctctggataattttctcctcatttaaccaattcagcacatcttgcctgggctgtggaggttcgatacacgtcangagcctgagcaacaaatccatgatagcagaagtcctatgtgctttataataaggtctacaaaatcatgcttcttctttaanaaatncacaatctggtctggttttctgctgataagaatacttancaccttgctgaanaaacctggcaagtaggtggattcaaanggggaatcgtttaagganggaaacctttttaatttcattagcaanggattcatcttctnccagtctatcattcatctggggagacattcanaaagggagccacctcccaagaaatatttnggatacctgggatctggacctttcatncaagggcttggagggggggtccttctnttatgggaatggagacctaaattttttnaaaaaattcctnggtttttaacanaaaccctttttaanntttggngggttntggacctttanatttcttggaaaaaaaattttccccannccattaaccccnttnaggggtaccaantttntttttnttanaaannggggnttttttngggaangaangggggnaaananaaat

SEQ ID NO: 4900 - DNA, 874 bp, Homo sapiens
  misc_feature 1, 2, 3, 4, 570, 601, 652, 661, 744, 746, 749, 760, 772,779, 787, 790, 794, 797, 840, 844, 858, 859, 860, 861, 871: n = A,T,C or G
nnnncgtatcgactactatagggcgaattggagctccccgcggtggcggccgcccgggcaggtacagtcagaagggctgaatccacgatgaatcaacattaagaaaagaaaggtcactgtgtatgagatacttttcatgaatacacacacctaagtcacccaggaaaatcatctcaggagcctgtaggatgtatacttacagctttccagctgcaacttgcatgtctgtgtgtccatggggtatttagacagatccatgttacatgcaacagttgtcgtgattctgagggcatacaggaccgtgccattggagaagaggcggatgagcctgtttcccacagtgacttcatggaggaaggacttcttggactccacaatgtaagtatctggcacccagaggaactccacgaggcgggcatccagagtgaagctcttgttgccttcaaacaccagccgctggtccatccagcgctgtcggaggtatatggtggctgtgtagtccatgttactctctgaaatgctagaaatcttgcaatgtccaaagtcagcgctatctgtaccttgggccgntctagaactagtggatcccccgggctggcangaattcgatatcaaacttatcgatacccgtcgacctcgaggggggggcccngtacccaancttttggttccctttagtgaagggttaattgcccgcttgggcgtaatcatgggcatagcttgtttcctgtggggaaaatggtntnccntcacaattccnaaaacataccanccgggancataaaangtnaaanctngggggcctaattgagtgagctaactcacatttaattgggttgngctnactgcccgttttcnnnnggaaaccttntgg

SEQ ID NO: 4901 - DNA, 884 bp, Homo sapiens
  misc_feature 1, 4, 326, 428, 548, 641, 709, 718, 720, 745, 805, 811, 816,828, 841, 855, 863, 869, 877, 879, 880: n = A,T,C or G
nttntatacgactcactatagggcgaattggagctccccgcggtggcggcccgcccgggcaggtacacgggagtgtatggcctagaactcccatcatacctgtgcaccaattgaggagagacacatgggtgggaaattgcaataaaaagacggcccacagcaggctgcattcccatggctggccagaggaggaacgctttgtgttctcatcggagctgcatgggaagtctgcatacagcaaagtgacctgcatgcctcaccttatggaaaggatggtgggctctggcctcctgtggctggccttggtctcctgcattctgacccangcatctgcagtgcagcgaggtaagtattctgctcacctggcatctcaaatgtcaaaggaagacctagcaagtgaggatagaagtgcagagaaggtggctcangtaaggaagaagaattggcagttctaaagcaaaaactcaaaactagaagtcaagggaaacataatgagaaacaatggaaatcaaagtcacaatctcttcaaagagcctaatcagaaattnctctgaaagggcagtgggagccagttaacataatttcccatgcccatatctttgggagattagagaccccagattaaagaagatcaagaaatncttactcagtcacctttgtgctggcaagtgccttcttctttttctgaaaggcttaattaatgatcttntttatgaantngggcaattcaaaaactttcagaaangagtcttaaggctttaaaattagaatgccaaattttaaccccctgaaagaagggtggganaaggtnccctnggccggttttanaactagtgggatncccccggcctgganggaattcnaatttnaagccttntnnatct

SEQ ID NO: 4902 - DNA, 864 bp, Homo sapiens
  misc_feature 7, 8, 10, 11, 20, 35, 515, 521, 554, 570, 603, 628, 630,638, 644, 665, 680, 681, 696, 698, 699, 700, 720, 722, 725,727, 735, 739, 740, 741, 742, 747, 748, 753, 761, 762, 767,768, 771, 775, 780, 781, 785, 791, 794, 800, 803, 805: n = A,T,C or G
  misc_feature 806, 814, 815, 818, 822, 826, 827, 828, 830, 837, 838, 840,843, 846, 847, 850, 852, 853, 861: n = A,T,C or G
attgttnncnntcacttctnactatatggcgactnggagctccaccgcggtggcggcccgcccgggcaggtaccaaatgaagtgtgaagacaaggccatccaccactttatagagggtgtaaaaataaaccagaaatcaagggagaaagaaaagatgaaagacaaactgcaaaaaattgccaaaatgcgactttctaaaaatggagcagattctgaggctttgcatgtcttggcattccttcaggagctgaatgaaaaaatgcaacaagcagatgaagactctgagaggggtttggagtctggaagcctcatcccttcagcatcaagctggaatggggaatgaagaatagagatgtggtgcccactaggctactgctgaaagggagctgaaattcctccaccaagttggtattcaaaatatgtaatgactggtatggcaaaagattggactaagacactggccataccactggacagggttatgttaacacctgaattgcttggtcttgagagancccaangagttcttggagagggaccaaattggggggtangtcccccgggcttggngatagaaatatttctcgattgacttccttgagncaatttgaactgtacatttgcttantnacctttantggagnaatccactgggcctggttctntattaatataaagcnnccaatccttcattgnannnttaaaccccatttttgccangntgntncattactnggannnntttgnntcccntaaaggtnnccctnnatngccntaatnncctnaatttnatncaaaanctngnngaccaaannttnaatngggnnnanttccccnncnttnttnnttncnncttccccnctt

SEQ ID NO: 4903 - DNA, 879 bp, Homo sapiens
  misc_feature 2, 3, 33, 588, 596, 633, 646, 650, 668, 715, 729, 756, 758,769, 771, 775, 778, 799, 825, 851, 852, 856, 865, 866, 871,872, 876: n = A,T,C or G
anngccgcttttatacgactcactatagggcgntttggagctccccgcggtggcggccgcccgggcaggtactattccctcccttattcaagactttgcttaaatgtcacctgtgtaatggaatctttcccaatttgtcaatttgtcccattagacaaatagatcaatagttcactgatctattcccagtgctgataacaatacctggcatagagtagatggtcaatgaatatgtgttgaatgaataaatgagcaacgtgggtcagccaccccatgaagttagctggaggttttacaacatcaacagagtgaggtaagagcacgggagacaagccaccatggtcactgtaaaccaggctgccaaactgatttcaattactgcttacaaggaggaaagaacaaggatcccatgtggtgcctaggaaagtcaacaaagttaataaaagcagagttttctagagcctgaggatcaagtatccagtaggaaagctgcccctttacttttcaaaaacatctattccaagccttgcagcacaagctggaccaccccgcgtaccttgggccgttcttaaactaagtggatccccnggctggangaattcgatattaagcttatcgatccggcgacctcanggggggccccgtnccanttttgttcctttaatgangggtaattgcccccttggccgtaatcatgggcatagctggttcctgngggaaaatgttttncccttcacaatttcacacaacattccnancccgggagccntnaagnggnaaaccctgggggggcctaaanggggggcctacccccatttattgggntgggcctcactgggccccttttcaanngggnaaacctttnnggccnntttnttt

SEQ ID NO: 4904 - DNA, 918 bp, Homo sapiens
  misc_feature 1, 10, 12, 19, 101, 104, 105, 138, 341, 376, 379, 386, 390,398, 401, 410, 414, 433, 440, 443, 452, 521, 529, 533, 535,545, 547, 556, 560, 566, 574, 593, 595, 599, 602, 620, 622,626, 633, 654, 665, 673, 684, 689, 692, 695, 697, 718: n = A,T,C or G
  misc_feature 725, 731, 735, 751, 756, 771, 772, 775, 781, 782, 788, 791,794, 797, 800, 801, 806, 808, 813, 816, 821, 823, 825, 834,835, 836, 838, 839, 841, 843, 859, 865, 867, 871, 872, 880,881, 885, 889, 890, 893, 894, 899, 902, 903, 904, 906: n = A,T,C or G
  misc_feature 908, 909, 916, 917: n = A,T,C or G
naatccgttntnaacgacnactatagggctttttggaactcccccgcggtggcggcccgaggtactgctttaatgagcagcaaccttctttcacctggcanttnnaggcgttcagtgcagggctggcctgcccctgcntgcttcagagaccactgcgtttcttagaagggaaacaacggggccgggcgcggtggctcatgcctgtaatcccagcactttcagaggccacggtatcccagcactttcagaggccaaggtaggtggatcacgaggtttggagttcgagatctgcctggcccatataagtgaaaccctgtctctactaaaaatacaaaaatcanccgggcatggtggaagaaggaggaggaggaaaaangangaaaaangaanaaaggagnaancaaccagtncaanaggatgatgccatttcccngggaaanaangttgacttngagggaaggctgcccattgggaaataaaaactcccacagatcctttttcaactaaaaaaagaaaagccngcccgggngcantnacctcacgcntntaatcccangcantttgtnggaaggcncaaaacaaggagaatctcnantttnaanaccagccttgggcaacanancaanaaccccnaccttttaccaaaaaaatatnttttggggggnttttcaanaaagtgatttnaaatngcntgntnaaaattttaaaacttacctgnaactatncggggnaaanaacccatgcctggaancctgnttcattttttaattnnaanttgggnnaaaaangcngtnttngannccctngnctttnttntcctncntnaaccacatnnnanntntngaaaaaataaaattgncccaangngganngccccttnngggnccannttnntaagnaannnangnnggaaaannt

SEQ ID NO: 4905 - DNA, 459 bp, Homo sapiens
  misc_feature 1: n = A,T,C or G
nagtattggccgcgtaatacgactactatagggcgaattggagctccccgcggtggcggccgccgggcaggtacagtcacacatcacttagcaatgggcatatattatgaggaatgggtcattaggcaattttgtcattgtgtgaacatcatggagtatacttacacaaacctagatgataaagcctactgcacatctaggttacaaacttgtacctcggcccgctctagaactaagtggatcccccgggctgcaggaattcgatatcaagcttatcgataccgtcgacctcgagggggggcccggtacccagcttttgttccctttagtgagggttaattgcgcgcttggcgtaattcatggtcataggctgtttcctggtgtgaaattgttatcccgctcacaatttccacaccaacattaccgaagcccggggagcattaaaagtgttaaaagccc

SEQ ID NO: 4906 - DNA, 459 bp, Homo sapiens
  misc_feature 2, 3, 4, 5, 12, 15, 38, 100, 413: n = A,T,C or G
gnnnnagttgangcntttaatacgactactatagggtnaattggagctccccgcggtggcggccgaggtacccagggaacaaatgctactgggactcctnacctacctaagaagcagctctacccagactccacatggctctctgttttggtctggagaccccagctggggtatctcctgagcccagggattcaaaggttcgtggcagaaatatgcatcccacgggactctcactcactcaccattttcttgtagggggattcccctgggtctgtgccactcctgggtgaatggttgatctgtctcactcttctccgtgatccgaaggtcacactatgtcactgatgaatccttatgtgtccacctgggatgtttccggttgaagaagctagtgtctcaccactccttctgcntatttgtggaagaagtggcacacaacctatcctggctttctaagtc

SEQ ID NO: 4907 - DNA, 455 bp, Homo sapiens
  misc_feature 1, 6, 7, 8, 434: n = A,T,C or G
nagggnnnggccgctatcgactactatagggcgaattggagctccaccgcggtggcggccgcccgggcaggtactagaatttagttggaagaataagacatttacttctaatctgatttaaaaaaaaccagatgggtagtatttgaatacagccagtgttttaaatgtaaaagaaaatgtttaatctggtatttctagagttgagtcatgcattacaggcaatgggataaaagtgaataattatagtagtcctgtggggacagctgtaagagagatgggcaccacagcttgccacagtgggcaggactgttcctagttttgagtggaaccaagagatttggggaaggattgcaaaagaaggataaaattatcgagggcctcccagggagggtgcctggcctcatcacttctcaaagctgggagggcagccattnattttcccgcccctgcctgaa

SEQ ID NO: 4908 - DNA, 451 bp, Homo sapiens
  misc_feature 1, 2, 3, 4, 13, 451: n = A,T,C or G
nnnnaggccctancactacttagggcgaattggagctccccgcggtggcggccgaggtacgcgggggggtgcagggcagtcagactggaaccatggagctcagcgtcctcctcttccttgcactcctcacaggcctcttgctactcctggttcagcgtcaccctaactcccatggcaccctcccaccagggccccgccctctgccccttttggggaaccttctgcagatggacagaagaggcctactcaaatcctttctgagggagtggatctgattgccgtcaatcaataatacctttgaccaagggactccaatcaattcagcatgctttgcctaatgccttttgtttgtaatactgttgcgggacaatcaaagactgggagagaccaagggaaaaaaaaaaaaaaaagtccctgcccggggccggcccgctctaagaactagtgggan

SEQ ID NO: 4909 - DNA, 455 bp, Homo sapiens
  misc_feature 1, 3, 4, 13, 382, 415, 418, 452: n = A,T,C or G
ntnnaggccctancactacttagggcgaattggagctccccgcggtggcggccgaggtacaacgcagagcaggtcctgagttgggagccagtggccctgagcaatagcacgaggcctgttgtctaccaagtgcagtttaaatacaccgacagtaaatggttcacggccgaggtacttcagttcgaaatgcaagaaatcacccacctttctgggtttggtcttcgctgggagcttgcagatgggagctgttcctatttggccatcttcagaatgttttaaataaatataaacaaatgccatttcaagcacttgcgctacctttgttcgggcccctgccagctggaacctagaccactgcttaccccgacttgccccatcattnattccccagtattttcaggcatcttattgtcanaantgggtctaagactcttttattcattccaagctangtc

SEQ ID NO: 4910 - DNA, 463 bp, Homo sapiens
  misc_feature 2, 3, 4, 5, 8, 11, 12, 22, 28, 54, 57, 78, 92, 93, 424: n = A,T,C or G
gnnnnagntcnnctcaattctnctttcnggcgaactgttgctctttgcggcggnggncgaggtactgatcaaaaacantacagttatttctnntgtatgaggttttttattagaccaaattttaatcccagtctgccactttttcataaagtagaaaacagctcagatgagtagaaagttagactcaaagtgtaggggtttgtttaaaccacataaaaagtaataacgatagaaggttttatgcccgtaggtatataaatctggtgagtgtgatttttaatttcagtgaatgtttcactccccacaataaatacgtttttatacctttcaagatatcttcaaagtttctgatagttaaaaaaatcattttacaaaggctgccttctttaaatggaaatgtgtttgcaaaacagtttaccttctngagccctttccaaaaagggtggcctcaaagggcttcagt

SEQ ID NO: 4911 - DNA, 428 bp, Homo sapiens
  misc_feature 51, 200, 424: n = A,T,C or G
ggcgaattggagctccccgcggtggcggccgaggtacagtattgagaagtngggaaagaatagaaggaggagttgaatctgtaattgactgagcaatcagttgagataactcactgcctccacataaccttgggctgtcctatgagtcagtggagagcaacccctctcatgtaggttcaagtctgaggttagctcactgncactgggaaagttgatcagggtagtcccatctcatgcacagccccatttccccatgagccgctagagtggctcgtatcagaaagatgccataccaaatgctggcaaggacctggagcaactagaatgcatgtgcatttaccttgtcctgacagccactttagagaacctcttttgggctgtttcttattaaagctaaacattaatctttccccaaaataacatngggc

SEQ ID NO: 4912 - DNA, 462 bp, Homo sapiens
  misc_feature 2, 3, 4, 5, 13, 48, 74, 233, 431, 448: n = A,T,C or G
gnnnnagttcgangcccttttatacgactactataggtttaattgganctcccccgcggtggcggccgcccggncaggtacgtgggctttacgtaaagaaattgtgccattttttcaagccagatatagcttctgtatcaacaaatggaacacaaatctttagtctaggacttagggttggggaaaaagggaaaaaacaactataacacttaaatgaaatctttgtatcttanggtttgttgaccagagtattatatatatatctaatgctactaaaattatgatgttatcgaatattcaagttaattcaataagtggtggttatctgtagtaatcatagagaaaggaactattactatgagggacctgcgggtacctccggcccgcttctagaactagtgggatccccccgggcctgcagggaatttcgnatatcaagcttattcgnatacccgtcggacc

SEQ ID NO: 4913 - DNA, 476 bp, Homo sapiens
  misc_feature 2, 3, 41, 44, 50, 75, 76, 105, 106, 393, 472: n = A,T,C or G
gnncatcctttcgacgcctttttcgaaaatccggcgaattnttnctcccngcggcggcggccgcccgggcaggtnnacataaataatgattgagtttgtgtgttnntgtatacgtgtgagtgtgtgcgtgtgtgtgtgtgaataaatagaagacttttttaaagttataaactcttaagaggccaacataatttgcttattgagttgttaatgaattaattgatttattaagaccccatcttgttccaagaaataatttaaggcagctcagtctaccaatcttcataaaatataacttataatttgtgaggaattctcttatattttagctcttttcgatccttaaaaatatttccaaataaaggagatctattacaacatgaggttcctgcnaagagtgaacttaaagttcttactcattctcatgttccacatagaatcaccgaaatgtaaaaatctaattgtgtaatcnaaaa

SEQ ID NO: 4914 - DNA, 826 bp, Homo sapiens
  misc_feature 5, 6, 7, 11, 14, 19, 21, 29, 33, 34, 38, 41, 42, 45, 46,52, 53, 56, 73, 83, 84, 85, 86, 87, 92, 94, 97, 100, 101,110, 115, 116, 118, 125, 342, 376, 389, 391, 411, 416, 428,443, 455, 467, 472, 473, 480, 482, 515, 525, 531, 544, 550: n = A,T,C or G
  misc_feature 552, 554, 556, 567, 600, 604, 617, 626, 635, 653, 656, 658,673, 690, 695, 712, 743, 744, 753, 759, 811, 815, 820: n = A,T,C or G
tctcnnnattntgntcttncnttttgttnaagnntttnaannaanntatctnntcnggatattaataatggcnaatatcgatnnnnntttantntanttnntatttaagntcgtnngncgcgcgnatacgactcactatagggcgaattggagctccaccgcggtggcggccgaggtaccacctgctgtatccttccccacctcatcacccccaaagccatttagtgccaaatgctacagtaaaaacccaatgcatttacataaaataatgcctaactgcatatttacattttttaggaaaaaaaatcccattaaggctcttctaggaaaaggttatgggcnagggaaaagggtaaaggggaccccaagggcttantggaggccaaagncncattattggtggggaaaaanctttnaaaaggttaagnattggaaggccaacnttggaaggtttntccttcccaatnaaggnnttggggnanaaaaaaaaaggccccaccaaccttggaaggccncccaaccttncttttncccttggttgganggggcnanangnaattggaaggnaaccccttttccccttttttttaattaaccccncttnggttttgggaagnaaaatttcnttccaaggnggttgggggaaccaaaanccngnttggaacctttggcnaatttggaaggcttggnttttnggaaaaaagggggccanggtctttttggcccccgtggcctttttaagnnttttaattncaaccnccttttggccaaggtaaggtggttaaggcctttatttgggctatccttaacnaacnaaggnctccag

SEQ ID NO: 4915 - DNA, 463 bp, Homo sapiens
  misc_feature 14: n = A,T,C or G
atccctatcactanttagggcgaattggagctctccgcggtggcggccgggggccattgagactgccatggaagacttgaaaggtcacgtagctgagacttctggagagaccattcaaggcttctggctcttgacaaagatagaccactggaacaatgagaaggagagaattctactggtcacagacaagactctcttgatctgcaaatacgacttcatcatgctgagttgtgtgcagctgcagcggattcctctgagcgctgtctatcgcatctgcctgggcaagttcaccttccctgggatgtccctggacaagagacaaggagaaggccttaggatctactgggggagtccggaggaacagtctcttctgtcccgctggaacccatggtccactgaagttccttatgctacattcactgagcatcctatgaaatacaccagtgaggaaattccttgaaat

SEQ ID NO: 4916 - DNA, 466 bp, Homo sapiens
  misc_feature 1, 2, 3, 10, 15, 16, 36, 37, 99: n = A,T,C or G
nnncgcctancactnnttagggcgaattggagctcnnccgcggtggcggccgaggtacaagttgtctttatgctgcgagataagtcctctcttggtttnagctcccaccttttcagtgaactcttacattttgggggatctactcttgtaaaggacatcctttctggtctttgattacttgagaaaagtgagtgaggtggggccaagatggttgactagaagcagctagtgtgtgccactctcacaaatagcagaaagagtggtgagacactagctcttcaaccggaacatccaggtggacacataaggattcatcaagtgacatagtgtgaccttcggatcacggagaagagtgagacagatcaaccattcacccaggagtggcacagacccaggggaatccccctacaagaaaatggtgaagtgagtgagagtcccgtgggatgtatatttctgccacgaacct

SEQ ID NO: 4917 - DNA, 461 bp, Homo sapiens
agcctaacactacttagggcgaattggagctccccgcggtggcggccgaggtacgcgggggcagtgggaagctcgcagcagctggggaggagccaaagcctcggcgctcacctaagccgcagggagatacacccaactgggagatgaggaaacggcaacccagagaggagaactagcccacacaggatcatttcgcgaaggagcaaggctgaagaaccagacctggactttcttaggacaaacttactgcagcttgaaggagccaaccatggatttgaggcgtgtgaaggaatatttctcctggctctactatcaataccaaatcattagctgctgtgctgttttagagccctgggagcgatctatgtttaacaccatcttactaaccattattgctatggtggtatacactgcctatgtctttattccaatccacattcgcctggcttgggaatttttcc

SEQ ID NO: 4918 - DNA, 467 bp, Homo sapiens
  misc_feature 1, 2, 3, 4, 5, 13: n = A,T,C or G
nnnnngcccgtancactactatagggcgaattggagctccccgcggtggcggccgaggtactgtccaactggatgctgccctggtggctgaaggcacacttcatgatgctgtccagggtcatcagggagacatgttgaaagagctccagacgtgagttttgggcaatgtgttcctcccatttgttcagcatcatccgaacactctcagacatcatgggtgatgaatattttcagaatgctgatgttgaaagccaggtttcacaatctggtggtgctttttccatttagaaccatccagggtcacaagtcctcgaccaacccaggattcaaggattttgtggctaacagcacttttgggatcctgtcttttcaggagaatcttggcataagtctgggtcatggacactgaagaacatcgtaaagggtccaacccacaagggaacagcacatgggtatttttccatcag

SEQ ID NO: 4919 - DNA, 473 bp, Homo sapiens
  misc_feature 9: n = A,T,C or G
aatccctancactacttagggcgaattggagctccccgcggtggcggccgcccgggcaggtaccggagtttgccgaggcccagtaagtccaacagccggaacggggctgggaacaggtctagcaccagcagcatagattccaacattagcagcaagtccgcaggcctgccagtgcccaaactgagggagccttccaaaaacaagccctaaggcagctctctaccagggtctgggtcaaccaaacagacaagggagaaaggcatctcatcatgacaacgagagttgtggctttcctgtaactcgggtgaaagtgaatccggcagcccagcctgtgtccagtccggctcagaccagtctccagcctggagccaagtacctcggccgaggtactgaaaagggaggcatttggtcaccattacccatcaagggaactctttacaaggataggttccaagtccttcgtgctgctcttg

SEQ ID NO: 4920 - DNA, 463 bp, Homo sapiens
  misc_feature 1, 2, 3, 11: n = A,T,C or G
nnnagccgaancactacttagggcgaattggagctccccgcggtggcggccgcccgggcaggtactttttttctttttttttttctttgcgtatttcccgtctaccctccccaaacaaagccatttagagacagatggaccagaccttccgcaatctcagtgagcccatgagcatcccagactgaacagaaattcagctgtagacctagcagatgtttattatcctccctccttcttttgttgtttttcacacacctctgtgctggaaaagagccacctggtatattaactctacacagatacttggaattttctgtccttttaacctagcaaagaaaggagttgtaaaacataaagacttctttttttaacttttaaaataaatgaaatcggctgggcatggtgactcatgcctgtaatcctagcactttgggaggctgaggcggggggatcgcttgaggtc

SEQ ID NO: 4921 - DNA, 420 bp, Homo sapiens
  misc_feature 3: n = A,T,C or G
ggngcgcgtaatacgactcactatagggcgaattggagctccaccgcggtggcggccgcccgggcaggtaccaacagctagcggtagccctggactccagctatgtaacaaacaaacaactcaatatcacgatagagaaattgaaacaacagaaccaagaaattacggatcagttggaagaagaaaagaaagaatgccaccaaaagcagggagccctaagggagcagttacaggtccacattcagaccatagggatcctcgtatcagagaaagctgagttacagacagccctggctcacactcagcatgctgccaggcagaaagaaggagagtctgaagatctggccagccgcctgcagtattcccggcggcgtgtgggagagttggagcgggctctctctgctgtctccacgcagcaga

SEQ ID NO: 4922 - DNA, 430 bp, Homo sapiens
  misc_feature 123, 264, 290, 302, 419, 430: n = A,T,C or G
gagccccgccgtaataccgactttcactattagggccgaattggagctccaccgcggtggcggccgcccgggcaggtacttttttttttttttttttttttttttttggctttttagtactancacactttctcttcaattctaatttgaagctcctagttgcagtgggcttgggagccagataacaaaaaagttgtattaaaatgtatgaaatataaggatgaataaggttgagggaaactctaaagctattttttttgttanaaaaatctgtttacattatggatacnctgacttgccanaaatctatgattctaaacagatattaatatgtgtgtgcattttttaaagtaataagcaatttttttctgttcaacaattggataattaatgaaaagattacaaaatgaatatttcanataaaataatn

SEQ ID NO: 4923 - DNA, 426 bp, Homo sapiens
  misc_feature 352: n = A,T,C or G
gagccccgcgtaataccgacttcacttatagggcgaattggagctccaccgcggtggcggccgcccgggcaggtaccggagtttgccgaggcccagtaagtccaacagccggaacggggctgggaacaggtctagcaccagcagcatagattccaacattagcagcaagtccgcaggcctgccagtgcccaaactgagggagccttccaaaacagccctaggcagctctctaccaggtctggtcaaccaaacagacaaggagaaaggcatctcatcagacaacgagagtgtggcttcctgtaactcggtgaaagtgaatccggcagcccagcctgtgtccagtccggctcanaccagtctccagcctggagccaagtacctcggccgaggtactgaaaagggaggcatttggtcaccattacccat

SEQ ID NO: 4924 - DNA, 437 bp, Homo sapiens
  misc_feature 5: n = A,T,C or G
gagcncgcgtaatacgacctcactatagggcagaattggagctccaccgcggtggcggccgaggtacttaaaacatgatgagaaaggcaatgagaaagacaacttcatgcttttccccataaaaaaaaaaagaaagaaaaaacaaacagcaacaacaaaattgtcacagatatcaaagactatttcctggcaacataatcctgaacttatttaaaatgctggtagcttattcaacagttcaagaataagaaaagagggttgcacaagatggccgaataggaacagctccgatctacagctcccagcatgagtgacgcagaagacgggtatttatgcatttccaactgagttaccaggttcacctcactggggagtgccagacagtaggtgcaagacagtgggtgcagcctaccgtgcgcgagccgaagcagggtgag

SEQ ID NO: 4925 - DNA, 441 bp, Homo sapiens
  misc_feature 5, 120, 126, 141, 163, 165, 179, 216, 217, 222, 234, 242,299, 305, 320, 337, 353, 425: n = A,T,C or G
gagcnccgccgtaatacgacctcactatagggcagaattggagctccaccgcggtggcggccgcccgggcaggtactcgggggcagtgggaagctcgcaacagctggggaggagccaaancctcgnctctcacctaagccncaaggagatacacccaactggnanatgaggaaacagcnacccagagaggagaactaacccacacaggatcatttnncgaangagcaaggctgnagaaccanacctggactttcttaggacaaacttactgcatcttgaaggagccaactcatggattngaggcntgtgaaggaatattnctcctggctctactatnaataccaaatcattanctgctgtgctgttttagagccctgggagcgatctatgtttaacaccatcttactaaccattattgctatggnggtatacactgcctat

SEQ ID NO: 4926 - DNA, 426 bp, Homo sapiens
gagctccgccgtaataccgacttcactattagggcgaattggagctccaccgcggtggcggccgaggacaagttgtctttatgctgcgagataagtcctctcttggtttgagctcccaccttttcagtgaactcttacattttgggggatctgctcttgtaaaggacatcctttctggtctttgattacttgagaaaagtgagtgaggtggggccaagatggttgactagaagcagctagtgtgtgccactctcacaaatagcagaaagagtggtgagacactagctcttcaaccggaacatccaggtggacacataaggattcatcagtgacatagtgtgaccttcggatcacggagaagagtgggacagatcagccattcacccaggagtggcacagacccaggggaatccccctacaagaaaa

SEQ ID NO: 4927 - DNA, 433 bp, Homo sapiens
  misc_feature 71: n = A,T,C or G
gtttcgcgtaatacgactcactattttggcgaattggagctccaccgcggtggcggccgcccgggcaggtncccaggtgctacagcatcagcttcccttgccgcttcctgcggctgaagggatggtccgaccaaagcctcctgccctggggcagccgatgccactgcatgctttttcctgcgcttgggcttcacggtgccacggatattggccggcttgctgcgcttggagcgtagggtaatgtacctcggccgcccgggcaggtacgcggggagccaagatggttgcccccgcagtgaaggttgcccgaggatggtcgggcctggcgttgggcgtgcggcgggctgtcttgcagcttccagggctaactcaggtgagatggagccgctatagtcctgaattcaaggatcccttgattgacaaggaatattat

SEQ ID NO: 4928 - DNA, 404 bp, Homo sapiens
  misc_feature 5, 116, 144, 197, 235, 276: n = A,T,C or G
gagcnccgcgtaatacgactcactatagggcgaattggagctccaccgcggtggcggccgcccgggcaggtactttttttttttttttttttttttgaataagcttactttaatanatccaggggactgtttaatgcactgaanaattatttttcaggcattctgtgatgtccaaattaggttaatatacctctganaagtgaatcagctactcctcgttggatagtaaggtcanaacaactgttcctgaaaccttagtacacactagctgataanacactgttgcccataatgtctatttattggatcagcaatttataagtcccacattctcatgccacatagctctacacagctgcaaaaatataccatagcttgcaggtgatcattggtttgataaaaga

SEQ ID NO: 4929 - DNA, 892 bp, Homo sapiens
  misc_feature 1, 5, 675, 678, 709, 742, 749, 756, 796, 832, 855, 857, 883: n = A,T,C or G
nacgncgactactatagggcgaattggagctcccccgcggtggcggccgcccgggcaggtaccattatgaagagtatgccaattttattaaggtcccacaaactcagtgttacctgacttaaggtattttctctctaaagaaataagggcataaatatattgttcttaaatatcttaaattaaaatgttctaatgtgggaaaagccatctttctgtgacactctctgcctctctttcttcctctccccttctctctcacacacctatatgcacacacactccacactcacaaaagcatataattccaacaaaacaaggcaaaatattgaccaaaccactgaataacattcactggaccaaccttataaagcagtggcaattttcctaatttcaggagtgcgatctgatttgttacgttttttattttcctaatcctttttaaatcatctgccattccataactcacatcgatgacttcagccttgagagttcctttggcagaataggctgcatatgaatagagcaggtcttggctgctatcttttctggcttcttcactgcaaggctggccattaggatgaaagcattgaccactgctgctcagagtcacagtgctgggagaagggcctggcagatcaagcagcacaagagtaatttacaaactgtaccttgggncgntctagaactaagtggatcccccgggctgcangaattcgatatcaagcctatcggatcccgccancctcganggggggnccgggacccaacttttgttcctttaatgagggtaattgcnccctggcgtaatcatggccatagctggttcctgggngaaatggtattcccttacaattncncacacatacaaaccggagccttaagngtaaagccg

SEQ ID NO: 4930 - DNA, 886 bp, Homo sapiens
  misc_feature 14, 34, 745, 747, 754, 767, 781, 796, 811, 870, 882, 885: n = A,T,C or G
cgcgcgcgtatacnactcactataggggcgaatnggagctccccgcggtggcggccgcccgggcaggtaccattatgaagagtatgccaattttattaaggtcccacaaactcagtgttacctgacttaaggtattttctctctaaagaaataagggcataaatatattgttcttaaatatcttaaattaaaatgttctaatgtggaaaagccatctttctgtgacactctctgcctctctttcttcctctccccttctctctcacacacctatatgcacacacactccacactcacaaaagcatataattccaacaaaacaaggcaaaatattgaccaaaccactgaataacattcactggaccaaccttataaagcaagtggcaattttcctaatttcaggagtgcgatctgatttgttacgttttttattttcctaatcctttttaaatcatctgccattccataactcacatcgatgacttcagccttgagagttcctttggcagaataggctgcatatgaatagagcaggtcttggctgctatcttttctggcttcttcactgcaaggctggccattaggatgaaagcattgaccactgctgctcagagtcacagtgctgggagaagggcctggcagatcaagcagcacagagtaatttacaaactgtaccttgggccggtctagaactagtgggatcccccggctgcaggaattcgatatcaagcttatcgatccgtcnancctcganggggggcccggtncccagcttttggtncctttaatgagggtnattgccccctggcgnaacatggcctagctggttcctgggggaaatggtatccgttacaattcccacaaaatacnagccgggacctnaang

SEQ ID NO: 4931 - DNA, 890 bp, Homo sapiens
  misc_feature 1, 34, 531, 702, 736, 749, 754, 761, 773, 788, 832, 834,841, 844, 848, 855, 862, 863, 865, 880, 881, 886: n = A,T,C or G
ncgcgcgcgtatacgactcactatagggcgaatnggagctcccccgcggtggcggcccgaggtacaagttgtctttatgctgcgagataagtcctctcttggtttgagctcccaccttttcagtgaactcttacattttgggggatctgctcttgtaaaggacatcctttctggtctttgattacttgagaaaagtgagtgaggtggggccaagatggttgactagaagcagctagtgtgtgccactctcacaaatagcagaaagagtggtgagacactagctcttcaaccggaacatccaggtggacacataaggattcatcagtgacatagtgtgaccttcggatcacggagaagagtgagacagatcaaccattcacccaggagtggcacagacccaggggaatccccctacaagaaaatgaagccaaggaacaccatctgaagttctgacggcaacatcagaagctaagagaaaggcatggaaaagattctcacctagagcatccagaggagaggttggtcctgcanacaccttgttttctgacctctgacctccacaactgtgagggaaagaaatttctgttgcttaaagacacacagcttgtggtacacccacttgaaccattttgagatatctggcatatcttggatccttggctacaggtaaaatattttctgctgatcttcacttttctgtantccaaaatcttgtgtaccttgcccggccggccgntcgaaccaatttncatangcactgngccaaggtttangccaggtcaatggcnatgaataccttggccgttttaaactagtggatcccccggcttgnangaattcnatntaancttatcnttcccgnnanctcaggggggcccgnncccantttt

SEQ ID NO: 4932 - DNA, 891 bp, Homo sapiens
  misc_feature 11, 25, 29, 296, 466, 504, 614, 620, 650, 682, 687, 688,690, 729, 759, 771, 775, 779, 786, 835, 847, 860, 878, 888,891: n = A,T,C or G
agcttttaacnactactatagggcntttnggagctccccgcggtggcggcccgaggtacaagttgtctttatgctgcgagataagtcccctcttggtttgagctcccaccttttcagtgaactcttacattttgggggatctgctcttgtaaaggacatcctttctggtctttgattacttgagaaaagtgagtgaggtggggccaagatggttgactagaagcagctagtgtgtgccactctcacaaatagcagaaagagtggtgagacactagctcttcaaccggaacatccangtggacacataaggattcatcagtgacatagtgtgaccttcggatcacggagaagagtgagacagatcaaccattcacccaggagcggccagacccaggggaatccccctacaagaaaatgaagccaaggaacaccatctgaagttctgacggcaacatcagaagctaanagaaaggcatggaaaagattctcacctagagcatccanaggagaggttggtcctgcagacaccttgttttctgacctctgaccttcgcaactgtgagggaagaaatttctgttgcttaaagacacacagcttgtggtacctgcccggncggcgntctagaactagtggatcccccgggctgcangaattccatatcaaagcttatcgataccgtcnacctnnanggggggcccggtacccaacttttggtccctttaatggangggtaattggccccctggcgtaatcatggncatagttgtttnctgngtgnaaattgntattccgttacaattccacacacataccaagcccggaacctaaaatggnaaagcctggggngcctaatgagggnctacccaaattaatgggntgcgcccacngcn

SEQ ID NO: 4933 - DNA, 413 bp, Homo sapiens
cgcgtaatacgactcctatagggcgaattggagctccccgcggtggcggccgaggtactacccagatcacagacaatccaaatatcagaactagggggctgggcagagaggacaaatcatctattagggagtgggacagaaagtggaaacattacaaaggagcaagtaggctcagaacagaggggagagtaatactggggaaactccctactgaggacaggtttgccacagtggatatgtatgtgatgcttttgtcctcatgggctggaatggaagctgataaagaagttcagacgctacgtgttgcttaggtctgctttgttgaagcatgtctctttcagagttcctaaacacaatattcccgtggcatctaatcccagtgagtgctccaaatccaggctgtgtatcagatg

SEQ ID NO: 4934 - DNA, 413 bp, Homo sapiens
cgcgcgtaatacgactcactatagggcgaattggagctccaccgcggtggcggccgaggtaccacacaccctccactactcatcaccagacagggaaccctggcttgggcccacagcacagaccctccatcctgggccgattacactaagtgattgctaactcacatgtctctgggatggagcacccaggagacaagcaaagtgttggagcagcaagtcaggtgatgtggagcccagagggctgggacagctatctctctagggtctacttgcccttgtgagacactttatcccagcactttaggaatgctgaggtcataccagccacatctcatgtgcaagattgcccagcagagatcaggtccaagagttcctgttttaaaaaagggggacttgcttaataaaaagaagtc

SEQ ID NO: 4935 - DNA, 409 bp, Homo sapiens
  misc_feature 3, 110: n = A,T,C or G
gcnccgcgtaatacgactcactatagggcgaattggagctccaccgcggtggcggccgcccgggcaggtactttttttttttttttttttttttttatggagtctttaanattatctctatgttggctggctgcggtggctcatgcctgtaatcccagcactttgggaggccaaagcgggaggccaacactggggctacccaagagttgaccaaaggtgatattaatacatatgcttacttattaccttgttcgcacagttctagtgtaagtcttgaaaatcaagtaaatttggaaacatagttgcacaaactctctcatgagtcacacagttaatccagaatattatttctaagttatcataaagccaacaagcaaatatgatgtacctcggccgctctagaactagt

SEQ ID NO: 4936 - DNA, 412 bp, Homo sapiens
gagcgcgcgtaatacgacctcactatagggcgaattggagctccaccgcggtggcggccgaggtacagaaaaacctttaggctgaacttaaaatatgtaagcagagagctttaggctgaacttgatttaacatggttttattttgtttttaacaaatagaggccatgatgactgtttaggctgagtaatggaggcctctgctccaagggcaggctgcttttcaaacagttgccatctcagtaatttttatccatttgcatctcacaacatcacaagacaggtttacataaaagtccaggttaccctgcaggctgcgtggtaacctttgattttaggttgatactggagagaaggtccgagaagaagccatccttaacaggaaatacattaaaaaaattctttgaaactggtt

SEQ ID NO: 4937 - DNA, 417 bp, Homo sapiens
  misc_feature 17, 390: n = A,T,C or G
gagcgccccgtaatacngactcactattagggccgaattggagctccaccgcggtggcggccgaggtacaagttgtctttatgctgcgagataagtcctctcttggtttgagctcccaccttttcagtgaactcttacattttgggggatctgctcttgtaaaggacatcctttctggtctttgattacttgagaaaagtgagtgaggtggggccaagatggttgactagaagcagctagtgtgtgccactctcacaaatagcagaaagagtggtgagacactagctcttcaaccggaacatccaggtggacacataaggattcatcagtgacatagtgtgaccttcggatcacggagaagaagtgagacagatcaaccattcacccagnagtggcacagacccaggggaatccccc

SEQ ID NO: 4938 - DNA, 436 bp, Homo sapiens
  misc_feature 69, 108, 243, 290: n = A,T,C or G
cgcgtaatacgactcacctatagggcagaattggagctccaccgcggtggcggccgaggtactcggatngctccctgtgcttcatctaatactaacatggagagactncagagatcatcttattctcctcattgctaagttttctaaatacttgcctatagaaagagaaaagataatttaagtgagcagaaaaataataaagcagtgtgggctctgaaatccatacttgtttgcttttatctnttgacctgctcttgcatgtattcttttaagccctactgaggatattnagttattaatatttctaaccccagtgttcaactctgacttctctactgacaaactctacagaagaaaaggtcaaagttaacaccagctcaatattaaatcatggggactgtagctccagaaaactggagttaataagatgatccaa

SEQ ID NO: 4939 - DNA, 426 bp, Homo sapiens
  misc_feature 182, 311, 327, 393: n = A,T,C or G
cgccgtaatacgactcactatagggcgaattggagctccaccgcggtggcggccgcccgggcaggtactttttttttttttttttttttttttattttttttttttttctggctgagccagtggtcaccttaatttaataaactctcctgaaccttttttggtctctccagtctttgattgncccgcaacagtattacaaacaaaaggcattaggcaaagcatgctgaattgattggagtcccttggtcaaaggtattattgattgacggcaatcagatccactccctcaaaaaggatttgagtaggcctnttctgtccatctgcanaaggttccccaaaaggggcagagggcggggccctggtgggagggtgccatgggagttagggtgacnctgaaccaggagtagcaagaggcctgtgaggag

SEQ ID NO: 4940 - DNA, 432 bp, Homo sapiens
gcgtaatacgactcactatagggcagaattggagctccaccgcggtggcggccgaggtaccaccatttgtttttcaatttgtccaaaagcccctgctcgttcagttttaacactgccaggtttactggatttctttaaaaacgaataaataacactcgatgagtaacaggtggagaacactcagcaagtcacgtgacccaagggatcggtgaatcagctccattacccagcctgccaggttgccctttgacctgaggatgccctgcccccaacaccactgcaggaattgggggatggagccaaggcatagtctccatcattgactcccattatggagaggcgtcattgtaacctaagttttcagaagttgggtattttgaaagcaatggccccaatagttttcccctcctgtctgcttttatagatttcttt

SEQ ID NO: 4941 - DNA, 382 bp, Homo sapiens
cgtatacgactcactatagggcgaattggagctccaccgcggtggcggccgcccgggcaggtacagcctaccgaaaatactccaggataatctcaagatccttaacttaattacatctgcaaagaccctttttccaaataatgccacctccacagattctaggcacaaggatctggatatatcttgtgtaaagccaccattcagctcactacactagaaagaggaaaaacaacaacgatgtaacaagaggcgcagaagaaagaacagatgcagcttgtgtggcagtggccatcaaggcaggctggggtaaaactgtgtcaacagaagccccagatggaactcaagtgcggccgctctagaactagtggatcccccgggctgc

SEQ ID NO: 4942 - DNA, 402 bp, Homo sapiens
  misc_feature 3: n = A,T,C or G
gcnccgcgtaatacgactcactatagggcgaattggagctccaccgcggtggcggccgaggaccgcaccatgtattaaaaagactattattttaattgcagtggcatatttgtcgaaaatcaaatgactatgaatgggagtttattctggactctattctgttccattgtctatatgtgtatctttatagcaggaccaacacttgttggttaccatatagatttatagtatgttttgagattagataagtttaagtcctgcagcttcatactttttcagagttgtttcactattcttggtattttatactttcatatatattttaggaccaatttctagaaaaagattacgatggcatttaggtagatcagtgtagggagaattgacgtcttagtaatattg

SEQ ID NO: 4943 - DNA, 381 bp, Homo sapiens
  misc_feature 5: n = A,T,C or G
gagcnccgccgtaataccgactcactatagggcgaattggagctccaccgcggtggcggccgaggtacaagttgtctttatgctgcgagataagtcctctcttggtttgagctcccaccttttcagtgaactcttacattttgggggatctgctcttgtaaaggacatcctttctggtctttgattacttgagaaaagtgagtgaggtggggccaagatggttgactagaagcagctagtgtgtgccactctcacaaatagcagaaagagtggtgagacgctagctcttcaaccggaacatccaggtggacacataaggattcatcagtgacatagtgtgaccttcggatcacggagaagagtgagacagatcagccattc

SEQ ID NO: 4944 - DNA, 412 bp, Homo sapiens
  misc_feature 5: n = A,T,C or G
gagcnccgcgtaatacgactcactatagggcgaattggagctccaccgcggtggcggccgaggtactttaaaattgatacctttctctaggtttgggaagttctctgttattattttattgaataaactttctacccaatctctctctattttctctttaagaacaattacttggatttgcccttttgaggctaatttctaggtcttataggcatgctttgttgttttttattctctcttttttttgtcttctctgactgtgtattttcaagtagtctatcttcaagctcactcattctttcttctgctggatcaagcctggaatcgagggcctcaagggcccttttggtgctcttcctcactgcggctgagctggcacctaagctcatcacaaagtgctctttcctcttcc

SEQ ID NO: 4945 - DNA, 390 bp, Homo sapiens
gtatacgactcactatagggcgaattggagctccccgcggtggcggccgcccgggcaggtaccagctgtggtgagggtgtgctgccactgcagctgctgtctgggcatctgtgttagggccaatacttcaagaagtgtgagtcattgtgaagtgactgtaggcagctgggaaataacagctgtgaacagaaaaaagactggaggcgtgctctctggaggtctgggcatagtgatgagaggctgaggaacagagagggaaaagaaaaatgcaattctaaaattaaaaagaaaaccttaatttaaaccgtgatttacagataattcccatgtgtgagagacagtataggaaacactccaaagagcttgcgttaaaacaaaaataagtaaata

SEQ ID NO: 4946 - DNA, 402 bp, Homo sapiens
gcgtaataccgactcactatagggcgaattggagctccaccgcggtggcggccgaggtacagggtgaaggagctgcttctgtcttgttgcgatccaagttgtaaatgttaatgaagtcttgtttgacctcaggatatcccagaagctcctgagagactgatgacagacaccattaatgaaccaatcttgctgtgtcgatttcctgtggagatcaagtccttctacatgcagcgatgtcctgaggattcccgtcttactgaatctgtcagtttctgtttcaaagagtattaataattttgctttttaagggggtggggactgtcatctggaatcaggtacctgcccgggcggccgctctagaactagtggatcccccgggctgcaggaattcgatatcaagct

SEQ ID NO: 4947 - DNA, 406 bp, Homo sapiens
  misc_feature 235, 264, 346: n = A,T,C or G
gagcgcgcgtaatacgactcactatagggcgaattggagctccaccgcggtggcggccgaggtacttttttttttttttttttttttttttaaaagtgcctgcttattgttttgtgctacctagcatccagccgcccctttaattttcaggttagcgtgtgttgtgtgggtcccagtggactggccttgtcgtttctgctcacctcaggatagttatggaatgttcatgacatanacttagccaattcaatgttcttgtcctanattttgaatactgaaggaggaacaaagtgtagggacagttgaagtgtttacagtggtaagggcaatgatgtggagagtccanaggtgagggctgcagcaagactacagtagtggcaagtgtctaataatagcaatgcacaat

SEQ ID NO: 4948 - DNA, 404 bp, Homo sapiens
cgcgtaatacgactcactatagggcgaattggagctccaccgcggtggcggccgcccgggcaggtactgtgtgtggatcaagtgtcatgagaacccacataacagcatggctgattctgctgaggaaagtcagggaatgtttcacagcagagaggacattcaggttagggcatgttgcctaagtaggagtttctcagttgaagaagattggaggtggaaggggagggaggtaaacttctcaggcagagggaaaagcaggtgcaaaggcaggaagtctgtacctcggccgctctagaactagtggatcccccgggctgcaggaattcgatatcaagcttatcgataccgtcgacctcgagggggggcccggtacccagcttttgttccctttagtgagggttaat

SEQ ID NO: 4949 - DNA, 428 bp, Homo sapiens
  misc_feature 5, 428: n = A,T,C or G
gagcnccgcgtaatacgactcactatagggcagaattggagctccaccgcggtggcggccgcccgggcaggtactttttttttttttttttttggctgtttttaagtttattttgacggaacttttgataagaaatctcagattagacttttaaaagcctttcaagggtcagaagtcaaaggagggcgaacatcagactttggctgcagtatctaaaaatctgtatgaatttctctcttcttgaggtctccaatatatctggaggttcctggccattttcttgtagggggattcccctgggtctgtgccactcctgggtgaatggctgatctgtctcactcttctccgtgatccgaaggtcacactatgtcactgatgaatccttatgtgtccacctggatgttccggttgaagagctagtgtctcan

SEQ ID NO: 4950 - DNA, 416 bp, Homo sapiens
  misc_feature 268, 339: n = A,T,C or G
gcgtaataccgactcactatagggcgaattggagctccaccgcggtggcggccgcccgggcaggtacctttgcacctgcataatcctgtgcctgtttagatagtcctgagagctctctcctctttctccctctctgggaaataagaatggccctaggttccacagagtctaaggataaataactgttaaagacatgagtgtgttaagacatttcaatccaaacatagctgcattgttaaaaaaaaaaaagttgttttaagacctgcangtaaggagcgtccatctggaaaggtaatgggtttgtcgagtaaccgggatatgtttactaccggtgcgtanaggcggaggcattccttgatgcacattgtggcgtaaggcatctggctcaggtgttcccaggtaatagaagacccatc

SEQ ID NO: 4951 - DNA, 432 bp, Homo sapiens
  misc_feature 5: n = A,T,C or G
gagcnccgcgtaatacgacctcactatagggcagaattggagctccaccgcggtggcggccgaggtacttccagcatgggctctgtccaccctgctctctgggtctacatccagcccttcagttttcactaggcaaatctgaggtgagtcaactgagtttgcaaaatgtgcttattagcaggtgtgggatgttctactaccttcttcagagccacagcattcctgttccttcccacatcatttcactaagggtctgaccaactcatctcccaaccattcaagacacaggagaattaactgcaggccttcacacatggaagtcagtcacagtgcgtggagaagggaggggcgggaggggctgaatgaggagtggatgtgagcaggtcccctggcagctccaaaccccagtagacaagaacagcttccagtgcc

SEQ ID NO: 4952 - DNA, 416 bp, Homo sapiens
  misc_feature 291, 371: n = A,T,C or G
gagccccgccgtaataccgacctcactatagggcgaattggagctccaccgcggtggcggccgaggtacaagttgtctttatgctgcgagataagtcctctcttggtttgagctcccaccttttcagtgaactcttacattttgggggatctgctcttgtaaaggacatcctttctggtctttgattacttgagaaaagtgagtgaggtggggccaagatggttgactagaagcagctagtgtgtgccactctcacaaatagcagaaagagtggtgagacactagctcttnaaccggaacatccaggtggacacataaggattcatcagtgacatagtgtgaccttcggatcacggagaagagtgagacanatcaaccattcacccaggagtggcacaaacccaggggaatccccc

SEQ ID NO: 4953 - DNA, 845 bp, Homo sapiens
  misc_feature 5, 6, 14, 21, 32, 33, 267, 369, 377, 379, 471, 496, 503,526, 544, 560, 576, 601, 610, 614, 615, 617, 618, 619, 620,621, 622, 623, 624, 625, 626, 627, 628, 629, 630, 631, 632,633, 634, 635, 636, 637, 638, 639, 640, 641, 642, 643: n = A,T,C or G
  misc_feature 644, 645, 646, 647, 648, 649, 650, 651, 652, 653, 654, 655,656, 657, 658, 659, 660, 661, 662, 663, 664, 665, 666, 667,668, 669, 670, 671, 672, 673, 674, 675, 676, 677, 678, 679,680, 681, 682, 683, 684, 685, 686, 687, 688, 689, 690: n = A,T,C or G
  misc_feature 691, 692, 693, 694, 695, 696, 697, 698, 699, 700, 701, 702,703, 704, 705, 706, 707, 708, 709, 710, 711, 712, 713, 714,715, 716, 717, 718, 719, 720, 721, 722, 723, 724, 725, 726,727, 728, 729, 730, 731, 732, 733, 734, 735, 736, 737: n = A,T,C or G
  misc_feature 738, 739, 740, 741, 742, 743, 744, 745, 746, 747, 748, 749,750, 751, 752, 753, 754, 755, 756, 757, 758, 759, 760, 761,762, 763, 764, 765, 766, 767, 768, 769, 770, 771, 772, 773,774, 775, 776, 777, 778, 779, 780, 781, 782, 783, 784: n = A,T,C or G
  misc_feature 785, 786, 787, 788, 789, 790, 791, 792, 793, 794, 795, 796,797, 798, 799, 800, 801, 802, 803, 804, 805, 806, 807, 808,809, 810, 811, 812, 813, 814, 815, 816, 817, 818, 819, 820,821, 822, 823, 824, 825, 826, 827, 828, 829, 830, 831: n = A,T,C or G
  misc_feature 832, 833, 834, 835, 836, 837, 838, 839, 840, 841, 842, 843,844, 845: n = A,T,C or G
gccgnngcgcgtanacgactnactatagggcnnattggagctccccgcggtggcggccgaggtacctggcgatggtttgcaaaatcttgacgttaaaaatcaccactgtttcatgtgtgtgggaaataagaaggcagggagacagaatgaaaagcctgagaaaacacaataaggcagctaccaggaggcagcctgaacgtgtcagggcctgggcacgacacttgcctttcttggaggagtgatttgaagccatagtggaagactgancctctataaaaaatgaacgaggacactcttaatggacagatacaaaacaagccccaggagaaaggtgtatcaaccattttaaatctgccctcaaaagcacanaacaaatnanacagcattttgctcacagaggagagggtctatgagaaccaaattccagcttcagcacatggccttgggtacctgcccgggcggccgctctanaactagtggatcccccgggctgcangaattcnatatcaagcttatcgatcccgcnacctcgaaggggggcccngtcccaacttttgttncctttaatgaagggtnattgcgcgcctggcgtaatcatggncatagctgntttnngnnnnnnnnnnnnnnnnnnnnnnnnnnnnnnnnnnnnnnnnnnnnnnnnnnnnnnnnnnnnnnnnnnnnnnnnnnnnnnnnnnnnnnnnnnnnnnnnnnnnnnnnnnnnnnnnnnnnnnnnnnnnnnnnnnnnnnnnnnnnnnnnnnnnnnnnnnnnnnnnnnnnnnnnnnnnnnnnnnnnnnnnnnnnnnnnnnnnnnnnnnnnnnnnnnnnnnnnnnnnnnnnnnnnn

SEQ ID NO: 4954 - DNA, 834 bp, Homo sapiens
  misc_feature 25, 118, 137, 207, 224, 239, 535, 543, 546, 592, 613, 635,645, 653, 667, 699, 715, 727, 743, 762, 776, 783, 798, 799,810, 819, 825, 826, 834: n = A,T,C or G
gcgcgtatacgactactatagggcnaattggagctccccgcggtggcggccgcccgggcaggtaccaagattgaagccccttaacattcagttcaagtgttggttccacttgcctgancacaagttggaagtagctntgttaggattctagccggcatccttgctgtcactactggttcttgtatagtcaagccccactctgtgcanagcaaatctttgctcanttaagcgagcgtcantcactggtaagcttggctgccggcccggggttgttaggcttttccatgctacacctgaatgagatattgacgagacattgctacctaaacagagttgagaaactggataaataaataaattaattaaattgtcacagggctgagagaataattttgaaaatgcaacttacacttccagtgcagaaacagatcaagggaagtacctcggccgcccgggcaggtacttcctgtataacccattttctcatttgtaaaatgaactaacatggtatgttactgcgaaaattaaatgaatnaatgtaangtnctcaatgcacaatctggccagtaggtggcctatataaatatttggnaattttatcttcatatctgtnaatttttaataaaatcttgctnttttacccangctgcaantgcatggcacaatnttggcttactggaactttcaccttctgggctnagcaatcttatgcctncccttccgagtnctgggactcaggattntgccacattcccacctaanttttttttcttttnaaaaacngggtttttttttttnncaggtgggctnaaatcttgnctcaannatcccccn

SEQ ID NO: 4955 - DNA, 880 bp, Homo sapiens
  misc_feature 3, 5, 8, 36, 150, 409, 415, 429, 560, 562, 573, 574, 613,614, 618, 637, 642, 654, 659, 661, 662, 673, 686, 690, 700,705, 708, 722, 730, 735, 736, 741, 753, 758, 760, 784, 795,796, 798, 799, 800, 801, 802, 803, 804, 805, 806, 807: n = A,T,C or G
  misc_feature 808, 812, 815, 816, 817, 818, 819, 820, 821, 822, 823, 824,825, 826, 827, 828, 829, 830, 831, 832, 833, 834, 835, 836,837, 838, 839, 840, 841, 842, 843, 844, 845, 846, 847, 848,849, 850, 851, 852, 853, 854, 855, 856, 857, 858, 859: n = A,T,C or G
  misc_feature 860, 861, 862, 863, 864, 865, 866, 867, 868, 869, 870, 871,872, 873, 874, 875, 876, 877, 878, 879, 880: n = A,T,C or G
agngntangcgcgcgttatacgactactatagggcnaattggagctccaccgcggtggcggcccgcccgggcaggtaccacaagctgtgtgtctttaagcaacagaaatttcttccctcacagttgcggaggtcagaggtcagaaaacanggtgtctgcaggaccaacctctcctctggatgctctaggtgagaatcttttccatgcctttctcttagcttctgatgttgccgtcagaacttcagatggagttccttggcttcattttcttgtagggggattcccctgggtctgtgccactcctgggtgaatggatgatctgtctcactcttctccgtgatccgaaggtcacactatgtcactgatgaatccttatgtgtccacctggatgttccggttgaagagctantgtctnaccactctttctgntatttgtgagaagtggcacacactaactgcttctattcaaccatcttgggccccacctcactgacttttctcaagtaatcaaagaccacaaagggatgtccttttcaagaacagatgccccaaaatgtaananttcactggaannggtggggaacctcaaacccaagaagaaggacttattttnnggtngttaaagacaaacttggtnccttnggcggcttttanaactnannggaatcccccngggttgaaagaanttgntttttaagcntatcnatnccgggaaccttgangggggggnccggnncccanttttggttcccntttangnagggtaaatgggccccttggcgcnaattaatgggnntnnnnnnnnnnntttncgnnnnnnnnnnnnnnnnnnnnnnnnnnnnnnnnnnnnnnnnnnnnnnnnnnnnnnnnnnnnnnnnnn

SEQ ID NO: 4956 - DNA, 820 bp, Homo sapiens
  misc_feature 15, 24, 446, 451, 524, 540, 551, 556, 585, 596, 603, 645,650, 675, 688, 689, 697, 720, 722, 738, 742, 745, 754, 759,766, 769, 770, 771, 772, 773, 774, 775, 781, 782, 783, 784,785, 786, 787, 788, 789, 790, 792, 794, 795, 796, 797: n = A,T,C or G
  misc_feature 798, 799, 800, 801, 802, 803, 804, 805, 806, 807, 808, 809,810, 811, 812, 813, 814, 815, 816, 817, 818, 819: n = A,T,C or G
agccgtatcgactantatagggcngattggagctccccgcggtggcggccgcccgggcaggtacagatacagtttttaaacctaaagttactggtgaaacaagcttgctattactgagatgtataatgaatgtcttaaagctataaatccactcatcgttgtgtttaaggaggaactgaagcacaattgttaagaacaagtgaattaggtgaatatacattgacaaaaggttgataataaagttgtcagaatttcaaaaataatttagtgtgacttgaaatcttaaaatcatgttatattaaattaagtaacactttactgatttaatatttgagtcatttctaaggaaaatactgaaatatcaattgcttaacagaagtttaaaatatacgtaatttggcatcttggtttcacatgttatggaaaagctaaacatatttgggccngttanttaaaggcataaaaattattttatgagatggtgtcatctgcaaaatactaacatgatgcacttcaaaatgctnactaattttcactagnaaattaaggtnctaanagttaattaaaattaatattagagtaatntaaactagaantatgaangggaacaaatctgtcctcggcccgctctagaactagtggatnccccnggcttgcaggaatcgatattaagcntatcgataccggnnaccttcangggggggccggtcccacttttgntncctttaatgagggtanttgngcncttggcggnatcangggcatngcnnnnnnntcgggnnnnnnnnnnanannnnnnnnnnnnnnnnnnnnnnnnnnc

SEQ ID NO: 4957 - DNA, 867 bp, Homo sapiens
  misc_feature 7, 136, 167, 281, 287, 328, 361, 370, 375, 376, 385, 398,446, 449, 473, 488, 497, 498, 499, 500, 501, 502, 503, 504,505, 506, 507, 508, 509, 510, 511, 512, 513, 514, 515, 516,517, 518, 519, 520, 521, 522, 523, 524, 525, 527, 528: n = A,T,C or G
  misc_feature 529, 530, 531, 532, 533, 534, 535, 536, 537, 538, 539, 540,543, 544, 545, 546, 548, 549, 550, 551, 552, 553, 554, 555,556, 557, 558, 559, 560, 561, 562, 563, 564, 565, 566, 567,568, 569, 570, 571, 572, 573, 574, 575, 576, 577, 578: n = A,T,C or G
  misc_feature 579, 580, 581, 582, 583, 584, 585, 586, 587, 588, 590, 591,592, 593, 594, 595, 596, 597, 598, 599, 600, 601, 602, 603,604, 605, 606, 607, 608, 609, 610, 611, 612, 613, 614, 615,616, 617, 618, 619, 620, 621, 622, 623, 624, 625, 626: n = A,T,C or G
  misc_feature 627, 628, 629, 630, 631, 632, 633, 634, 635, 636, 637, 638,639, 640, 641, 642, 643, 644, 645, 646, 647, 648, 649, 650,651, 652, 653, 654, 655, 656, 657, 658, 659, 660, 661, 662,663, 664, 665, 666, 667, 668, 669, 670, 671, 672, 673: n = A,T,C or G
  misc_feature 674, 675, 676, 677, 678, 679, 680, 681, 682, 683, 684, 685,686, 687, 688, 689, 690, 691, 692, 693, 694, 695, 696, 697,698, 699, 700, 701, 702, 703, 704, 705, 706, 707, 708, 709,710, 711, 712, 713, 714, 715, 716, 717, 718, 719, 720: n = A,T,C or G
  misc_feature 721, 722, 723, 724, 725, 726, 727, 728, 729, 730, 731, 732,733, 734, 735, 736, 737, 738, 739, 740, 741, 742, 743, 744,745, 746, 747, 748, 749, 750, 751, 752, 753, 754, 755, 756,757, 758, 759, 760, 761, 762, 763, 764, 765, 766, 767-867: n = A,T,C or G
cgctatngagcgcgtaatacgactcactatagggcgaattggagctccccgcggtggcggcccgcccgggcaggtactcatggcagaaccagcccctctggggacagggtctaagtttagaaggaaacaccagganagcggttaattgacattccttcaaatgctgnttcacacacccaaaacaatttcatctggaaaatgggcggaaggaacgaaggggttggttctgaggctatccagagggatgagggaggagcacagcgcaggctcatgggccagantaaganacgcttccacggggtaggagagggttctcactttccctcantcctcggccgctctaaaactagtggatcccccnggctgcagnaattnnatatcaagnttatcgatcccgntaacttcagggggggcccggtacccaacttttggttcctttaattaanggntaattgcgccccttggcgtaatcnttggcattaccttgnttctttgannnnnnnnnnnnnnnnnnnnnnnnnnnnntnnnnnnnnnnnnnnttnnnngnnnnnnnnnnnnnnnnnnnnnnnnnnnnnnnnnnnnnnnnnannnnnnnnnnnnnnnnnnnnnnnnnnnnnnnnnnnnnnnnnnnnnnnnnnnnnnnnnnnnnnnnnnnnnnnnnnnnnnnnnnnnnnnnnnnnnnnnnnnnnnnnnnnnnnnnnnnnnnnnnnnnnnnnnnnnnnnnnnnnnnnnnnnnnnnnnnnnnnnnnnnnnnnnnnnnnnnnnnnnnnnnnnnnnnnnnnnnnnnnnnnnnnnnnnnnnnnnnnnnnnnnnnnnnnnnnnnnnnnnnnnnnnnnnnnnnnnnnnnnnnnnnnnnnnnnnnnnnn

SEQ ID NO: 4958 - DNA, 817 bp, Homo sapiens
  misc_feature 23, 52, 73, 79, 82, 84, 98, 101, 102, 114, 139, 141, 143,145, 146, 156, 159, 160, 162, 172, 176, 197, 199, 211, 217,218, 220, 225, 228, 230, 232, 234, 235, 239, 246, 257, 259,260, 267, 271, 273, 276, 277, 278, 285, 290, 291, 296: n = A,T,C or G
  misc_feature 310, 311, 313, 314, 316, 322, 323, 328, 329, 330, 331, 334,336, 338, 340, 342, 344, 350, 352, 353, 354, 356, 359, 360,507, 540, 594, 599, 617, 625, 638, 650, 655, 664, 666, 673,687, 688, 699, 717, 718, 723, 725, 732, 733, 738, 741: n = A,T,C or G
  misc_feature 744, 757, 761, 767, 775, 776, 779, 799, 804, 805, 807, 808,809, 810, 811, 812, 813, 814, 815, 816: n = A,T,C or G
agcgtatcgactactatagggcnaattggagctccccgcggtggcggccgangtactcacatgctgagggtangaggcngantntctttcgcttgaanatnncaggatctttancaaaagcctggactctgaagacccnangngnncatggaactntgnntnactggatccntgantccaaaggatgccactccccncntacctgcccggncggccnntntaganctngngnanncccngggctgnccgaattcgananntatcttntccntnccnnnaaccttnaaggnnggccnggtgcccccctttnncnncntttaannagggnnnnttncncncntngnatactnannncnatnnctgctccttgtggtggctctagcaggtctggctaaaacaaaaggattccatacaaccattgacattggagttaagtatgcagaaaaacaaacaagacgttttgatgaaggaaaattaaaagctggccaaagtgtaattggtctgcanatgggaaccaacaaatgtgccaccaggcaggtntgacagcttacgggactaggaggcatctttatgatcccaaaatgcaaactgacnaaccntttgaccagacccaattngtctgcanatgggcccttatnaaggaacccccnggccnggattttancnccaggtncctcggccgctctnnaactatggatnccccggctgcaggaattnnatttnancttatcnntccgncanctnagggggggccggncccncttttntccctttnnganggttaatgccccctgggtanctggnntnnnnnnnnnnc

SEQ ID NO: 4959 - DNA, 810 bp, Homo sapiens
  misc_feature 3, 4, 5, 6, 7, 35, 68, 76, 79, 84, 99, 100, 118, 119, 122,127, 129, 207, 208, 222, 225, 241, 252, 257, 269, 276, 280,498, 513, 540, 542, 593, 594, 595, 599, 603, 615, 618, 619,630, 632, 640, 664, 670, 671, 674, 680, 685, 692, 693: n = A,T,C or G
  misc_feature 694, 695, 699, 711, 713, 732, 733, 742, 744, 751, 755, 760,761, 762, 763, 764, 765, 766, 768, 769, 770, 771, 772, 773,774, 775, 776, 777, 778, 779, 780, 781, 782, 783, 784, 785,786, 787, 788, 789, 790, 791, 792, 793, 794, 795, 796: n = A,T,C or G
  misc_feature 797, 798, 799, 800, 801, 802, 803, 804, 805, 806, 807, 808,809, 810: n = A,T,C or G
agnnnnngacgcgcgtatacgactactatagggcnaattggagctccccgcggtggcggccgcccggncaggtacntgngcaanctgatggctcacagnnggtggggcacacactcgnnggncttgncngtctggtctgtaagataaaaggtaatgtttacgttcccaaataattataataaacagggtatattttaacatctttgnngaatgtctctcttncancaaaagacattttctnatgtattgttnaaatnaaaattccacangctctgntttnacctgaagtattttatctatcctcagtctcaggacactgttgatggaattaaggtataatgtgttaaagtctgtgtggctttctcttgtttactttgggggaaaggatgccaggaacatgtatagtgtctcagtgctaatactctatgatggattaactcaaagcatcgggagatgactcatattatcttaacatgctttcttttattgaaagtgganggcgggtggtggtanaatgtgattctacagaaatggcccacntnttcaaaaaggtcctcctgacactttttatttttggggcaaatgtgctcaannnttgntctnattccatctttnaannctgggaccttngnccctttanaactaagggatccccgggcttccngaattnnatntaaacntattnataccgnnnncctncaggggggcccngncccaacttttttcctttannaaggtaatngnccctggntaanatggnnnnnnntnnnnnnnnnnnnnnnnnnnnnnnnnnnnnnnnnnnnnnnnnnn

SEQ ID NO: 4960 - DNA, 847 bp, Homo sapiens
  misc_feature 1, 8, 10, 13, 23, 40, 65, 399, 514, 533, 535, 545, 578, 611,663, 665, 683, 695, 699, 719, 724, 737, 742, 744, 750, 761,816, 817, 820, 822, 823, 824, 825, 826, 827, 828, 829, 830,833, 836, 837, 838, 839, 840, 841, 842, 843, 844: n = A,T,C or G
  misc_feature 845, 846, 847: n = A,T,C or G
nagccgtnanagncgcgttatangacttactatagggctnattggagctccccgcggtggcggcncgaggtactattgacccagcgatgggggcttcgacatgggctttagggagtcataagtggagtccgtaaagaggtatctttactatcccgcgtactccaagtcccaaagaatctgttctgatggtgtggttacacaaccagccaagcacagccttaggttgctctcaactcagaactcaccctatcacacgttgacgaatgcaagagcctgttagagacactggaacccaagatgatgaagtttcattcttgtcgcccaggctggagtgcagtggtgcgttctcggctcactgcaacctccgcctccccggctcaagcgattctcctgtctcancctcccaagtagctggaaatacaggcatgtgccaccatgcccagctaattttgtatttttagtaaagatggagtttcttcatgttggccaggaaaaaaccttcactgaaaaaggncgctaccactactcgattntntctaagttgntcaaataccatgcaggaaactgactgttatgantaagacctggaaaggaaaatgaccccctaaaanccccaaagaatgttgattacctgtttatattacactggaccattggcttgtngnaccttgcccggcgggcgntttaaaactttngatncccccggctgcaggaatttnatttnagcttatccattnccgcnanctcaangggggcccggncccacctttttgttccctttatgaaggttaattgggcccttggcgtaatcatggnnatnannnnnnnnnttnggnnnnnnnnnnnn

SEQ ID NO: 4961 - DNA, 852 bp, Homo sapiens
  misc_feature 2, 8, 10, 14, 17, 19, 76, 201, 276, 419, 541, 568, 591, 595,606, 627, 669, 674, 740, 756, 784, 785, 804, 831: n = A,T,C or G
anccgtantngacntantntatggctgattggagctcccccgcggtggcggccgcccgggcaggtacaggacgcanaaaacccagggtcccagagcagggagaggattcccgggaccgtggcagactcattcccagggtgacagccacggagcgggctgagagacagcagtccagggtaggcagaaggggtgggttgcccntccacacctgtgggtgtttctcgttaggtggaacgagagacttggaaaagaaagagacacagagacaaagtatanagaaagaaaaatgggcccaggggactggcattcagcatacggaggacccgcgccagcaccggcctctgagttcccttagtatttattgatcattatcgggcgtttcccggaaagggggatgtggcaggacaataggataatantggggagaaggtcaacatgtaaacatgtgaacaaatgtcttttgcatcataaaaaggtaaagaaaaaggtgctgtgcttttgatgtgcatataaataaacatcttaatgccttaaagagcanttttgtttccacacgttccaccttcancccttaggcagtttttccctttnttanttgatggaatntcaattgggctttacacctanaccttccattgccggggaccaacaggaaacaaatccttcctnttatnttaacttgcaaagacccgtccttcctcttttactaatcccctcaatgcaaaccctttacggttttngacttgtggacggcanatttttcctttccaggaggccttttttnnacttttccaggggagaaancttgggcaatacctgggttttctaggnaaagtcccttggcctttccat

SEQ ID NO: 4962 - DNA, 851 bp, Homo sapiens
  misc_feature 6, 10, 17, 586, 593, 643, 650, 651, 652, 653, 654, 655, 656,658, 660, 661, 662, 663, 664, 665, 666, 667, 668, 669, 670,671, 672, 673, 674, 675, 676, 677, 678, 679, 680, 681, 682,683, 684, 685, 686, 687, 688, 689, 690, 691, 692: n = A,T,C or G
  misc_feature 693, 694, 695, 696, 697, 698, 699, 700, 701, 702, 703, 704,705, 706, 707, 708, 709, 710, 711, 712, 713, 714, 715, 716,717, 718, 719, 720, 721, 722, 723, 724, 725, 726, 727, 728,729, 730, 731, 732, 733, 734, 735, 736, 737, 738, 739: n = A,T,C or G
  misc_feature 740, 741, 742, 743, 744, 745, 746, 747, 748, 749, 750, 751,752, 753, 754, 755, 756, 757, 758, 759, 760, 761, 762, 763,764, 765, 766, 767, 768, 769, 770, 771, 772, 773, 774, 775,776, 777, 778, 779, 780, 781, 782, 783, 784, 785, 786: n = A,T,C or G
  misc_feature 787, 788, 789, 790, 791, 792, 793, 794, 795, 796, 797, 798,799, 800, 801, 802, 803, 804, 805, 806, 807, 808, 809, 810,811, 812, 813, 814, 815, 816, 817, 818, 819, 820, 821, 822,823, 824, 825, 826, 827, 828, 829, 830, 831, 832, 833: n = A,T,C or G
  misc_feature 834, 835, 836, 837, 838, 839, 840, 841, 842, 843, 844, 845,846, 847, 848, 849, 850, 851: n = A,T,C or G
agcgcntatngacttantatgtggctgattggagctccccgcggtggcggccgaggtacgcgggggcagtgggaagctcgcagcagctggggaggagccaaagcctcggcgctcacctaagccgcagggaggtacacccaactgggagatggggaaacagcaacccagagaggagaactaacccacacaggatcatttcgtgaaggagcaaggctgaagaaccagacctggactttcttaggacaaacttactgcagcttgaaggagccaaccatggatttgaggcgtgtgaaggaatatttctcctggctctactatcaataccaaatcattagctgctgtgctgttttagagccctgggagcgatctatgtttaacaccatcttactaaccattattgctatggtggtatacactgcctatgtctttattccaatccacattcgcctggcttgggaatttttctcaaaaatatgtgggatatcacagtacctgcccgggcggccgctctagaactagtggatcccccgggctgcaggaattccatatcaagcttatcgatccgtcgacctcgagggggggcccngtcccancttttgttccctttaatgagggttaattgcgcccttggcgtaatcatggncatagcnnnnnnntngnnnnnnnnnnnnnnnnnnnnnnnnnnnnnnnnnnnnnnnnnnnnnnnnnnnnnnnnnnnnnnnnnnnnnnnnnnnnnnnnnnnnnnnnnnnnnnnnnnnnnnnnnnnnnnnnnnnnnnnnnnnnnnnnnnnnnnnnnnnnnnnnnnnnnnnnnnnnnnnnnnnnnnnnnnnnnnnnnnnnnnnnnnnnnnnn

SEQ ID NO: 4963 - DNA, 856 bp, Homo sapiens
  misc_feature 17, 22, 26, 27, 56, 74, 81, 96, 98, 100, 102, 107, 116, 124,133, 135, 137, 142, 149, 159, 214, 218, 245, 254, 261, 268,271, 274, 278, 303, 308, 309, 310, 315, 530, 586, 675, 683,695, 716, 720, 755, 756, 757, 758, 759, 760, 761: n = A,T,C or G
  misc_feature 762, 763, 764, 765, 767, 768, 769, 770, 771, 772, 773, 774,775, 776, 777, 778, 779, 780, 781, 782, 783, 784, 785, 786,787, 788, 789, 790, 791, 792, 793, 794, 795, 796, 797, 798,799, 800, 801, 802, 803, 804, 805, 806, 807, 808, 809: n = A,T,C or G
  misc_feature 810, 811, 812, 813, 814, 815, 816, 817, 818, 819, 820, 821,822, 823, 824, 825, 826, 827, 828, 829, 830, 831, 832, 833,834, 835, 836, 837, 838, 839, 840, 841, 842, 843, 844, 845,846, 847, 848, 849, 850, 851, 852, 853, 854, 855, 856: n = A,T,C or G
agcgcttatcgacttantatanggcnnattggagctccaccgcggtggcggccgangtacccggggctcggacntaagtantttgttgggccgggntntnangcctngcttctctntacttttncactctagncnangatgnctgattncctgcccggncggccgctctagaactagtggattccccgggctgcaggaattctatatcaagctnatcnataccgtcttacctcaagggggggccngatacccancttttgntcccttnaanganggtnaatggcgcgctgggcgaaatcatgntcatnnntgtanccctgatctcaagccctggtaatcacacagctctggtcgatttcacaggtttagggactgatctctttcacttggctgcagagcagggagaaaaatccttctccttctggaaggaaaaatctctttacttgccgagaaatggctctagtagcttgccctggtcagctcctcttgcaaaaaaagaatcaccctaggagcacagtaacctgccccanattttcaaagatttttcttccaaaaataataataatagtaataaccaagcgcactnacacacacatgcacacgtacctcggccgctctaaaactagtggatcccccgggctgcaggaattcgatatcaagcttatcgatccgtcnacctcganggggggcccggncccaacttttgttccctttantganggttaattgcgcccttggcgtaatcatgggcatannnnnnnnnnngnnnnnnnnnnnnnnnnnnnnnnnnnnnnnnnnnnnnnnnnnnnnnnnnnnnnnnnnnnnnnnnnnnnnnnnnnnnnnnnnnnnnnnnnnn

SEQ ID NO: 4964 - DNA, 872 bp, Homo sapiens
  misc_feature 13, 16, 20, 25, 26, 539, 543, 544, 545, 548, 549, 550, 551,552, 553, 554, 555, 556, 557, 558, 559, 560, 561, 562, 563,564, 565, 566, 567, 568, 569, 570, 571, 572, 573, 574, 575,576, 577, 578, 579, 580, 581, 582, 583, 584, 585, 586: n = A,T,C or G
  misc_feature 587, 588, 589, 590, 591, 592, 593, 594, 595, 596, 597, 598,599, 600, 601, 602, 603, 604, 605, 606, 607, 608, 609, 610,611, 612, 613, 614, 615, 616, 617, 618, 619, 620, 621, 622,623, 624, 625, 626, 627, 628, 629, 630, 631, 632, 633: n = A,T,C or G
  misc_feature 634, 635, 636, 637, 638, 639, 640, 641, 642, 643, 644, 645,646, 647, 648, 649, 650, 651, 652, 653, 654, 655, 656, 657,658, 659, 660, 661, 662, 663, 664, 665, 666, 667, 668, 669,670, 671, 672, 673, 674, 675, 676, 677, 678, 679, 680: n = A,T,C or G
  misc_feature 681, 682, 683, 684, 685, 686, 687, 688, 689, 690, 691, 692,693, 694, 695, 696, 697, 698, 699, 700, 701, 702, 703, 704,705, 706, 707, 708, 709, 710, 711, 712, 713, 714, 715, 716,717, 718, 719, 720, 721, 722, 723, 724, 725, 726, 727: n = A,T,C or G
  misc_feature 728, 729, 730, 731, 732, 733, 734, 735, 736, 737, 738, 739,740, 741, 742, 743, 744, 745, 746, 747, 748, 749, 750, 751,752, 753, 754, 755, 756, 757, 758, 759, 760, 761, 762, 763,764, 765, 766, 767, 768, 769, 770, 771, 772, 773, 774: n = A,T,C or G
  misc_feature 775, 776, 777, 778, 779, 780, 781, 782, 783, 784, 785, 786,787, 788, 789, 790, 791, 792, 793, 794, 795, 796, 797, 798,799, 800, 801, 802, 803, 804, 805, 806, 807, 808, 809, 810,811, 812, 813, 814, 815, 816, 817, 818, 819, 820, 821-872: n = A,T,C or G
agccgtatcgacntantatngggcnnattggagctccaccgcggtggcggccgaggtaccggtgcccatcaccaacgccaccctggaccagatcactggcaagtggttttatatcgcatcggcctttcgaaacgaggagtactcttgtttaaccatcagaggtgatcccatcaccttcacagccccagcctctgctccagtccctccccagcgaaaagggccgcccatgccatcctgctgctggtgatttgctttgtggtcatggactcagtggacatcattattttattaaccgtgtggtaggtttttaactcaattatcctggatatccaaaggtttgtggtccatctttaggcttccgtttgttctttggtacctgcccgggcggccgctctagaactagtggatcccccgggctgcaggaattcgatatcaaagcttatcgataccgtcgacctcgagggggggcccggtacccagcttttgttccctttagtgagggttaattgcgcgcttggcgtaatcatggtcatagctgnttcnnngannnnnnnnnnnnnnnnnnnnnnnnnnnnnnnnnnnnnnnnnnnnnnnnnnnnnnnnnnnnnnnnnnnnnnnnnnnnnnnnnnnnnnnnnnnnnnnnnnnnnnnnnnnnnnnnnnnnnnnnnnnnnnnnnnnnnnnnnnnnnnnnnnnnnnnnnnnnnnnnnnnnnnnnnnnnnnnnnnnnnnnnnnnnnnnnnnnnnnnnnnnnnnnnnnnnnnnnnnnnnnnnnnnnnnnnnnnnnnnnnnnnnnnnnnnnnnnnnnnnnnnnnnnnnnnnnnnnnnnnnnnnnnnnnnnnnnnnnnnnnnnnnnnnnnnnnnnnnnnnnnnnn

SEQ ID NO: 4965 - DNA, 848 bp, Homo sapiens
  misc_feature 7, 24, 53, 56, 61, 63, 64, 69, 72, 91, 95, 99, 102, 107,108, 112, 123, 124, 139, 163, 166, 173, 176, 190, 196, 200,205, 218, 219, 225, 227, 231, 235, 238, 244, 250, 257, 258,259, 265, 269, 274, 281, 283, 312, 317, 338, 342, 344: n = A,T,C or G
  misc_feature 350, 351, 353, 356, 357, 358, 368, 558, 572, 577, 578, 651,652, 653, 654, 655, 656, 657, 658, 660, 662, 663, 664, 665,666, 667, 668, 669, 670, 672, 673, 674, 675, 676, 677, 678,679, 680, 681, 682, 683, 684, 685, 686, 687, 688, 689: n = A,T,C or G
  misc_feature 690, 691, 692, 693, 694, 695, 696, 697, 698, 699, 700, 701,702, 703, 704, 705, 706, 707, 708, 709, 710, 711, 712, 713,714, 715, 716, 717, 718, 719, 720, 721, 722, 723, 724, 725,726, 727, 728, 729, 730, 731, 732, 733, 734, 735, 736: n = A,T,C or G
  misc_feature 737, 738, 739, 740, 741, 742, 743, 744, 745, 746, 747, 748,749, 750, 751, 752, 753, 754, 755, 756, 757, 758, 759, 760,761, 762, 763, 764, 765, 766, 767, 768, 769, 770, 771, 772,773, 774, 775, 776, 777, 778, 779, 780, 781, 782, 783: n = A,T,C or G
  misc_feature 784, 785, 786, 787, 788, 789, 790, 791, 792, 793, 794, 795,796, 797, 798, 799, 800, 801, 802, 803, 804, 805, 806, 807,808, 809, 810, 811, 812, 813, 814, 815, 816, 817, 818, 819,820, 821, 822, 823, 824, 825, 826, 827, 828, 829, 830: n = A,T,C or G
  misc_feature 831, 832, 833, 834, 835, 836, 837, 838, 839, 840, 841, 842,843, 844, 845, 846, 847, 848: n = A,T,C or G
agcgtancgacttactatagggcnaattggagctccccgcggtggcggccgangtnccatntnngcggnganctgaagatgggtggccccnacanccgnaanccacnntgcncattacctgtnnatactgcagcccttnatatggaaacttcttacatcactntgntgtgtgngtntcacaggtgggttntgctgnaccngcccnggcggccgctctnnaactantngatncccnggnctgcangaattncatatgnnncttatngatnccgangacctgnanggggggccccggccccacttttgttcctntagtnagggttaattgctcgcttggngtantnatggtnntngannnctcccggganagatttgaatagaaaaagtaatcaagttaaaacctgcaaagctaaaattgaactacttgggagctatgatccacaaaaacaacttattattgaagatccctattatgggaatgactctgactttgagacggtgtacctcggccgctctagaactagtggatcccccgggctgcaggaattcgatattaancttatcgatccgcnacctnnagggggggcccggtcccaacttttgttccctttaatgagggttaattgccccctggcgtaatcatggcatacnnnnnnnncngnnnnnnnnnannnnnnnnnnnnnnnnnnnnnnnnnnnnnnnnnnnnnnnnnnnnnnnnnnnnnnnnnnnnnnnnnnnnnnnnnnnnnnnnnnnnnnnnnnnnnnnnnnnnnnnnnnnnnnnnnnnnnnnnnnnnnnnnnnnnnnnnnnnnnnnnnnnnnnnnnnnnnnnnnnnnnnnnnnnnnnnnn

SEQ ID NO: 4966 - DNA, 853 bp, Homo sapiens
  misc_feature 7, 13, 17, 22, 375, 380, 382, 385, 386, 392, 397, 398, 399,400, 403, 404, 407, 414, 415, 416, 421, 425, 429, 433, 435,436, 443, 445, 448, 451, 458, 459, 462, 464, 474, 477, 479,480, 481, 485, 488, 491, 494, 496, 501, 502, 503, 504: n = A,T,C or G
  misc_feature 507, 513, 520, 522, 523, 529, 530, 531, 535, 539, 540, 541,542, 543, 544, 546, 550, 551, 553, 554, 555, 557, 560, 561,562, 566, 568, 576, 577, 582, 583, 584, 587, 589, 591, 592,594, 595, 598, 601, 602, 604, 609, 610, 611, 612, 614: n = A,T,C or G
  misc_feature 615, 616, 617, 619, 620, 623, 624, 628, 630, 631, 632, 633,636, 637, 643, 644, 645, 646, 647, 648, 649, 650, 652, 653,654, 655, 656, 657, 658, 659, 660, 661, 662, 663, 664, 665,666, 667, 669, 671, 672, 673, 674, 675, 676, 677, 678: n = A,T,C or G
  misc_feature 679, 680, 681, 686, 689, 690, 691, 692, 693, 694, 699, 700,701, 702, 703, 704, 705, 706, 707, 708, 709, 710, 712, 713,714, 715, 716, 717, 718, 721, 722, 723, 724, 725, 726, 728,729, 730, 731, 738, 743, 744, 747, 748, 749, 750, 753: n = A,T,C or G
  misc_feature 754, 755, 756, 759, 762, 763, 764, 765, 766, 770, 771, 773,774, 775, 776, 777, 781, 782, 785, 786, 787, 789, 790, 791,792, 794, 795, 796, 797, 798, 799, 800, 801, 802, 803, 804,805, 806, 807, 809, 810, 811, 812, 813, 814, 815, 816: n = A,T,C or G
  misc_feature 817, 818, 819, 820, 821, 822, 823, 824, 825, 826, 827, 828,829, 830, 831, 832, 833, 834, 835, 836, 837, 838, 839, 840,841, 842, 843, 844, 845, 846, 847, 848, 849, 850, 851, 852,853: n = A,T,C or G
agctatngactantatngggcngattggagctccccgcggtggcggccgttattggtggtgaagacccgtagcaacagtgggcatgtcttctcgcggtcgatcggtttctctggctccttcttaatttcctcctgggtaacgcgcgactccaccgccatcttcctcctacggcctccccgcgtacctgcccgggcggccgaggtacctttatgtctggcaaaatagcgccccagaatgatgagcaagcacagcatggcgaacaccaccaccgccacgacgccaccgatcacggcatgatccactgccctgatcgagccttcttcacctgctcgggaatctgtgatgatggtaaggatggtggtggtggtggtggnggtcntngcnnaagctncaccnnnnggnntgntattttnnnacttntggnaatntctncnnaagtgantngtntgngatgggnncgncnggtgaaaatngtntnnntgangcncancancngagtnnnnctnaaaaangggcttnannacctgnnnaacnaggnnnnnngncccnngnnntnttnnnagtntngaaccccnntacgnnnccncngnngnnggnatnnanggtgnnnntnnnncnntgnnggtnannnnccnnagggcnnnnnnnnannnnnnnnnnnnnnnnanannnnnnnnnnnccccnggnnnnnngaatnnnnnnnnnnnntnnnnnnnccnnnnnncnnnnggggggnccggnnccnnnnttnnnnccnttnnnnngggnnannnnncccnnggnnnannnngnnnnnnnnnnnnnncnnnnnnnnnnnnnnnnnnnnnnnnnnnnnnnnnnnnnnnnnnnnn

SEQ ID NO: 4967 - DNA, 833 bp, Homo sapiens
  misc_feature 15, 22, 27, 130, 470, 546, 564, 579, 636, 671, 677, 696,699, 737, 743, 748, 760, 761, 769, 773, 774, 775, 778, 784,788, 793, 794, 806: n = A,T,C or G
agccgtttacgactnactatanggctnattggagctcccccgcggtggcggcccgcccgggcaggtacagtaggtgaaaggtgaggattcatccaaaatctgctgtagtgtgagtgcctgagcaagccancagaaagattctggtcagagtgggccatctaaatcagtgatgttgcaggaagaacactggagtggggtgaattgattgagtgttactgtaggagcctatgggtgggaagaggcggaatagagggaatgatggatggcatggctgtcaagactctaaaaggacctggcattggatgatttggccatctagaggctgaagtcgtgcaggataatggcaggaagggcaggaggcattggggtgaagaggaagcccagactccaagccagggtggtcagtgaatgtggccatgtctggcatatcatgaaggagagtttcaaggatgggtggaagatttggccanatgataggcccctcaaaggctgaaaagtttgcttgcttgctttaataaatggaggaaaaaaagtattctagaagcnggaatggaaaataagtantctaacaaaatcctntccaacacctggcattggggaattttaaacttagagaataccattattttaaaaccncccagattcctcctatatctcaccctttgggaagncaggtnggaagacatatgggccacntantaagacctctctctacaaaaaaaaaaaaaaaaaaaaancccccnccccntttaaaattggnncccccccncccnnnaantttttnaaanttttnncccccccccccngggggggggccggcccccctttttttt

SEQ ID NO: 4968 - DNA, 858 bp, Homo sapiens
  misc_feature 25, 101, 125, 191, 220, 231, 242, 257, 307, 309, 404, 408,414, 419, 420, 426, 442, 484, 488, 489, 492, 493, 494, 495,496, 497, 498, 499, 500, 501, 502, 503, 504, 505, 506, 507,508, 509, 510, 511, 512, 513, 514, 515, 516, 517, 518: n = A,T,C or G
  misc_feature 519, 520, 521, 522, 523, 524, 525, 526, 527, 528, 529, 530,531, 532, 533, 534, 535, 536, 537, 538, 539, 540, 541, 542,543, 544, 545, 546, 547, 548, 549, 550, 551, 552, 553, 554,555, 556, 557, 558, 559, 560, 561, 562, 563, 564, 565: n = A,T,C or G
  misc_feature 566, 567, 568, 569, 570, 571, 572, 573, 574, 575, 576, 577,578, 579, 580, 581, 582, 583, 584, 585, 586, 587, 588, 589,590, 591, 592, 593, 594, 595, 596, 597, 598, 599, 600, 601,602, 603, 604, 605, 606, 607, 608, 609, 610, 611, 612: n = A,T,C or G
  misc_feature 613, 614, 615, 616, 617, 618, 619, 620, 621, 622, 623, 624,625, 626, 627, 628, 629, 630, 631, 632, 633, 634, 635, 636,637, 638, 639, 640, 641, 642, 643, 644, 645, 646, 647, 648,649, 650, 651, 652, 653, 654, 655, 656, 657, 658, 659: n = A,T,C or G
  misc_feature 660, 661, 662, 663, 664, 665, 666, 667, 668, 669, 670, 671,672, 673, 674, 675, 676, 677, 678, 679, 680, 681, 682, 683,684, 685, 686, 687, 688, 689, 690, 691, 692, 693, 694, 695,696, 697, 698, 699, 700, 701, 702, 703, 704, 705, 706: n = A,T,C or G
  misc_feature 707, 708, 709, 710, 711, 712, 713, 714, 715, 716, 717, 718,719, 720, 721, 722, 723, 724, 725, 726, 727, 728, 729, 730,731, 732, 733, 734, 735, 736, 737, 738, 739, 740, 741, 742,743, 744, 745, 746, 747, 748, 749, 750, 751, 752, 753-858: n = A,T,C or G
agcgtaatcgacttactatagggcnaattggagctccccgcggtggcggccgcccggccaggtactaaggcctccttgagcttaataactggaatgggttntgtggggtttatcactaatgtctnctgagtgctggtcaccatgtctcaagcaatagccctaaggtgtctacatggatcacctcattacancttatagccaggtcttataatgatcaatnccatgttttanatgaggaaccnggggctcaggttaancaacttgcccttgcccttgatcacactggtcccttgtctccaaggccaantntatactcaggcctcatacctgaggaccacaactcaaaaggtcaagcagggtttgatgtctgttttcttttttccttttttttttttttaaaaaanaaangggggncccgnnccccancttttgttccctttantgagggttaattgcgcgcttggcgtaatcatggcatagctgnttcnngannnnnnnnnnnnnnnnnnnnnnnnnnnnnnnnnnnnnnnnnnnnnnnnnnnnnnnnnnnnnnnnnnnnnnnnnnnnnnnnnnnnnnnnnnnnnnnnnnnnnnnnnnnnnnnnnnnnnnnnnnnnnnnnnnnnnnnnnnnnnnnnnnnnnnnnnnnnnnnnnnnnnnnnnnnnnnnnnnnnnnnnnnnnnnnnnnnnnnnnnnnnnnnnnnnnnnnnnnnnnnnnnnnnnnnnnnnnnnnnnnnnnnnnnnnnnnnnnnnnnnnnnnnnnnnnnnnnnnnnnnnnnnnnnnnnnnnnnnnnnnnnnnnnnnnnnnnnnnnnnnnnnnnnnnnnnnnnnnnnnnnnnnnnnnnnnnnnnnnnnnnnnnn

SEQ ID NO: 4969 - DNA, 860 bp, Homo sapiens
  misc_feature 6, 8, 14, 20, 27, 31, 37, 94, 123, 133, 138, 144, 215, 236,478, 495, 509, 521, 536, 590, 597, 608, 611, 613, 623, 672,760, 764, 824, 828: n = A,T,C or G
agcgcntntacgcnattatngacttantatngggctnattggagctccaccgcggtggcggccgaggtaccctggactcatacctgaaagcagngttcaaccttagcaaaatctccaaccagngcatgaacanttttntacatnacaacgacctggttttcaaattcagctctcaaggccaaatcttttctaaatttaaccaagaacttcatcanttcacagagaaagtaatccangaccggaaggagtctcttaaggataagctaaaacaagatactactcagaaaaggcgctgggattttctggacatacttttgagtgccaaaagcgaaaacaccaaagatttctctgaagcagatctccaggctgaagtgaaaacgttcatgtttgcaggacatgacaccacatccagtgctatctcctggatcctttactgcttggcaaagtacctgcccgggcggccgcccgggcaggtacncggggggcttttgattntaatgataattgcncctttatctttnaaaagctgatatttnctacctaaccatctaccgagaaaaatatctcattaaaaagcccataaataattngggagangaaagccttangtntnaattccaaancagtgattgaaaattcccaaaataattatggcttctgtcatctccaaanataatctggcttggtttaccccataatctaatttcaaaaaaaaaagctttattttaacactcatctgaatcaacattaaagccttttntttnaaacgtttattgggaaactcaaatgaatatactttttgaattactggcatcaaaagtgtncggnttcctgtcctgttgggtaaaatggaacctgcc

SEQ ID NO: 4970 - DNA, 855 bp, Homo sapiens
  misc_feature 3, 4, 5, 17, 30, 34, 35, 220, 395, 599, 632, 633, 634, 635,636, 639, 640, 641, 642, 643, 644, 645, 646, 647, 648, 649,650, 651, 652, 653, 654, 655, 656, 657, 658, 659, 660, 661,662, 663, 664, 665, 666, 667, 668, 669, 670, 671, 672: n = A,T,C or G
  misc_feature 673, 674, 675, 676, 677, 678, 679, 680, 681, 682, 683, 684,685, 686, 687, 688, 689, 690, 691, 692, 693, 694, 695, 696,697, 698, 699, 700, 701, 702, 703, 704, 705, 706, 707, 708,709, 710, 711, 712, 713, 714, 715, 716, 717, 718, 719: n = A,T,C or G
  misc_feature 720, 721, 722, 723, 724, 725, 726, 727, 728, 729, 730, 731,732, 733, 734, 735, 736, 737, 738, 739, 740, 741, 742, 743,744, 745, 746, 747, 748, 749, 750, 751, 752, 753, 754, 755,756, 757, 758, 759, 760, 761, 762, 763, 764, 765, 766: n = A,T,C or G
  misc_feature 767, 768, 769, 770, 771, 772, 773, 774, 775, 776, 777, 778,779, 780, 781, 782, 783, 784, 785, 786, 787, 788, 789, 790,791, 792, 793, 794, 795, 796, 797, 798, 799, 800, 801, 802,803, 804, 805, 806, 807, 808, 809, 810, 811, 812, 813: n = A,T,C or G
  misc_feature 814, 815, 816, 817, 818, 819, 820, 821, 822, 823, 824, 825,826, 827, 828, 829, 830, 831, 832, 833, 834, 835, 836, 837,838, 839, 840, 841, 842, 843, 844, 845, 846, 847, 848, 849,850, 851, 852, 853, 854, 855: n = A,T,C or G
gcnnngacgcgcgttancgacttactatanggcnnattggagctccccgcggtggcggcccgaggtacagcaatacatgagttcttcctctagaaaaccaagccttctctggctgttagaaaggaggctaaagaggccgagaacccaaggtgttgtgtttgaatcccctgaggaaagtgctgatcaatctcaagctgacagagactcaaagaaggccaanaaagagaaactttctccctggcctgcggaccttgaaaagcagccttcccaccatcctttgcggatcaagaagcagttgttcccagatctctatagcaaagaatggaacaaggcagtgcctttctgtgagtctcaaaagagggtgactatgttgacggccccactgggattttcantgcacttaaggtctacagatgaggagtttatttctcaaaaaaccagggaggaaattggtttagggtcccccttggtacctgcccgggcggccgctctagaactagtggatcccccgggctgcaggaattcgatatcaagcttatcgataccgtccacctcgagggggggcccggtacccaacttttgttccctttaatgagggntaattgcgcccttgcgtaatcatggcataactnnnnnttnnnnnnnnnnnnnnnnnnnnnnnnnnnnnnnnnnnnnnnnnnnnnnnnnnnnnnnnnnnnnnnnnnnnnnnnnnnnnnnnnnnnnnnnnnnnnnnnnnnnnnnnnnnnnnnnnnnnnnnnnnnnnnnnnnnnnnnnnnnnnnnnnnnnnnnnnnnnnnnnnnnnnnnnnnnnnnnnnnnnnnnnnnnnnnnnnnnnnnnnnnnnnnnnnnnnnnnnn

SEQ ID NO: 4971 - DNA, 905 bp, Homo sapiens
  misc_feature 14, 25, 26, 451, 452, 453, 454, 455, 456, 457, 458, 459,460, 461, 462, 463, 464, 465, 466, 467, 468, 469, 470, 471,472, 473, 474, 475, 476, 477, 478, 479, 480, 481, 482, 483,484, 485, 486, 487, 488, 489, 490, 491, 492, 493, 494: n = A,T,C or G
  misc_feature 495, 496, 497, 498, 499, 500, 501, 502, 503, 504, 505, 506,507, 508, 509, 510, 511, 512, 513, 514, 515, 516, 517, 518,519, 520, 521, 522, 523, 524, 525, 526, 527, 528, 529, 530,531, 532, 533, 534, 535, 536, 537, 538, 539, 540, 541: n = A,T,C or G
  misc_feature 542, 543, 544, 545, 546, 547, 548, 549, 550, 551, 552, 553,554, 555, 556, 557, 558, 559, 560, 561, 562, 563, 564, 565,566, 567, 568, 569, 570, 571, 572, 573, 574, 575, 576, 577,578, 579, 580, 581, 582, 583, 584, 585, 586, 587, 588: n = A,T,C or G
  misc_feature 589, 590, 591, 592, 593, 594, 595, 596, 597, 598, 599, 600,601, 602, 603, 604, 605, 606, 607, 608, 609, 610, 611, 612,613, 614, 615, 616, 617, 618, 619, 620, 621, 622, 623, 624,625, 626, 627, 628, 629, 630, 631, 632, 633, 634, 635: n = A,T,C or G
  misc_feature 636, 637, 638, 639, 640, 641, 642, 643, 644, 645, 646, 647,648, 649, 650, 651, 652, 653, 654, 655, 656, 657, 658, 659,660, 661, 662, 663, 664, 665, 666, 667, 668, 669, 670, 671,672, 673, 674, 675, 676, 677, 678, 679, 680, 681, 682: n = A,T,C or G
  misc_feature 683, 684, 685, 686, 687, 688, 689, 690, 691, 692, 693, 694,695, 696, 697, 698, 699, 700, 701, 702, 703, 704, 705, 706,707, 708, 709, 710, 711, 712, 713, 714, 715, 716, 717, 718,719, 720, 721, 722, 723, 724, 725, 726, 727, 728, 729-905: n = A,T,C or G
agccttatcgactnactatagggcnnattggagctccaccgcggtggcggccgaggtaccttgcacatctctgcctgcgctgctcacccactgtcaagaaagaaaggtagagcctggtgctctccctaagcactgtgggcctcacagttcgggcgggagcccccagcacctggctcttcctgatggaaagcttggtttcactcttcagaggtggtggcaacatccccagaaaaccggtaggcgtgggcacagtggctggaggccgagggctcctcgccatagcagaagcacggccgctctagaactagtggatcccccgggctgcaggaattcgatatcaagcttatcgataccgtcgacctcgagggggggcccggtacccagcttttgttccctttagtgagggttaattgcgcgcttggcgtaatcatggtcatagctgtttcctggnnnnnnnnnnnnnnnnnnnnnnnnnnnnnnnnnnnnnnnnnnnnnnnnnnnnnnnnnnnnnnnnnnnnnnnnnnnnnnnnnnnnnnnnnnnnnnnnnnnnnnnnnnnnnnnnnnnnnnnnnnnnnnnnnnnnnnnnnnnnnnnnnnnnnnnnnnnnnnnnnnnnnnnnnnnnnnnnnnnnnnnnnnnnnnnnnnnnnnnnnnnnnnnnnnnnnnnnnnnnnnnnnnnnnnnnnnnnnnnnnnnnnnnnnnnnnnnnnnnnnnnnnnnnnnnnnnnnnnnnnnnnnnnnnnnnnnnnnnnnnnnnnnnnnnnnnnnnnnnnnnnnnnnnnnnnnnnnnnnnnnnnnnnnnnnnnnnnnnnnnnnnnnnnnnnnnnnnnnnnnnnnnnnnnnnnnnnnnnnnnnnnnnnnnnnnnnnnnnnnnnnnnnnnnnnnnnnnnnnnnnnnnnnnnnnnnnn

SEQ ID NO: 4972 - DNA, 825 bp, Homo sapiens
  misc_feature 25, 26, 524, 579, 613, 635, 660, 662, 663, 664, 668, 670,671, 672, 673, 674, 675, 676, 677, 678, 679, 680, 681, 682,683, 684, 685, 686, 687, 688, 689, 690, 691, 692, 693, 694,695, 696, 697, 698, 699, 700, 701, 702, 703, 704, 705: n = A,T,C or G
  misc_feature 706, 707, 708, 709, 710, 711, 712, 713, 714, 715, 716, 717,718, 719, 720, 721, 722, 723, 724, 725, 726, 727, 728, 729,730, 731, 732, 733, 734, 735, 736, 737, 738, 739, 740, 741,742, 743, 744, 745, 746, 747, 748, 749, 750, 751, 752: n = A,T,C or G
  misc_feature 753, 754, 755, 756, 757, 758, 759, 760, 761, 762, 763, 764,765, 766, 767, 768, 769, 770, 771, 772, 773, 774, 775, 776,777, 778, 779, 780, 781, 782, 783, 784, 785, 786, 787, 788,789, 790, 791, 792, 793, 794, 795, 796, 797, 798, 799: n = A,T,C or G
  misc_feature 800, 801, 802, 803, 804, 805, 806, 807, 808, 809, 810, 811,812, 813, 814, 815, 816, 817, 818, 819, 820, 821, 822, 823,824, 825: n = A,T,C or G
agcgcgtaacgactactatagggcnnattggagctccccgcggtggcggccgaggtacagtttgtttccaaggccatctctcaccgactttgttcttattaaaataattttttaaataatttttacttttccttcaaaggaagtttttttttagtaaatatgttcatattcccatcataagaagttgaaacaacacaagataaaaattccctggattcttcccagttttcatttactacctctgagataactactattacccatttggagtgtttcctttgtacagcctgggtagggggaaaatcaagttctttcagctaccacccatccaacctttgggcctatgtgaaaagaaaggaactaagctgggtgtgttctgtctggacctggggaggcccctgaaggcaaagagggaaactgtcccagctgttctgtcctaggggagggggacatagccctaacaggagctcccagcccctcttggcactctgacacacaagtacctgcccgggcggccgctctanaactagtggatcccccgggctgcaggaattcgatatcaagcttatcgatccggcnacctccagggggggccccgtcccaacttttgttncctttatgagggttaattgccncttggcgtaatcatgggcatagctngnnnttcngnnnnnnnnnnnnnnnnnnnnnnnnnnnnnnnnnnnnnnnnnnnnnnnnnnnnnnnnnnnnnnnnnnnnnnnnnnnnnnnnnnnnnnnnnnnnnnnnnnnnnnnnnnnnnnnnnnnnnnnnnnnnnnnnnnnnnnnnnnnnnnnnnnnnnnnnnnnn

SEQ ID NO: 4973 - DNA, 962 bp, Homo sapiens
  misc_feature 3, 19, 91, 93, 104, 108, 115, 138, 165, 176, 184, 210, 225,246, 247, 281, 285, 287, 291, 294, 302, 303, 328, 329, 330,333, 342, 349, 350, 353, 354, 363, 367, 368, 381, 382, 391,393, 394, 401, 403, 406, 431, 443, 444, 445, 451, 453: n = A,T,C or G
  misc_feature 456, 466, 472, 473, 477, 481, 489, 496, 497, 502, 508, 509,517, 519, 521, 522, 523, 529, 532, 533, 535, 536, 537, 542,555, 556, 559, 560, 563, 568, 570, 575, 579, 580, 581, 582,584, 585, 589, 590, 594, 600, 618, 619, 621, 626, 627: n = A,T,C or G
  misc_feature 628, 637, 639, 650, 659, 664, 665, 666, 670, 680, 681, 683,687, 695, 698, 704, 709, 710, 715, 716, 720, 725, 729, 731,735, 736, 745, 747, 749, 754, 755, 760, 762, 765, 780, 782,789, 790, 792, 794, 796, 797, 802, 807, 816, 824, 826: n = A,T,C or G
  misc_feature 827, 829, 830, 832, 836, 842, 844, 846, 849, 853, 862, 866,881, 883, 884, 891, 894, 897, 903, 910, 911, 915, 919, 924,926, 937, 939, 944, 948, 950, 953, 956, 960, 961: n = A,T,C or G
tancgcgtaatcgactatntacgactactatagggctaattggagctccaccgcggtggcggcccgcccgggcaggtacagatggggtttntncatgttgatanacgntattctncaaactcccgacatccagtaatnctacacacggtcagagcgtactctagntctcattattnatcaatangtgcacaaacgggaagttttctgctnaagcctgactattgnttaacacattgaataaagaannatttcccaacatttggcaatccaacaataccaantttnantgangcnccaaattnnacaatgattgggggtggtttaattnnntcncctactttntaggggnnatnnttctcaacntttnncaattaaacaaanngttaaaatnannacattananaantcatgacatataatctgttagcatnaaaaaaataaannncgtaanantcngtatttaagnttaaanntaanaatnttataaantattaannaaatnttggannataaaatntnannnttaacnttnnannnatatnataaatatataanngannatnataananatatntaannnntnnaatnntatnaaaatntgataattaaaaaaatannantaatnnntaatactantnacgataaatgncatcataanacatnnnactntcatatgaanntnattnatatattnaantatgtntaagnntaaanntatntcatnatgnanttannaacatagcntntnaaatnnaaaantngtnatataaatattatananctagagnnantnannttaancaaanaagatatangtataaanannannanttanataaananantcnaagnaagaataangatnattattataatatananntataaanttnacntataantattgannatgngatngatantnataaaattatnantaaantatnantanttnatanng

SEQ ID NO: 4974 - DNA, 852 bp, Homo sapiens
  misc_feature 18, 22, 28, 150, 226, 378, 441, 462, 467, 511, 522, 526,527, 528, 536, 539, 540, 541, 542, 543, 544, 545, 546, 547,548, 549, 550, 551, 552, 553, 554, 555, 556, 557, 558, 559,561, 565, 566, 567, 573, 575, 577, 578, 581, 582, 583: n = A,T,C or G
  misc_feature 584, 585, 586, 587, 588, 589, 590, 591, 594, 595, 596, 597,598, 599, 601, 602, 604, 606, 607, 611, 613, 614, 615, 616,617, 618, 619, 620, 625, 626, 628, 631, 632, 633, 634, 635,636, 641, 642, 643, 644, 645, 646, 647, 648, 651, 653: n = A,T,C or G
  misc_feature 655, 656, 657, 658, 659, 660, 661, 662, 666, 667, 668, 669,670, 673, 674, 675, 676, 677, 685, 688, 689, 690, 691, 696,697, 698, 699, 701, 702, 703, 704, 705, 706, 709, 712, 713,714, 715, 716, 717, 718, 721, 722, 723, 724, 725, 726: n = A,T,C or G
  misc_feature 727, 728, 729, 730, 731, 734, 736, 737, 738, 739, 740, 741,742, 743, 744, 745, 746, 747, 748, 749, 750, 751, 752, 753,754, 755, 756, 757, 758, 759, 760, 761, 762, 763, 764, 765,767, 768, 769, 770, 771, 772, 773, 774, 775, 776, 777: n = A,T,C or G
  misc_feature 778, 779, 780, 781, 782, 783, 784, 785, 786, 787, 788, 789,790, 791, 792, 793, 794, 795, 796, 797, 798, 799, 800, 801,802, 803, 804, 805, 806, 807, 808, 809, 810, 811, 812, 813,814, 815, 816, 817, 818, 819, 820, 821, 822, 823, 824: n = A,T,C or G
  misc_feature 825, 826, 827, 828, 829, 830, 831, 832, 833, 834, 835, 836,837, 838, 839, 840, 841, 842, 843, 844, 845, 846, 847, 848,849, 850, 851, 852: n = A,T,C or G
agcttatcgactactatncganctaatnggagctccaccgcggtggcggccgaggtacccaggcctcattgatgtgggcaggcactggcaggggcagtgctgggtggggaggaactgtcttcaggctctctgatggtgtatgtccatggnaaatttaaaacatggggtgacatgattaatgttgtatttttgaaagtgaactctggaaacagagtatatgcattanatttagaaatgactaaataaatcaacagatggataagtcattcccccaccaaatgttgaaaatgatttcaaagttgcttgaatctcacattgcacttcattcattcttctctcatgtagggtgtcaaaattcggtacctgcccgggcggccngtctaaaactaagtggatcccccgggctgcacgaattccatatcaagcttatcgataccgtcnaccttgagggggggcccggtncccancttttgttccctttaatgagggttaattgcgcgcttggcgtaancatggtcatanctgnnntccggggnggnnnnnnnnnnnnnnnnnnnnngnaaannntttccntngnnccnnnnnnnnnnnccnnnnnncnntntnnaaantnnnnnnnnccccnngnctnnnnnnaattnnnnnnnnaancntnnnnnnnncccnnnnnccnnnnngggggggnccnnnnccccnnnntnnnnnnccnttnnnnnnnggnnnnnnnnnnnccntnnnnnnnnnnnnnnnnnnnnnnnnnnnnnncnnnnnnnnnnnnnnnnnnnnnnnnnnnnnnnnnnnnnnnnnnnnnnnnnnnnnnnnnnnnnnnnnnnnnnnnnnnnnnnnnnnnnn

SEQ ID NO: 4975 - DNA, 822 bp, Homo sapiens
  misc_feature 26, 68, 72, 73, 83, 88, 90, 92, 96, 101, 105, 106, 110, 112,114, 115, 116, 122, 123, 126, 131, 132, 138, 139, 141, 146,148, 151, 153, 161, 162, 163, 164, 169, 174, 179, 186, 190,192, 197, 199, 206, 208, 215, 217, 220, 224, 225: n = A,T,C or G
  misc_feature 227, 236, 238, 243, 248, 249, 251, 253, 254, 256, 258, 260,266, 274, 275, 282, 283, 288, 289, 290, 299, 305, 306, 309,313, 319, 320, 323, 331, 332, 333, 339, 340, 341, 343, 344,346, 350, 352, 368, 374, 379, 521, 570, 583, 603, 617: n = A,T,C or G
  misc_feature 635, 639, 645, 646, 647, 648, 649, 650, 651, 652, 653, 654,655, 656, 657, 658, 659, 660, 661, 662, 663, 664, 665, 666,667, 668, 669, 670, 671, 672, 673, 674, 675, 676, 677, 678,679, 680, 681, 682, 683, 684, 685, 686, 687, 688, 689: n = A,T,C or G
  misc_feature 690, 691, 692, 693, 694, 695, 696, 697, 698, 699, 700, 701,702, 703, 704, 705, 706, 707, 708, 709, 710, 711, 712, 713,714, 715, 716, 717, 718, 719, 720, 721, 722, 723, 724, 725,726, 727, 728, 729, 730, 731, 732, 733, 734, 735, 736: n = A,T,C or G
  misc_feature 737, 738, 739, 740, 741, 742, 743, 744, 745, 746, 747, 748,749, 750, 751, 752, 753, 754, 755, 756, 757, 758, 759, 760,761, 762, 763, 764, 765, 766, 767, 768, 769, 770, 771, 772,773, 774, 775, 776, 777, 778, 779, 780, 781, 782, 783: n = A,T,C or G
  misc_feature 784, 785, 786, 787, 788, 789, 790, 791, 792, 793, 794, 795,796, 797, 798, 799, 800, 801, 802, 803, 804, 805, 806, 807,808, 809, 810, 811, 812, 813, 814, 815, 816, 817, 818, 819,820, 821, 822: n = A,T,C or G
agcgctaatcgactcactatagggcnaattggagctccccgcggtggcggccgacgtaccctgtgctnggcnntgaataacancacgnangnccgnatccntgannttgnanannnaatatnnaangatannggcctnncnttccngnatncngctcctcnnnntaatntaatnacacntgtggtntatncncttgntnacataancncaggacntnatnaagnngnactgcctantntgaantaggnnancnntnangntggaanaattgcanntgatacnnatggnnnaaaagatcntaatgnnggngccnaggtcnnagntaatgttnnntaaatnnnanntntatngnacgatgggaataatcntggctntcggngaatccttgtatccggatgtgcagaagcttgtcagcatcgcctgcaaaaaagggccctgtatccatggagacattgacatgggctttgattttcaagtccttctgaatcttggggtcacaggcttgactgaaattgccaacnaaaaccttcctggcacgatttcaatggggtatggctgaaatgcatccanttcctgaggcatncaaatgatcttctgggtccngaaaaaagtgcccncgtacctgcccgggcggncgangtcttnnnnnnnnnnnnnnnnnnnnnnnnnnnnnnnnnnnnnnnnnnnnnnnnnnnnnnnnnnnnnnnnnnnnnnnnnnnnnnnnnnnnnnnnnnnnnnnnnnnnnnnnnnnnnnnnnnnnnnnnnnnnnnnnnnnnnnnnnnnnnnnnnnnnnnnnnnnnnnnnnnnnnnnnnnnnnnnnnn

SEQ ID NO: 4976 - DNA, 625 bp, Homo sapiens
  misc_feature 31, 62, 63, 70, 73, 77, 80, 84, 87, 90, 91, 93, 94, 96, 99,103, 105, 110, 124, 127, 128, 129, 131, 137, 139, 145, 149,152, 162, 164, 167, 168, 169, 184, 193, 196, 212, 217, 219,255, 259, 263, 275, 278, 280, 293, 298, 311, 322, 327: n = A,T,C or G
  misc_feature 515, 520, 565, 578, 584, 585, 603, 609, 610, 615, 618, 624,625: n = A,T,C or G
gagcgcgcgtaatacgactcactatagggcnaattggagctccaccgcggtggcggccgggnnccattgntantgcnatngtanacnctnnanntnacntacntnagacntctggctatacctnacnnngnttgtgncnctacgncaanaantgacctctgnancannnagaacgatataatanctactgganacncacaacactctctaanatctncnaatacctacttcatcatgctgacctgtgtgcagggngccngggnttcctctgagcnctntntatcgaatggtgnctggnccacttcaccttncctgggatgtncctgngacaagagacaaggagaaggccttaggatctactgggggagtccggaggagcagtctcttctgtcccgctggaacccatggtccactgaagttccttatgctactttcactgagcatcctatgaaatacaccagtgagaaattccttgaaatttgcaaggtaggaggcatcttgggtattactctcanattanctttgttgctggagctatgtgcttctagggacgtgtacctgcccnggcggccgtctanaactannggatcccccgggctgcangaattnnatatnaancttatnn

SEQ ID NO: 4977 - DNA, 636 bp, Homo sapiens
  misc_feature 118, 124, 462, 480, 481, 482, 483, 487, 488, 506, 507, 512,513, 515, 517, 518, 519, 533, 542, 543, 544, 545, 546, 552,554, 555, 556, 557, 558, 559, 560, 561, 562, 563, 569, 570,571, 577, 578, 581, 582, 583, 594, 595, 596, 597, 604: n = A,T,C or G
  misc_feature 605, 606, 613, 614, 620, 621, 624, 625, 632, 633, 636: n = A,T,C or G
gagcgcgcgtaatacgactcactatagggcgaattggagctccaccgcggtggcggccgcccgggcaggtaccgggggggtgcagggcagtcagactggaaccatggagctcagcgtnctcctnttccttgcactcctcacaggcctcttgctactcctggttcagcgtcaccctaactcccatggcaccctcccaccagggccccgccctctgccccttttggggaaccttctgcagatggacagaagaggcctactcaaatcctttctgagggggtggatctgattgccgtcaatcaataatacctttgaccaagggactccaatcaattcagcatgctttgcctaatgccttttgtttgtaatactgttgcgggacaatcaaagactggagagaccaaaaaaggttcaggagagtttattaaattaaggtgaccactggctcagccagaaatatgtccnaaaaaaaaaaaaaaaaannnncccnnaaaaaaaaaaaaaaaaannccccnncncnnnaaaaaaaaaaaaanccccccccnnnnnaaaaantnnnnnnnnnntttttnnncccccnnccnnnggggggggggnnnnccccccnnnttttttnntttttnnggnngaaaaannccn

SEQ ID NO: 4978 - DNA, 383 bp, Homo sapiens
  misc_feature 4: n = A,T,C or G
ggcnattggagctccaccgcggtggcggccgaggtacctggggcaacacaagcccgtgaagatgagtctaggttacattcagtgcaaaaaaccacaacccagaactgccttgccatggcttcccagggctgtgtttactaactgcaaaatcatctccctgctgcggtctcaaagtcttcagacatttcttgatctggctgtcttaaaaagcaaatttaacatcagccacgtagccaggttttccttgccaacaatcatgtgagtttgctattctgttcctgtgcatcttgcgcactccccgcgtacctgcccgggcggccgctctagaactagtggatcccccgggctgcaggaattcgatatcaagcttatcgataccgtcg

SEQ ID NO: 4979 - DNA, 915 bp, Homo sapiens
  misc_feature 1, 2, 4, 530, 537, 559, 570, 604, 610, 611, 626, 634, 641,653, 672, 673, 693, 721, 722, 727, 729, 733, 734, 739, 740,750, 751, 752, 758, 760, 762, 780, 783, 790, 793, 798, 799,803, 805, 808, 811, 812, 813, 822, 823, 827, 828, 830: n = A,T,C or G
  misc_feature 831, 835, 836, 839, 846, 847, 854, 857, 860, 874, 875, 877,879, 883, 884, 885, 889, 890, 895, 900, 903, 905: n = A,T,C or G
nngncgagcgcgcgtaatcgactcactatagggcgaattggagctccccgcggtggcggcccgaggtactcaatctgtgaagtgtgttctcacagtgtcccacacctccccgaggggctcacctgcccacagcagtgctctctgctcttcagtccacctagatactctcttctctttgatcttgaagcctccttatcctgacccatcattcttggaaccactaacctataaagtaattgcaaatcagactcctgtttcagggtctgtttctgaggatcctcaacttcagacactgtaaatttttttcatggtaatggtaaggaaaatgcattattttatctgaaatattcattttgtaatcttttcattaattatccaattgttgaaacagaaaaaaattgcttattactttaaaaaatgcacacacatattaatatctgtttagaatcatagatttctggcaagtcagccgtatccataatgtaaacagatttttctaacaaaaaaaaaaaaaaaaaaagtcctgcccnggcgggncgctcttagaactaggtggatnccccgggctgnaaggaattcgatatcaagcttatcgataccgtcnacctgnnaggggggcccagttncccgactnttggtcncgttaaggaaanggccattggacccttggcnncatctttggccttttttggnacctggggggaatttgttttcccggtcnnaactngngctnncttannatcccgggtnnnctaaantngnaaagcctgggggtgcccnatnggggganccnacccnntttnanttnggnnngggttactnncccnntnncaannttngggaaannttttttnccnctngctataagtgaaanngncnaccnnngggnngcggnggttngcntnttgggcccct

SEQ ID NO: 4980 - DNA, 912 bp, Homo sapiens
  misc_feature 15, 18, 31, 38, 136, 218, 221, 249, 256, 365, 405, 411, 508,520, 591, 606, 640, 662, 667, 761, 762, 767, 769, 774, 794,806, 811, 815, 824, 827, 842, 846, 853, 856, 857, 858, 862,868, 869, 884, 885, 892, 911: n = A,T,C or G
tacgtccgactcctntangacgactactatntggcganttgtagctgccccgcggtggcggcccgaggtacttttttttttttttttttttttgaacttctgtttagaccaagaggaagaagccaaaggccttcanaaaccccaaaagttaacacaacctcatctggctgctctaaatgcagaacatttctaagaagtagcattagggggttccccanatnaatcttgaaaacacatcagggccttctnacccctnacttggccaaagatgtgccgtgctttcgcaacattctgccaattcttatttctctttcactttctgagaaatggggggaaaacacaacccaaacaaaccaaccaaagtngaaatctagctaggcagatgtcacaagctttgaaagccanaggctngtcatacccgcgtacctgccgggcggccggtctaaaactagtggatcccccgggctgcaggaattcgatatcaagcttatcgatcccgtcgaccttnagggggggcccngtacccagctttttgtccctttagtgaaggttaattgcgcgcttgggcgtaatcatggtcatagctgtttnctggggtgaaattgntattccgttacaatttccacacaaacattaccancccggggagccataaaagtgtnaaagncctggggtgcctaaatgaagtggagctaactcacattaattggggttggcgctcactggccgcttttcaatccgggaaaacctgttgggccaanntggantnatganttcggccaccccccgggganaggcggttttcnttttngggngcttttccnttncttggtttaatgaanttantggcttnggnnntttnggttgnngggaagcggtttaanntcaattnaaaggggtattccggtttnt

SEQ ID NO: 4981 - DNA, 919 bp, Homo sapiens
  misc_feature 1, 11, 65, 366, 383, 602, 629, 647, 668, 677, 694, 697, 703,713, 744, 763, 779, 780, 781, 789, 791, 802, 803, 807, 808,810, 814, 816, 817, 855, 863, 877, 883, 887, 888, 902, 904,905, 911, 912, 915: n = A,T,C or G
nacgtctttcnccttatacgactcactatagggcgaattggagctccccgcggtggcggcccgangtacagtttttgatcttgtggaagagtatgaaaacatctgtggtagtcaggtgaatatactgagtaaaatagtgagtcgagcaacacctggacttcaaaaattttcaaaaacagccagtatgctctggcttcttcaacaggagatggtcgcatggaggctgctggcttctttgtatagagacagaatacagtctgcattagaagaggaaagtgtattcgcagttactgctgttaatgccagtgaaaaaacagttgtggaagcgttatttcagagggattcacttgttcgacaaagtcaagnttggtggtagaattggntagaagagtatttgccaaagatgaaattggagaattttctgataatattgagttttatgcaaaatcagtatattgggaaaatactctgcataccttaaaacaacggcagctgacttcttaccttggaagtgtcgccccttgtcactgaattggaccctgatgctcccataagacagaaaaatgccccttggtggatctggatagagaagatgaagtttngattactcaaaatatctctttactctnatccctgctggaattgcngaaaaaggcccaaccgacctncgtaaaccnctttgggttaaagcatnggngagctnccaccccttngaaggctgggaaattttccttgccccgggcnggccgttttaaacctagtnggttcccccggcctgnnnggaatttngntttaaagcttnnttcnntnccgncnnccctctagggggggggcccgttccccaactttttgttncctttagngaggggtaattgcncccctnggcnnaaacaagggcatancnngttccnnggnggat

SEQ ID NO: 4982 - DNA, 901 bp, Homo sapiens
  misc_feature 653, 678, 698, 702, 713, 729, 744, 746, 763, 769, 773, 777,786, 803, 813, 818, 820, 826, 832, 841, 848, 853, 858, 864,873, 875: n = A,T,C or G
ccgtacgctcctatagggcgaattggagctcccccgcggtggcggccgcccgggcaggtacttatttaagacattacttaatagaaactgcacctctcaagtctattctaatatgatgcatgcaggaaatgcaaatttgcatccaaaatatttaatgtttaaataatactagacaagtttttaaaatcatagtaaattatttgttgtccatcaagagcagagaaagttatattctacgtaatacaatattctgatttagtttcctcatctgtaaaataagactgttatggattaaatgaattaatatttgtttagtatttacagtagtccctagcatatagattaaatgctacataagcgattattaaataaagtaatatcattgtggcagatcatatttccaaaaatggcttcagccgtatttctggtccagcatgctcttccagaatcttgccaaccccacccatcacatggtagagtctatttctctcctcttgaacctagggggatttctaattattctggccaacagagcaaaatagaaataatgttctgtgacttccaaggctctgtcataagaaggatatagcttctgcctatctttctctttttggaaatggttgctctgaggaacccagaccactctacttaanggagcccaaactagttcatttgganacatcacatgggaaggcccntgtnggggaggactnggggccacagcccgtngcattccgcccgacntnttaatggaatggatggnttttgngggnccanccctttggnggttccagcctccaacnctgggggganctaananaagccnttcctntgggggtcncgttccnaattnccganccccanaaatttggnancctaaaaacccggatgggttgggcct

SEQ ID NO: 4983 - DNA, 897 bp, Homo sapiens
  misc_feature 2, 3, 524, 634, 639, 646, 656, 679, 701, 705, 744, 763, 768,774, 782, 784, 788, 807, 815, 825, 829, 837, 844, 853, 858,866, 875, 880, 883, 890, 891: n = A,T,C or G
tnnatacgtacgactactatagggcgaattggagctccccgcggtgggcggcccgaggtactgtgggctgagctggtatccaaaatgcaagacaaagttctctttactttcctctcttcgagcagaaggaaggagtcactttccttgctgtgagctctgctgcctggggttggtggagaggtggtgcaacctctcccttagccactgtgtctggtacagttaatctttgaaaactggtgggttcaaaaggtttttttttcttccacattggaagagaggaagtattgtatatactgccaagatttgtcctacagaaaaggattatatggccccaaaacagacttcttttgtcattttagatggcagagtgaattttgttcattatgtttcttaaggattaacaattccagaaagaactgggaaaggggaaatagatgtttgagctgagaagttattatcttaccagttttaaaaaaatactgcaaatactctgataccttgtttttcatgtcctgccattttgnaaataaataacacttttcatatacaagagactggtattatataccttctaaatattacatgtcaaggggcttaagaactgatttttttaaagcacaaaaatatgctcttnaagancataagngtttgcaaanataattcaatttctatatccctnggggtttaagcatgggggcccngcancatcacactggcctcagaaaaaatttccatgaattcaanaaaggagcttacccttttnttgcnatgaangatccaancnaaanaccggggggggattagganttaattcntttggggggnaaantgattttncctttanggagccaanggcancttcaaanaaaaagganggttnganctttganntaaatt

SEQ ID NO: 4984 - DNA, 895 bp, Homo sapiens
  misc_feature 2, 3, 534, 567, 606, 706, 710, 723, 734, 755, 774, 780, 782,785, 789, 795, 797, 800, 808, 809, 814, 815, 817, 824, 836,848, 854, 856, 861, 866, 871, 874, 879, 882, 890: n = A,T,C or G
tnntacgatacgactactatagggcgaattggagctccccgcggtgggcggcccgcccgggcaggtacaggaaacctcatacgacgggtgcatgttatccagtgatcttccttccttccttcaacaaatatgtattgaaccccttccatgtgccaagccctgtgatattaaaatgacgattaaaatagagtgatcaatgccatgataggcggtgtgaatgcattgcagggagctctccctagtttagaggtcagggatgactccagaggatgggacatttaacatttaagctaagatatttatcagattatctagttgagagtggggaggaaggtgggagttagagttggccatttggagcgaggagatggggatggttaatgggtacctcggccgctctagaactagtggatcccccgggctgcaggaattcgatatcaagcttatcgataccgtcgacctcgagggggggcccggtacccagcttttgttccctttagtgagggttaattgcgcgcttggcgtaatcatggncatagctgtttcctgtgtgaaattgttatccgntcacaatttcacacaacatacgagccgggagcataaagngtaaagcctggggtgcctaatgagtgagctaactcacattaattgggttggcgcttcactggcccgcttttccagttcgggaaaaccttttcgtgcccanctgnatttaatgaattnggccaacgccncgggggagaagccggtttgcntttttgggccgtttttcgntttctngnttnaatnaacttngntgngccttggnngttcnngnttcgggngagcggtttcancttcactcaaangcggtnantcggntattnccccnaanttagnggnttacccangaaat

SEQ ID NO: 4985 - DNA, 883 bp, Homo sapiens
  misc_feature 517, 553, 575, 613, 650, 663, 687, 734, 746, 748, 768, 769,773, 779, 792, 797, 802, 803, 815, 826, 827, 837, 840, 846,853, 861, 869, 871: n = A,T,C or G
tacgatcgactactatagggcgaattggagctccaccgcggtggcggcccgaggtacagggtgaaggagctgcttctgtcttgttgcgatccaagttgtaaatgttaatgaagtcttgtttgacctcaggatatcccagaagctcctgagagactgatgacagacaccattaatgaaccaatcttgctgtgtcgatttcctgtggagatcaagtccttctacatgcagcgatgtcctgaggattcccgtcttactgaatctgtcagtttctgtttcaaagagtattaataattttgctttttaagggggtggggactgtcatctggaatcaggtacctgcccgggcggccgctctagaactagtggatcccccgggctgcaggaattcgatatcaagcttatcgataccgtcgaccctcgagggggggcccggtacccagcttttgttccctttagtgagggttaattgcgccgcttggccgtaatcatggtcatagctggttcctgtgtgaaattngttatccgctcacaattccacacaacatacgagccnggagcataaagtgtaaagcctngggtgcctaatgagtgagctaactcacattaattgcgntgcgctcatggccgcttttccaagtcgggaaaacctngtcgtgccacctncatttaatgaatcggcccaccccncgggggagaggcggttttgcgtattgggcgctttttccctttcctanttaatgactcgntnggcttcggtctttcgggttnnggcnagcggnatcaacttcactnaaaangcggnnataccggttttnccccgaaatcnngggattaccncanggaaanaacattngtggcaanaggccacnanaaggcccggaat

SEQ ID NO: 4986 - DNA, 920 bp, Homo sapiens
  misc_feature 2, 3, 8, 454, 557, 583, 592, 593, 594, 606, 609, 648, 700,703, 728, 736, 740, 757, 825, 826, 840, 842, 859, 864, 865,871, 875, 880, 909: n = A,T,C or G
tnnaacgncgactactatagggcgaattggagctccccgcggtggcggcccgaggtacagagaacagaagccatggtctagcaccaaagaagggaggatgctaatgaaagccaactagggaagagtcaaggagaatagggtcagtgccacagcatgaaactgtagcgttgtagcagaaagttattatataaggtgggaggctgcagcccatttacacctaggccgctccagtcatactgggtgtgggaagatttaagaaacaacaggcaggatttggggaataggcttcagccccagtaaaggataagaagaggaaccaagggctttgacactgcagagctcatactcttaacactgaggcaattgcttgttctcagacctccctctaacaactggacccaactcaactattctcattcaatgggaatatcttagacattcctaacccagcagntctttcactcaatttctacagtaacacatttggtcggtgagtccttctttatcacacatattcatgaaccaactctttcatattgggccactcactcacatanggcttccattttttaaaattggctgnataccatgnnntaaccacttgtnttntacccattttctcttgggaggctcactttttgtcttgtnaagattgggaaaaaaattccaggaaccttggttctactaaaaaggatttganggnccttcaattgatttttaatttttanaatgggtnaagnccttactgggccaccgntttaaaaccttaaaaaaaaaaaaaaaaaaaaaaaaagtccttgcccgggcggccgttttaaaaatagnnggtcccccgggttnanggaatttgatttaaaanctttnngatccntccnccctnaggggggggcccggtccccacttttgttncctttaagggg

SEQ ID NO: 4987 - DNA, 888 bp, Homo sapiens
  misc_feature 5, 634, 637, 638, 639, 642, 644, 645, 646, 647, 648, 649,650, 651, 652, 653, 654, 655, 656, 657, 658, 659, 660, 673,682, 684, 699, 728, 772, 782, 786, 789, 790, 800, 811, 814,817, 819, 826, 832, 838, 845, 846, 847, 848, 849, 850: n = A,T,C or G
  misc_feature 851, 852, 853, 854, 855, 856, 857, 858, 859, 860, 861, 862,863, 864, 865, 866, 867, 868, 869, 870, 873, 874, 878: n = A,T,C or G
cacgncactactatagggcgaattggagctcccccgcggtggcggcccgcccgggcaggtaccacatccacttggtcgagctcctggctgtgtgcacggagggtaagaatgtctacacagagatcaagtgcaactccctgctcccgctggatgacatcgttcgcgtggtgacccacgaggactgcatccctgaggtgagcgagcccagcctggctgtgcccttctcgttgctatgtggtgtgtgctgtcgtggctcactgggagacatggtggtggctggcctgggggagccctcatggctctgaaagctgcagctcattttgtagtgggatttcaagttccctaaaacattttctcgagcattgattttgcatgaaaggaacacggaagaagttagtcgttctttctgtatctttaagaacagtgaggaaaaaagcttcagctctgtggactaatttagcctgttgagcaaaggggatatgacctgaatgaacttttcagaaatgtgacgaagagtaggttgagatctagtccatatgaatgtaagacttagtaagttaattctttaaaacaaaaacccttattacagaaaataatggccattataaaaaatttaggaactacagacaatccnttnnnaanannnnnnnnnnnnnnnnnaaagtcccttggncgaaggtcncnggggactcggggtcncctttggagcaaaaaaggaggcaattggnccccattggagaacaaaggtgatctgcgccctggtccctggggnccatgtgggncctnggnncccttggccnagggccaaaanaanacntnttccctncccggngggccnaggaccnnnnnnnnnnnnnnnnnnnnnnnnnnaanncccnccccaaaaat

SEQ ID NO: 4988 - DNA, 927 bp, Homo sapiens
  misc_feature 7, 8, 9, 10, 11, 12, 466, 482, 501, 571, 578, 625, 707, 715,745, 759, 765, 771, 778, 781, 782, 800, 804, 808, 820, 834,844, 850, 851, 866, 889, 905, 911, 912, 921: n = A,T,C or G
tacgctnnnnnncgcgcgtatacgactactataggggcgaattgggagctcccccgcggtggcggcccgaggtacccccacctttaggaaaaaacctacaacatatattttatttactaatattctcgatgaaacaggaaaaaattaattttattgaatgtcaactgttgggcatgcatctttttaatattctgtgtgatgagatgggacgtgcacataaagccttcctgctgcatacagatgcacaatgtctgtcctgaggaaaggtacctgcccgggcggccgctctagaactagtggatcccccgggctgcaggaattcgatatcaagcttatcgataccgtcgacctcgagggggggcccggtacccagcttttgttccctttagtgagggttaattgcgcgcttggcgtaatcatggtcataagctgtttcctgtgtgaaattggtatccgctcacaattncacacaacatacgaanccgggagcataaaagtgtnaaagccctgggggtgcctaatgaagtgagctaactcacattaattgcggttgcgctcactggccgctttncaagtcngggaaaccctgtcgtgccaacctgcatttaatgaatcggccaacccncgggggagaggccggtttggcgtatttgggcgcttttccgctttcttggttaattgcttcgcttgggctcgggccgttcggnttcgggcnagcgggtttcaacttcacttcaaaggcggngaataccggttttncccaanaatcanggggatnacnncaggaaagaacattttgngccnaaanggcccccaaaanggcccggaaccgtnaaaaaggccnggtttnntggcgttttttccanaggttccgcccccctgacaagcnttaaaaaaaattgacncttaanntaaaggggnggaaat

SEQ ID NO: 4989 - DNA, 890 bp, Homo sapiens
  misc_feature 183, 331, 403, 410, 443, 503, 517, 523, 550, 564, 582, 595,603, 617, 618, 621, 622, 625, 626, 629, 634, 636, 638, 651,660, 670, 678, 688, 693, 695, 700, 706, 714, 715, 724, 735,741, 752, 753, 768, 786, 790, 822, 823, 824, 825, 826: n = A,T,C or G
  misc_feature 831, 833, 864, 867, 869, 873, 877, 879, 888: n = A,T,C or G
agtcgcgtcgcgtctcgactactatagggcgaattggagctccccgcggtggcggcccgaggtacagtgcctatgcatagtaatctctcaaaattgtttgttgagtgagtgaatgtgtgaacattttatgaaattatctttaagagtagttactcatgatcagtatactttaaaagatcggcnaaacattgatgactttttaaaaagtaattttggccaggagcaggggctcatgcctgtaatcccaacactgggaagtgaaggggggaggatcacttgaggccaagagttcaaaactaggctagtggacgtagcccagaccacatcgctncaaaagaaaaattttaaaaccagctggatgtggttggcatgtgcctattatcccactactggggaggctaangcaggangattgcttgaacccaggagtgcaaggccgcacngaagttacaattgcaccactgcacccggcctgggttaaagagtgaagaccctgtcagaanaaaaaaaaaaagtnttttcntaaaattgtggaaaaatttcctttttntaaggaaaggcgantgttttaaaaaccctctnctgaccttaaaanaaaaaaangggtccaaatttcnnttnnctnnccntttcngngnccttaaaaaaagnatgcccccnttgcccctantttttttntttttccaanaaaancnttggnattggncctttggnnacccttggntttttggcttnaaaccngggattttttnncccttggcttttggnaaaaaccccaaaaaaaanaaangggggcctttttggttaaaaattgtttttaannnnnaggantnggggcgccggccttaccctttttttggaaantgntngggnaaancntcgggaaangt

SEQ ID NO: 4990 - DNA, 847 bp, Homo sapiens
  misc_feature 3, 586, 594, 665, 703, 706, 707, 708, 709, 715, 716, 717,718, 719, 720, 721, 722, 723, 724, 725, 726, 727, 728, 729,730, 731, 732, 733, 734, 735, 736, 737, 738, 739, 740, 741,742, 743, 744, 745, 746, 747, 748, 749, 750, 751, 752: n = A,T,C or G
  misc_feature 753, 754, 755, 756, 757, 758, 759, 760, 761, 762, 763, 764,765, 766, 767, 768, 769, 770, 771, 772, 773, 774, 775, 776,777, 778, 779, 780, 781, 782, 783, 784, 785, 786, 787, 788,789, 790, 791, 792, 793, 794, 795, 796, 797, 798, 799: n = A,T,C or G
  misc_feature 800, 801, 802, 803, 804, 805, 806, 807, 808, 809, 810, 811,812, 813, 814, 815, 816, 817, 818, 819, 820, 821, 822, 823,824, 825, 826, 827, 828, 829, 830, 831, 832, 833, 834, 835,836, 837, 838, 839, 840, 841, 842, 843, 844, 845, 846: n = A,T,C or G
  misc_feature 847: n = A,T,C or G
agncgcgtaatcgactactatagggcgaattggagctccaccgcggtggcggccgcccgggcaggtacacgtccctagaagcacatagctccagcaacaaagctaatctgagagtaatacccaagatgcctcctaccttgcaaatttcaaggaatttctcactggtgtatttcataggatgctcagtgaaagtagcataaggaacttcagtggaccatgggttccagcgggacagaagagactactcctccggactcccccagtaggatcctaaggccttctccttgtctcttgtccagggacatcccagggaaggtgaacttgcccaggcagatgcgatagacagcgctcagaggaatccgctgcagctgcacacaactcagcatgatgaagtcgtatttgcagatcaagagagtcttgtctgtgaccagtaagaattctctccttctcattgttccagtggtctatctttgtcaagagccagaagccttgaacggtctcttcagaagtctcagctacgtgacctttcaaagtcttcctggcagtctcaatggcccccggccgctctagaactagtggatccccnggctgcangaattcgatatcaagcttatcgatccggcacctccagggggggcccggtacccaacttttggtccctttantgagggttaattgcgcgcttggcgtaatcatggcatanctnnnntttcgnnnnnnnnnnnnnnnnnnnnnnnnnnnnnnnnnnnnnnnnnnnnnnnnnnnnnnnnnnnnnnnnnnnnnnnnnnnnnnnnnnnnnnnnnnnnnnnnnnnnnnnnnnnnnnnnnnnnnnnnnnnnnnnnnnnnn

SEQ ID NO: 4991 - DNA, 854 bp, Homo sapiens
  misc_feature 3, 9, 513, 521, 632, 651, 701, 710, 734, 746, 747, 749, 753,755, 767, 789, 809, 820, 821, 822, 823, 824, 825, 826, 827,828, 829, 831, 833, 834, 835, 836, 837, 838, 839, 840, 841,842, 843, 844, 845, 846, 847, 848, 849, 850, 851: n = A,T,C or G
  misc_feature 852, 853, 854: n = A,T,C or G
agncgcgtnatcgactactatagggcgaattggagctccccgcggtggcggccgggggccattgagactgccatggaagacttgaaaggtcacgtagctgagacttctggagagaccattcaaggcttctggctcttgacaaagatagaccactggaacaatgagaaggagagaattctactggtcacagacaagactctcttgatctgcaaatacgacttcatcatgctgagttgtgtgcagctgcagcggattcctctgagcgctgtctatcgcatctgcctgggcaagttcaccttccctgggatgtccctggacaagagacaaggagaaggccttaggatctactgggggagtccggaggagcagtctcttctgtcccgctggaacccatggtccactgaagttccttatgctactttcactgagcatcctatgaaatacaccagtgagaaattccttgaaatttgcaagttgtctgggttcatgtctaaacttgttccagctatccanaatgcccncaagaattcaactggatctggaaaaagaaagaaaactgatggtgttaactgaacccattttgattgagacctacccagggctgatgtcattcattggaaaccgaaccaacntggctatttccttgccgtnggaatattgggttttgagagtctttttggtccttggccgtctaaactagnggatccccngctgcaggaatttgaaattaagcntattgatcccgnnancttnanggggggcccggncccacttttgttcctttatganggtaaatgcgcccttggcgnatcatggctannnnnnnnnncngnnnnnnnnnnnnnnnnnnnnnn

SEQ ID NO: 4992 - DNA, 843 bp, Homo sapiens
  misc_feature 3, 4, 6, 7, 32, 58, 342, 397, 427, 470, 555, 563, 581, 601,602, 612, 616, 619, 645, 655, 660, 688, 692, 705, 726, 739,745, 747, 780, 787, 790, 814, 817, 820, 823, 824, 825, 826,827, 828, 829, 830, 831, 832, 839, 840, 841, 842, 843: n = A,T,C or G
agnngnngcgcgtatacgactactatagggcnaattggagctccccgcggtggcggcncgcccgggcaggtacaggaatggaaaacttgaaatttgtcccctgtgctgaaacaacaagcttttctttgagtattgacctgctcttaatagaaaatagtgaaatgttttctctaccttttagataactggcctaataaaccaagattttttgtttatcaaggtaatttcttatgctttatgctctcttttactaggtctttgattacttgagaaaagtgagtgaggtggggccaagatggttgactagaagcagctagtgtgtgccactctcacaaatagcanaaagagtggtgagacactagctcttcaacccggaacatccaggtggacacataanggattcatcagtgacatagtgtgaccttcngatcccggagaaagaagtggagaacagatcaaccctttacccnggggtggcaccaaccccagggggaattcccctacaagaaaatggtgaatgagtgaaaagtccctgggatgcatatttctggcacnaacctttnaattccttggctcaaganatccccagctggggtcttcnnaccaaaacanaaanccntgtggaatcttgggtagactgcttcntagtaggtgnggagnccaaaacatttgttcctgggtccccggncgtnttaaacaaaggancccccggcttcagaaattganttaaacctttttnttcccncnacccccagggggggccgggccccacttttggtncctttanggnggttaatgggccccttggggaaantgnggnaannnnnnnnnntttctgnnnnn

SEQ ID NO: 4993 - DNA, 858 bp, Homo sapiens
  misc_feature 27, 28, 70, 163, 166, 230, 234, 243, 244, 347, 399, 450,465, 545, 546, 547, 549, 557, 558, 559, 560, 561, 562, 563,564, 565, 566, 567, 568, 569, 570, 571, 572, 573, 581, 585,586, 588, 589, 590, 599, 600, 601, 606, 618, 619, 629: n = A,T,C or G
  misc_feature 650, 658, 662, 663, 664, 666, 670, 676, 677, 679, 680, 684,685, 691, 701, 703, 704, 705, 713, 714, 716, 721, 723, 763,765, 768, 769, 775, 785, 786, 787, 793, 799, 806, 808, 811,818, 821, 824, 836, 837, 840, 845: n = A,T,C or G
agtcgctaatcgactcactatagggcnnattggagctccccgcggtggcggccgcccgggcaggtacgcngggccccttcgccagtgtggggaacgcggcggagctgtgagccggcgactcgggtccctgaggtctggattctttctccgctactgagacacngcngacacacacaaacacagaaccacacagccagtcccaggagcccagtaatggagagccccaaaangaanaaccagcanntgaaagtcgggatcctacacctgggcagcagacagaagaagatcacgatacagctgacatcccagtgcgcgacatggaaggtgatctgcaagagctgcatcantcaaacaccggggataaatctggatttgggttccggcgtcaaggtgaagatnatacctaaagaggaacactgtaaaatgccataagcatgtgaagagcaaccnccagtttaaatgaanacaagctgaaacaacgcaagctggttttatattaaatatttgacttaaactatctcaataaagttttgcagctttccccnnnangaattttnnnnnnnnnnnnnnnnnaaaatttntttnncnnnggccccttnnnttttnaccccaaggggnntttgggggcntttttttttaaaaaaaaaaantttttttngggnnncntttnccaaanntnncctnnaaaagnaacccccccncnnncaaaaaannangtgtntntttaaaaacccttttaaaaaaaaaaaaacgggtttttttnanttnncaaaanggggcccttnnntttccngaaacntgccccncnggngggggtnttnaanacaaaagggggnnccngggtncccgttttcccgg

SEQ ID NO: 4994 - DNA, 859 bp, Homo sapiens
  misc_feature 2, 569, 578, 579, 580, 581, 582, 583, 584, 585, 586, 587,588, 589, 590, 591, 592, 593, 594, 595, 596, 597, 598, 599,600, 601, 602, 603, 604, 605, 606, 607, 608, 609, 610, 611,612, 613, 614, 615, 616, 617, 618, 619, 620, 621, 622: n = A,T,C or G
  misc_feature 623, 624, 625, 626, 627, 628, 629, 630, 631, 632, 633, 634,635, 636, 637, 638, 639, 640, 641, 642, 643, 644, 645, 646,647, 648, 649, 650, 651, 652, 653, 654, 655, 656, 657, 658,659, 660, 661, 662, 663, 664, 665, 666, 667, 668, 669: n = A,T,C or G
  misc_feature 670, 671, 672, 673, 674, 675, 676, 677, 678, 679, 680, 681,682, 683, 684, 685, 686, 687, 688, 689, 690, 691, 692, 693,694, 695, 696, 697, 698, 699, 700, 701, 702, 703, 704, 705,706, 707, 708, 709, 710, 711, 712, 713, 714, 715, 716: n = A,T,C or G
  misc_feature 717, 718, 719, 720, 721, 722, 723, 724, 725, 726, 727, 728,729, 730, 731, 732, 733, 734, 735, 736, 737, 738, 739, 740,741, 742, 743, 744, 745, 746, 747, 748, 749, 750, 751, 752,753, 754, 755, 756, 757, 758, 759, 760, 761, 762, 763: n = A,T,C or G
  misc_feature 764, 765, 766, 767, 768, 769, 770, 771, 772, 773, 774, 775,776, 777, 778, 779, 780, 781, 782, 783, 784, 785, 786, 787,788, 789, 790, 791, 792, 793, 794, 795, 796, 797, 798, 799,800, 801, 802, 803, 804, 805, 806, 807, 808, 809, 810: n = A,T,C or G
  misc_feature 811, 812, 813, 814, 815, 816, 817, 818, 819, 820, 821, 822,823, 824, 825, 826, 827, 828, 829, 830, 831, 832, 833, 834,835, 836, 837, 838, 839, 840, 841, 842, 843, 844, 845, 846,847, 848, 849, 850, 851, 852, 853, 854, 855, 856, 857-858: n = A,T,C or G
gncgcgcgtaatacgactactatagggcgaattggagctcccccgcggtggcggcccgcccgggcaggtaccatagaacaaggcttcctccaacaggccgaggttgatgcaggcatccatggcgcagtcgagcaccttcagctggtagatgttgatatcgggaagccgttcagaattgctgcttatgatcgcctggcacatggccagaacctgctcccactctgttattaaccttagttagggattcattgtctttatgaactttcacagcaaatgtattttctttccagcaaaggcctcccggagacacagtatcttactccaaaagatgagttccttgatgagaatttaaagcaccccaatgcacagctgagagcctgttccatcacacccactacaatgtccccgcgtacctcggccgctctagaactagtggatcccccgggctgcaggaattcgatatcaagcttatcgataccgtcgacctcgagggggggcccggtacccagcttttgttccctttagtgaagggttaattgcgcgcttggcgtaatcatggtcatagctgnttctgggannnnnnnnnnnnnnnnnnnnnnnnnnnnnnnnnnnnnnnnnnnnnnnnnnnnnnnnnnnnnnnnnnnnnnnnnnnnnnnnnnnnnnnnnnnnnnnnnnnnnnnnnnnnnnnnnnnnnnnnnnnnnnnnnnnnnnnnnnnnnnnnnnnnnnnnnnnnnnnnnnnnnnnnnnnnnnnnnnnnnnnnnnnnnnnnnnnnnnnnnnnnnnnnnnnnnnnnnnnnnnnnnnnnnnnnnnnnnnnnnnnnnnnnnnnnnnnnnnnnnnnnnnnnnnnnnnnnnnnnna

SEQ ID NO: 4995 - DNA, 787 bp, Homo sapiens
  misc_feature 2, 3, 9, 11, 17, 20, 21, 24, 26, 27, 29, 34, 38, 39, 43,47, 49, 55, 57, 58, 59, 63, 67, 71, 72, 74, 75, 76, 77,79, 86, 100, 103, 108, 109, 110, 111, 116, 118, 122, 123,139, 349, 399, 404, 412, 444, 475, 495, 497, 522, 533, 545: n = A,T,C or G
  misc_feature 547, 548, 577, 578, 583, 586, 611, 615, 618, 621, 630, 633,636, 651, 661, 664, 677, 681, 691, 692, 695, 703, 704, 708,709, 710, 716, 719, 721, 722, 726, 727, 731, 732, 737, 739,741, 742, 743, 755, 757, 760, 763, 764, 765, 766, 768: n = A,T,C or G
  misc_feature 769, 777, 785: n = A,T,C or G
annggaacnanttaagnatnntanannancaaantaanntcanatananagtttntnnnaaangaanggannannnnantgtaggntataacagaacttntantagannnngggtnancctnnagatcactatagggcnaattggagctccaccgcggtggcggccgaggtacatcatcaccatatttgattaaaagttccaccacctcttgatgattgtgttctgtggcccaatggagagctgtcatctttaacatgtcctttgcattgacatcagcaccatgcttaaggtaaaacctcttactattgctggcatggcccttcagaagcttgccatatgttaatgggntgtttcggtcccactttgggtttcttgggcaatctctggctcacacccangctcncaagcaanttaccctggcccgggccggcccgccttctaanaaactaagtggggattcccccccgggggccntggcaagggaaaattattcnantttattcaaaagccttttaatttcngaattaccccngttccgaaaccntnncaaaaggggggggggggccccccggggtnnccccnaancctttttttgggtttcccccttttnaaanggnaangggggtttnaanttnttggccccccccttntgggccgggnaanatcaaattggggngcantaagccctgnnttncccctggnnagannnattatngtngnnatcnnattnnattantngnnnaaaaatcttacnangangtnnnnannaattttcnaccacttnag

SEQ ID NO: 4996 - DNA, 481 bp, Homo sapiens
  misc_feature 1, 15, 428: n = A,T,C or G
nctactatgtgggcngattggagctccccgcggtggcggccgcccgggcaggtactagaagctgggggaaaaagagtaggtaaaacagacatggccttggcccttctggaatttacattctcgtatgtgtcatgaaagttgttttgaaaaaacccaaaccattgtttttcctctgctttcacactacaacaatcaacacagaagacttctgtgactccaaaaaatatgtaaggatttctccccaccaccaggcaagcaatcagttctgcagcggacaccagttgggtgtcctccaattcaattccaacactatctacctagagacagcatcagatcccacagcatgagggctcaatgcccaagctgccccacagccccctgggcaccagtagcaagtctgggcctctggaacttctttttttgcaganatggggtctcactatattgcccagactgggggctcaagcattcctcccacctc

SEQ ID NO: 4997 - DNA, 866 bp, Homo sapiens
  misc_feature 3, 304, 426, 433, 503, 542, 547, 548, 551, 552, 553, 554,555, 556, 557, 558, 559, 560, 561, 562, 563, 564, 565, 566,567, 568, 569, 570, 571, 572, 573, 574, 575, 576, 577, 578,579, 580, 581, 582, 583, 584, 585, 586, 587, 588, 589: n = A,T,C or G
  misc_feature 590, 591, 592, 593, 594, 595, 596, 597, 598, 599, 600, 601,602, 603, 604, 605, 606, 607, 608, 609, 610, 611, 612, 613,614, 615, 616, 617, 618, 619, 620, 621, 622, 623, 624, 625,626, 627, 628, 629, 630, 631, 632, 633, 634, 635, 636: n = A,T,C or G
  misc_feature 637, 638, 639, 640, 641, 642, 643, 644, 645, 646, 647, 648,649, 650, 651, 652, 653, 654, 655, 656, 657, 658, 659, 660,661, 662, 663, 664, 665, 666, 667, 668, 669, 670, 671, 672,673, 674, 675, 676, 677, 678, 679, 680, 681, 682, 683: n = A,T,C or G
  misc_feature 684, 685, 686, 687, 688, 689, 690, 691, 692, 693, 694, 695,696, 697, 698, 699, 700, 701, 702, 703, 704, 705, 706, 707,708, 709, 710, 711, 712, 713, 714, 715, 716, 717, 718, 719,720, 721, 722, 723, 724, 725, 726, 727, 728, 729, 730: n = A,T,C or G
  misc_feature 731, 732, 733, 734, 735, 736, 737, 738, 739, 740, 741, 742,743, 744, 745, 746, 747, 748, 749, 750, 751, 752, 753, 754,755, 756, 757, 758, 759, 760, 761, 762, 763, 764, 765, 766,767, 768, 769, 770, 771, 772, 773, 774, 775, 776, 777: n = A,T,C or G
  misc_feature 778, 779, 780, 781, 782, 783, 784, 785, 786, 787, 788, 789,790, 791, 792, 793, 794, 795, 796, 797, 798, 799, 800, 801,802, 803, 804, 805, 806, 807, 808, 809, 810, 811, 812, 813,814, 815, 816, 817, 818, 819, 820, 821, 822, 823, 824-866: n = A,T,C or G
agncgcgtatcgactactatagggcgaattggagctccccgcggtggcggccgcccgggcaggtacaggaaacctcatacgacgggtgcatgttatccagtgatcttccttccttccttcaacaaatatgtattgaaccccttccatgtgccaagccctgtgatattaaaatgacgattaaaatagagtgatcaatgccatgataggcggtgtgaatgcattacagggagctctccctagtttagaggtcagggatgactccagaggatgggacatttaacatttaagctaagatatttatcanattatctagttgagagtggggaggaaggtgggagttagagttggccatttggagcgaggaggtggggatggttaatgggtacctcggccgctctagaactaagtggatcccccgggctgcangaattcnatatcaagcttatcgataccgtcgacctcgagggggggcccggtacccagcttttgttccctttagtganggttaattgcgcgcttggcgtaatcatggtcatagctgntttcnnggnnnnnnnnnnnnnnnnnnnnnnnnnnnnnnnnnnnnnnnnnnnnnnnnnnnnnnnnnnnnnnnnnnnnnnnnnnnnnnnnnnnnnnnnnnnnnnnnnnnnnnnnnnnnnnnnnnnnnnnnnnnnnnnnnnnnnnnnnnnnnnnnnnnnnnnnnnnnnnnnnnnnnnnnnnnnnnnnnnnnnnnnnnnnnnnnnnnnnnnnnnnnnnnnnnnnnnnnnnnnnnnnnnnnnnnnnnnnnnnnnnnnnnnnnnnnnnnnnnnnnnnnnnnnnnnnnnnnnnnnnnnnnnnnnnnnnnnnnnnnnnnnnnnnnnnnnnnn

SEQ ID NO: 4998 - DNA, 837 bp, Homo sapiens
  misc_feature 2, 8, 13, 493, 541, 545, 583, 585, 599, 601, 602, 605, 626,637, 648, 652, 669, 675, 680, 685, 686, 687, 688, 689, 690,691, 692, 693, 694, 695, 696, 697, 698, 699, 700, 701, 702,703, 704, 705, 706, 707, 708, 709, 710, 711, 712, 713: n = A,T,C or G
  misc_feature 714, 715, 716, 717, 718, 719, 720, 721, 722, 723, 724, 725,726, 727, 728, 729, 730, 731, 732, 733, 734, 735, 736, 737,738, 739, 740, 741, 742, 743, 750, 751, 752, 753, 754, 755,756, 757, 758, 759, 760, 761, 762, 763, 764, 765, 766: n = A,T,C or G
  misc_feature 767, 768, 769, 770, 771, 772, 773, 774, 775, 776, 777, 778,779, 780, 781, 782, 783, 784, 785, 786, 787, 788, 789, 790,791, 792, 793, 794, 795, 796, 797, 798, 799, 800, 801, 802,803, 804, 805, 806, 807, 808, 809, 810, 811, 812, 813: n = A,T,C or G
  misc_feature 814, 815, 816, 817, 818, 819, 820, 821, 822, 823, 824, 825,826, 827, 828, 829, 830, 831, 832, 833, 834, 835, 836, 837: n = A,T,C or G
gncgcgtncgcgnatacgactactatagggcgagattggagctccaccgcggtggcggcccgaggtacagttacattctgtggttttaaaatcttttttaatgggcttggcatttcttgccgttttttccttcaattatttttcttattatttgattttatgaccattttaaagctacctttatttagctttctgattacaataatgaaatgaccagtgttctctttttttaatgtatagtaagcaagaagagtgcaccacaacatcaacagccccagtccctacaacagaaattccgaccacaatgagcaccatggctgctgccgaagcagcagctgctgttgttgcagcagcagcggcagcagcagcagcagctgcagccaatgctaatgcttccacttctgcttctaatactgtcaagtggaactgttccagttgttcctgagcctgaagttacttccattgttgctactggtgtagataatgagaatcngtaactatttcaactggggaacaagcacaacttactagtacctgcccnggcnggccgtctagaactaagtggatcccccggctgcaggantntatataagcttatnannccnccacctcagggggggcccgtnccactttggtncctttaatganggtnaatgcccccttgggcgnaataanggganaaaannnnnnnnnnnnnnnnnnnnnnnnnnnnnnnnnnnnnnnnnnnnnnnnnnnnnnnnnnnggggggnnnnnnnnnnnnnnnnnnnnnnnnnnnnnnnnnnnnnnnnnnnnnnnnnnnnnnnnnnnnnnnnnnnnnnnnnnnnnnnnnnnnnnnn

SEQ ID NO: 4999 - DNA, 573 bp, Homo sapiens
  misc_feature 20, 285, 286, 289, 290, 294, 296, 297, 303, 311, 313, 317,318, 319, 321, 322, 324, 332, 333, 335, 336, 344, 353, 354,356, 357, 358, 360, 361, 362, 363, 364, 367, 368, 372, 375,377, 379, 380, 381, 383, 392, 394, 395, 397, 401, 403: n = A,T,C or G
  misc_feature 404, 407, 410, 413, 417, 420, 427, 429, 435, 437, 442, 443,447, 449, 452, 456, 459, 460, 461, 466, 467, 481, 485, 489,490, 493, 497, 498, 501, 502, 503, 504, 510, 519, 521, 522,532, 535, 536, 537, 541, 546, 548, 552, 557, 560, 566: n = A,T,C or G
  misc_feature 568, 573: n = A,T,C or G
taatacactactatagggcnaattggagctccccgcggtggcggccgggggtacggatgggaaagccgtggggcaatgggaggttgcaggaagcccatccttcccctcctgcggcaggtacctcggccgctctagaactagtggatcccccgggctgcaggaattcgatatcaagcttatcgataccgtcgacctcgagggggggcccggtacccagcttttgttccctttagtgagggttaattgcgcgcttggcgtaatcatggtcatagctgttccctggannatnnaatnanntataanatattctngnatannnanntnttttattnntnntaacaatnattaatttnntnnncnnnnnttnntctnagnanannntntatataatngnntnaatntnntcnaantantatntantataacntnaatccnanctacnntacntnagncttnttnnntactnntcgctaaatacacncttngtcnntanaatnnatnnnncttatnttatctatncnngattattccnttnnnttanaaatntnatcnaaatnaantttccntntttan

SEQ ID NO: 5000 - DNA, 497 bp, Homo sapiens
  misc_feature 2, 5, 19, 496: n = A,T,C or G
cnaancactacttagggcnaattggagctccccgcggtggcggccgcccgggcaggtacaagttgtctttatgctgcgagataagtcctctcttggtttgagctcccaccttttcagtgaactcttacattttgggggatctgctcttgtaaaggacatcctttctggtctttgattacttgagaaaagtgagtgaggtggggccaagatggttgactagaagcagctagtgtgtgccactctcacaaatagcagaaagagtggtgagacactagctcttcaaccggaacatccaggtggacacataaggattcatcagtgacatagtgtgaccttcggatcacggagaagagtgagacagatcaaccattcacccaggagtggcacagacccaggggaatccccctacaagaaaatggtgagtgagtgagagtcccgtgggatgcatatttctgcccacgaacctttgaatccctgggctcagggagataccccna

SEQ ID NO: 5001 - DNA, 843 bp, Homo sapiens
  misc_feature 3, 9, 22, 610, 668, 697, 723, 732, 735, 736, 737, 738, 740,743, 745, 746, 753, 759, 760, 761, 762, 763, 782, 783, 787,788, 792, 796, 797, 798, 802, 803, 805, 806, 807, 808, 809,817, 818, 819, 820, 825, 829, 830, 833, 834, 836, 837: n = A,T,C or G
  misc_feature 838: n = A,T,C or G
agncgcgtntcgacttactatntggctgattggagctccccgcggtggcggccgaggtaccaaaaagactctcaaaaaccaatactcccacgggcaggggaatagccaagtttgttgcggtttccaatgaatgacatcagccctgtgtaggtctcaatcaaaatgggttcagttaacaccatcagtttctttcctcttccagatccagttgaattcttgtgggcattctggatagctggaacaagcttagacatgaacccagacaacttgcaaatttcaaggaatttctcactggtgtatttcataggatgctcagtgaaagtagcataaggaacttcagtggaccatgggttccagcgggacagaagagactgctcctccggactcccccagtagatcctaaggccttctccttgtctcttgtccagggacatcccagggaaggtgaacttgcccaggcagatgccgatagacagcgctcagaggaatccgctgcagctgcacacaactcagcatgatgaagtcgtatttgcagatcaagagagtcttgtctgtgaccagtaagaattctctccttctcattgttccagtggtctatctttgtcaaganccagaagccttgaatggtctctccagaagtcttcaactacgtgacctttcaagtcttncatggcagtctcaatggcccccggccgangtactttttttttttttttttttttnggggggggnccnnnntnttnannaaaaaantttttnnnnngggggggaaaaaaaaaaanncccnngggncccnnntttnngnnnnnaaaggggnnnnggggncccnnaanntnnnacccc

SEQ ID NO: 5002 - DNA, 828 bp, Homo sapiens
  misc_feature 15, 26, 27, 481, 483, 487, 502, 512, 513, 515, 517, 521,533, 539, 556, 561, 565, 566, 568, 571, 594, 595, 605, 609,611, 618, 620, 621, 638, 647, 655, 656, 663, 664, 675, 676,678, 679, 687, 688, 689, 690, 691, 695, 699, 702, 703: n = A,T,C or G
  misc_feature 705, 715, 716, 718, 722, 741, 742, 757, 760, 761, 762, 763,766, 769, 774, 775, 776, 779, 780, 787, 788, 790, 792, 793,795, 796, 798, 799, 800, 803, 804, 805, 806, 812, 813, 817,818, 819, 823: n = A,T,C or G
agcgcgtatcgactnactatagggcnnattggagctccccgcggtggcggccgcccgggcaggtacttctgattggaaaaaaaggcaagaggcagatcatgggatccattaaaagctttcaagcaatatcagatacacatttaagtaaaatcactttgaagtgttaacagatggattagaaaaattaaaagccagggtaagctaggaggttactacacagttctatacacaaactcatgtatttagcaaatattcagagtgagtgactgaatacacttttccagacctgaattaaagtagtggcagtgggagtgaagacaacgaggggagataggccaagaactatagttagaacagacattagggacataaggaacatgggtattaaagaaaggaagatgattcctaggcttctgataatctgagaccatactgttttcagtttgtatcccattttttttttttttggaaaaaattttgntntttngcccaggctaaaggncaggggcttnntntnactncctccccctccngggttnaaacaatttcttgcctnaaccncccnngnggntgggattaaaggcccccccaaanngctggggtantttntnttttttnannaaaaacggggtttcccnttttggccngggtggtnntaaaccnntttaacttggnngnnaaggttcnnnnncccnaaanccnncnttgccctccnntngggnaacaaaggaaactttttcnnaaaaaaaaaaaaaanccnnnnccnttnaaaannnggnncccgggnncngnnanntnnnttnnnntttttnncccnnncccnggggg

SEQ ID NO: 5003 - DNA, 847 bp, Homo sapiens
  misc_feature 1, 10, 14, 27, 61, 601, 627, 649, 657, 663, 664, 678, 687,688, 690, 712, 715, 726, 730, 734, 743, 755, 756, 757, 760,761, 765, 766, 768, 770, 771, 772, 773, 774, 775, 776, 777,778, 779, 780, 781, 782, 783, 784, 785, 786, 787, 788: n = A,T,C or G
  misc_feature 789, 790, 791, 792, 793, 794, 795, 796, 797, 798, 799, 800,801, 802, 803, 804, 805, 806, 807, 808, 809, 810, 811, 812,813, 814, 815, 816, 817, 818, 819, 820, 821, 822, 823, 824,825, 826, 827, 828, 829, 830, 831, 832, 833, 834, 835: n = A,T,C or G
  misc_feature 836, 837, 838, 839, 840, 841, 842, 843, 844, 845, 846: n = A,T,C or G
ncgcgtatangacntactatatggctnattggagctccccgcggtggcggccgaggtacangtccactagcacggcagctatagtgtgggcatctaagagtgccctgtaagcagctgtggccagactgggtccctgggagaggccagcagaccaaggagtgctcagttggaccagcttcttctgatttgcaagaccatcctgcagaaattaggcccaacagttcccgtagggctaaagtctcttatgggagacagttgagcctagagaaatggccatcactggccacactttactacagatgctcttgcaccaaaccctctggccaccacatgagctggcttgctgcattatctctttgcttgtcttctgggggctgcatctcagagagatgtaggtcagcaattactcagtgcagccagcccaggatggaagatctttacttttggccaagttaggggtttgctgtctgctgaggagcagtgggtagtttgtgggacccatggaggatgggctggcttcctctccttgggtaaactgcagtttgaggtgtgaataaagcacttaaggtttgggattttttattaatcttgagggtacaanggcagttgtcctgccccggcgggcgntttagaactaatggatcccccnggctgcangaattnnatattaaacttatngataccccnnanccctaagggggggcccggcccnccntttttttcccntttngaangggtaaatngcccccctgggnnnaanngggnnanannnnnnnnnnnnnnnnnnnnnnnnnnnnnnnnnnnnnnnnnnnnnnnnnnnnnnnnnnnnnnnnnnnnnnnnnnnnnc

SEQ ID NO: 5004 - DNA, 500 bp, Homo sapiens
  misc_feature 19, 79, 87, 196, 203, 221, 247, 369, 396, 405, 438, 453,456, 464, 469, 474, 476, 499: n = A,T,C or G
atacgactactatagggcnaattggagctccccgcggtggcggccgcccgggcaggtacgcgggttcgtgggtcattancatttcanatgaagtgctggcaagggaccctgccattcagcagcacagtgctgggcacacctgggttgtcacatgtgccctgttaggaggcggtagatgcccctctccctctgtcanagctgancatggcacttgtaaatanccgtcttcctggaagtgctgggtatnggaacacctgtgggggctgttgctcaccccctcttcagggaacgctggtgctcatatttatgtatttggtggcctgaggggaggtacctcggccgatctaagaactacatggatcccccggncttcatgaattccatatcaatcttatngataccgtntacctcgagtggggggcccggtacccaactttngttccctttagtganggntaattgcnccctnggcgnantcatggtcataaattttttcctng

SEQ ID NO: 5005 - DNA, 695 bp, Homo sapiens
  misc_feature 1, 3, 10, 12, 13, 14, 17, 19, 20, 22, 25, 26, 30, 32, 34,35, 36, 38, 40, 41, 44, 45, 46, 47, 48, 49, 54, 59, 65,71, 72, 74, 80, 82, 83, 86, 87, 89, 92, 94, 97, 99, 101,103, 104, 111, 112, 113, 116, 117, 118, 119, 120, 124, 125: n = A,T,C or G
  misc_feature 126, 127, 128, 133, 139, 155, 156, 423, 435, 438, 564, 565,590, 646, 667, 681: n = A,T,C or G
ngngttggcntnnnaantnntnaannttantntnnncntnntgnnnnnnatgantaagntatttnggtatnntngtatcnanntcnntnganangtnanantnngtcatgnnnatnnnnncagnnnnnggggnccctanacgatcatatagggcnnattggagctccaccgcggtggcggccgaggtatcccgcggacttccggtttgataagccaaagaaaagcagaagcccagcctcagcagaagccccaggggacagtggagagcggtcagaaggggaggccatggaaatctgctctgagcctgtggcagcctcccctgcaccggcatggtgagaggcggatctacagacataggaataccctctaccatctgctttggtcaggggtgcccgctcggagggatttaataaggcaaccaangaagaaaaaacncanaaccagatggctggataggactcaagtaaaagggagtggggggggccagtcacccactggcttggggccgtggcattcccgccccttggggcccttttctcccgaccttcttggtggtgggcccgnncctggggggggccaggcccctcgcncatccttccccatcctttggtttccctcaagcaaaatgggcatttagcaagccttntccattcaagaaggctggtgnaggggaccccacangtattttgggaaaa

SEQ ID NO: 5006 - DNA, 482 bp, Homo sapiens
  misc_feature 19, 482: n = A,T,C or G
atacgactactatagggcnaattggagctccccgcggtggcggccgaggtacgcggggagagctggtgtaattgaaagacgtttaggtgcaatcattctgctgtttgctccttgccaggttcaacatgggattgtgtgagtatttgaagaaaacagcaattttttcatatctttgaaagatgtaaaaagcgtagattagtgcttaaatttaagaaatctggtaatttataatcatgtggctctaaaataaaaaggtattttatttgtctggtggattaaagctttagaaaagctacgccttggatacaagtgaaccgataattctggtctaatgttgccgtggtaacaactcatgctgatataattgagaacatcttatacatcctggttcgaacattttctccctgccatttttgagttgttctagtggtatatgaaggaggctgggataactagcttgaaagaaattcagtctaagttan

SEQ ID NO: 5007 - DNA, 849 bp, Homo sapiens
  misc_feature 2, 3, 4, 6, 10, 15, 36, 125, 471, 553, 555, 579, 643, 653,658, 663, 679, 689, 693, 734, 756, 769, 789, 791, 798, 807,837, 847: n = A,T,C or G
gnnnangggnccgtntcgactactatagggcgaatnggagctccccgcggtggcggccgaggtacactcacaaggaaataggatgtcaagtccttgggtagtttgatagttttccatgacaccancttatagcacaatgccaaaataaagttcaggagaagggtcaaataatgcagacttgtaagttcctgtaattcttgactatacaattgattccattttgaatgtttaacacacagttgctcagcagtctggatgttactgtattcccccacaaagacagctctgtaaatgaacataaatcaggctataagagaatatctccttacacttggtcttcagggcagaagtagcaacaaagaagcacaagtcctctttgaaaccatatcttgatttagtgtcctcagcctaacacgtattgcagtgtggcccaacagaaatgggtctgtgagatacttcaacacccggcangggcttgctgggtctaacattggagtgttgggctgcagacactgactggggagaaatgttgtgaactttatttgcagttctnanagaaatgctgtgttgaaacagganaaggttttcaaaagctgctctcaataactggcttcaggattggggtgatggtattatacttacnaaaggcagcncatcnaatanagaatttgataggcanaaattaggtncttncgcaagtatttttcatgggagaataaggggagatccaatancttgccggcgggcggtctaaantagtggatccccnggcttcaggaattcatttcnancttatcnttccctcanctcaaggggggcccgggccccacttttgtncctttatgangg

SEQ ID NO: 5008 - DNA, 870 bp, Homo sapiens
  misc_feature 476, 477, 478, 480, 481, 482, 483, 484, 485, 486, 487, 488,489, 490, 491, 492, 493, 494, 495, 496, 497, 498, 499, 500,501, 502, 503, 504, 505, 506, 507, 508, 509, 510, 511, 512,513, 514, 515, 516, 517, 518, 519, 520, 521, 522, 523: n = A,T,C or G
  misc_feature 524, 525, 526, 527, 528, 529, 530, 531, 532, 533, 534, 535,536, 537, 538, 539, 540, 541, 542, 543, 544, 545, 546, 547,548, 549, 550, 551, 552, 553, 554, 555, 556, 557, 558, 559,560, 561, 562, 563, 564, 565, 566, 567, 568, 569, 570: n = A,T,C or G
  misc_feature 571, 572, 573, 574, 575, 576, 577, 578, 579, 580, 581, 582,583, 584, 585, 586, 587, 588, 589, 590, 591, 592, 593, 594,595, 596, 597, 598, 599, 600, 601, 602, 603, 604, 605, 606,607, 608, 609, 610, 611, 612, 613, 614, 615, 616, 617: n = A,T,C or G
  misc_feature 618, 619, 620, 621, 622, 623, 624, 625, 626, 627, 628, 629,630, 631, 632, 633, 634, 635, 636, 637, 638, 639, 640, 641,642, 643, 644, 645, 646, 647, 648, 649, 650, 651, 652, 653,654, 655, 656, 657, 658, 659, 660, 661, 662, 663, 664: n = A,T,C or G
  misc_feature 665, 666, 667, 668, 669, 670, 671, 672, 673, 674, 675, 676,677, 678, 679, 680, 681, 682, 683, 684, 685, 686, 687, 688,689, 690, 691, 692, 693, 694, 695, 696, 697, 698, 699, 700,701, 702, 703, 704, 705, 706, 707, 708, 709, 710, 711: n = A,T,C or G
  misc_feature 712, 713, 714, 715, 718, 719, 720, 721, 722, 723, 724, 725,726, 727, 728, 729, 730, 731, 732, 733, 734, 735, 736, 737,738, 739, 740, 741, 742, 743, 744, 745, 746, 747, 748, 749,750, 751, 752, 753, 754, 755, 756, 757, 758, 759, 760-870: n = A,T,C or G
gcgcgcgttatcgactactatagggcgaattggagctccaccgcggtgggcggcccgaggtacaacgcagagcaggtcctgagttgggagccagtggccctgagcaatagcacgaggcctgttgtctaccaagtgcagtttaaatacaccgacagtaaatggttcacggccgaggacgcgggcaagcccaaggctaaaaaggcgggcggaaccaaacctaagaagccagttggggcagccaagaagtccaagaaggcggctggcggcgcaactccgaagaagagcgctaagaaaacaccgaagaaagcgaagaagccggccgctctagaactagtggatcccccgggctgcaggaattcgatatcaagcttatcgataccgtcgacctcgagggggggcccggtacccagcttttgttccctttagtgagggttaattgcgcgcttggcgtaatcatggtcatagctgttcctggnnnannnnnnnnnnnnnnnnnnnnnnnnnnnnnnnnnnnnnnnnnnnnnnnnnnnnnnnnnnnnnnnnnnnnnnnnnnnnnnnnnnnnnnnnnnnnnnnnnnnnnnnnnnnnnnnnnnnnnnnnnnnnnnnnnnnnnnnnnnnnnnnnnnnnnnnnnnnnnnnnnnnnnnnnnnnnnnnnnnnnnnnnnnnnnnnnnnnnnnnnnnnnnnnnnnnnnnnnnnnnnnnnnnnnnnnnnnnnggnnnnnnnnnnnnnnnnnnnnnnnnnnnnnnnnnnnnnnnnnnnnnnnnnnnnnnnnnnnnnnnnnnnnnnnnnnnnnnnnnnnnnnnnnnnnnnnnnnnnnnnnnnnnnnnnnnnnnnnnnnnnnnnnnnnnnnnnnnnnnnnnnnnnnnnnn

SEQ ID NO: 5009 - DNA, 852 bp, Homo sapiens
  misc_feature 1, 3, 29, 32, 36, 624, 675, 679, 686, 696, 704, 729, 759,760, 761, 762, 763, 764, 765, 766, 767, 768, 769, 773, 775,779, 780, 781, 782, 783, 784, 785, 786, 787, 788, 789, 790,791, 792, 793, 794, 795, 796, 797, 798, 799, 800, 801: n = A,T,C or G
  misc_feature 802, 803, 804, 805, 806, 807, 808, 809, 810, 811, 812, 813,814, 815, 816, 817, 818, 819, 820, 821, 822, 823, 824, 825,826, 827, 828, 829, 830, 831, 832, 833, 834, 835, 836, 837,838, 839, 840, 841, 842, 843, 844, 845, 846, 847, 848: n = A,T,C or G
  misc_feature 849, 850, 851, 852: n = A,T,C or G
ngncgcgcgcgcgttatacgactactatnggngcgnattggagctccccgcggtggcggccgcccgggcaggtacacctgccagactgtctccagtgacatcccactatccatgtaaatggcaccagcaagcgactcaaaaatatcccccatggcctttggaacttcaatatcctcttctttctcttcatcctcctcagatctcctaagctattacagagggaaaagtgacttgtaagcaaaaaggccacttttacaggcagtccacagatgtagtttcttttcttggatatatgacttttgttacttctttagtaaggggggaaataccatttatggtatgcctactatattgtaatagtaaaacaaatgttatatttttaaaaaagtttttcaaacttctcaagaaaaaaagaaaaaatatccccaccccatttattattctatatacccagcaaagaaaaaagattacttctaactttaaacaaccttaacaaaagaattaagaaatagtcaataaaagtatgaaaaaattcaaattcactcgtaatcaaagaactatactttaaaacagttctacttcctactacttggcaagcattcaatagtacctcggccgctctanaactagtggatcccccggctgcaggaattcgattcaagcttatcgatcccncgancctcgangggggggccnggacccancttttggttccctttatgaagggtnaatggccccctggcgtaatcatgggcatannnnnnnnnnnttcngngggnnnnnnnnnnnnnnnnnnnnnnnnnnnnnnnnnnnnnnnnnnnnnnnnnnnnnnnnnnnnnnnnnnnnnnnnnn

SEQ ID NO: 5010 - DNA, 852 bp, Homo sapiens
  misc_feature 3, 6, 15, 22, 30, 503, 649, 665, 687, 705, 725, 745, 748,753, 755, 771, 775, 788, 790, 796, 827, 849, 850, 851, 852: n = A,T,C or G
agncgngtgcgcgtnaacgacntactatanggcgagattggagctccccgcggtggcggcccgggggccattgggactgccatggaagacttgaaaggtcacgtagctgagacttctggagagaccattcaaggcttctggctcttgacaaagatagaccactggaacaatgagaaggagagaattccactggtcacagacaagactctcttgatctgcaaatacgacttcatcatgctgagttgtgtgcagctgcagcggattcctctgagcgctgtctatcgcatctgcctgggcaagttcaccttccctgggatgtccctggacaagagacaaggagaaggccttaggatctactgggggagtccggaggagcagtctcttctgtcccgctggaacccatggtccactgaagttcttatgctactttcactgagcatcctatgaaatacaccagtgagaaattccttgaaatttgcaagttgtctgggttcatgtctaancttgttccagctatccagaatgcccacaaagaattcaactggatctggaagaagaaagaaactgatggtgttaactgaacccattttgattgaaacctacacagggctgatgtcattcatttggaaacccgcaccaactttggctntttcctttgccccgtngggaatattgggtttttgagantctttttggtacctcggnccgtctaaaactagtggatnccccgggctgcaggaattcnatnttaancntatcgatacccgccanctcnaaggggggggccngnccccancttttgttccctttatgagggtaattgcgcncttggcgtaatcatgggcatannnn

SEQ ID NO: 5011 - DNA, 866 bp, Homo sapiens
  misc_feature 398, 435, 520, 522, 523, 526, 527, 528, 529, 530, 534, 538,542, 547, 549, 552, 556, 557, 563, 565, 567, 568, 571, 574,575, 576, 578, 583, 585, 587, 589, 590, 592, 596, 597, 598,601, 607, 611, 616, 618, 621, 622, 624, 625, 628, 629: n = A,T,C or G
  misc_feature 630, 631, 632, 635, 638, 639, 640, 641, 643, 644, 645, 646,647, 650, 653, 661, 664, 666, 667, 675, 678, 681, 682, 685,689, 693, 695, 697, 699, 700, 701, 702, 705, 706, 707, 708,709, 710, 712, 714, 715, 716, 717, 718, 735, 736, 740: n = A,T,C or G
  misc_feature 741, 742, 748, 751, 755, 756, 762, 763, 764, 765, 768, 770,778, 779, 780, 784, 786, 788, 796, 797, 799, 801, 803, 807,809, 810, 811, 812, 814, 815, 816, 817, 818, 819, 827, 828,831, 834, 836, 837, 839, 840, 842, 845, 846, 852, 854: n = A,T,C or G
  misc_feature 855, 858, 864: n = A,T,C or G
tataggggcgaattggagctccaccgcggtgggcggccgcccgggcaggtacagtcctttgcccccccgacaaactcatcccctagttgcaggtgtgcattgccgggcttcagttaactgtccgtgaaggttcatttcatcacacacatttcacattttacaacagtgctctctacttcattgctagtcgtttaaaatttggccacatggcaaaaatgtgtgtaatgcaggggtctttttttaagtgttcattgagcacgtaattcaaaagtctgaatattaaataaacatctctgccctttctttcttccagcaggcagctcaaagaacggctctccgcgctctctctgacaggtaccgcgggccgctctagaactagtggatcccccgggctgcangaattcgatatcaagcttatcgataccgtcgacctcnagggggggcccggtacccagcttttgttccctttagtgagggttaattgcgcgcttggcgtaatcatggtcatagctgttcctgnannaannnnngttngggngagngggtntnagnatannaagtangngnntanggnnnanagaanangnannanggannnaangaggangtanggaangnagnngnnagnnnnntgnagnnnnannnnngcngangaataagntgnanngtaggganaanctnngtnggancaangnangnnnngannnnnntngnnnnnaaggagggagggggagnnagannngagagnagntagnnagcgannnntgnangtaagtannnacanangnaagaaagnnangnangtangnnnngnnnnnnagcgatgnnggnagngnnannantgnngtgaangnngtnaggtangg

SEQ ID NO: 5012 - DNA, 852 bp, Homo sapiens
  misc_feature 19, 766, 787, 792, 820, 821, 822, 823, 824, 825, 826, 827,828, 829, 830, 831, 832, 833, 836, 837, 838, 839, 840, 841,842, 843, 844, 845, 846, 847, 848, 849, 850, 851, 852: n = A,T,C or G
ggggccgcgtatcgactcnatatggcgaattggagctccaccgcggtggcggccgaggtacatacactaggacctcttgggccaacagtaccagcaggaccaacaggaccagaaggaccctgtgaaatgaaaaagaaaaacacaacttagctaggcccaagatacccctccccactcctccaccatccccaagtgtggggaagtcagaagtgaagcccacgagaatgctgcactgagggactggtattcacaaacttacagtttcaccacggtttccatgtttgccagcaggacccacggggccatgaggaccaggtgcacctgcagcaccaacgggaccaatattgccagggtaaccgcgctctcccttgtgtccgggttgaccatcgcgacctgggggaccatcgttcccagggttgccctgtgaagacaccacacaaattaaggctgttggtgaggctctgctgcctaccagcccctatgttgtagctactctgtcttcatcacttccagtgctcagtaacgaaccctctttcagactgttaaaactagggataaaaacctgccaacctaaatattttttagagatgttttaaatacttgggcccaattttgcagtgtgctattgaaaagcccattctttggcctaagcaattttcatattttcagtacctgcccgggcgggcgctctaaaactagtggatccccggctgcaggaattcgatattaagcttattgatccgcgacctcgaagggggggccggtnccacttttgttccttaatgangggtnattgggcccttggggaacattggcatannnnnnnnnnnnnnggnnnnnnnnnnnnnnnnn

SEQ ID NO: 5013 - DNA, 887 bp, Homo sapiens
  misc_feature 4, 5, 30, 341, 514, 549, 560, 588, 598, 627, 633, 660, 669,680, 683, 702, 704, 717, 718, 725, 736, 744, 749, 756, 757,767, 769, 778, 781, 782, 784, 785, 786, 787, 788, 789, 791,793, 796, 797, 798, 799, 800, 801, 802, 803, 804, 805: n = A,T,C or G
  misc_feature 806, 807, 808, 809, 810, 811, 812, 813, 814, 815, 816, 817,818, 819, 820, 821, 822, 823, 824, 825, 826, 827, 828, 829,830, 831, 832, 833, 834, 835, 836, 837, 838, 839, 840, 841,842, 843, 844, 845, 846, 847, 848, 849, 850, 851, 852: n = A,T,C or G
  misc_feature 853, 854, 855, 856, 857, 858, 859, 860, 861, 862, 863, 864,865, 866, 867, 868, 869, 870, 871, 872, 873, 874, 875, 876,877, 878, 879, 880, 881, 882, 883, 884, 885, 886, 887: n = A,T,C or G
gggnnccgcgtaatcgactactatagggcnaattggagctccccgcggtggcggccgaggtacaagttgtctttatgctgcgagataagtcctctcttggtttgagctcccaccttttcagtgaactcttacattttgggggatctgctcttgtaaaggacatcctttctggtctttgattcttgagaaaagtgagtgaggtggggccaagatggttgactagaagcagctagtgtgtgccactctcacaaatagcagaaagagtggtgagacactagctcttcaaccggaacatccaggtggacacataaggattcatcagtgacatagtgtgaccttcngatcacggagaagagtgagacagatcaaccattcacccaggagtggcacagacccaggggaatccccctacaagaaaatggtgaagtgagtgagaatcccgtgggatgcatatttcttgccacgaacctttgaatccctgggctcaggagatccccaacttggggtcttccanaccaaaccagaaagccatgttggagtcttgggtanaagctgctttnttaggtaggtggtgggagtccccagtancattttgttnccttggggtaccttgccccggccggccgnttttanaacttaatgggttcccccgggcctgcnggaaattcnattttcaaacnttntcggttccctccaacctcnangggggggcccggnnccccacnttttgttcccnttaatganggttnaattggnnccttggcgtnanccttggcanaanntnnnnnncntncgnnnnnnnnnnnnnnnnnnnnnnnnnnnnnnnnnnnnnnnnnnnnnnnnnnnnnnnnnnnnnnnnnnnnnnnnnnnnnnnnnnnnnnnnnnnn

SEQ ID NO: 5014 - DNA, 860 bp, Homo sapiens
  misc_feature 4, 521, 561, 572, 650, 671, 676, 677, 678, 679, 680, 681,682, 683, 685, 687, 688, 689, 690, 691, 694, 695, 696, 698,710, 711, 748, 750, 751, 754, 757, 758, 759, 761, 762, 766,768, 772, 784, 785, 787, 798, 819, 820, 843, 845, 848: n = A,T,C or G
  misc_feature 851, 853, 854, 855, 856, 857, 858, 859, 860: n = A,T,C or G
ggangccgcgtatcgactcactatagggcgaattggagctccccgcggtggcggccgtcttgttttcccggccaggaagcttcatcttccggatcatccgggaaagggacagaggcggccgaggtacatttcctctttgtggagctatttatttttctggagagccaagacaggtatttccacttcagtggtgtgatttgaggggttaggaaaatttccttgccttcaattttctttccaacctagatgtcacaaatacataatagtagtccttaactttatttttgttttcagtcacctgaaagacatgacaatccatactccatattaatgcagcggcgattctcaaatagagaagggctttaaaaaattagaaatctctgccgggcgcagtggctcacgcctgtaatctcaacactttgggaggccgagatgggcggatcatgaggtcaggagatcgagaccatcctggctaacacggtgaaaccccatctctactaaaaatacaaaaaattaaccangcgtggtggtgtgggccgctgtattcccactactcgggangcttgagtcangaaaatggcatgaacctgggaggcggaacttgcagtgagccgaaaatcgcgccactgcacttcacccgggcgacagancgagactctgtctcaattaanaaaannnnnnnngngnnnnnaannntntcctcccccggnnggccctttaaaaaatttgggggcccccggggggcggnannttngtnnnanncttntntaancccccccccccnngnggggggccccnccccccttttgtccctttagnnggggaaaaggcccccggggaaananggnaanannnnnnnn

SEQ ID NO: 5015 - DNA, 867 bp, Homo sapiens
  misc_feature 3, 31, 32, 94, 99, 100, 134, 135, 136, 137, 138, 139, 145,147, 150, 152, 154, 156, 161, 166, 172, 177, 179, 187, 190,198, 203, 206, 209, 210, 215, 231, 233, 236, 246, 262, 270,272, 329, 345, 360, 551, 556, 583, 596, 600, 602, 606: n = A,T,C or G
  misc_feature 607, 610, 611, 618, 621, 624, 627, 629, 632, 633, 635, 639,644, 660, 661, 665, 668, 671, 676, 682, 683, 684, 688, 690,703, 705, 709, 710, 711, 712, 715, 716, 717, 718, 719, 721,722, 723, 724, 725, 726, 727, 729, 730, 732, 733, 736: n = A,T,C or G
  misc_feature 739, 740, 744, 750, 751, 755, 757, 760, 761, 764, 767, 770,771, 773, 774, 775, 778, 779, 780, 785, 786, 788, 791, 792,793, 795, 796, 797, 799, 808, 811, 814, 815, 822, 826, 829,830, 831, 834, 835, 837, 838, 841, 845, 846, 848, 854: n = A,T,C or G
  misc_feature 857, 863, 864: n = A,T,C or G
agngacgcgcgtaatcgactactatagggcnnattggagctccccgcggtggcggccgaggtactttttttttttttttttttttttgcgggtnttttnngtttttttttttttttttttttttttttttttannnnnntttttntnttntncntnttctnactantaatanggatnanggccctcntgntgaacatncctgnccntcnnatctnacacccacatcacgcngnggngccaggtgcncactttgttcttcctntgctccgncntgtgactttcaagattgatttcttctgaaaaaatatattcctgaaattaaaactganaaatcctgattgaaanagagtgggctttctngtctactcaaaaaataatgggaatattaaccattcaataatgtctggggtaaatcagagattttaaatgaagcctttctgtatgactaccaatcatttaaaatcaacatcatggtttgctatgaagaaagccatcatttctacccatcaaaaatacatttatgaaagatgaaagtgagattggcaaaaganaaaantgaatgtccctgaataaaacctctgtntctggaaaaaaanaaananaccnnaannaaaaaantantangtngnaannantatnttccnttttattatttttaanntcanccntgnggggnggctcnnnaaananagtttttattttntncctnnnnaannnnnannnnnnnannannaanaanngaanggaggnnaaangnaannagnaanaanntnnnaannnacaannangannnannnanagaaggaantanaannaaataantatnaannnaannanntancaannanttatgnatngattannaac

SEQ ID NO: 5016 - DNA, 848 bp, Homo sapiens
  misc_feature 1, 2, 4, 7, 16, 17, 21, 24, 28, 29, 33, 590, 591, 593, 594,595, 596, 597, 598, 599, 600, 601, 602, 603, 604, 605, 606,607, 608, 609, 610, 611, 612, 613, 614, 615, 616, 617, 618,619, 620, 621, 622, 623, 624, 625, 626, 627, 628, 629: n = A,T,C or G
  misc_feature 630, 631, 632, 634, 635, 636, 637, 638, 639, 640, 641, 642,643, 644, 645, 646, 647, 648, 649, 650, 651, 652, 653, 654,655, 656, 657, 658, 659, 660, 661, 662, 663, 664, 665, 666,667, 668, 669, 670, 671, 672, 673, 674, 675, 676, 677: n = A,T,C or G
  misc_feature 678, 679, 680, 681, 682, 683, 685, 686, 687, 688, 689, 690,691, 692, 693, 694, 695, 696, 697, 698, 699, 701, 702, 703,704, 706, 708, 709, 710, 711, 712, 713, 714, 715, 718, 720,721, 722, 723, 724, 729, 734, 738, 739, 740, 742, 744: n = A,T,C or G
  misc_feature 745, 746, 749, 753, 754, 755, 756, 757, 758, 759, 760, 761,762, 763, 764, 765, 766, 767, 768, 769, 770, 771, 772, 773,774, 775, 776, 777, 778, 779, 780, 781, 782, 783, 784, 785,786, 787, 788, 789, 790, 791, 792, 793, 794, 795, 796: n = A,T,C or G
  misc_feature 797, 798, 799, 800, 801, 802, 803, 804, 805, 806, 807, 808,809, 810, 811, 812, 813, 814, 815, 816, 817, 818, 819, 820,822, 823, 824, 825, 826, 827, 828, 829, 830, 831, 832, 833,835, 836, 837, 838, 839, 840, 841, 842, 843, 844, 845: n = A,T,C or G
  misc_feature 846, 847: n = A,T,C or G
nngngangcgcgttanngacntantatnnggcngattggagctccccgcggtggcggccgcccgggcaggtacgcgggacctattttaaggacaaatgattaccaactttaattccatctgcaaccttaattctccttttccatgtaatgtaacatattcacaggttctggcaatttaggatgtggttttctttcctgcataattattctgcctatcacaacttccaaagttgaactatattgtgcaaggtggacatccaagctaccaacaatgttgaaagcttagatttgttcaacacatttacagacgttacattcttctttatgcctgaaaggtagaccttatacataaagcatgaacaagtaaattggtatgcttttttgtaggattcttggctcagggcccaaggagctttacagtacctcggccgctctagaactaagtgggatcccccgggctgcaggaattcgatatcaagcttatcgataccgtcgacctcgagggggggcccggtacccaacttttgttccctttaatgagggttaattgcgcgccttggcgtaatcatggcatagctggtttcctggannannnnnnnnnnnnnnnnnnnnnnnnnnnnnnnnnnnnnnnnannnnnnnnnnnnnnnnnnnnnnnnnnnnnnnnnnnnnnnnnnnnnnnnnnannnnnnnnnnnnnnnannnnantnnnnnnnnccntnnnnnaaggngggangggnnngnannntangagnnnnnnnnnnnnnnnnnnnnnnnnnnnnnnnnnnnnnnnnnnnnnnnnnnnnnnnnnnnnnnnnnnnnannnnnnnnnnnnannnnnnnnnnnnnc

SEQ ID NO: 5017 - DNA, 867 bp, Homo sapiens
  misc_feature 2, 3, 4, 5, 7, 9, 21, 27, 31, 556, 572, 578, 580, 603, 604,606, 607, 608, 609, 610, 611, 617, 618, 619, 620, 621, 622,623, 624, 625, 626, 627, 628, 629, 630, 631, 632, 633, 634,635, 636, 637, 638, 639, 640, 641, 642, 643, 644, 645: n = A,T,C or G
  misc_feature 646, 647, 648, 649, 650, 651, 652, 653, 654, 655, 656, 657,658, 659, 660, 661, 662, 663, 664, 665, 666, 667, 668, 669,670, 671, 672, 673, 674, 675, 676, 677, 678, 679, 680, 681,682, 683, 684, 685, 686, 687, 688, 689, 690, 691, 693: n = A,T,C or G
  misc_feature 694, 695, 696, 697, 698, 699, 700, 701, 702, 703, 704, 705,706, 707, 708, 709, 710, 711, 712, 713, 714, 715, 716, 717,718, 719, 720, 721, 722, 723, 724, 725, 726, 727, 728, 729,730, 731, 732, 733, 734, 735, 736, 737, 738, 739, 740: n = A,T,C or G
  misc_feature 741, 742, 743, 744, 745, 746, 748, 749, 750, 751, 752, 753,754, 755, 756, 757, 758, 759, 760, 761, 762, 763, 764, 765,766, 767, 768, 769, 770, 771, 772, 773, 774, 775, 776, 777,778, 779, 780, 781, 782, 783, 784, 785, 786, 787, 788: n = A,T,C or G
  misc_feature 789, 790, 791, 792, 793, 794, 795, 796, 797, 798, 799, 800,801, 802, 803, 804, 805, 806, 807, 808, 809, 810, 811, 812,813, 814, 815, 816, 817, 818, 819, 820, 821, 822, 823, 824,825, 826, 827, 828, 829, 830, 831, 832, 833, 834, 835: n = A,T,C or G
  misc_feature 836, 837, 838, 839, 840, 841, 842, 843, 844, 845, 846, 847,848, 849, 850, 851, 852, 853, 854, 855, 856, 857, 858, 859,860, 861, 862, 863, 864, 865, 866, 867: n = A,T,C or G
gnnnngngnccgtaacgactnacttanggcnaattggagctccccgcggtgggcggccgcccgggcaggtactttgccaagcagtaaaagatccaggagatagcagtagttgtggtgtcatgtcctgcaaacatgaacgttttcacttcagcttggagatctgcttcagagaagtctttggtgttttcacttttggcactcaaaagtatgtccagaaaatcctggcgtcttttctgagtagtatcttgttttagcttatccttaagagactccttccggtcctggattactttctctgtgaactgatgaagttcttggttaaatttagaaaagatttggccttgagagctgaatttgaaaaccaggtcgttgtgatgtagaaaattgttcatgcgctggttggagattttgctaaggttgaacactgctttcaggtatgagtccagggtacctcggccgctctagaactagtggatcccccgggctgcaggaattcgatatcaagcttatcgataccgtcgacctcgagggggggcccggtacccaacttttgttncctttaatgaagggtnaatgcncncttggcgtaatcatgggcataanntnnnnnnccgggnnnnnnnnnnnnnnnnnnnnnnnnnnnnnnnnnnnnnnnnnnnnnnnnnnnnnnnnnnnnnnnnnnnnnnnnnnngnnnnnnnnnnnnnnnnnnnnnnnnnnnnnnnnnnnnnnnnnnnnnnnnnnnnnngnnnnnnnnnnnnnnnnnnnnnnnnnnnnnnnnnnnnnnnnnnnnnnnnnnnnnnnnnnnnnnnnnnnnnnnnnnnnnnnnnnnnnnnnnnnnnnnnnnnnnnnnnnnnnnnnnnnnnnnn

SEQ ID NO: 5018 - DNA, 891 bp, Homo sapiens
  misc_feature 2, 3, 9, 622, 633, 644, 653, 676, 766, 781, 794, 800, 803,804, 830, 844, 868, 869, 879: n = A,T,C or G
gnnagtggngcgcgcgtaatactactactatagggcgaattggagctccccgcggtggcggccgcccgggcaggtactctctctctctctctcacacacacacacacacacacacacacacacacacacacccaccaaacaacagtgtatccacaaatgaatgaatgaaagttttacttataacttcactgaaacacagcttttgcttattctagtttaggaaccatgagtgatattttgggaaaccttttatggatttaagaaatgatccctggctgggcgcggtggctcacgcctgtaatcccagcactttgggaggccaaggtgggtggatcacgaggtcgggagatcgagaccatcctggctaacacggtgaaaccccgtctctattaaaaatgcaaaaaattagccagacatggtggcgggcacctgtagtcccagctacttgggaggctgaagcaggacaatggcgtgaacccgggaggcggagcttgcagtgagccgagatagcaccactgcactccagcctgggtgaaagagcgagactccgccccaaaaaaaaaaaaaaaaaaaaaagtaccttcggccgctctagaaactagtgggatcccccgggctgganggaattcgatnttaagcttatntgataccgntcgacctcgagggggggcccggnacccagctttgttccctttagtgaggggtttattgcgcgcttggcgtaattaatgggcataagctggtttcctgggggaaaattggtatnccggttaaaaattcnccacaacattacnagcccnggnngccataaagtgttaaagcctgggggnggctaatggagggngctaactcacattaatttgcgttnnggctacttgncccctttcaagg

SEQ ID NO: 5019 - DNA, 861 bp, Homo sapiens
  misc_feature 1, 4, 11, 14, 525, 691, 737, 739, 751, 769, 778, 779, 784,786, 824, 829: n = A,T,C or G
ngcnatcgacngcngcgtaatacgactactatagggcgaattggagctccaccgcggtggcggcccgcccgggcaggtacgcggggagtgcgcaagatgcacaggaacagaatagcaaactcacatgattgttggcaaggaaaacctggctacgtggctgatgttaaatttgctttttaagacagccagatcaagaaatgtctgaagactttgagactgcagcagggagatgattttgcagttagtaaacacagccctgggaagccatggcaaggcagttctgggttgtggttttttgcactgaatgtaacctagactcatcttcacgggcttgtgttgccccaggtacctcggccgctctagaactagtggatcccccgggctgcaggaattcgatatcaagcttatcgataccgtcgacctcgagggggggcccggtacccagcttttgttccctttagtgagggttaattgcgcgcttggcgtaatcatggtcatagctgtttcctgtgtgaaattgttatncgctcacaattccacacaacatacgagcccgggagcataaagtgtaaagcctggggtgcctaatgaagtgagctaactcacatttaattgcgtttgcgctcaattgcccgcttttcagtccgggaaacctgtcgtgcccagctgcattaaatgaatcggcccaacnccccggggagaggccgtttgcgtattgggcgctttttcccttcctngntcactgacttgnttgggcttcggtcgtttngcttgcggnnagcgntntcaacttacttcaaaggcggtaatccgggtattcccanaatcnggggataacccaggaaagaacatttgaccaat

SEQ ID NO: 5020 - DNA, 858 bp, Homo sapiens
  misc_feature 606, 647, 713, 721, 744, 789, 802: n = A,T,C or G
agtggacgcgcgtaatacgactactatagggcgaattggagctccccgcggtggcggccgcccgggcaggtacccaaccttgcaaatgggagctggccagtgggttggggtgaccaatcaatgaacaagagaggtctgagacctccctgtccgtcgggtctgaagggctgcgtgggggcatgtggcctcacctgttctctaaggtagaactgctccataaagggccaggtgtgcagatcctggtcctgggatgtgagtgctgctgagccaaggtgcacggagcattagttcatccttcttgaaacctgcggtggcaatggttcttgacaggtattgggttaagaattgaggactcagtgacagctgtggaccttcttcccagagaagcacacatactgaaaccatctgcatttgtgtgtggggagaagtttgcagatgtggggagtcacaggtcatttgaaattccaagattaagaaaccctgttacctttaagataaagtctgactccatggtatgacaaataaatcccttcccagtctggtcttaacccagacctcatttgccacatgtgcccactccccatccccctgcaggccattcctcanccaccatggcctttggccttgcttattaggttcttcccaangaccttctcaccaggcctgagggtacctcggccgctctagaactaatggatccccccggcctgcangaatttcnatatcaacttatcgataccgtcnacctcgagggggggcccggtcccaacttttgttccctttagtganggttaattgcccncttggcgtaatcatggtcatactgtttctgtgtgaaattgtatcccttcacaattt

SEQ ID NO: 5021 - DNA, 872 bp, Homo sapiens
  misc_feature 3, 4, 5, 6, 7, 8, 10, 661, 730, 797, 800, 853, 854, 857,867, 869: n = A,T,C or G
tannnnnngncgcgcgtaatacgactcactataggggcgaattggagctcccccgcggtggcggcccgcccgggcaggtacgtttaaatgggattgtttgtttttcacttgttgatttttttaagttcaccagatgcactgtgctggggttctgtgatagtccctaattgctgtgcaccctcccaagcctgagagcagcaggagggagggttgcgagacagcaaaaaggtggactgcctctctctttggaagctgcatgccggagaagtgtagagctgctcccagctggagaactcaggagggctagggtggcctcactagcatcccaggctagtgggccttatcctacaaggttcaagtggtggtgaggtctgcaagtctatcactgctcagccccatggacttggccccttttctggggagcgtgcaagaaaacttggcctccccaattgctggagctgcagcccctggttttggggtacctcggccgctctagaactaagtggatcccccgggctgcaggaattcgatatcaagcttatcgataccgtcgacctcgagggggggcccggtacccagcttttgttccctttagtgaggggttaattgcgcgcttggcgtaatcatggtcatagctgtttcctgtgtgaaattggttatncgctcacaatttccacacaacatacgagccgggagcataaagtgtaaagcctggggtgcctaatgagtnaagctaactcacattaattgcgttgcgctcactggcccgttttcaatcgggaaacctgtcgtgccanctncattaatgaatcggccaacccccggggaagaggcgggttgggtattgggcgcnnttncccttcttgntnatt

SEQ ID NO: 5022 - DNA, 717 bp, Homo sapiens
  misc_feature 2, 3, 4, 7, 13, 17, 18, 19, 25, 27, 35, 37, 39, 40, 42, 44,45, 49, 53, 55, 61, 62, 67, 68, 69, 79, 83, 86, 88, 89,93, 95, 97, 98, 100, 102, 106, 109, 115, 118, 220, 364,416, 432, 433, 437, 441, 442, 444, 502, 536, 547, 550, 563: n = A,T,C or G
  misc_feature 570, 586, 598, 621, 631, 638, 642, 652, 654, 681, 698, 704,710, 717: n = A,T,C or G
tnnnacntctaantttnnntttttnanatttattngntnntntnnctancgtntnttcgcnnttgtnnntcctttaaancccngantnnattnananntncntccncanttatcngantgtagactatactatcatatagggcgaattggagctccaccgcggtggcggccgtggttgtggggaccataactgatgatgtgcgggttcaggaggtacctnggccgctctagaactagtggatcccccgggctgcaggaattcgatatcaagcttatcgataccgtcgacctcgagggggggcccggtacccagcttttgttccctttagttgaagggtttaatttgccgccgcttgggccgtanatcatgggtcatagctgtttcctggtgtggaaaattgtttatcccgctcacnaatttcccacaccaannatancganncncggggagcattaaaaggtggtaaaagccctggggggttgcccttaatggaggtgtagnctaaacttcacaatttaaattttgccgtttgccncttcaacttgnccncgcttttcccagntcggggnaaaacccttgttccgntggcccagcctngcaattaaaatggaattcgggcncaaacggccnccggggngtangaagggccgngntttggccgttattttggggccgccttncttcccgcctttccttngcttcnacttgnaactgcn

SEQ ID NO: 5023 - DNA, 457 bp, Homo sapiens
  misc_feature 1, 60, 62, 159, 161, 224, 358, 367, 370, 400: n = A,T,C or G
nattggagctccccgcggtggcggccgaggtactttttttttttttttttttttttttgntnttcctcctttattttaattatttatttaggctcttggcattcaaggaaatccctatcaaaatactagctgaacacaagctaatggaacagagacttnanaaaccacacatgacaaacatcaactttacaaaaataatttttgcaagtccaaacacaaacagncatagtccactgcaagcaacaaaaataaactctgaggaatgagaagaatctgatttccagagttaccaccacattaaaatatccaattcttaaccacaacaacaacaaaatcacaaaacctggctgggtgcggnggctcacanctntaatcccagcactttaagaggctgaggcanacggatcacctgaggtcagggagttcaagaccagcctggccaacatggggaaacccc

SEQ ID NO: 5024 - DNA, 830 bp, Homo sapiens
  misc_feature 2, 3, 4, 6, 7, 10, 13, 17, 18, 20, 22, 25, 27, 28, 29, 30,31, 32, 33, 34, 36, 37, 39, 41, 46, 47, 53, 55, 62, 66,67, 68, 70, 74, 75, 76, 77, 79, 82, 85, 87, 89, 90, 97,98, 101, 102, 104, 110, 112, 114, 118, 119, 122, 123, 124,132: n = A,T,C or G
  misc_feature 137, 142, 146, 187, 189, 320, 334, 341, 407, 419, 438, 443,465, 472, 473, 476, 496, 499, 516, 529, 531, 550, 556, 565,575, 584, 590, 595, 608, 620, 624, 626, 648, 654, 657, 687,704, 721, 743, 771, 775, 783, 816: n = A,T,C or G
annntnntcnccntacnngntnttntnnnnnnnntnntnanattanntttttntntcccccnctannncnattnnnntnctnccntnanngcccctnntgnntnaaatangngncatnnccnnntattagcncattnggttngacncatactatcactatagggcagaattggagctccactcgcangngggcggctcgaggtactggcaaaaaagatgttcggtggttccagcagaagccaggccaggcccctgtgttagtgatgtataaagacagcgagcggccctcagggatctctgagcgattctccggctccagntcacggaccacagntcacctntgaccatcaagtgggggcccaccgtttgaagggatggaggcttgactatttactggttactgttgncggtcccgctcntaagaacctaggtgggatnccccncggggcctgccaagggaatttncggatanncanagcctttattccggaatacncgngcggacctcttctgtangggggggggggcncncgggttagctcccaaggcntgtgtntggtgtgcnccctctttangttggaagngggttntaaantttggccggccgncctttgggccgntganantccattgggggtgcaaataagncctggnttnttcccttggtggttggaaaaaatatgggtntaattgccccggccttncaaccaaatttgcccanccaaccaaatccatttacctgnaaggcctccggggggaggccaattaaanaagnttggttanaaaaggccccttgggggggttggccccttaaantgggaagttggaat

SEQ ID NO: 5025 - DNA, 486 bp, Homo sapiens
  misc_feature 47: n = A,T,C or G
ctatacactactatagggcgaattggagctccccgcggtggcggccngcccgggcaggtacgctctccaactggccaatacaaatcccttgtatccgtcttccgggctgcagggctccctcaggcagaggctatgacctgcagataggccacaccattcttggactggtcctgtagagcagggttccccaatccctgttactgcttcatggcctgttcagaagtgggccacacagcaggagggacttcagtacctcggccgctctagaactagtggatcccccgggctgcaggaattcgatatcaagcttatcgataccgtcgacctcgagggggggcccggtacccagcttttgttccctttagtgagggttaattgcgcgcttggcgtaatcatggtcatagctgtttcctgtgtgaaattgttatccgctcacaattccacacaacatacgagccgggagcataaagtgtaaagcctggggtg

SEQ ID NO: 5026 - DNA, 459 bp, Homo sapiens
  misc_feature 363, 407, 456: n = A,T,C or G
attggagctccccgcggtggcggccgaggtacgcgggtcccatatcattaagtgccagtgtcctgcattgagtttgtggttaattaaatgagctcttctgctgatggaccctggagcaatttctcccctcacctgacattcaaggtggtcacctgccctagtagttggagctcagtagctgaatttctgaaaccaaatctgtgtcttcataaaataaggtgcaaaaaaaaaaataccagttaagtaaagcctcaactgggtttttgtttctatgaaaatatcattataatcactatttatttcctaagttgaacctgaatagaaagggaaaccattcttattaagctttttattaggccctgnggctaaatgtgtacctgcccgggccggccgctctagaactaagnggatccccccgggctgcaggaattcgatatcaagcttatcgatacccgncga

SEQ ID NO: 5027 - DNA, 478 bp, Homo sapiens
  misc_feature 476: n = A,T,C or G
taatacactactatagggcgaattggagctccccgcggtggcggccgcccgggcaggtacagagcaggggctgagaggttggctcaggttggctctctgggagcctgactgtaagtctatagttttattttattttgctgttgtgagaaatctttgataagttagaacagtggttctcaaaatgtgatcttgggacccatcagggttcccgagacctttgtagggtgcctatgaagtaaaacatcttgtcataacaatattaattatttgcctttttcgctctcattctttcttaggtggaatgttctagaaggcatatgatgtgatcttgcaacagattgaatgcagaaacagagatgagcgtccagccatcttccattaagccagattttaagagactttcaaaaatgtgtaacaatgctactcttctcacaaattatttttggtttgggaaaatatattttaaaaatatgttngc

SEQ ID NO: 5028 - DNA, 802 bp, Homo sapiens
  misc_feature 1, 6, 18, 22, 23, 30, 34, 44, 47, 48, 51, 53, 56, 60, 63,66, 71, 72, 74, 75, 81, 89, 91, 92, 93, 94, 96, 98, 99,101, 107, 108, 110, 113, 114, 115, 116, 117, 119, 126, 129,301, 318, 336, 355, 361, 376, 379, 385, 392, 397, 398, 407: n = A,T,C or G
  misc_feature 411, 417, 422, 444, 468, 475, 484, 504, 550, 558, 559, 571,575, 584, 593, 606, 607, 608, 612, 626, 638, 640, 655, 660,674, 681, 713, 740, 751, 778, 784, 801: n = A,T,C or G
nttttnctcacacattantatnntgttttnattntatttatatntcnncancntcncccnctnttnccccnntnnttcccngattaatntnnnntnanntntttatnnancannnnngncttctanacnatcactatagggcgaattggagctccaccgcaggtggcggccgaggtacgcgggtaacctgacgatctcagacgtcagcgtgagtgatgtgccatttcctttctctgcccagtctggggctggggtgccaggctggggcatcgcgctgctggtgcatggtctgtgttctggntgccgctggccattgtnctatctcattgcccttgntctgtcctgtcaacgtgcncgcccnaaaaggaacctaccnggngccagntttgggnccatnntttttccancccncggggnaatgnccctaccacattctcttattgnaggccggaggtaccccttgtcccngggggcngggcaccgncttcttaagaaaccttaagntggggattcccccccccgggggccttggcaaggggaaatctcccgnattaatgnnaaaggccttttnaatncggaattanccccggctnccggaaccccttnnnggangggggggggggggncccccccggggntnccccccaaggccttnttttngttttccccccttnttttaantatggaagggggggttttaaaattttggccgncccgccctttgggggccggttaaaatncaattggggtnccattaaggccctgggttttccctggntgggtnggaaaaaatttgtttant

SEQ ID NO: 5029 - DNA, 771 bp, Homo sapiens
  misc_feature 1, 4, 5, 6, 7, 13, 15, 17, 18, 21, 23, 24, 26, 27, 29, 30,32, 34, 36, 37, 38, 39, 42, 44, 45, 55, 61, 62, 64, 69,70, 71, 72, 73, 74, 75, 78, 88, 92, 99, 103, 106, 107, 108,109, 121, 124, 126, 128, 130, 131, 133, 136, 137, 140, 144: n = A,T,C or G
  misc_feature 331, 362, 388, 392, 407, 441, 448, 451, 475, 486, 487, 495,501, 507, 510, 524, 543, 544, 559, 565, 583, 605, 606, 636,648, 655, 676, 694, 698, 707, 718, 724, 729, 743, 747, 765,770: n = A,T,C or G
nacnnnnaccctntnanntgnannanntnnantnannnnctnanntactcccccncccccnncntcgcnnnnnnntcncccttctttncccnctttctnttcnctnnnntccctcttttanctncngngnntngtnntcnctanacgactcactatagggcgaattggagctccaccgcggtggcggccgaggtacacagagaggggtgtcacttcagaaaatcttccagcatgttcttcagaatattaatttatatgcgaggtgaggttgggaatgaaaagaacaggtcagcactttttttttttcctagaacatacaaaagaacatggnggactttcaggggagtgccaatggcaaaggncgaatatttccttaaggggtccccgnaggnaaatggggtagttgnagaggggaggggggaacacaaatggcttttttgnaggcttnacntttttaccccttctggatacttangttccaagggnncccagaancccagncgcacncanggccaaaaattttncttatcctcgggggtgccnngggccccacctgganaaaatncccctttggtttcaaagnaaaccccaggaatccaccaaannattcctcgggggggccttccttttggggtncccccattttgnggaaggnaaagggggaaaggggaaaagnaagcccctccaaaaaaanttanacggttggntggccaacccnccaatnggccnccaattaattttcnaggnggaaaaccaaggcttttngtttnt

SEQ ID NO: 5030 - DNA, 604 bp, Homo sapiens
  misc_feature 2, 3, 4, 108, 387, 504, 573, 604: n = A,T,C or G
gnnnatcgcgtatactctactatagggtcgaaattggagctccaccgcggtggcggccgcccgggcaggtaccattattatccccacttcagaaatgaagaaactgancctcagagaggggaattcattggcctgaagtcagcacagctggcaagtctgtaaccaaaacctaagcctgcaacttctgctgttcactgctgcctcccacagcaaagggacttcagctacaccactcaacatcttgtgtgaccagccatagggcaaatatggccatcccgatatacacacactgtcctcagtgcacttccaggatgccttccaatttaaggagctctgcagggcctgggggatctagctgccatttccaaggctggcagggcagagcanaggtggagcctggaaggagcccactttggtttgtaagcctccttgcaagtgcactgggccacctgaggcacttaggggccttctaggatgtcaggcaccttcacctctgaaactaangctgggaccagggctggaggactctttgcccacctcttttttttttttgaagatggaagttcttgcttntttcgccccagggctagaagtgaacattgan

SEQ ID NO: 5031 - DNA, 589 bp, Homo sapiens
  misc_feature 2, 3, 4, 424, 567, 584, 588: n = A,T,C or G
gnnnatccgtaatcgactactatagggcgaaattggagctccccgcggtggcggcccgcccgggcaggtacttttttttttttttttttttttgggatttttagtagaggcggggtttcaccatgttggccaggctggtctcaaactcctgacctcagggatcctccagcctcggcctcccaaagtgctgagattataggccggagccaccgcgcccgggctcatgacaattttctaaggcagcacagatgaaacaaggaaagcaggaaccagggtccaaaaccatgtctctctactctaaattcgatgctccttccactacactgatggctttcacagtttacagtgcttgcaaatcacctaaaggtcctgttcacagatcacaggataccgaccaagtaggtcggggtggggcccgagaatntgtatttctagcgagcgcccaaaagtagcggaggctgctggtcgtcgggctaccctttgcctggcaaggccctgggcaaagactcaaagagagagactcccggagacgctgaattttaggtgtcgccaaactgtccttgaatnggaaacgcttggcccgnaccnt

SEQ ID NO: 5032 - DNA, 592 bp, Homo sapiens
  misc_feature 6, 8, 9, 16, 32, 496, 589: n = A,T,C or G
gccctngnnctttttnactactcctatagggntttttggagctccccgcggtggcggccgaggtgccactgcgcgtagccactatagcctttcgcacagttttaatacagccgtgtcttcagcgctcaggctgttcatttgcagatacagcgtgttcttggaattgtctctggagatggtgaatcggcccttcacggagtctacatagtatctattaatcccatcatatgatatggctgccacccactccagctccttgcctggagcctggcggacccagtgcatgccatagttactgaacatgaatccagaggctgcacaggagagtctcagggacctcccaggttggaccacgcctcccccagactccaccagctgcacctgacactggacacctcttaaaagagcaacgaggaaaacccagctcaagcccaaactccatggtgagtcctctgtgttcagtgatgatcaccggaatggaaacaccggcgacttncagtgctgggctcgttccccccgcgttaccttgccccgggcgggcgctcttagaaactagtgggatcccccgggcttgcaaggaatttcgatntta

SEQ ID NO: 5033 - DNA, 562 bp, Homo sapiens
  misc_feature 561: n = A,T,C or G
gggcgaattggagctccaccgcggtggcggccgcccgggcaggtacgcgggatttgagaacccttgccctacagacagtttctgagagcaccccaggaggattaagttttagttactcaccattgtgatgtgttcaatgaagtggcctttagtttctatcttctggtttctgtctccctaactcccttcccagtatttcctggaatcatcagccaaataaattacttgcacttggatcattgttttggggtctgctctcaggaaacctaaactatgacactctatatctacagttctggtattcatatttgtttcagtcagctaatgttggactctgttagcacagctgtttggaatttaaacttttcaagaaattctttcatccttattattcattcctgttttattcttggatatcctaagtgcatacccagactaaatgataatatcaacacttgttcagtatggttggtcatttttaaaaataaacaggcaatttatgggtgacccacacaaagaaacagctggctgccattaacttcacgccctcttccattggtng

SEQ ID NO: 5034 - DNA, 852 bp, Homo sapiens
  misc_feature 1, 5, 8, 11, 13, 552, 590, 629, 690, 703, 741, 775, 807,824, 842, 851, 852: n = A,T,C or G
nacgncantantnacgccgtatacgactactatagggcgaattggagctccaccgcggtggcggccgaggtactctatacccaggcaaaggcaagcaagcagccttgaacaagtcattcaactcattgaagctgatgtatccattgccatcagtatcaactttggcaaaagcttctctgagctccatcatttcctcatcggacactgatcctctggccattttttattgctttaggtaacagatctcagcagcacgaaaagctctgtctagatgcattctcctcactggccccaggcagatgcccccgcgtacatgttattcacttgggtctcccatgcttcaaaaacacctaacgctgttaacattgagaagaggattgagaggagcagaatacaaaggtatttattaaggtaattataatagccgtagaataacaggccagagaactgaaagtgattgaataatgagaataaaaacaaaggaagagggttgagtgtggcagtacctgcccgggcggccgctctagaactagtggatcccccgggctgcangaattcgatatcaagcttatcgatccgtcgacctcganggggggccccggtacccagcttttgttccctttagtganggttaattgcgcgcttggccgtaatcatggtcatagctggttcctgtgtgaaattggtatnccgctcacaattncacacaacataccaacccggagcataaagtgtaaaagnctggggtgcctaatgaagtgagctaactccattnattgcgtgggctactggccgctttcaatcggnaaccggcggccactgcntaatgaatcggccacccncggggggann

SEQ ID NO: 5035 - DNA, 804 bp, Homo sapiens
  misc_feature 2, 12, 13, 16, 19, 21, 22, 34, 36, 37, 39, 43, 45, 47, 49,50, 53, 64, 65, 69, 70, 78, 79, 81, 84, 85, 90, 91, 92,94, 106, 257, 390, 448, 464, 501, 515, 523, 558, 559, 568,574, 575, 577, 579, 586, 597, 602, 635, 644, 651, 661, 676: n = A,T,C or G
  misc_feature 680, 683, 685, 716, 747, 751, 769, 776, 790, 792, 794, 799: n = A,T,C or G
tngggtatactnnggnttntnnatatccgacaancnntnatcngncngnnttncgaatttgggnnttgnnaaatatgnntnttnnaattnnnanttgcaactatcnttaggcgaattggactccaccgcggtggcggccgcccgggcaggtactgtcctgtggtttcatggcctttcttccatttgtggttcttgtgaagtggaatttaaatgacatcaagatggataaaccctagtttcccagtgctggaatatanaaaatggatggacaagtaaatcccactcatcacccatagtccaggcatggggacctcaacacacctgagccccagacatcacctttcattctggacctaccatgaaaggacttcttgaatccaggaagagagnactgacttgggcaacatgtttattcaagaaaacaggacccttgcccctgttcatttangatgggaagttttcangtgggtcccaaatcaatgtgcttcaagttggtaagcncttcaaaaacttcncccagggncttcaaaggcaaaattcccttaccccatggtccanncccctttcncccagnntnanccttggnggaacttaacnaaggngtaaaagccattccgggtggaccacctttcagntggaaaatntttgggntttttttaanttttttttttggtangaangantngggggccccttcaagtaattgtttggcccancgggcttggacccctttggaaattttccctnctancttccaaagggggaattnttttccntggccccttgggcncntntcccnaaaaa

SEQ ID NO: 5036 - DNA, 566 bp, Homo sapiens
  misc_feature 410, 447, 510: n = A,T,C or G
gaattggagctccaccgcggtggcggccgggggccattgagactgccatggaagacttgaaaggtcacgtagctgagacttctggagagaccattcaaggcttctggctcttgacaaagatagaccactggaacaatgagaaggagagaattctactggtcacagacaagactctcttgatctgcaaatacgacttcatcatgctgagttgtgtgcagctgtagcggattcctctgagcgctgtctatcgcatctgcctgggcaagttcaccttccctgggatgtccctggacaagagacaaaggagaaggccttaggatctactgggggagtccggaggagcagtctcttctgtcccgctggaacccatggtccactgaaggttccttatgctactttcactgagcatnctatgaaaatacaccagtgagaaattcccttgaaaantttgcaagttgtctggggtttcatgtctaagcttggttccagctatccagaatgcccacaagnaatttcactgggatctgggaagaggaaaggaaactgaatggtggttaactgaaacc

SEQ ID NO: 5037 - DNA, 904 bp, Homo sapiens
  misc_feature 366, 370, 463, 465, 471, 473, 475, 532, 537, 555, 589, 604,636, 652, 662, 678, 695, 704, 711, 712, 759, 797, 839, 858,861, 874, 884, 888, 891, 892, 899, 900, 902: n = A,T,C or G
cgaattggagctccacccgcggtggcggccgaggtacgcggtggcagtgggaagctcgcagcagctggggaggagccaaagcctcggcgctcacctaagccgcagggagatacacccaactgggagatgaggaaacagcaacccagagaggagaactaacccacacaggatcatttcgtgaaggagcaaggctgaagaaccagacctggactttcttaggacaaacttactgcagcttgaaggagccaaccatggatttgaggcgtgtgaaggaatatttctcctggctctactatcaataccaaatcattagctgctgtgctgttttagagccctgggagcgatctatgtttaacaccatcttantaangattattgctatggtggtatacactgcctgtgtctttattccaatccacattcgcctggcttgggaatttttctcaaaaatatgtaggatatnangggtancngnagccgggccggccgctcttagaactaagtggatcccccgggctgcaggaattcgatntcaancttatcgataccgtcganctcgagggggggccccggtacccagcttttgttncctttagtgaggggntaaattgccgcgcttggccgttatcatggtcnataagctgtttcctgngtgaaattgntatccgcttacaattnccacaaacattacgagncgggagcantaaagtnntaaagcctgggggtgcctaatgagtgagcttactcactttaattgcnttgcgcttactgcccgcttttcaatcggggaaacctgngtgccagctgctttatgaatcgccaccccccgggtagaagcngtttgcgttttgggcgctnttncgctttcctggtnacatgcctcnttgngcnngacgtcnntnct

SEQ ID NO: 5038 - DNA, 956 bp, Homo sapiens
  misc_feature 2, 3, 4, 5, 6, 7, 52, 59, 392, 428, 451, 472, 481, 497, 557,582, 606, 620, 622, 649, 660, 666, 674, 679, 682, 689, 692,709, 719, 732, 733, 737, 738, 739, 742, 761, 763, 766, 775,789, 790, 796, 800, 803, 807, 814, 832, 833, 842: n = A,T,C or G
  misc_feature 850, 851, 858, 862, 870, 876, 880, 882, 885, 888, 891, 893,895, 896, 899, 903, 906, 907, 910, 911, 912, 932, 937, 941,945, 947, 949, 950, 953, 954, 955: n = A,T,C or G
tnnnnnncactactatagggcgaattggagctcccccgcggtggcggccgangtacttncctcgatctgtttctgcactggaagtgtaagttgcattttcaaaattattctctcagccctgtgacaatttaattaatttatttatttatccagtttctcaactctgtttaggtagcaatgtctcgtcaatatctcattcaggtgtagcatggaaaagcctaacaaccccgggccggcagccaagcttaccagtgactgacgctcgcttaactgagcaaagatttgctctgcacagagtggggcttgactatacaagaaccagtagtgacagcaaggatgccggctagaatcctaacaaagctacttccaacttgtgctcaggcaagtggaantgacacttaaactgaatgttaaggggcttcaatctngggtacctgcccgggcggccgcnctagaactagtgggatccccngggctgcanggaattcgatatcaancttatcgataccgtcgacctcgagggggggccccggtacccaccttttgttcccttttantgagggagtaattgcccgcttggcntaattcatggtcataagctggttncttgtgtgaaaatngnttttccgttcaacaatttccacacaancattaccgagnccgggngctttaangtgtnaangccttgnggngccttaatgaggttgangcttaacttnacattaatttggnnttgnnnctnacttgcccgtttttcaagncnggnaaaccttgncgtggcccacttcnnttaatnaatnggnccanccccccngggaagaggcggttttgnntattggggngcttttcnnatttcangatnaatggatnggttgnattntntcnttngtntntnnagncggntannccnnnttaaaggtggtaatccggtntcctngaanaggngnannccnnnc

SEQ ID NO: 5039 - DNA, 949 bp, Homo sapiens
  misc_feature 2, 3, 4, 7, 24, 26, 35, 44, 48, 49, 52, 57, 101, 110, 211,213, 221, 400, 442, 450, 451, 460, 472, 473, 476, 480, 499,500, 506, 535, 537, 561, 572, 577, 582, 583, 590, 594, 595,596, 599, 617, 618, 619, 623, 652, 654, 660, 675, 679: n = A,T,C or G
  misc_feature 682, 685, 687, 690, 694, 695, 698, 709, 713, 726, 728, 731,739, 745, 758, 762, 777, 780, 781, 800, 801, 802, 804, 808,809, 810, 811, 812, 829, 838, 841, 851, 853, 854, 855, 866,878, 882, 886, 895, 896, 897, 913, 920, 923, 924, 926: n = A,T,C or G
  misc_feature 928, 936, 939, 941, 942, 947: n = A,T,C or G
tnnnagngctacttagggcgaatngnatctccccnttgtagctncccnntgnggcgnacgaggactgatgtgctcatgggacataccagtgaagacagcanctctcccangactggggttcagcagggagggctcagacgagttcaggatgtcaaatcatcgaggtgtatctggtggtgatgggaaccagccagtgagcaggaataatcananaagagcanagggtcaaggtcagagtcctagagagctggtctgggaaggggaaactgaggaatgggcccccaggcgggaggtataggaggagccacctagagtgagaggcagattatgaaaagcatcactaggacagatcatggaattcaataagagtggttttggtggaggaatggtgcgatagctnatggcagattgtggtagggtagtgatgaaagatcatagaagnattgcacnnaggtggatnacatgccaaccnnttnaaanaccatggcttgggatctgnntgtggnggcttacaaccataatttaccactttggntnggctgacatgggaggatccgcttnagccccaccanttttntaccnnactgagnaacnnnttnaagaccccctctttaccnnnattnataaaaaaaaaattggccgggattttggngngtgctnattttgggggcccangctnccnctngnaanctgnngtngaagggatttntttntgccccataaggntnatntttcactnggccanaaattgggtgcancggnccttccaccttgggnttnntaattgataccttgttccnnnanaccnnnnnttcaaaatttccttccnccccttccncanttaaaaaaangnnnatcccccgggntttaggaatttnaatnacantttttatannnccctaataccttatangagggtnccnntncnccaatgtntgntnncttantt

SEQ ID NO: 5040 - DNA, 1066 bp, Homo sapiens
  misc_feature 5, 119, 168, 171, 211, 212, 213, 215, 219, 224, 229, 230,234, 239, 240, 251, 253, 258, 272, 282, 285, 287, 291, 293,296, 297, 298, 300, 302, 304, 305, 307, 308, 311, 312, 315,316, 320, 321, 326, 331, 352, 353, 358, 361, 362, 365: n = A,T,C or G
  misc_feature 366, 376, 378, 382, 385, 388, 395, 410, 414, 415, 417, 423,431, 432, 438, 440, 442, 459, 462, 472, 474, 492, 497, 503,504, 507, 513, 527, 528, 530, 533, 534, 541, 548, 556, 558,559, 560, 561, 567, 570, 572, 574, 576, 583, 586, 594: n = A,T,C or G
  misc_feature 602, 611, 614, 617, 618, 619, 628, 630, 634, 636, 641, 642,644, 648, 651, 652, 654, 655, 658, 661, 662, 665, 669, 670,675, 676, 680, 681, 682, 685, 688, 693, 694, 695, 696, 697,707, 711, 712, 715, 721, 729, 730, 731, 732, 737, 738: n = A,T,C or G
  misc_feature 741, 743, 747, 748, 752, 755, 758, 766, 767, 785, 788, 789,790, 791, 795, 796, 798, 809, 810, 817, 818, 823, 826, 834,843, 846, 847, 850, 852, 853, 854, 859, 865, 869, 871, 901,907, 910, 911, 921, 923, 926, 927, 928, 933, 937, 940: n = A,T,C or G
  misc_feature 942, 948, 949, 950, 960, 964, 970, 972, 978, 979, 986, 989,990, 992, 998, 1019, 1023, 1025, 1032, 1046, 1047, 1051,1053, 1060, 1061, 1065: n = A,T,C or G
tattnctactatagggcgaattggagctccccgcggtggcggcccgcccgggcaggtacgcgggggactcggggtcgcctttggagcagagaggaggcaatggccaccatggagaacanggtgatctgcgccctgttcctggtgtccatgctggccctcacaccctgnccnaggcccatacagagacgtgtacctcggccgaggtactttnnnanttangtttntttannttanttatnnttttttctttntncattntttaatttgatttntgatcttctnttncntatnanaannntnananngnngtnnttnntaannccganctacntattcttttttcatcaatgtnnttaantannttnnactatttaananatanctnatnttcaacnactttaatggttagnagtnntnagttgntaattagnnaaaggncncntagagaagcagactcangangagatttgcnancttagcctagtatttaanaaccnttagcnnctntatcantgtagctgattatnntnggnngtgtagntacttgnagtttttntnnnngtttgnatntntntnggatctntangttatttngtttttantcaagatanagnagnnngttttggtntnacgnangaggnngnatantanntnngtnacnntanattnntgacnntttnnncanatntatannnnngcagtttagntaannacntatcgngatctaannnntcctnnttnanttanntaancanctntcgtctannatattgatctatgttaantannnngatnntngttagttcatnnctctatnntatgntanttaggatnatactcgtnatnntantnnnttaantctaanaaananattatacttattgtatatttacctatcgtnttgccnccnnatattatctnanttnnntaccngtgnttnantttatnnnaatgtatacngacncataantnagttgnnttttctnttnncnacgatntactaattaatcttatatacntttnantatacantctgaattgacttnngtantntctcttnntttng

SEQ ID NO: 5041 - DNA, 939 bp, Homo sapiens
  misc_feature 2, 3, 16, 433, 439, 441, 472, 473, 485, 509, 559, 575, 584,605, 624, 651, 655, 662, 667, 686, 698, 701, 707, 713, 723,736, 755, 775, 814, 817, 845, 847, 858, 865, 868, 870, 874,878, 881, 892, 898, 904, 907, 909, 910, 911, 923, 924: n = A,T,C or G
  misc_feature 927, 928, 936: n = A,T,C or G
tnnatgcactacttanggcgaatagtatctggcgaattggagctccccgcggtggcggccgcccgggcaggtacaccctggggaagaaagtgatcctggtaattgagctcctaggcctgggagaaaaatgaggtaagctcgatctccgtaggacttatggaaggaaagacatcagagcaatctctcagacagaggggaaatgaaaacataacatgaaatgatggagggagcattggtgttagccagcaagcctggattctagtgaagcccaattcaccagccatttggtcttagtaaggccattaccgcgctctaggtttgagtctcatttgtaaaatgaagggagtggaggggcttatagagctcgaaccctctgagtctaagaggctagaaagcgtgcgatctatactccgcctaagaaaggaacatctangtatgntnaaaaacagtggagaagtatggcgtatataanntctgggctaccnaggcattcgcagcgtggaccaccnatagagacacaaatccaggcatccctttcccttggcttcaggccggaatnggggggcaatctccgnatgcatctnacccaagttcttcttccacgncaaggaccttgacaccatnttaccaacgccgggggtgggatcgaangctngaggcancccanctgggtaaagcatactttnggatcccccgcnggntccctnggccgntttaaaaacnattggatcccccnggctggagggaattcgatntcaaagcttatccataccgncaaccttgagggggggcccgttccccacttttggttccnttngaggggggttaattggccccttgggggnancctgggcatanctttttnctntngggnaaantgnttttcggttanaatttnaaaaanatntnnntcccgggagccnnaannggtaaagnccg

SEQ ID NO: 5042 - DNA, 889 bp, Homo sapiens
  misc_feature 2, 21, 26, 467, 495, 525, 534, 542, 545, 567, 608, 627, 637,652, 686, 691, 695, 702, 703, 712, 725, 745, 748, 761, 777,787, 799, 812, 817, 819, 827, 831, 863, 877: n = A,T,C or G
anacgttctcactataggttngaatnggagctccccgcggtggcggcccgaggtacttttataaatgggttgttcattttttgttttattgtttgatattttggcctccatagtaatatgtctggagcttgatctttataagtttctcctggttctgtgaaatctattatcaccaaattttcacgaaccaggcaatgacattactatttattttgtaggttgaaacattttttagcatgcaaggaacttattcagcgtgcatgcatacacatgcacaaaaacacattaaattgccggtgttcacagtgcatgtgaaggtaattgcaagaaaatatgttttaaaagcaacaatagaaagataagaaaagtacctgcccgggcggccgctctagaactaagtggatcccccgggctgcaaggaattcgatatcaagcttatcgatccgtcgacctcgaaggggggcccnggacccagcttttgttccctttagtgangggtaattgcgcgcttggcgtaatcatggncatagctgnttcctggntgnaaatgttatcgctcacattccncaccaacatacgagcccgggagccttaagtggtaaagcctngggggcctaattgagtgancctaacctanattaaatggcgttgncctcacttgcccccttttcaagtcgggaaaactntcctngccnacctggnnttaattgantcgggccaacccncccggggagaggccggtttngcngtattgggcgctntttccctttcttggtnactgactcgntttgcctcggcnttcggttggggcnaaccngnttcaactnactnaaaggggggaataacggtatccccaaaattangggataaccccggnaaaaacattttt

SEQ ID NO: 5043 - DNA, 906 bp, Homo sapiens
  misc_feature 2, 3, 6, 17, 19, 21, 27, 28, 29, 30, 36, 38, 47, 229, 303,307, 339, 416, 446, 495, 531, 559, 628, 646, 656, 661, 667,688, 697, 703, 706, 714, 732, 736, 745, 794, 811, 833, 836,837, 840, 843, 854, 857, 862, 869, 888, 905: n = A,T,C or G
tnnttnctactttggantncntgctcnnnncggagntncccgcggtngcggccgaagtaccccctccttttaggtggggtcagcagacacaggggcgccatgtggcccgagttaccaagatgaacacgagttcaacgcccacctggtttgtcgcatgtgctgtatggatgaacgggaccgggttcagaagaaaacgttcaccaagtgggtcaacaagcacttaatgaangtccgcaagcacatcaatgatctttatgaagatctgcgggatggccataacctgatctctctgtggaggtcctntcangcatcaaactgccccgggagaagggcaggatncgttttcataggctgcaaaatgtgcagattgccctggacttcctaaaagcagcgacaggtgaaactagtgaatattngcaatgatgacatcacagatggcaaccccnagttgaccctgggtctgatctggaccattattttggattttcaaatctntgacatctacattagtggaagaatcaaggggatacnttcaccaaaggaaaaactaactcctttnggaccccagaaaggtgacaagcttggtttccccaggaatcaaaatgcccccactttttccttcctgctngaagtgatggggaaaganttttcaatgnacttnatttanccgatacccgaccccattctnattgacatnggaaanggngccaaatnccaaagtaacccgagaanaatnttggaacangctttttgaaaccggcaaaaaaaactgggggtccctccccctgctggangcaaaaaaaaatggatntgccattttcaaaatgaaaaanctnnaantcnctttttgggcntcnaattnatgatgnccttccttaaattcctganggggggaaaaagggatnt

SEQ ID NO: 5044 - DNA, 937 bp, Homo sapiens
  misc_feature 3, 4, 7, 397, 403, 422, 498, 508, 525, 566, 591, 593, 607,611, 612, 613, 614, 615, 618, 623, 626, 627, 628, 630, 632,634, 637, 640, 642, 643, 644, 645, 646, 650, 651, 653, 654,655, 657, 659, 661, 662, 663, 664, 665, 667, 668, 669: n = A,T,C or G
  misc_feature 670, 671, 672, 676, 677, 679, 680, 685, 687, 688, 690, 691,692, 695, 697, 699, 700, 701, 702, 703, 704, 705, 710, 711,712, 713, 715, 716, 719, 720, 721, 725, 727, 728, 729, 730,731, 732, 733, 734, 736, 737, 738, 739, 741, 742, 743: n = A,T,C or G
  misc_feature 745, 748, 749, 751, 752, 756, 757, 758, 759, 760, 761, 762,764, 765, 766, 767, 768, 769, 771, 774, 778, 780, 782, 788,789, 790, 791, 792, 794, 795, 799, 800, 802, 804, 805, 806,807, 808, 809, 810, 812, 814, 815, 818, 819, 821, 822: n = A,T,C or G
  misc_feature 823, 824, 827, 830, 831, 833, 835, 836, 837, 838, 839, 840,841, 843, 844, 845, 846, 847, 848, 851, 852, 853, 855, 856,858, 859, 861, 863, 864, 865, 867, 868, 870, 871, 872, 873,874, 875, 877, 879, 880, 881, 882, 884, 885, 886, 889: n = A,T,C or G
  misc_feature 890, 893, 894, 895, 898, 899, 903, 904, 905, 906, 907, 908,909, 910, 911, 913, 914, 917, 919, 920, 921, 924, 927, 932,933, 934, 937: n = A,T,C or G
tgnnggnccgcgtatacgactcactatagggcgaattggagctccccgcggtgggcggcccgcccgggcaggtactgaaaatatgaaaattgcttaggccaaagaatgggcttttcaatagcacactgcaaaactgggcccaagtatttaaaacatctctaaaaaatatctaggttggcaggtttttatccctagttttaacagtctgaaagagggttcgttactgagcactggaagtgatgaagacagagtagctacaacataggggctggtaggcagcagagcctcaccaacagccttaatttgtgtggtgtcttcacagggcaaccctgggaacgatggtcccccaggtcgcgatggtcaacccggacacaagggagagcgcggttaccctganaatatnggtcccgttggtgctgcanggtgcacctgggtcctcatggccccgtgggtcctgctggcaaacatggaaaccgtggtgaaactgtaaggttttgngaataccaanccctcagtgcagcattntcgtgggcttcacttctgactttcccacacttggggatggntggaaggagtgggggaggggtattntngggccttaagtaantgannnnncanttttnatnnncnangntanttntnnnnntgtnngnnntntntnnnnntnnnnnnccanntnnttctntnngnnnttntntnnnnnnntttannnntnntgnnntctncnnnnnnnnannnnannntnttnntnntttnnnnnnntnnnnnntnttnaatngngntgtctnnnnnanncatnntntnnnnnnntntnnatnngnnnntanttnncntnnnnnnntnnnnnngtnnntnntnntntnnntnntnnnnnntntnnnntnnnatnnctnnnttnnatannnnnnnnntnnttntnnnttnttntttannnccn

SEQ ID NO: 5045 - DNA, 972 bp, Homo sapiens
  misc_feature 2, 3, 24, 438, 451, 462, 500, 572, 597, 613, 634, 651, 697,739, 767, 803, 816, 833, 838, 850, 857, 869, 882, 890, 903,905, 906, 909, 917, 930, 936, 939, 945, 950, 955, 959, 960: n = A,T,C or G
tnnaagtgctacttagggcgaatnggagctccccgcggtggcggccgcgcggagccgggatgcactgttcctgctgtgggtcctcatcatggagaccaagcgggtggagattcccggcagcgtcctggacgatctctgcagccgatttattttgcatattcccagcgaggaaagagacaatgcaatccgagtgtgttttcagattgaacttgcccattggttttacttggatttctacatgcagaacacaccaggattacctcagtgtgggataagagactttgctaaagctgtcttcagtcattgtccgtttttgctgcctcaaggtgaagatgtggaaaaagttttggatgaatggaaggaatataaaatgggagtacctgcccgggcaggccggtctagaactagtgggatccccccgggctgcaaggaattcgntatcaagcttatnggatacccggncgaccctcgaggggggggcccgggacccaactttttgntcccctttaagtgaggggttaattgccgcgcttggcggtaatcattggtcattacttggttccctgtgtganaattggtaattccgctcaccaattnccccacaacattagcnagcccggggagccataaaagngtaaaagcctggggtgnctaatggagtgagcctaactcacattaattgcgtttgcgctcactncccgcttttccaatcggggaaacctggtcgtgccaactgcanttaatgaaatcgggcaaccccgccgggnaaaaggcgggtttgggttatttggggcgcttttttncgctttccttggntaacttgactcgcttgngcttnggtccgttcggnttgcggnaagcggttttcnagctcacttaaangggggtantaccggtttttcncnnaantaggggantaacccaggtaanaacatntgnccaaanggccntaaangcannaaaccgaaaaag

SEQ ID NO: 5046 - DNA, 912 bp, Homo sapiens
  misc_feature 199, 230, 248, 317, 364, 366, 410, 466, 467, 480, 484, 494,499, 505, 525, 529, 537, 540, 555, 560, 573, 617, 623, 638,641, 657, 661, 666, 677, 684, 690, 697, 699, 707, 711, 712,718, 719, 735, 747, 764, 766, 786, 791, 795, 798, 801: n = A,T,C or G
  misc_feature 803, 805, 811, 817, 818, 823, 827, 833, 848, 856, 861, 865,871, 881, 885, 892, 896, 899, 900, 901, 911: n = A,T,C or G
cgaattggagctccccgcggtggcggcccgcccgggcaggtacttttttttttttttttttttcttatgaataagcttactttaatagatccaggggactgtttaatgcactgaagaattatttttcaggcattctgtgatgtccaaattaggttaatatacctctgagaagtgaatcagttactcctcgttggatagnaaggtcagaacaactgttcctgaaaccttantacacactagctgataanacactgttgcccataatgtctatttattggatcagcaatttataagtcccacattctcatgccacatanctctacacagctgcaaaaatataccatagcttgcaggtgatcattgngntgaggaaagatattgagtccctcatcttgtgaaagtgatctttnatataagagggagcatcaagcggggaagctcagatttcccgtggctgacacaccannaagtatttgggtnttgncattggctgnctggnagcccntggcaatggcttttcaaaanaggngctgagantgnggttaaactgggggnacctntttttcctggccnggggcaaaaaaaaaatccaatttatgtcccgacttggagtcctnggggtnttggctttcttatgnaantaattccctttggtgngccngaaanaataaattgcntggattncacctnccttccncnacattgtnattnnatttgnnaaggaaaaagattccnagccctggaatnttaaatttgaacatgantntttgtcatcctttttcccgnaactngggntgnacntnantagctntggggnnttaancccnccattncagggtgtgggcttntcctggcntgaantccnccgaangttttcccancctnttacccntttnggnnnccctctaatnt

SEQ ID NO: 5047 - DNA, 891 bp, Homo sapiens
  misc_feature 1, 2, 4, 8, 11, 12, 40, 623, 656, 666, 691, 693, 839, 840,841, 849, 853, 866, 879: n = A,T,C or G
nnanacgngannccgtatacgactcactatagggcgaatnggagctccccgcggtggcggcccgcccgggcaggtactatatccttttcctcaggtttctcttttccctgtctctatcaactctaacaaattcaattttaccctttaagtcaatgcctcaaaagttcgattctaaaatttatctatgattaaaagcaacacacctcagtctgtatgttttgtggtgtgtccacctcaaatttagcatgtcctgtaatcaaattaattcatcttaaaaaaaacttaaaaaaatttccatcttcaaataatattactattagaaattctggactccctggaatctactcacatccaagtagtcatcaagtatcactgagacactttagagcagtagtccccaacctttttggcccagggactggttctgtggaagacagtttttcaatggacagggtcaagtgggggggatggtttcagatgaaattggtccacctcagatcatcaggcattagattctcataagggaggggcacgacctaagatccctcgcatgtgcagttcacaataaggggtcatggttcctatgagaatctaatgcagccactgatcttgacagaaggcanaacaaggtgggaaatgtatgccttgcccgctgntcaccttctngttgtgggggccccggttcctacangncacggactgggtcccttgggccggtctaaaactagtggatcccccgggctgcaggaattcgatatcaagcctattggataccggcgacctcaagggggggcccggtacccaactttttgttccctttaatgaagggttaattgggnnncttggggnaaancatgggcataacnggttcccgggggnaaatggtttccc

SEQ ID NO: 5048 - DNA, 942 bp, Homo sapiens
  misc_feature 2, 5, 6, 68, 73, 74, 76, 78, 83, 92, 102, 105, 106, 107,111, 115, 116, 119, 125, 126, 129, 130, 164, 304, 429, 518,609, 624, 630, 639, 659, 664, 673, 679, 698, 704, 705, 718,720, 735, 741, 742, 747, 754, 760, 762, 776, 782, 812: n = A,T,C or G
  misc_feature 822, 838, 841, 845, 857, 859, 861, 864, 881, 882, 883, 884,886, 887, 926, 934, 935: n = A,T,C or G
tnatnncgactactatagggcgaattggagctccaccgcggtggcggccgcccgggcaggtactcggnggctnntntnactgntccgggaanaggaaaaccnggnnntgantttnnggncgaggnntannatgagaatgggggtatcaggtgcatgagccatantgggatatggccaactcgggctgcaaggacgtcacgggtccagatgaggagagttttctgtacctcggcccgctctagaactagtggatcccccgggctgcaggaattcgatatcaagcttatcgataccgtcgacctcnagggggggcccggtacccagcttttgttccctttagtgagggttaattgcgcgcttggcgtaatcatggtcatagctgtttcctgtgtgaaattgttatccgctcacaatttcacacaacatacnagcccgggagcataaagtgtaaagcctggggtgcctaatgagtgagctaactcacattaattgcgttgcgctcactgcccgctttccantcgggaaacctgtcgtgccaactgcattaatgaatcggccaacgcgcggggagaggccgtttgcgtattgggcgctctttcgctttcttgntcactgactcgcttncgcttnggtcgttcngcttgcggcgagccggtatnaactnactcaaaangcggtnataccggttattccacaanaatcanngggattacgcaangnaaaaaacattgtganccaaanngccanccaaaanggccangnaacccgtaaaaaanggcccntttgttggcgttttttcaataaggctccgnccccttgacnagcattacaaaaattnacncttnaagtcaaaaggngncnaancccccagggcttttaannnncnnggcgtttcccctggaaacttcctctgcctttctttttcnaccttgcnnttacccg

SEQ ID NO: 5049 - DNA, 879 bp, Homo sapiens
  misc_feature 2, 3, 4, 10, 26, 28, 425, 447, 454, 468, 470, 492, 498, 518,524, 534, 546, 549, 558, 569, 574, 576, 579, 585, 615, 621,623, 642, 649, 656, 658, 668, 669, 670, 672, 674, 679, 680,683, 687, 690, 699, 701, 702, 706, 708, 714, 717: n = A,T,C or G
  misc_feature 724, 725, 732, 738, 748, 752, 754, 755, 757, 761, 764, 770,773, 774, 776, 777, 778, 787, 796, 802, 803, 804, 809, 810,818, 819, 822, 824, 825, 838, 839, 840, 844, 848, 852, 853,856, 858, 864, 865, 872, 873, 878: n = A,T,C or G
tnnntatgtnctacttatggcgaatngnagctccccgcggtggcggcccgaggtacactctgtgatgttcatacggcaaaatctcctgacacatttctcagaacgtatcctcgttgataagtgatgcgtaactgtattcctgaacggaatggtaaggaggccaggttaatctttcagaagtgaagaagtggagaggagatgaaatccctggacttaatatggacaagagctgtgggatagatagctgagtagtgaggaggtgacttggctcaagggcccccaaacagaccagggtggaggtggccgaaaactgtgacagggcaggtgcagagcctaaagtggggcgctcacccttattgtggaatatttgctggtacctgcccgggcggccgcccgggcaggtactttttttttttttttttttnggagatgtgccctttctccttncaccaangatccctatcactngntttgggcaaatcttgagtttancctagngagaagtcaaacccccaatngtttcnacctaaaccnagtttggagtgnccnctggaaggnctaaccctccnccctntnttnctcttntgacattgaccttttggggggcaattgacnctcatnangggactttttgggttcaangacaagngaccctnanaaactccggnnntnanagaannggntaancgnttgactttngnnggtngncatttnggnaaccttnngggcttnaaagancaaaacaccngctntnnancccnttnaattanttnncnnnccccggggnaaagggggntacgannnttggnnattttccnnttncnngacaattttttgnnngccngggntttnnggncnaaaatnnagaaaannttttnt

SEQ ID NO: 5050 - DNA, 919 bp, Homo sapiens
  misc_feature 2, 3, 4, 696, 699, 702, 711, 736, 738, 745, 752, 755, 779,790, 800, 801, 802, 836, 847, 850, 854, 869, 874, 883, 884,898, 901, 913, 915: n = A,T,C or G
tnnncgcgactactatagggcgaattggagctccccgcggtggcggcccgctctccactgcattttcaatctctagcaaagtctcatggggtaacaaagagacagtaatataataaaagagtctttcactgactgcctgggaacaagcacaacctgcatggccatcaaaaacccccaaaagcatccctctggtctgcaagcaggttgctgcacttctccggtcctcaatgggtgcatttgcaggcagctgattgctgtcaaatccaaggatagaactgacatttttgtcgtcaaattctggcactttgaaactgtattcattagctttaaggatgctattgacttgtggaggtgtgaggtaaaatttctgtggtgtggaagcatatctccttccttgggtgtacctcggccgctctagaactagtggatcccccgggctgcaggaattcgatatcaagcttatcgataccgtcgacctcgagggggggcccggtacccagcttttgttccctttagtgagggttaattgcgcgcttggcgtaatcatggtcatagctgtttcctgtgtgaaattgttatccgctcacaattccacacaacataccaaccgggagcataaaagtgtaaaagcctggggtgcctaatgagtgagctaactcacattaattgcgttgcgcttactggcccgcttttcantcnggnaacctgtcntgccaacctggattaatgaatcggncnacccccngggagangcngtttgcgtatttgggcgctttttncgctttcttgnttactgactnnntgggctcggtcgttcgggtgcggggagcggtttnaacttactcancgncggnatccggtttccccanaatanggggatacnnaggaaaaaaaaagnganccaaagcccccnanggct

SEQ ID NO: 5051 - DNA, 921 bp, Homo sapiens
  misc_feature 2, 451, 540, 556, 566, 589, 593, 596, 602, 605, 621, 681,689, 703, 705, 716, 722, 729, 745, 760, 764, 771, 785, 823,837, 844, 845, 861, 877, 882, 883, 890, 891, 903, 912, 916: n = A,T,C or G
tntacgcactactatagggcgaattggagctccccgcggtggcggccgaggtaccagcactgcaggactgggcagacagacggtggctgctgctgccgccaccaccacctcaacagcaacagcagcagcagcagcatctgagaagcaagtgcgaacacaacctgtgctgaatgatctgatgccagacatcgcggtgggtgtgtccacactgtcactcaaggacaggaggcttccagagcttgctgtagacacagaattaagccagtcagtttctgaagcaggaccagggcctccccagcatctgtcgtgtattccacagagacatacacacacttctcggaaaaaacacacactagagcaaaaaacagacaccagagaaaatccacaggaatatccggatttctatgacttctcaaatgctgcttgcaaacctttctactcctggtcttancaagacgcacccctttcccttcgcaagggtgggatattttgggtccccgatctgtaccttgcccggccgggccgcttctagaactagtnggattcccccgggctngaaggaattncgatttcaaagcttattcgatanccgntcnaccttngangggggggccccggttncccaacttttggttccctttaagtgaagggttaaattggcgccccttggcgttatcaatnggtcatangcttttttccttgngngaaaattggtnattccncttcacnaatttccaaacaaaantacgaagcccgggangcantaaagtntaaaagcctggggnggcctaatgaggggagctacctccaattaattgggttnggcttcactgcccnttttcanntcgggaaaccttgttnggcccacttgaattantaaannggccaannccccgggggaanggggttttngttnttggg

SEQ ID NO: 5052 - DNA, 906 bp, Homo sapiens
  misc_feature 2, 67, 94, 141, 180, 209, 250, 375, 380, 396, 403, 443, 466,518, 553, 560, 573, 578, 579, 589, 590, 600, 606, 617, 637,642, 674, 675, 680, 685, 686, 689, 699, 701, 704, 725, 726,736, 743, 745, 761, 762, 768, 786, 792, 800, 810: n = A,T,C or G
  misc_feature 816, 819, 822, 836, 843, 853, 861, 874, 884, 891, 893, 894: n = A,T,C or G
tnaacgtgactactatagggcgaattggagctccccgcggtggcggcccgcccgggcaggtacttgnactttttttttttttttttttttgtcncctccattgttttattattttaagcagcagagagatctgcctactgnagtatgttcgttacagcttatatggtagaggggacacancccagatcaggcaaacccaagatgaggcnatgttgtaaaaatactctgaggaatcccacagaaatctaanagcaggaactacagcacagctgggcttcctggtacctcggccgctctagaactagtggatcccccgggctgcaggaattcgatatcaagcttatcgataccgtcgacctcgagggggggcccggncccancttttgttccctttantgagggntaattgcgcgcttgggcgtaatcatgggcatagctgtttnctgtgtgaaattggtatccgctnacaattttcacacaacatacgaaccgggagcataaagtgtaaaacctggggngcctaatgagtgagctaactcacattaattggctntgcgctnactgccccttttncagtnnggaaacctgnngtgccagctnttttantgaaatcggcncaaccccccgggaaaaggcngtttnggtttttgggcccctttttccctttcctctcnnaactnacttnnatnggcctcggtngntcnggttttggggaaacgggtttnntcttaacttnaaaaggngnttatacggttttttcnnccaaantaaggggggataaccccnggaaanaaaatttntaaccaaaanggccgnccnaangggccgggaacccntaaaaanggccgggttngtgggggntttccaaatggtncccgcccccnttaaaangnnttacaaaaattt

SEQ ID NO: 5053 - DNA, 956 bp, Homo sapiens
  misc_feature 12, 23, 39, 109, 536, 550, 552, 581, 674, 681, 709, 725,754, 765, 792, 798, 805, 840, 843, 852, 853, 856, 857, 889,890, 898, 902, 907, 919, 921, 922, 932, 938, 955: n = A,T,C or G
gtttacgcccantttctactatncggcgaattggatttnaccgcggtggcggcccgggggccattgagactgccatggaagacttgaaaggtcacgtagctgagacttntggagagaccattcaaggcttctggctcttgacaaagagacaaggagaaggccttaggatctactgggggagtccggaggagcagtctcttctgtcccgctggaacccatggtccactgaagttccttatgctactttcactgagcatcctatgaaatacaccagtgagaaattccttgaaatttgcaaggtaggaggcatcttgggtattactctcagattagctttgttgctggagctatgtgcttctagggacgtgtacctcggccgctctagaactagtggatcccccgggctgcaggaattcgatatcaagcttatcgataccgtcgacctcgagggggggcccggtacccagcttttgttccctttagtgaggggttaattgcgcgccttggccgtaatcatggtcataactggtttctgngtgaaattgttatncngttcacaattccacacaacataccaaccnggagccataaagtggtaaaagcctggggtgcctaatgaagtgagcctaactcacatttaaattgcgttgcgcttcactggcccgcttttccantctgggnaaaacctgtcgtgcccagcttcattaantgaaatcgggccaacncccccggggaaaaggccggttttccgtanttggggcgctntttccccttccttggttaaatgaactncttggnctcgggncgtttcgggttggggggagccgggtttaacttacntcnaaagggggnnaanncgggtttttcccagaaatcagggggttacccnnggaaaaanattntgggnccaaaaggcccncnnaaggccccgnaccctnaaaaaggcgcggttgtnt

SEQ ID NO: 5054 - DNA, 916 bp, Homo sapiens
  misc_feature 2, 6, 146, 322, 332, 406, 422, 425, 444, 454, 464, 507, 520,521, 545, 621, 627, 683, 709, 720, 726, 730, 737, 747, 751,755, 756, 757, 758, 762, 764, 765, 819, 820, 829, 838, 849,852, 854, 855, 861, 863, 887, 901, 910: n = A,T,C or G
tnatancgctccgtttcgactcactatagggcgaattggagctccccgcggtggcggcccgaggtactgctccctgcacgatccagtcagcccctgcccggctggttatgtaacaaacaagtctgtgtctgtgtggagtgttgcangacgagtggaaatgactgtttccaagttcatggcaattcagaaggcccttcatccagactggttccagtgcctctccgatggagaagtatcttgtaaggaagcaacttccataaaaagggtcagaaagtctgttgaccgatcacttcttttcttggataactgtctgcggctgcangaagagtcanaggttcttcaaaaagagtgtgatcattggagtgattgaaggtggagatgtgatggaagagaggcttgaggtcancacgaaaagacaaccnaancggcctgtgggtggctttncttttggatnggtttcaaangaaatccaacaaccctggaggctagactacgcttgctgtcatnaagtcacctgcannactgcccggaaggacaagcccaangctcatatcttggtgttaagtccggccaaaatgaaggtgctccgagttgtatttgaaaagaagaattgggacttantttganaagtttttttcctttttcaagtaacaaaaacgggggatgtgccccttgactttcantttttgattaccaacccgaatccttnagaagacactncttccnccanaattggnaccccttggngggntatnnnntttntnntgttccttggccgggccggccggttttaaaaactttttgattccccccggcctnnagggatttnatattcaancttattcgatnccntnnaccttnanggggggccccggccccactttttnttccctttaatgangggttattngcccct

SEQ ID NO: 5055 - DNA, 921 bp, Homo sapiens
  misc_feature 2, 6, 11, 15, 636, 661, 691, 727, 737, 770, 795, 814, 815,820, 828, 837, 839, 861, 874, 877, 881, 887, 901, 906, 921: n = A,T,C or G
tnatanggacncgcntatacgactcactatagggcgaattggagctccccgcggtggcggcccgaggtaccagcaaatccaaaacaatggaatttaataaaaagttcttcaaactattaaagtaacttaaaacctcttttaaaattgaaattttagttttatttaaatctacttcttagagcaccttttagctgcattttccccctacctcagtgcgtgaatgcaatatatcattcttggtatgtttttccgatcatagacatctgttgtttctggataaaatatctggaaaacaaaagaaacaatatttattatatgttttgcttctcacaagtattttaacttcccaaaatgaccctattttgattgtccttgctatcctataattatttaaatatagaggaacctctctgccattgcttcatcttgctgtagagatagaccaatcaccatatctggacccctgcctgacagcatgcctcttagtggtccacaggaggatggtggggtccccagccagctactccaaggaggctgtgtccacagtgctagtggcagtgtttcatttcataggggcatatgagcacatgtgggctctgccttctgtagccttcacactcctgtgacttcccagangtcccatgggcctgagaagggtgtncttggtattaaccactttattgcattggtnaaaacttggcatatggtgctctgtacctgcccggcnggccgtctanaactagtggatcccccgggctgcaaggaattcnatttcaagcttatcgataccgtccnccctgaagggggggcccgnnccccncttttgtncccttaatnangggtaattgcgcccctgggggnaacatgggcatanctngttnccgggngaaaatggttttcngtcanaattccccacaactn

SEQ ID NO: 5056 - DNA, 902 bp, Homo sapiens
  misc_feature 2, 6, 65, 68, 240, 271, 311, 339, 364, 395, 468, 500, 549,554, 578, 584, 653, 696, 735, 751, 761, 769, 783, 786, 808,809, 838, 864, 875, 900, 901: n = A,T,C or G
tnatangcgactcactatatgcgactcactatacggcgaattggagctccacccgcggtgggcgngcncgaagtaccctcaggcctggtgaggaggtccttgggaagaacctaataagcaaggccaaaggccatggtggctgaggaatggcctgcagggggatggggagtgggcacatgtggcaaatgaggtctgggttaagaccagactgggaagggatttatttgtcataccatggantcagactttatcttaaaggtaacagggtttnttaatcttggaatttcaaatgacctgtgactccccacatntgcaaacttctccccacacacaaatgcngatggtttcagtatgtgtgcttctntgggaagaaggtccacagctgtcactgagtnctcaattcttaacccaatacctgtcaagaaccattgccaccgcaggtttcaagaaggatgaactaatgctccntgcaccttggctcagcagcactcacatcccangaccatgatctgcacacctggccctttatggagcagttctaccttaganaacangtgaagccacatgcccccacgcancccttnaaacccgacggacagggaggtctcaaacctctcttgttcattgattggtcacccccacttactggccancttccatttgcaaggttgggtacctggccgggccggccggttntagaactaatggggatccccccggcctgcaggaatttcnatatcaagctttatcnattacccgtngaacctcnaaaggggggccccngtncccaactttttgttccctttanngaggggttaattgcgccccttggcgttantcattggaccttagctgtttcctgtntgaaattgttnttccgttaccaattcaaacaaaatnnt

SEQ ID NO: 5057 - DNA, 895 bp, Homo sapiens
  misc_feature 550, 601, 645, 685, 688, 699, 716, 728, 729, 736, 737, 740,742, 759, 761, 766, 767, 782, 796, 800, 803, 812, 819, 820,827, 830, 831, 834, 835, 844, 845, 856, 859, 860, 866, 867,868, 869, 871, 872, 874, 877, 882, 884, 888, 889, 891: n = A,T,C or G
gccgccgtatacgactcactatagggcgaattggagctcccccgcggtggcggcccgggggccattgagactgccatggaagacttgaaaggtcacgtagctgagacttctggagagaccattcaaggcttctggctcttgacaaagatagaccactggaacaatgagaaggagagaattctactggtcacagacaagactctcttgatctgcaaatacgacttcatcatgctgagttgtgtgcagctgcagcggattcctctgagcgctgtctatcgcatctgcctgggcaagttcaccttccctgggatgtccctggacaagagacaaggagaaggccttaggatctactgggggagtccggaggagcagtctcttctgtcccgctggaacccatggtccactgaagttccttatgctactttcactgagcatcctatgaaatacaccagtgagaaattccttgaaatttgcaagttgtctgggttcatgtctaagcttgttccagctatccagaatgcccacaagaattcaactggatctggaagangaaggaaactgatggtgttaactgaacccattttgattgagacctacacanggcttgatgtcattcattggaaacccgaacaaacttggctattncctttgccgtgggagtattgggtttttgagaagctttttnggnccctcggccgntctaaaactagtggatnccccgggcttgnnggaattnnatntnaagcttattgatcccgncnacctnnagggggggcccggtnccacttttggtccnttanggngggtaatgncccttgnngaatcanggnntanngtttccggnngaaatgtttcnttnnaattcnnnnanntncanccggncntaanngnaaac

SEQ ID NO: 5058 - DNA, 895 bp, Homo sapiens
  misc_feature 4, 5, 6, 578, 617, 654, 684, 714, 755, 783, 793, 797, 813,816, 835, 836, 837, 855, 862, 883, 889: n = A,T,C or G
gggnnncgtatcgactcactatagggcgaattggagctccccgcggtggcggcccgggggccattgagactgccatggaagacttgaaaggtcacgtagctgagacttctggagagaccattcaaggcttctggctcttgacaaagatagaccactggaacaatgagaaggagagaattctactggtcacagacaagactctcttgatctgcaaatacgacttcatcatgctgagttgtgtgcagctgcagcggattcctctgagcgctgtctatcgcatctgcctgggcaagttcaccttccctgggatgtccctggacaattgtctgggttcatgtctaagcttgttccagctatccagaatgcccacaagaattcaactggatctggaagaggaaagaaactgatggtgttaactgaacccattttgattgagacctacacagggctgatgtcattcattggaaaccgcaacaaacttggctattcccttgcccgtgggagtattggtttttgagagtctttttggtacctgcccgggcggccgctctagaactagtggatcccccgggctgcangaattcgatatcaagcttatcgataccgtcgacctcganggggggcccggtcccaacttttgttccctttaatgangggtaaatgcccgcttggcgtaatcatggncatagctggttcctgggtgaaaatggtatnccgttcacaattcacacaacataccaacccggagcataaangtaaagcccggggggcctaatgagtganctaactacantaantgggttggctccctgnccntttcaatcgggaaaactgnnngccactggattaagaatnggccacncccgggagaggcggttgggtnttggcnccttcc

SEQ ID NO: 5059 - DNA, 927 bp, Homo sapiens
  misc_feature 2, 8, 466, 648, 654, 679, 691, 704, 720, 728, 736, 760, 786,814, 815, 826, 827, 834, 845, 856, 869, 871, 882, 885, 888,893, 905, 906, 908, 909, 912, 926: n = A,T,C or G
tnatatcnctactatagggcgaattggagctccccgcggtggcggccgaggtacgcgggggggcattcctgaagctgacagtattcgggcccgagatgtctcgctccgtggccttagctgtgctcgcgctactctctctttctggcctggaggctatccagcgtactgagaccacagcttttggcctcccttccagctctgcagctaatgaggtcctgccacaacggaaagagggagttaataaagccattggagcatcccgaaaaaaaaaaaaaaaaaaaaagtacctgcccgggcggccgctctagaactagtggatcccccgggctgcaggaattcgatatcaagcttatcgataccgtcgacctcgagggggggcccggtacccagcttttgttccctttagtgagggttaattgcgcgcttggcgtaatcatggtcatagctgtttcctgtgtgaaattgntatccgctcacaattcacacaacatacgagccgggagcataaaagtgtaaagcctggggtgcctaatgagtgagctaactcacattaattgcgttgcgctcactgcccctttccagtcgggaaaacctgtcgtgcccagctgcattaatgaatcggcccaccccccggggagaggcgggttnccgtanttgggcgctttttccgctttcttgnttaactgacttngttgggctcgggncgttcggcttgggggngagcgggnttaaactnaactcaaaaggcgggaataccggntattcccaaaaaatcagggggtaacncagggaaaaacatttgagccaaaaggcnncaaaaagggcnnggacccnaaaaagggcgngtgggtggcgnttttcataaggtncnccccctgacanggntanaaaantgaccttaaatnnannggngaaaaccacaaggnt

SEQ ID NO: 5060 - DNA, 911 bp, Homo sapiens
  misc_feature 3, 566, 672, 684, 702, 714, 746, 751, 763, 783, 815, 818,894, 911: n = A,T,C or G
cgncgcgcgtatacgactcactatagggcgaattgggagctccccgcggtgggcggcccgaggacagcccacggaactgtgagccaattcaatcccttttcttcttcaattacccactctcatgtatatctttatagcagtgtgagaacagattaatacactcctcctcagaaagcattcaatttagctgtgtctaaagtatgccaggtgtcctagggtgttatcttagccaataattcttcctcttcagcaagatctatttgcctatgacagcttgacctacagttcctaccacacttgtcagtaacaagtagcccataacatctgaagggacttcattgaaatcacagaggttctttagttctttacctcattagtaggcattagggaagcacatcaactttctaatttaataaggtgcctgttgctttgaaaaactgctcaaaaaaagataggagaggcttacttaaagatatcactataggcgtggcatgctgcttcacacctgtaatcctagtacctgcccgggcggccgctctagaactagtggatcccccgggctgcangaattcgatatcaagcttatcgataccgtcgacctcgagggggggcccggtcccagcttttggtccctttagtgagggttaattgcgcgcttggcgtaatcatggncatagctggttnctgtgtgaaaatggtatncggtcacaattncacacaacataccagccgggagccttaaaggnaaagnctggggtgcctnatggagtgagctacctacantaattgcgtgggctactggccccttttcagcnggnaaaccgtcgggccactgcattaatgaatcggcccacccccggggaaaggcgggttgggtattgggcgctttttcgnttcttggttaatgaatn

SEQ ID NO: 5061 - DNA, 936 bp, Homo sapiens
  misc_feature 5, 7, 9, 588, 594, 650, 669, 680, 720, 755, 785, 823, 832,833, 865, 900, 925, 933: n = A,T,C or G
tacgngncncgtaatacgactactatagggcgaattggagctccacccgcggtggcggcccgaggtaccttgcacatctctgcctgcgctgctcacccactgtcaagaaagaaaggtggagcctggtgctctccctaagcactgtgggcctcacagttcgggcgggagcccccagcacctggctcttcctgcatggaaagcttggtttcactcttcagaggtggtggcaacatccccagaaaaccggtaggcgtgggcacagtgactggaggccgagggctcctcgccatagcagaagcacggccgctctagaactagtggatcccccgggctgcaggaattcgatatcaagcttatcgataccgtcgacctcgagggggggcccggtacccagcttttgttccctttagtgagggttaattgcgcgcttggcgtaatcatggtcatagctgtttcctgtgtgaaattgttatccgctcacaattccacacaacatacgaacccgggagcataaagtgtaaaagcctggggtgcctaatgaagtgagctaactcacattaattgcgtttgcgctcactgcccgctttncaatcnggaaaccttgtcgtgccaactgcattaatgaatcggccaacccccggggagaggcngtttgcgtattgggcgctntttcgcttctngctcactgactcgcttgcgctcggtcgttccggttcgggnaagcggtatcaacctcactcaaaggcggtaatacnggtattcacaaaaatcaggggataacccanggaaaaaacatgttagccaaaaggccaccaaaagggcnaggaacccnnaaaaaggccccgttgttggcgtttttccatangctccccccccttgacaacattacaaaaattgacnctcaaatcaaaggtggcgaaacccnccgggctntaa

SEQ ID NO: 5062 - DNA, 905 bp, Homo sapiens
  misc_feature 2, 3, 6, 8, 9, 544, 565, 597, 612, 625, 681, 688, 739, 742,757, 801, 825, 831, 835, 854, 862, 871, 879, 889: n = A,T,C or G
tnnatngnngtcgtatcgactcactatagggcgaattggagctccccgcggtggcggcccgaggtacgcggggtcccagtgagataagccagttacctcagttggaaatgcagaaatcacccatcttctacatcgatcttgctgggagctgcagaccagagctgctcctatttggctatcttggaagcaacctcaggtatttctttattagcagtgtgagaacagactaatacagattactaaatccagaatccagagaacacaagattataagttccttgcgcttgagcatgttcagtgagagcgctgcagggagaaggatgatgcattctgagagccaacagggctggactggaaactggaggaagagaaagagctaaggaaggagaggagcaaattgggggttgacatggctgcacatggcataccatcctgggtccagtctaactcccagtggtccttacacagatggaacccttgtctaatgccatttggaagaccctactactagtttcattatgggaccagggttggagaggctcanaattcatgggcagcaggcctncaccattttcagatttaatctgaatatattgncctggtgtgccagantgactggttcttnctctctggcctcattaaacccctacagataaggcttgggaaggattgggaattaangctttangggtgatcatgttggggaactggatctctactaacatcaatgctgcttttnctnaatgcccaaaaatancctctggctacccttttatttggatctggtgactcaggtaacangtcctggccggcgggccgttttanaatagnggancccggctgaggaattcatntcaagctnttataccgncaacctgnggggggcccntcccacttttttcctt

SEQ ID NO: 5063 - DNA, 868 bp, Homo sapiens
  misc_feature 433, 472, 498, 499, 501, 505, 512, 532, 551, 552, 579, 586,598, 600, 634, 645, 646, 650, 653, 666, 672, 677, 679, 697,699, 713, 720, 725, 733, 735, 736, 741, 750, 758, 760, 774,781, 783, 785, 793, 804, 816, 826, 827, 828, 829, 832: n = A,T,C or G
  misc_feature 834, 840, 841, 845, 847, 848, 849, 851, 857, 868: n = A,T,C or G
cgactactatagggcgaattggagctccccgcggtggcggccgcacaaaaaccaatctacctgatgaaaactccgttcccttctcgccagaaacataaaatgcgatggagctacggccaccgctgccgagacaaaatggcgccccccgcgtacctcggccgccgggcaggtacttttttttttttttttttttaatctttcaatcttttatttaaatgccatgatccaggatggattttagatcttgttgaaagcagccacatccatggactgcacatagtcctcaaaagcagtgatctgctcctccagcatatctgttccaactttatcatcttcaactacacactgtatttgaagtttcttaattccgtatcccactggaactagtttagatgaagccccaagactaagccgtctggcttgaatggctttnttgacgccacttctttaaattttcgccattttttggctnaataattcccaagggtttcacatttnngntaanaatgggnaagaacttgggccaacaagntggccaggtttttttgggnnttttttggaatccatattgggggcaanaacgttnttttcctttaancntttttgctttttaaattttcctcccaattaatanaaacccaaaanngggnaangggaataaaaaanttttcnttttngnaaggtcccaatttccggnanggggtttcacaatnggggggngcccntttttggncnnaaagntttttttcnttctgggngnggggggctttttcnttttggnananaattgggnggggatttccnaccttggggttntaccaaaatnnnnaangngggtgnntttngnnncnttttanaaattgggccn

SEQ ID NO: 5064 - DNA, 901 bp, Homo sapiens
  misc_feature 1, 2, 3, 4, 554, 615, 652, 658, 711, 738, 741, 742, 753,756, 764, 765, 775, 776, 783, 787, 797, 802, 833, 858, 859,869, 879, 900: n = A,T,C or G
nnnncgcgactactatagggcgaattggagctccacccgcggtggcggccgggggccattgagactgccatggaagacttgaaaggtcacgtagctgagacttctggagagaccattcaaggcttctggctcttgacaaagagacaaggagaaggccttaggatctactgggggagtccggaggagcagtctcttctgtcccgctggaacccatggtccactgaagttccttatgctactttcactgagcatcctatgaaatacaccagtgagaaattccttgaaatttgcaaggtaggaggcatcttgggtattactctcagattagctttgttgctggagctatgtgcttctagggacgtgtacctcggccgctctagaactagtggatcccccgggctgcaggaattcgatatcaagcttatcgataccgtcgacctcgagggggggcccggtacccagcttttgttccctttagtgagggttaattgcgcgcttggcgtaatcatggtcatagctgtttcctgtgtgaaattgttatccgctcacaattncacacaacatacgagccgggagcataaagtgtaaagcctggggtgcctaatgagtgagctnactcacattaattgcgttgcgctcactgcccgctttncagtcnggaaacctgtcgtgccactgcattaatgaatcggccaacccccgggagaggcngtttgcgtattgggcgcttttcccttnctnnttactgactcnttngctcggcnntcggctgcgnnagcggtntaantcactcaaangcggnattcggttttcccaaaatcaggggatacccnggaaaaaaattttaccaaaaggccnnaaaggcccgnaccctaaaangcccgtttcttgcgtttttcnt

SEQ ID NO: 5065 - DNA, 925 bp, Homo sapiens
  misc_feature 1, 2, 8, 14, 15, 681, 684, 693, 707, 711, 724, 732, 760,766, 796, 802, 806, 811, 815, 857, 879, 889, 907, 908, 909,910, 915, 925: n = A,T,C or G
nntgactnctatanntctcactatagggcgaattggagctccccgcggtggcggcccgcccgggcaggtacaagaacctgaggacatatggaagggatcccttctacacctccactataagatcacatataccctttctctcagattctcagatgtcatcttagagaagaacgggagacggagaagggaaatacaagatggggacagttacttaaaagaggatgtaactgcatttttggatttagctcccacatctaaagaactgggaagtcatgattactgtcctacaacaacaacagcaacaaagctgaacaaacgaaaaatcaatgaattttcttggatccatgagaggactgacatcacaggaaaacatagtcaaggtctacttatgtgaagcacaagttactggagccagaagctgacgggaatacttaaatggtaatttttaaatgctgctggaaactgaggtgggttagcttgcaagtgagaaactcctggggtcgagagtcttcggggcacccgagaggttcatgaattttacaaagagggaccagattatgactgaaaacagccaaaaaaaaaaaaaaaaaaaaagtcctcgccgctctagaactagtggatcccccgggctgcaggaattcgatatcaagcttatcgatcccgtccacctcgagggggggnccngtaccaacntttggtccctttantganggttaattgcgcncttggcgnaatcatggcatagcttgtttcctggggngaaatngttttccgttccaattccccacaacattcnaagccngganccatnaaantgtaaagcctggggggccctaatgagtgggcttacctcacantaaattgcgttgggcctcactngcccgttttncaattcgggaaacccttnnnngcccnctgctttatn

SEQ ID NO: 5066 - DNA, 884 bp, Homo sapiens
  misc_feature 2, 5, 596, 682, 701, 733, 750, 760, 762, 782, 821, 822, 829,830, 844, 845, 850, 865, 866, 868, 875: n = A,T,C or G
angcnactactatagggcgaattggagctccccgcggtggcggcccgaggtaccaatgcacacttttccttccaatgttgtttcccccacaggtaatcctggccgtctttcctggggccactgacaccgagggtggctgagtcagcacataggaggtcacagagactgtgcagtgagagaggaggccgaggaggagaacggtccaggccatggctgaggcaccaccagtgctgcttccttaggcccagactccccgtacctgaaggttcacagcacacttgtggatcatattataataatcccagattgccagggaatctaaggtcaagataggctgagtaactcactcaggtaatacaacttgtaaatggtcattctagaatgagaatacaaatctgtgtgactcaaaacttctctcttttcactgtgtcttgctcacctcattaaagaaattgctagttaaattatgaggatgaggaggtcattttacataagggaaagatacaagtaaaagtaaagtgtgggaaagtgaaaggcaccatggaggagataggcaaagtgcctattgataatgggcaatgcttactacataccangctctgctgtgagcactaagcctgtgtgaactcatggaatcctgtaaataaccccatggtaaaaacttctattgccctcatttgcnggaagaagaaacccgaganccaaaaagataaattacttggcccaaaattgncttgggtaccttgcccnggccggccgntntaaaactagtggatcccccnggcttggaggaatttgatattaaacttattgatcccggnnacccttnnggggggggcccggnncccanttttgttccctttanngngggtaanttgccccct

SEQ ID NO: 5067 - DNA, 868 bp, Homo sapiens
  misc_feature 579, 622, 636, 647, 675, 694, 736, 743, 748, 789, 792, 800,802, 824, 825, 833, 835, 840, 845, 849, 862: n = A,T,C or G
acgcactactatagggcgaattggagctccccgcggtggcggccgggggccattgagactgccatggaagacttgaaaggtcacgtagctgagacttctggagagaccattcaaggcttctggctcttgacaaaggtagaccactggaacaatgagaaggagagaattctactggtcacagacaagactctcttgatctgcaaatacgacttcatcatgctgagttgtgtgcagctgcagcggattcctctgagcactgtctatcgcatctgcctgggcaagttcaccttccctgggatgtccctggacaagagacaaggagaaggccttaggatctactgggggagtccggaggagcagtctcttctgtcccgctggaacccatggtccactgaagttccttatgctactttcactgagcatcctatgaaatacaccagtgagaaattccttgaaatttgcaagttgtctgggttcatgtctaagcttgttccagctatccagaatgcccacaagaattcaactggatctggaagaggaaagaaactgatggtgttaactgaacccattttgattganacctaccagggctgatgtcattcattggaaaccccaacaaacntggctattcccttncccctgggagntttggtttttgagagtctttttgggacnttggccctttaaaattagnggaacccccgggcttcaggaatttgatttcaaactttttggntccctcnacttngagggggggccccggtacccacttttgttccctttagtganggntaattggncncctggcgtaaacaatggaaaanntgttcctntngaaantggtnttcncttcaaattctcnaacttt

SEQ ID NO: 5068 - DNA, 885 bp, Homo sapiens
  misc_feature 22, 47, 571, 626, 629, 641, 703, 708, 710, 722, 728, 733,782, 795, 815, 824, 831, 833, 841, 868, 879: n = A,T,C or G
acgcactactatagggcgaatnggagctccaccgcggtggcggccgnccgggcaggtaccgctaaagcaaaaaaagaaaactctctaacagcaggacctctgatctggaggcatattgaccataaatttacgccaccccatgagagctcaaaggctgtgctgttctcgtcctctctcagtccccatttccaggtgatcaagcttgggcttagggtagtggcagtgtggctttagctgtcagccatcaccatggaagagcaggaggtttaggggccttcataacctttcaagtgttggtttccgttggaaagtagttgaatatctccaccccacccatgcccctgagagaaagcccgggaagaggggccaccatcgggggctcagcacctgcaagcccaatgctgacatgaaggcttcgcttcattccattcggccacgagagctatactcgcttcctagggctcccctagccacgcgggtacctcggccgctctagaactagtggatcccccgggctgcaagaattcgatatcaagcttatcgatacccgtccacctcgagggggggcccngtcccaacttttggtccctttagtgaggggtaattgcgcccttggcgtaatcatnggncatagctggttncttgtggtgaaaattggtattccgcttacaaattcacacaacattaccagcccgggagcatnaagtntnaaagcctggggnggcctnatggngtgagctaactcacattaattgcgttgcgctcactggcccttttcagtngggaaaacctgtntgccacttgattaatgaatnggccacccnccggggnanggggttgngtattggggcgctttttccttttttgntaattgaatcnttggct

SEQ ID NO: 5069 - DNA, 908 bp, Homo sapiens
  misc_feature 4, 5, 6, 7, 8, 9, 10, 11, 528, 620, 628, 640, 669, 672, 677,687, 727, 748, 765, 768, 777, 792, 804, 821, 842, 843, 855,862, 874, 875, 888, 896: n = A,T,C or G
gtgnnnnnnnncgcgcgtaatacgactcactatagggcgaattggagctccccgcggtggcggccgaggtactttttttttttttttttttttttgggttacaaactcaaggctggggaaaaaagcagtccagtattaaattggttaaaaagaaaaccactatggcaccaaaaaattcaaataacacaccacgagaaggtctgaaatgtgcctatacctaactctgtcgctcttcagctaaaatgaacacataactacttaacacaaggttaattctctccacaaatgagggcactgtccatgaaattcttataaggtttcttgagttaaaaggtagtctccttaaattcaaatacttctatgacacattaagcagacactggaagttttactcaaagccaccaagcgatgtttaacaatggcttggttgtttttcattgatcctgtaggtgtatgtctgggatcctctattactacattgcttttaaaggaaatctttaaatttcaatacttggaatttgagaaggnccttcatggggatttaataatcaaacttaccgttaaattttattttccattattcttcccttgcttgggctttttcaaatttccaaccaggnggactttntattaaaactcnaaattaccatttggtttaaagggcactgncanggctnacttttggcnttttgggaaaaagggtaatttttaattggttccaaggaanaaaaggtttgttaatttaaanaaccccttttttttaanaanaacttttgnaactggaaataaaantagcaccttttnttttttttttgagggancccctttgcaaggggaaaagnnttttttttttgncaatccngattttaaaagnntaccttaaaaatnaaaaaaangtttgggggcct

SEQ ID NO: 5070 - DNA, 865 bp, Homo sapiens
  misc_feature 16, 433, 530, 565, 602, 624, 631, 638, 648, 655, 679, 687,692, 696, 709, 712, 729, 739, 761, 762, 768, 770, 783, 790,791, 794, 815, 819: n = A,T,C or G
tagtatacgactactntcgtatacgactactatagggcgaattggagctccaccgcggtggcggccgcccgggcaggtacaagttgtctttatgctgcgagataagtcctctcttggtttgagctcccaccttttcagtgaactcttacattttgggggatctgctcttgtaaaggacatcctttctggtctttgattacttgagaaaagtgagtgaggtggggccaagatggttgactagaagcagctagtgtgtgccactctcacaaatagcagaaagagtggtgagacactagctcttcaaccggaacatccaggtggacacataaggattcatcagtgacatagtgtgaccttcggatcacggagaagagtgagacagatcaaccattcacccaggagtggcacagacccaggggaatccccctacaanaaaatggtgagtgagtgagagtcccgtgggatgcatatttctgccacgaacctttgaatccctgggctcaggagatccccaagctggggtcttccanaccaaaaacagagaagccatgtggagtttgggtanagctgcttcttagggaggtgtgggagtccagtagcanttgtttcctgggtccctcggcncttttanaactagngggatccccngggcttnaggaatcgatatcaagccttattnaataccgntcaancttngaggggggggccnggnacccaactttttgtttnccttaattgngggttaattggccccctttggnngtaatnantgggtataaatgnttcctgnnttnaatttttattcggttaacaanttcnaaaaaaaatattacccgggtggcataaatgtaaagctggggtgcct

SEQ ID NO: 5071 - DNA, 856 bp, Homo sapiens
  misc_feature 3, 4, 553, 566, 570, 608, 613, 647, 653, 662, 669, 673, 679,691, 696, 700, 809, 817, 818, 831, 847, 850: n = A,T,C or G
tannggtatcgactactatagggcgaattggagctccccgcggtggcggccgaggtaccggtgcccatcaccaacgccaccctggaccagatcactggcaagtggttttatatcgcatcggcctttcgaaacgaggagtacgcgggggcagtataggagctgaaacaaagcagagcatcaccttgcttgacctcagctggggacatgtgcatcagatgattcaaatttatttatttattttatttttttgagaaggagtctcactctgctgccaggctggagtgcagtggcgcgatctcggctcgctgcaacctctgcctcctgggttcaagcgattctcctgcctcaggctcctgagtagctgggactacagtttgaacagctggaaatagctccaatggattgctatgttgattttctaaaactggaagaaaatctatgacctacattaaatgaaattgagataccaaagatttcttggtgtaagaagaaaaaaaaccctgaattatacgaccaatttgcattctactagtgattttgatgagagatgagnaggaaaacttcantttnccttaaggagtgcatgttactgggggaggtatggtttngaaanggtttcaaaggggattatgttggattcactttgngacttntgtgaaganggaaatncctnttgagnaatcattacttnaccgnccanggggattcctttttttgttaaaagacctttcctggggctcctggagccttaaaacatgggccatttcttcactttagggaaagaattattggagcccaaaccggaaganaaagaggnnaaaattttaattngaaattttaaactttngtngtttgg

SEQ ID NO: 5072 - DNA, 843 bp, Homo sapiens
  misc_feature 1, 4, 539, 590, 633, 636, 655, 661, 727, 729, 742, 760, 764,785, 787, 802, 805, 840: n = A,T,C or G
ngcnatcgctcctatagggcgaattggagctccccgcggtggcggcccgcccgggcaggtacattactgaataagctctggagataactcaattatgccagaagctggtcaaattttaaaataaaaataaaccctaaaggaacatacaaatttggcaagggaaaaaacctaatgtttcgattggaatcaattctttgatagactactgagctgtaggattagaggtaatttattatatagagatattaggattggctcttctgtaaaaagctaatttactgacaacagatttgaatcaaagtaagggattcataggtaaaactatgaacttttctccctaatgcttcattccctgtgggtaattaatgaaagagaaactttgcttgagtgtttctgggcatcttgtctcctacaacaggtgtcaaatttctccaggtgaatgcttaccggtaagggattggataaggaatgttgcggtgaggatcgtgcaactggtggaacacttctgccagggctggttcctggcgcgcttcccccancaaactggccaacagggaaaaaccgatatgaataattcaaaacagtacctnggccgctctagaactagtggatccccccggctgcaggaattcnatncaagcttatcgatcccgcnacctcnagggggggccccggtcccacttttggtcctttagtgaggggtaattgcccccttggcgtaatcatngncaatagctggttnctggggggaaattgttantccntcccaattccccccaactacnanccgggagccttaaanggnaaaacccggggggccctaatgagtgggctaactcnatt

SEQ ID NO: 5073 - DNA, 877 bp, Homo sapiens
  misc_feature 2, 3, 4, 7, 9, 11, 18, 660, 704, 722, 736, 738, 788, 793,794, 800, 811, 818, 827, 839, 844, 867: n = A,T,C or G
gnnnagngngncggctcncgtatacactactatagggcgaattggagctccccgcggtggcggcccgcccgggcaggtacaatttatcaaactgccccgagacctgataaccaaatccagcctccagggaaacatgtattcatatcttgctcacacatcagacatagttaacaactgcatgctaagcatagcaattaaattcagctgtgtttcaacaggtcccattggatttctttccagagaggacaattagtaaaccacaaaaactcacggggtgtgaccaacagcgagatgcctttgccgaagttgagtgcatacccggaatttgagttccacagtgcgttctccctaaacaaaaaaccccttgcagtagccaccatgtcccttctcctatgattcctattaaagctaatgtctgaaaaccaatcacacagcagtcacacagactgtgggtcatccatgggcccttgatggtgtaaataaagcttccctcttccatgagaccattgctgacaaaagtcaccactccccacagtgatgtgggtgatcaatattgaagatctgccatctgagggagggggccctgtgacatgttatgaaagtctggagttttcctatgtccacagaacgacctgctggtctggactgggaacaagccanggggctggacagaaacaattctgtggggttcaaagggtgaaagnggggggaagatttccaanagaaaggagttggnangtctttttttactcacttctgcattggactttaggtgcacttactgcttngggtnngaactncaccaatgttntaacaanttaagggtntaggatgttaancaagnttccttaatgggtttcaaacaancttggaaggg

SEQ ID NO: 5074 - DNA, 885 bp, Homo sapiens
  misc_feature 2, 6, 322, 555, 574, 642, 718, 726, 740, 751, 796, 799, 821,822, 834, 836, 843, 882: n = A,T,C or G
gngcgncgtatacactactatagggcgaattggagctccccgcggtggcggccgaggtacccgtccaggatctccaggtcatagccatcagccagacaccagttgacgcttgtctccttagtcttcccggattgccttttggaatcatatatgctgactctgccaacctaggaatcccagaagcaacgggagaaagatggaaacctttcaggaataagattctgaagcagggactcaagactcataggagagaggaagtgtggggtcatgatctttcccctgtatttagggttctgtttggctaagactgagcaccctctanacatactaactccacctcgattcaagattaattccagactaagagaagaaaagcccttggcatccaaaaggaaagaaagtttaaagttcttgggagaccaaccaatgttggtggtgggccactgtgggcaatgttcgcttgtgggctaccactgtgggcaatgttccccttgcccacagtgtacctgcccgggccggccgctctagaactaagtggatcccccgggcttgcanggaattccgatatcaagcntatcgataccgtcgacctcgagggggggccccggtacccaactttttgttccctttaatgaagggttnattgccccccttggcgtaatcatggtcatagctgtttcctggggtgaaattggtatcccgttcacaatttcacacnacataccnagcccggaggcatnaaagtgtaaangcctggggtgccctaatgagggagctaactcacatttaattgcgntgngctcacttgccccttttcaatnngggaaacctgtntncccactncattaataatcggccaaccccccggaaaagccgtttgcnttt

SEQ ID NO: 5075 - DNA, 903 bp, Homo sapiens
  misc_feature 2, 3, 4, 5, 7, 8, 10, 59, 68, 79, 586, 637, 652, 662, 664,684, 715, 736, 738, 748, 749, 751, 756, 765, 774, 775, 778,788, 797, 802, 804, 812, 821, 827, 839, 840, 864, 869, 878,882, 891, 896, 901: n = A,T,C or G
gnnnnanngngccctaatacactcactatagggcgaattggagctcccccgcggtggcngcccgcccnggcaggtaccngatgaggccacatgtgcttagcatggaagtgaggcgaattgatgcagcaggcaggctttctgtggcctctgaagggccgtggtgtgaagggagggattagttatactccttgtggctttagaaaccagaagtggggtccatgggtgggcttgttgtagaagaggaattcagctcaggataaaataggcttttctagcagttggtagcagctcaacaagcaatgcgctgcctccagagctgggaacatatgaggattattttagaaggatttgtgcctcagatttaggctcgcccactattatttttgatggtaagtctgagtctacaatcatgttgagatagccatgtgttctttccctgtaacttcttaatatatgatttaagctgttctgaaagctgttggcattgaactccatgtttatcgagtcgacttcaaatatttgaaaggtgttggtaatggttgttatttgccccaagaagccctgaatccatctgctgggtacctcngcccgtctagaactagtggatccccccggctgcaaggaattcgatatcaancttatcgaatacccntcgaccctcnanggggggggccccggacccancttttggtccctttaagtgaggggttaaatnccccccttggccgaaatcatngncataagctgnntncctgnggggaaaantggtatccnngtnaccaatttcnacaacaaantaccnancccggganccataaaangtgttnaaaccctggggnngccttaatgaaggggagcctaccnacaantaaattgcnttgncctacctgnccccntttcnat

SEQ ID NO: 5076 - DNA, 870 bp, Homo sapiens
  misc_feature 455, 502, 605, 728, 733, 735, 742, 744, 746, 751, 758, 782,799, 806, 811, 813, 819, 826, 827, 837, 843, 869: n = A,T,C or G
ctactatagggcgaattggagctcccccgcggtggcggccgaggtaccaaaaagactctcaaaaaccaatactcccacgggcaagggaatagccaagtttgttgcggtttccaatgaatgacatcagccctgtgtaggtctcaatcaaaatgggttcagttaacaccatcagtttctttcctcttccagatccagttgaattcttgtgggcattctggatagctggaacaagcttagacatgagcccagacaacttgcaaatttcaaggaatttctcactggtgtatttcataggatgctcagtgaaagtagcataaggaacttcagtggaccatgggttccagcgggacagaagagactgctcctccggactcccccaagtagatcctaaggccttctccttgtctcttgtccagggacatcccagggaaggtgaacttgcccaggcagatgcnatagacaagcgctcagaggaatcccgctgcagctgcacacaactcancatgatgaagtcgtatttgcagatcaagagaatcttgtctgtgaccagtagaatttctcttcttctcattggttccaagtggtctatctttgtcaaagagccnagaagccttgaatggtctctccagaagtctcaacttccgtgaccttcaagtctttccatggcagtttaaatggcccccggcccgatctagaactagtgggatcccccgggctgcaggaattcnatatnancttatcngntncccgncaacttngaggggggggcccggtacccagcntttgttcctttaatgangggtaantggcncncttgcntaatcannggcatagctntttccngggggaaatggttatccggtcccaant

SEQ ID NO: 5077 - DNA, 1048 bp, Homo sapiens
  misc_feature 1, 2, 9, 11, 16, 18, 19, 20, 22, 23, 25, 26, 28, 32, 34,36, 38, 42, 44, 45, 47, 49, 51, 54, 55, 57, 58, 59, 63,64, 65, 71, 75, 77, 78, 79, 81, 85, 86, 89, 93, 97, 98,102, 103, 107, 113, 114, 117, 118, 120, 124, 129, 145, 150,160: n = A,T,C or G
  misc_feature 174, 263, 268, 286, 321, 356, 410, 418, 462, 470, 480, 505,568, 575, 589, 592, 608, 613, 615, 624, 636, 647, 654, 661,678, 705, 708, 731, 735, 737, 739, 740, 745, 754, 756, 757,762, 766, 768, 794, 795, 808, 837, 848, 855, 861, 864: n = A,T,C or G
  misc_feature 866, 869, 886, 889, 905, 907, 927, 937, 969, 974, 976, 979,988, 990, 992, 1009, 1011, 1019, 1022, 1024, 1041: n = A,T,C or G
nncacacancnatacntnnntnntnnanccantnantntaancnntntngntcnnannnttcnnntaatgngagntnnngnactnnganacanttanntagnntagnggacgnntanncntacnactcntatagggcgaattggnctccncgctgtggcngccgagtaccaggntggaaagtggtatgtgtctaattgcaggggcgggggtaggggggaggccaaaggattaacactctttaaatagacatcagaaaactaanaatanccttgctgcctggtaatngatgggcattcctgactacgggccacacactcagnaggtgctcgataaacatgggtgaaatacaggaatnaacaaatactgaaaatgggtcattgggtgagcacttagccagtaaaaaatctgngctttgtnataaaaagaactttggactgagggttatatgagtcttcctgcangctggganacctctgttncctttacttctctactttttgttgncttgagaccagctttttttattttctggtggaaggagaacaaggcaggccagtttaaaatgtncaggggnaatgaacaaggttncanctttggcctttttccnttatntntgtctttgnataccctgctanttctggccaanggttagnaaagatnggaaatcacttcctttntggccctattcattcaagaactttaantgnttcccctgggagccacctcttanattngncnnatcanactttgganannttctnttantnccaaggctcctggggtcccttccttnnagggctgcctacnttgtattgcttgagaaaaaaatttaaggncccctttcccntgggaanggaatnccnancanccccctttttttaaagntantcaagttgtgcttttnanggaagggggcatggccaacntatatttgtncctttcccgggctgccctttttataacttagngggancnccnctggcctgnangnatttcattttaaccttntnagatcccnacncncttgaggggggccctgnacccact

SEQ ID NO: 5078 - DNA, 863 bp, Homo sapiens
  misc_feature 22, 37, 39, 42, 51, 70, 73, 75, 305, 312, 467, 474, 486,502, 544, 551, 569, 583, 605, 614, 618, 619, 630, 645, 648,652, 654, 656, 662, 668, 694, 701, 703, 712, 729, 746, 747,766, 768, 774, 777, 792, 798, 799, 802, 807, 810, 813: n = A,T,C or G
  misc_feature 819, 825, 826, 828, 835, 839, 847, 851, 852, 853, 858: n = A,T,C or G
ggccgtatcgactactataggnctatttggagctccncngcngcgccgcgntggcggtcgccgggcaggntcncngggacacaactttttttccttagtctgtatactttctgctgtcactagcataacagaaaagacgaatggcttttgttttaaactgagggcacttttacaaaagtcatctttccatttatttttctttcagaaaaagaatttgggttttgagctttttttaaaaaaaaaaagacaaacactttccttgactttgagaaataatttaagtcaaggaatctgctctatgctanccaaganatagagcacagcaaagatctgccagccccaggcctctacctagtggtctggaaattcaaagaattcttattggtggaggccatttgtttctgattagaagctgtctaaaccttctactctcaactcaaaggaaaacacagagcataccatggccnagaaagnttgcagtgattngagctggtgtgaagangcctcttctcatcaaatgcttgtggggatgaagaccctgganccacctngctttgagagaaagtgangacattggggggantatggaagtttcctggaccctngggccgacngggnnggtcttaaaanccccggtccgatttnttnattncnanaaccanttcctnggaacttgagcaagccattacttaantctcttnancggaaaaanggggcctccaatatccnaaaatggggagaaaaanncccaaaccttttttggaangncaactnctntcctgaaattgaatnccccannaangaagnggngtnaaaatngttttnncnttccatntaantgggtttncccnnntttanggggg

SEQ ID NO: 5079 - DNA, 912 bp, Homo sapiens
  misc_feature 220, 271, 314, 320, 383, 438, 467, 468, 475, 519, 527, 530,545, 566, 570, 571, 572, 575, 594, 603, 604, 611, 624, 640,661, 666, 668, 690, 692, 698, 700, 704, 726, 731, 738, 745,746, 750, 754, 756, 776, 777, 783, 787, 788, 797, 798: n = A,T,C or G
  misc_feature 799, 802, 804, 811, 812, 824, 827, 828, 832, 836, 844, 848,851, 852, 863, 867, 870, 878, 879, 885, 891, 892, 895, 898,899, 905, 908, 912: n = A,T,C or G
ggccgtaacgactcactatagggcgaattggagctccccgcggtggcggcccgggagagaactaggcgctaggacagctccaggtgcgactccccgcgtactgactcaactgcactgaccatgttgtcataattagaataaagaagaagtggtcggaaatgcacattcctggataggaatcacagctcaccccaagatctcacaggtagtctcctgagtngttgacggctagcggggaactagtttccccccatagttatagtgttgatgngtgaacccttgcctgtctggggtgctaagagctatgcacttancttgangcccctagaattactagatgtgctggatcacggggaatgaggtgggggtgcctaatttttaantgaactaatcagaaccctcttgagaaaattggttcttaattgaactggaaccatnaaagacattttaatgggaagtggataccnnagtgatnaggtgtcccatgctttttacttcttgaggacatttaaatcgganaaaccctnctnggggaatttttgggngggagacactttgggaaacanaaannnacncccttgggaatgcaatttncaagctcannatggctnccaccagtgtctnttgaccacccctgggngtgacttgttgactggcaacnttggnanccttgcccggccgggccctttnanaacttngngggntcccccgggcttgcaggaattncaatntcaagcnttattgnntccngtcnancctttaggggggggcccggnncccaantttnntttcttttnnngangntaattgnncccctgccggtntcnntggncatnactttttncccntgnnaaaattgggtntccnttntaattccnnacaaanttacannccnggnnctaaangtntagn

SEQ ID NO: 5080 - DNA, 883 bp, Homo sapiens
  misc_feature 3, 4, 6, 8, 22, 466, 607, 615, 642, 649, 667, 713, 728, 767,792, 799, 802, 808, 835, 845, 851, 852, 858, 874, 877: n = A,T,C or G
ggnncnanacgactactatacnactatagggcgaatcggagctccaccgcggtggcggcccgcccgggcaggtaccattattatccccacttcagaaatgaagaaactgagcctcagagaggggaattcattggcttgaagtcagcacagctggcaagtctgtaaccaaaacctaagcctgcaacttctgctgttcactgctgcctcccacagcaaagggacttcagctacaccactcaacatcttgtgtgaccagccatagggcaaatatggccatcccgatatacacacactgtcctcagtgcacttcaggatgccttccaatttaaggagctctgcagggcctgggggatctagctgccatttccaaggctggcagggcagagcagaggtggagcctggaaggagcccacttggttgtagcctcttgcaagtgcactggccacctgaggcacttaagggcctnctaggatgtcaggcaccttcacctctgaaactaaggctgggaccagggctggaggactcttgcccacctcttttttttgagatggagtcttgctctttcgcccaggctggagtgacatgatagatagatgatagatagatngatagatngatagataaactctaccttgacctttnctcaaangaggaaattgacttaaangaaataaatgatttgctcaagatcacaatgcttgtaagtggcaaancttgggccccaaggncagggcttttaattcccaaagccgtaccttgggccgttntaaaactaatggatcccccggcttnaaggaanttnattttnaagctttttggatcccgccgaacttcnaggggggggnccgggnncccacnttttgttccctttaangangggtat

SEQ ID NO: 5081 - DNA, 910 bp, Homo sapiens
  misc_feature 4, 55, 80, 110, 125, 134, 200, 208, 214, 287, 339, 493, 525,530, 570, 580, 586, 588, 653, 660, 674, 683, 704, 713, 720,725, 728, 737, 738, 739, 747, 752, 753, 754, 758, 759, 763,766, 777, 778, 782, 783, 787, 812, 820, 822, 826: n = A,T,C or G
  misc_feature 828, 834, 835, 838, 849, 852, 858, 862, 873, 886, 887, 896,898, 900, 901, 904, 907, 908, 909: n = A,T,C or G
gcgnaatacgactcactatagggcgaattggagctccaccgcggtggcggccgangtacgcgggggcagtgggaagctcncagcagctggggaggagccaaagcctcggngctcacctaagccgnagggaggtncacccaactgggagatggggaaacagcaacccatagaggagaactaacccacacaggatcatttcntgaaggancaaggntgaagaaccagacctggactttcttaggacaaacttactgcagcttgaaggagccaaccatggatttgaggcntgtgaaggaatatttctcctggctctactatcaataccaaatcattagctgntgcgctgttttagagccctgggagcgatctatgtttaacaccatcttactaaccatttattgctatggtggtatacactgcctattgtctttattccaatccaccattcgcctggcttgggaattttttctcaaaaatatgtggatattcacantacctgcccgggcggccgctcttagaactagnggatncccccgggctgcaagggaaattccattatcaagcttatcngattcccgtncgaccncnaggggggggggccccggtacccccaaccttttttggtttccctttttaatggaaggggtttaaanttggcgncgcttttgggcgtnaaattcaantggggcaataggctggttttncttgtgggngaaaaanttggnttntaccgcttnnncaaatttnccccnnnaacnnttancgnagccggggganncatnnaaangggtaaaaaacctcggggggggccntaattgangnggancntaaacnnccnatttaaatttngcngttggncctnaacctggcccngtttttcaaattnngggaaaaantntnnttnccnnnt

SEQ ID NO: 5082 - DNA, 914 bp, Homo sapiens
  misc_feature 353, 385, 419, 466, 505, 514, 529, 547, 587, 590, 591, 593,607, 614, 622, 626, 627, 636, 637, 638, 647, 648, 662, 668,670, 682, 699, 703, 709, 723, 725, 731, 732, 733, 745, 753,756, 772, 778, 779, 786, 790, 796, 798, 808, 818, 824: n = A,T,C or G
  misc_feature 825, 828, 829, 830, 836, 837, 839, 840, 843, 848, 863, 867,870, 875, 887, 892, 900, 901: n = A,T,C or G
gactactatagggcgaattggagctccaccgcggtggcggccgaggtacactctgtgatgttcatacggcaaaatctcctgacacatttctcagaacgtatcctcgttgataagtgatgcgtaactgtattcctgaacggaatggtaaggaggccaggttaatctttcagaagtggagaagtggagaggagatgaaatccctggacttaatatggacaagagctgtgggatagatagctgagtagtgaggaggtgacttggctcgagggcccccaaacagaccagggtggaggtggccgaaaactgtgacagggcaggtgcagagcctaaagtgggacgctcacccttattgnggaatatttgctggtacctgcccgggcggccngccgggcaggtaccttcggtgaaccaaacatttntggcatattaaatttgaagtgtcaaatgcatgcccttttctttgatntatgatctaataagcccttttctatctctaatttcaaangatttttgnaattccccaaattantttcccttttgtgggtgngaagaattttttttcttttcttcctcttaaactttccctnaanntnaaataaaggttttnattaaantaaaaatnccannggggatttnnntttaaaaannaaaaaaccttgggnaaaccntncccttttttttntttttggggaaaagacnaaangaaaancttgaaactttttntnaaattnnnaaaatttttaancctttaanaanttttatttttttttanggggannaaaattntttngggaanangttaaattanccccttaaanttaaannttnnntttttnnannttnaaaantaaaatttgaaaaancccngtnggatntccttttttaanttttnaaaaaaanntttttgaaaaaat

SEQ ID NO: 5083 - DNA, 852 bp, Homo sapiens
  misc_feature 5, 7, 8, 19, 127, 151, 157, 168, 190, 236, 240, 256, 315,354, 419, 439, 447, 513, 517, 525, 554, 583, 593, 618, 626,654, 658, 673, 687, 702, 704, 709, 710, 716, 717, 722, 728,731, 768, 772, 774, 775, 781, 784, 795, 799, 802, 809: n = A,T,C or G
  misc_feature 810, 811, 820, 824, 829, 831, 833, 834, 843, 844, 845, 852: n = A,T,C or G
atggntnnatactcgcgcncgactcactatagggcgaattggagctccccgcggtggcggccgcccgggcaggtactttcttttttttttttttttttttccttcagccctgcaaggcgggaatgcnctgcactgctgcttatcactgcanggcggnaatgcactgcnctgctgcttatcactggacatntcaccatcctgtgcttgtcctgttaatcctaaccagcccctgcaanaagncctttatttaagtctntacatttgactcatctggggtaattctgctcccttctgggaccctgaccacttaaccgntaaattctaaaatgggggtgttgtctcatgaaaaagcanatttgacaataccaggtccatatttgcacatcaaaacaatgacctagagcaggaaaacaattgcntccttaaagccactgctttntcagaggnggtaattgacagggaatcttgttaaaatgaatattcaaattaattagctctggggctgggcctganattntgcctttntaaaaagttttcaaggcgaggtcacagtnggaaggtctgtggaccacacttcaagtanatgggctttnaaaagtacccttggcccgcttttanaactaagnggatccccccgggctgcaggaattcganattnaacctttatcgaaanccggcgaacccttnaaggggggggcccgntncccanncttttnntcccntttagnggngggttaaatttgccccctttggggaaaaacaatgggncaanannttttcnccngggggaaaaanatgnttntcccccnnnaaatttccncccnaaccntncnnaaaccgggnnnttttaan

SEQ ID NO: 5084 - DNA, 620 bp, Homo sapiens
  misc_feature 592, 617: n = A,T,C or G
gcgtaatacgactcactatagggcgaattggagctccaccgcggtggcggccgaggtactcttcaccccagtgtggacggaacagaatctggctacacggtggccagtgatggactgctgggaaatctgctggcctgtggtctgagttcccctacttgctcaggctgcccctcactcccagtgtgccagggaggcttagtccggggagcatcagagcagaagacattcggggctcatggctcccatccccactggcctgtatcttcagcaccctctggccaccaccagctttggctctaactgcagactttgttcttggtgaattgctgtagaactgggaatgaggtgtgccctgggcacaggggcactgccccaccaaggtggtgcccactccactgctgggaaaacgaagttacctagcggagcctggagcccactgggtggtcactaatttcagcacaggcagtgcagtgtttgtgctttttttttggagattgagtctcactctgtcacccaggctggagtgcaatggcgtgatcttggctcactgcaacctccgcctcctgggttcaagcagttctgctgccttcanctttcccgaatagctgggattacangcc

SEQ ID NO: 5085 - DNA, 635 bp, Homo sapiens
  misc_feature 2, 3, 4, 5, 6, 374: n = A,T,C or G
gnnnnnccgcgtaatacgactcactatagggcgaattggagctccaccgcggtggcggccgcccgggcaggtactcacttcagcctggcaaaagagtaagaccctgtctcaaaaaaagaaaaaaaaattggtcatgtctcagaccaattaaatcacaatgttcaatggtgggatctagacatcagagtcttttttttaagctccccaggtgatgctgatgttcagcccagtttgagaagcactgatcagcactttccaaactttaatgtgcacacagatcacctggggatattgttaacctggagatccctatacagtggatctgtggagaggcctagaggtctgcatttcttataagctctaaggcgatgcanaagctgcttgtgggtggaccactttgagtccaagagctacatcagccctcccctctgttctctgattcattctcttgggctctcaaggctgcgggtgggccacaaagctgcagctgtgtcgagaggagcttcaagccgcagtcattgctgcttcatgtcacagggaattttattgtgaacactaaataacacttttctcatctgtaaaagcaggatagtagtcagatgtgtccttggcttttccactttatttattggaaa

SEQ ID NO: 5086 - DNA, 866 bp, Homo sapiens
  misc_feature 602, 625, 627, 664, 671, 676, 680, 693, 704, 711, 724, 732,743, 757, 758, 784, 786, 796, 800, 804, 806, 812, 813, 820,824, 836, 837, 840, 849, 851, 858: n = A,T,C or G
gtaatacgactcactatagggcgaattggagctccaccgcggtggcggccgcccgggcaggtacaacaaacgctccaggaaatggaaagccagttggcagcccacatgtggttacctcacaccagtcaaaagtgacagtggagaggtgagttttcactgacattcattaaagtaaaacattactgtttttacccaccagctccaccagaatttcaaagtcttaacattaggatttattatttggggggggcctcattgatttttggttgagctagtaattctgtacctcggccgctctagaactagtggatcccccgggctgcaggaattcgatatcaagcttatcgataccgtcgacctcgagggggggcccggtacccagcttttgttccctttagtgagggttaattgcgcgcttggcgtaatcatggtcatagctgtttcctgtgtgaaattgttatccgctcacaattccacacaacatacgagccgggagcataaaagtgttaagcctgggggtgcctaatgagtgagctaactcacattaattgcgttgcgctcactggccgctttttcaaatccgggaaacctggtcgtgccanctgcattaatgaatcggccaacncnccgggagaaggcggtttgcttattggggcgctttttncgctttnctcgnttanttggactccgttngcgcttcggtncgtttcnggcttgcgggggnagcgggtnttaaacttaanttcaaaaggcgggnnaattaccggtttttttcccaaaaaantnaaggggggantaancccnanggaaannaacattntgancaaaaaaggccnncanaaaaggccnangaaaccnttaaaaat

SEQ ID NO: 5087 - DNA, 880 bp, Homo sapiens
  misc_feature 477, 483, 513, 514, 561, 585, 588, 606, 616, 618, 630, 633,645, 652, 666, 668, 675, 676, 687, 696, 707, 708, 716, 725,726, 730, 732, 736, 738, 739, 747, 749, 751, 753, 762, 765,768, 769, 784, 792, 795, 797, 802, 818, 819, 824, 828: n = A,T,C or G
  misc_feature 841, 842, 852, 862, 863, 866, 870, 872, 876: n = A,T,C or G
ggagctccaccgcggtggcggccgcccgggcaggtacaaacttagctgccatagagagctagctggcatccctaaccctgcagccactgtagctctattcatgcccatagtcctgtcccaggttccctggcttacccattacttcataagcaccaacatgcaagtgggggtgccttcatcccagcaccaatgccattaatgccttggatcccagagccatagtccctctgctcatgctcatacttcaagacttggctctatggctgctttacatgccactcatcagacacctgtacctcggccgctctagaactagtggatcccccgggctgcaggaattcgatatcaagcttatcgataccgtcgacctcgagggggggcccggtacccaagcttttgttccctttagtgagggttaattgcgcgcttggcggtaaatcatggtcataagctggtttcttgtggggaaaattgttnttccgntcacaaattccacacaacaataccgaagcnnggggagcataaaagtgtaaaagcctggggggtggcctaaatgaagtngagcctaactcacatttaaattgncgnttgcgcttcacttgcccngcttttccantngggggaaaaacntgntcggcggcccancctgcanttaaatggaattcngnccaaacnnctccggggganagggccggntttgcggtatnnggggcgcntttttccgnnttcntnggtnannttgatttngntngngccttcggntcnttnnggcttgtgggcggancgggaatncancntcaanttaaaagggcgggaannacggnttantcccccaaaaatnngggggataancccaaggaannaanattngncccnaaag

SEQ ID NO: 5088 - DNA, 876 bp, Homo sapiens
  misc_feature 458, 466, 473, 485, 489, 493, 524, 541, 551, 552, 559, 563,566, 567, 570, 580, 582, 607, 610, 622, 623, 625, 630, 637,638, 642, 644, 646, 647, 661, 665, 667, 671, 673, 675, 676,677, 683, 689, 696, 697, 699, 700, 701, 704, 709, 712: n = A,T,C or G
  misc_feature 735, 738, 749, 752, 756, 763, 767, 772, 773, 774, 776, 779,784, 786, 787, 789, 791, 795, 796, 797, 806, 808, 811, 812,824, 827, 828, 831, 837, 840, 841, 842, 843, 848, 849, 852,853, 855, 856, 859, 860, 863, 864, 866, 867, 871, 873: n = A,T,C or G
  misc_feature 876: n = A,T,C or G
gcgtaatacgactcactatagggcgaattggagctccaccgcggtggcggccgcccgggcaggtacgcgggaaggaaaatcacacgggctgagagtcgctggcagcacagcttgaaatgcttctcagatattaaagcctgcttgcttttccaggtgggatacactcgctttccttttgacagtaatgcatgtttccccattagacaaacctgttttactacattcatcaagaaacccaatgatgctgcctcttctgctttgcaaattatcttttcacacgcgtgactccccttcttaggcagatggtttaccaagtgctacttatttggtttgcgttttgactattttttgaggatgacgtcattaatctattgctggaatctgggagagctgctgttttaaagacttactgggagctgccacgtctcgagcagataaatgtgggaagagccctccgnggaggaancggaaanaatttttttttngcgnggancccgtttttggttttccccgggggaaaaaanttccccccccccccccngggggggggnnccccccngagnaannaanaaccccccgngngggggggggggggcctttttttttnggnggaaaaaaaccnncnttaanaaaaaannaggngngnnggtttttttttttnaaananaaanancnnnaacaangggggnggggccnncnnnttnttganggnggggggggggggggggggggggnttntttattataanaancccnccccccncccnggggnnnanaanaaaananntntncatnnnttttgatgngnggnncccccccccccnggnnggnggtggngannnnccccnntcnncnnacnnaannannattngngcn

SEQ ID NO: 5089 - DNA, 777 bp, Homo sapiens
  misc_feature 598, 666, 728, 757, 767, 776: n = A,T,C or G
gtaatacgactcactatagggcgaattggagctccaccgcggtggcggccgcccgggcaggtacagcccacggaactgtgagccaattcaatcccttttctttttcaattacccactctcatgtatatctttatagcagtgtgagaacagattaatacactcctcctcagaaagcattcaatttagctgtgtctaaagtatgccaggtgtcctagggtgttatcttagccaataattcttcctcttcagcaagatctatttgcctatgacagcttgacctacagttcctaccatacttgtcagtaacaagtagcccataacatctgaagggacttcattgaaatcacagaggttctttagttctttacctcattagtaggcattagggaagcacatcaactttctaatttaataaggtgcctgttgctttgaaaaactgctcaaaaaaagataggagaggcttacttaaagatatcactataggcgtggcatgctgcttcacacctgtaatcctagtacctcggccgctctagaactagtggatcccccgggctgcaggaattccgatatcaagcttatcgataccgtcgacctcganggggggcccggtacccagcttttgttccctttagtgagggttaattgcgcgcttggcgtaatcatggncatagctgtttccctgggtgaaattggtatcccgctcacaatttcccacaacatacgaaccngggagcataaaggggtaaagccctggggngcctaatgangtgagctant

SEQ ID NO: 5090 - DNA, 839 bp, Homo sapiens
  misc_feature 14, 414, 420, 440, 478, 512, 530, 599, 656, 666, 670, 671,676, 697, 724, 763, 778, 780, 790, 792, 796, 798, 823: n = A,T,C or G
gtacacgactaccnctcactatagggcgaattggagctccaccgcggtggcggccgaggtacgcgggatatttattaaatgcgaattgagagcttgtgttgctatccccaaagacatcatagtcaagtgaaggaactgacttgcaattcaagaattaggatattggaataagggcaaaagtagggggaagcagagggtgaaaagaagggcctggagggagccctaaaccctccttgcagaagaggtgaaatggaacattccctcagctgcctttggaaggatcaatatgacactgagagcagcttggtgagagtttgagaatgcatagcgagtttggggaattttaaagagcttagtatggctgaagtttaaaggacaagtgggagattgtgaaaaaaaaaaaaaaaaaaaaanaaaaangtacctgcccgggcggccgntctaaaactagtgggatcccccgggctgcaggaattcnatattcaagcttatcgataccgttcgacctcaanggggggcccggtacccancttttgttccctttagtgagggttaattgcgcgcttggcctaatcatggtcataagctgtttccctgtntgaaaaattgtttatccgctcacaaattcccacaccaacattaccaacccggggaanccattaaagntgtnnaaaancctcggggggtgcccttaatngaagtgaagctaaaacttcaccatttnaatttgcggtttcccctccactggccccgctttttccanttccggggaaaaccntngtcgtgcccnancttncntttaatgaaatcgggcccaaccccnccgggggagagggcgg

SEQ ID NO: 5091 - DNA, 854 bp, Homo sapiens
  misc_feature 466, 474, 500, 515, 518, 523, 531, 573, 599, 602, 650, 651,657, 665, 672, 684, 685, 694, 697, 700, 701, 710, 713, 717,722, 727, 738, 739, 740, 747, 758, 759, 764, 767, 768, 772,785, 786, 787, 790, 794, 796, 798, 801, 808, 812, 813: n = A,T,C or G
  misc_feature 820, 822, 824, 828, 829, 832, 834, 835, 836, 837, 838, 842,846, 848, 854: n = A,T,C or G
gcgtaatacgactcactatagggcgaattggagctccaccgcggtggcggccgaggtacacgtggtctttttcaattctaagggaagtcagagttcacagaattaatttaatggtaacataaaagaggcaattaagtatgttgctttgtcaaactgaccgaagaataacaaatccaagttttccagatttggaagccagaagataaaacccaatgtaggaagaatagaaaaaaatgaataaaagaacaaaagaaaaaggaagcagcagttacaacaaagcagaaaaaaacatggaggtgcaccaagtagagaatgggagggaggaaagggctgatagctactttcaaaatatgcaataacttcagagaatacccgcgtaccagcagaagccaggccaggcccctatattggtaatatataaagacagtgagaggccctcagggatccctgagcgattctctggctncagctcanggaccacagtccatttgaccatcagngggagtccaggccanaanacgangcttgctnttttttgtcaattcggcaaacagcacttggtctttttttcgnggttttcggggggagggacccaagcnttnccccgtccctaccgttaagccccaagggggttgcccccctttggggcnntttttntttcccanccttttntttggggggggnntttaaaagnccnaannaaagggccnccntggnggggnttttnaaaaaaagggnnnttttttnacccccgggannccccnaannaatnggccctttaaaannnganaaanananacnccccccncaannggggggngngngggnnccncnnnnncccntttnanaaaaan

SEQ ID NO: 5092 - DNA, 828 bp, Homo sapiens
  misc_feature 573, 629, 658, 686, 691, 698, 736, 738, 748, 765, 770, 782,796, 815, 818, 821, 828: n = A,T,C or G
gtaatacgactcactatagggcgaattggagctccaccgcggtggcggccgaggtacttaagtgtccccaaagtgtggtccctgggccactagcatcagcatcacctggaaacttgtgagaaatgcaaattcttggagcttacccctgatatattgtagcagaagctctaggtccaccaatctgcattttaagaagcctctcccagccaggcatggtggctcacgcctataatcccagcactctgggaggccgaggcaggcagatcacctgaggtgcagagtgggcattgctttccagatggataaaaaagcaaaggctaaaatgtaacataaatgaggaggatcttatttgcacagccactttctgttcgtcattggccacgatttcagcagcaatcacagccgcctggttatttcgctgtggagtgggagtggagattgctagtacctgcccgggcggccgctctagaactagtggatcccccgggctgcaggaattcgatatcaagcttatcgatacccgtccgacctcgagggggggccccggtacccagctttttgttccctttagtngagggttaattgcgccccttggcgtaaatcatgggtcatagcctgttttcctgtgnggaaattggtattcgcttcacaattttcnccaccaacattaccgaagcccggggganccatnaaaagtngtaaaaagccctgggggggtgccttaaatggaggtgangncttaacctcnacatttaaaattggcgnttggngcttaacttggnccccttttttccantcccggggaaaaccctgtncgnggncaacttn

SEQ ID NO: 5093 - DNA, 849 bp, Homo sapiens
  misc_feature 658, 697, 713, 769, 773, 785, 805, 813: n = A,T,C or G
ctatagggcgaattggagctccaccgcggtggcggccgggggccattgagactgccatggaagacttgaaaggtcacgtagctgagacttctggagagaccattcaaggcttctggctcttgacaaagatagaccactggaacaatgagaaggagagaattctactggtcacagacaagactctcttgatctgcaaatacgacttcatcatgctgagttgtgtgcagctgcagcggattcctctgagcgctgtctatcgcatctgcctgggcaagttcaccttccctgggatgtccctggacaagagacaaggagaaggccttaggatctactgggggagtccggaggagcagtctcttctgtcccgctggaacccatggtccactgaagttccttatgctactttcactgagcatcctatgaaatacaccagtgagaaattccttgaaatttgcaagttgtctgggttcatgtctaagcttgttccagctatccagaatgcccacaagaattcaactggatctggaagaggaaagaaactgatggtgttaactgaacccatttttgattgagacctacacaggggctgatgtcatttcatttggaaacccgcaaacaaaacctggctatttccctttgccccgtggggaagtatttnggttttttgaagaagtcttttttttggtacctcggcccncttctaagaaactaantgggaatcccccccgggcctgcaaggaaattcggatattcaaggctttattcgaanaccngtccgaccctcngaagggggggggcccccggntcccccanctttttggttccccttttaggtgaaggggttaaatg

SEQ ID NO: 5094 - DNA, 843 bp, Homo sapiens
  misc_feature 3, 5, 532, 550, 709, 742, 755, 783, 796, 815, 823, 830: n = A,T,C or G
agncnaattggagctccaccgcggtggcggccgcccgggcaggtacttggaaaaatggacaaggattgtgaaatgaaacgcaccacactggacagccctttggggaagctggagctgtctggttgtgagcagggtctgcacgaaataaagctcctgggcaaggggacgtctgcagctgagtaagtatgagcccacgtgatcctgtataccgcacatgctgaagcaaccgaggagtatatgtgataacggcatgttttccattgatggcagggtaacgcatagccttacccccacaaccgcaaccacgagtccgtctctcaaaacagcgtgctgcgacggctcctgcatttgcagcttccctgtgtgttgcccaggagctctccacctccgatgaacccagggccgttcccttcataccctttcattagtagctctaagatgtttgattaaggtgtacctcggccgctctagaactagtggatcccccgggctgcaggaattcgatatcaagcttatcgataccgtcgacctncgaggggggggccccggnacccaagctttttggttcccttttagtgagggttaatttgcgcgcttggcgtaaatcatggtcatagcttgtttccttggtgaaattgtatccgctcacaaattccacacaaacataccgaagcccggggagccattaaagtgtaaaagcctgggggtngcctaaatgaggtgagcctaaccttcacatttnaattgcgtttgcngcttcactggcccggctttttccaggcnggggaaaaccctnggtcgggcccaacctgcanttaaatgnaatcggnccaaacgccgccg

SEQ ID NO: 5095 - DNA, 856 bp, Homo sapiens
  misc_feature 618, 647, 731, 754, 791, 797, 803, 811, 813, 819, 827, 836,837, 853, 854: n = A,T,C or G
gactcactatagggcgaattggagctccaccgcggtggcggccgaggtacaagttgtctttatgctgcgagataagtcctctcttggtttgagctcccaccttttcagtgaactcttacattttgggggatctgctcttgtaaaggacatcctttctggtctttgattacttgagaaaagtgagtgaggtggggccaagatggttgactagaagcagctagtgtgtgccactctcacaaatagcagaaagagtggtgagacactagctcttcaaccggaacatccaggtggacacataaggattcatcagtgacatagtgtgaccttcggatcacggagaagagtgagacagatcaaccattcacccaggagtggcacagacccaggggaatccccctcaagaaaatgaagccaaggaacaccatctgaagttctgacggcaacatcagaagctaagagaaaggcatggaaaagattctcacctagagcatccagagggagaggttggtcctgcagacaccttgttttctgacctctgacctccgcaactgtgaggggaagaaatttctgttgcttaaagacacacagcttgtgggtacctgcccggggcggccgctntagaactagtggatccccccgggctgcangaattcgatttcaagcttatcgataccgtcgacctcgagggggggccccggtcccaactttttggtccctttagtggagggttnaattgcgccgcttggccgtaatncatggtcaatagctgttttctggtgtgaaaattgttnatccgnttcacnaatttccncncaaacnttacgganccccggganncttaaaagtggtaaanncg

SEQ ID NO: 5096 - DNA, 890 bp, Homo sapiens
  misc_feature 580, 588, 596, 643, 662, 672, 680, 688, 692, 694, 701, 709,712, 741, 748, 752, 753, 765, 772, 774, 777, 793, 794, 809,821, 826, 827, 828, 831, 833, 835, 851, 854, 855, 858, 859,863, 864, 873, 875, 876, 877, 880, 889, 890: n = A,T,C or G
gcgcgtaatacgactcactatagggcgaattggagctccaccgcggtggcggccgaggtacctcagtctagtattgtctgtttgtctaaaattggttctaaggaatctaggctagtctgtctatccctttcaacttttgtgaggctgcacaaatgtaaaatgttgaataaaaagcattgatggaagtgtgtagaaattcttctgtttgttctgttgtaattttagttgcagtgcagcctggagagcagcttcttagtccagaaagaaggacaaataccccaaaagccatcagcgaggaggaggaggaagtagatccaaacacacagagtaagtctcaggacccatttttttcttacatgttgttcctccaggacttaaaaatcattcacagagacgtgcaccgcggtgagtgtggactcctggaagcgcaccgtagctccgctgtgtcctgctgctcctccctagctgtcagggaggctgtagtccattgctttgccagctcttttgtttccgagtgaacaccttatccgtacctgcccgggcggcccgctctagaactagtggatcccccgggctgcanggaattcnatatcaancttatcgataccgtcgaccttcgagggggggggccccggtaccccanctttttgtttcccctttantggaggggtnaatttgcncccccttnggcngnaaatcantgggtcanaancctggttccttggggtggaaatttttttnttccggnttcnncatttcccccanaacaatncngancccgggagccttaaanngtaaagccccggggnggccttaatggnggggnnntancncncattaatttggcgttngcnnctnnactnnccccttttncnnncgngggaaaccnn

SEQ ID NO: 5097 - DNA, 858 bp, Homo sapiens
  misc_feature 754, 845, 858: n = A,T,C or G
gcgtaatacgactcactatagggcgaattggagctccaccgcggtggcggccgaggtacctcagtctagtattgtctgtttgtctaaaattggttctaaggaatctaggctagtctgtctatccctttcaacttttgtgaggctgcacaaatgtaaaatgttgaataaaaagcattgatggaagtgtgtagaaattcttctgtttgttctgttgtaattttagttgcagtgcagcctggagagcagcttcttagtccagaaagaaggacaaataccccaaaagccatcagcgaggaggaggaggaagtagatccaaacacacagagtaagtctcaggacccatttttttcttacatgttgttcctccaggacttaaaaatcattcacagagacgtgcaccgcggtgagtgtggactcctggaagcgcaccgtagctccgctgtgtcctgctgctcctccctagctgtcagggaggctgtaagtccattgctttgccagctcttttgtttccgagtgaacaccttatccgtacctgcccgggcggccgctctagaactagtggatcccccgggctgcagggaattcgatatcaagcttatcgataccgtcgacctcgagggggggcccggtacccagcttttgttcccttagtgagggtttaattgcgcgcttggcgtaatcatggtcatagcttgtttcctgtgtgaaattggtatcccgctcacaatttcacacaacataccgagcccgggancataaaagtggtaaaagcctgggggtgccttaatgagtgaagctaacctcacatttaattgcgtttgcgctcacttggcccgctttttccnttcggggaaaccn

SEQ ID NO: 5098 - DNA, 874 bp, Homo sapiens
  misc_feature 56, 673, 699, 702, 715, 736, 740, 774, 778, 783, 788, 799,807, 827, 836, 842: n = A,T,C or G
gactactatagggcgaattggagctccaccgcggtggcggccgaggtacacctcantcctacaaccaagaacctacccatagaactgaagcaggaagctgtgtccatgctcctgacatgagaaagtcttgccaatggggaaagacaggggaaaacagagactagctcaagtcacagggtgagtgtgaacaacttacccagggaggacataagtgccaggttctccagagtcacatcacggtacctgcccgggcggccgctctagaactagtggatcccccgggctgcaggaattcgatatcaagcttatcgataccgtcgacctcgagggggggcccggtacccagcttttgttccctttagtgagggttaattgcgcgcttggcgtaatcatggtcatagctgtttcctgtgtgaaattgttatccgctccaattccacacaacatacgagccgggagcataaagtgtaaagcctggggtgcctaatgagtgagctaactcacattaattgcgttgcgctcactgcccgctttccagtcgggaaacctgtcgtgccagctgcattaatgaatcggccaacgcgcggggagaggcggtttgcgtattgggcgctcttccgcttcctcgctcactgactcgctgcgcttcggtcgttcgggtgcgggcgaagcngtattcagcttcacttcaaaagggcngtnataccggttattncacagaaattcaggggggatnacgncaggaaaagaaacatgttgaagccaaaaaggccnagcnaaaangggcnagggaaacccntaaaaaanggccgcggttggctgggcgnttttttccntaggcntccggccccccttgacgaggcattaacaaaat

SEQ ID NO: 5099 - DNA, 854 bp, Homo sapiens
  misc_feature 658, 699, 725, 773, 789, 794, 802, 825, 835, 837, 844, 847,854: n = A,T,C or G
gcgtaatacgactcactatagggcgaattggagctccaccgcggtggcggccgcccgggcaggtacaactgtccttgctaccctcagactaataaaaaatcccaaaccctaagtgccttattcacacctcaaactgcagtttacccaaggagaggaagccagcccatcctccatgggtcccacaaactacccactgctcctcagcagacagcaaacccctaacttggccaaaagtaaagatcttccatcctgggctggctgcactgagtaattgctgacctacatctctctgagatgcagcccccagaagacaagcaaagagataatgcagcaagccagctcatgtggtggccagagggtttggtgcaagagcatctgtagtaaagtgtggccagtgatggccatttctctaggctcaactgtctcccataagagactttagccctacgggaactgttgggcctaatttctgcaggatggtcttgcaaatcagaagaagctggtccaactgagcactccttggtctgctggcctctcccagggacccagtctggccacagctgcttacagggcactcttagatgcccacactatagctgccgtgctagtggactgtacctcgggccgctctagaactagtggatcccccgggctgcangaatttcgatattcaagcttatcgataccgtcgacctcganggggggggcccgggtcccagcttttngttccctttagtgagggttaaattgcgcgccttggcgtaaatcatggncaataagctggtttcntgtgngaaaatgnttatccgtttcacaattccacanaacaataccnancccgggngcnattaagn

SEQ ID NO: 5100 - DNA, 873 bp, Homo sapiens
  misc_feature 540, 703, 711, 743, 767, 808, 820, 836, 853, 866, 869: n = A,T,C or G
tacgactcactatagggcgaattggagctccaccgcggtggcggccgggggccattgagactgccatggaagacttgaaaggtcacgtagctgagacttctggagagaccattcaaggcttctggctcttgacaaagatagaccactggaacaatgagaaggagagaattctactggtcacagacaagactctcttgatctgcaaatacgacttcatcatgctgagttgtgtgcagctgcagcggattcctctgagcgctgtctatcgcatctgcctgggcaagttcaccttccctgggatgtccctggacaagagacaaggagaaggccttaggatctactgggggagtccggaggagcagtctcttctgtcccgctggaacccatggtccactgaagttccttatgctactttcactgagcatcctatgaaatacaccagtgagaaattccttgaaatttgcaagttgtctgggttcatgtctaagcttgttccagctatccagaatgcccacaagaattcaactggatctggaagangaaagaaactgatggtgttaactgaacccattttgattgagacctacacagggctgatgtcattcattggaaaccgcaacaaacttggctatttcctttgcccgtggggagtatttggttttttgaagaagtctttttttgggtaccctcggccgcttctaanaactaagngggatccccccgggcttgcaggaaattcgatnattaaagctttatccgatacccgncacctcgaaggggggggcccccgggtacccccaccttttgnttcctttaaggngagggggtaaattgcnccctttgggggtaatcnatggggccataanctnggtt

SEQ ID NO: 5101 - DNA, 861 bp, Homo sapiens
  misc_feature 702, 764, 770, 791, 814, 821, 825, 835, 837, 845, 860: n = A,T,C or G
tagggcgaattggagctccaccgcggtggcggccgggggccattgagactgccatggaagacttgaaaggtcacgtagctgagacttctggagagaccattcaaggcttctggctcttgacaaagatagaccactggaacaatgagaaggagagaattctactggtcacagacaagactctcttgatctgcaaatacgacttcatcatgctgagttgtgtgcagctgcagcggattcctctgagcgctgtctatcgcatctgcctgggcaagttcaccttccctgggatgtccctggacaagagacaaggagaaggccttaggatctactgggggagtccggaggagcagtctcttctgtcccgctggaacccatggtccactgaagttccttatgctactttcactgagcatcctatgaaatacaccagtgagaaattccttgaaatttgcaagttgtctgggttcatgtctaagcttgttccagctatccagaatgcctacaagaattcgactggatctggaagaggaaagaaactgatggtgttaactgaacccattttgattgagacctaccacagggctgatgtcattcattggaaacccgcaaacaaacttggctattccctttgccccggtgggaagtattggttttttggagaagtcttttttggtaccctgccccgggccgggccgcttctanaactaagtgggatccccccggggcttgcaagggaatttcgatttcaagcttatcgatacccncccgancctcggagggggggccccggnaccccagcctttttgttcccttnaagtggngggnttaattgcgncncttggcgnaaatcatgggccaana

SEQ ID NO: 5102 - DNA, 868 bp, Homo sapiens
  misc_feature 500, 583, 604, 642, 650, 676, 694, 715, 717, 720, 734, 747,778, 800, 803, 813, 822, 829, 856, 867: n = A,T,C or G
gcgcgtaatacgactcactatagggcgaattggagctccaccgcggtggcggccgaggtacgcgggggaggtggatttgagagatacctccctccttctgctcagctgccttgcagtaattaaactctttctctgctgcaacacccctactgttctccgtgtattggtttttctgggcagcaggaaggaaaagctgatgcgatgctctcagtgccgcgtcgccaaatactgtagtgctaagtgtcagaaaaaagcttggccagaccacaagcgggaatgcaaatgccttaaaagctgcaaacccagatatcctccagactccgttcgacttcttggcagagttgtcttcaaacttatggatggagcaccttcagaatcagagaagctttactcattttatgatctggagtcaaatattaacaaactgactgaagataagaaagagggcctcaggcaactcgtaatgacattttcaacatttcatgagagaaagaaatacngggatgcctctcaactgccacctgccttttgactttttgaagccttttgcaaaaagtgatctgcaactcttttcccatctgtnatgccggagatgcagaaattngtgttggcctatatccaatatttctttgcttcatccangctgtganccccactgttccaatgggttcaaatnggccccacctttttatgngaaccagtcccgaaaaattcnangtngggaaaaggagctnacccatcttgctnacctggaatatttcctgatgacccaatttangaaaccccccggaaaccacctnaanggggacccanttaccttgncccggcngggccgtttttaaaaactaatgggttnccccccggccnt

SEQ ID NO: 5103 - DNA, 842 bp, Homo sapiens
  misc_feature 636, 642, 661, 672, 692, 727, 749, 753, 756, 811, 818, 825,832, 841: n = A,T,C or G
agggagtcgacccacgcgtccgccgtgttggccgtgctgtagtaaaggaactagatccaggagggtcaccaaagtcacgtagaggccttggtagtccaaagaagggtagtctgacaactgagcatcacgactttgcgggccgcgttctgagggagcatctcgcaggacgctgtaaaggagggagcgagtaacagtagggttgatggaactgacctgcggtcttagagatggggtgagtgggaatggcacaggaaaaagacacatggtcatgggcactgtcaaattggaggcatcttggttttccttcttccctgtgcgggacaaaatgctgttggggggacaaagaaaaaaaagagacaacaaagacacaaagaacagcacattacattgaaatgacactctaaaacaaataataaaacaccagatacattccacataagatgcaattgccacgccagcagggtctaccagtctagtctggtcacatagcttcgtgctcagaggtaccaataatacaaggtttactttgtggaagtctcattgcatctcatgtgttatctggttaggaaggagcaaaaatattaaaaatgcatgtttcaatgcccaaacccattgtttttacagtttaacaatttngtgaangagaaggttccttgggaanaaaaaacaacngcttttgtctaatgagtaanggctctttattcctaattacaaggagctttcaaanggaaaaagacattttcagcaanactngtnttttattaaggtaaaataggaaccttgcaaaataattaggtatggcactttgcanaaacatnttttcanccaaaanaattaaaant

SEQ ID NO: 5104 - DNA, 859 bp, Homo sapiens
  misc_feature 573, 713, 721, 722, 734, 737, 744, 781, 782, 802, 804, 829,832, 833, 839: n = A,T,C or G
tagggagtcgacccacgcgtccgccacctcacatgttgatttccaggtcactacaggagcggaagagagcaggcttctcttccccgtggaagaattccccgtggccccacccacttcccccagtgcgtacgtcaggctccagttcactgtgggatgcccagacaagccctgggcaggttccctcatcgacccaaaagcatctaatgtaaacattcttgggacgcttggagattctccagggaccccattttatctgcctaagcatttggctgtctcatgttaaggtatcatccagccctcgtggcttgtgatggccatttctggttgcgtgagcattagtcatcctgtctctgcattgtggcatgccatggtctcttgcaagggctttgttacaaggtatctgcatttaagatagcccagtcatcgagcgttgcgaacagccccacccaatcgggcctggccaggagatttcatcactgtgatcttaagttctttaccagagcccttattagaacaagttagatgcaaccggggcacggtggctcatgcctgtaatcccaagcactttggganggtgaggcaagcggatcacgaggtcaggagttcaaagaccagcctggccaacataatgaaacccccgtcactgctaaaaacacacaaaaaaaattagcttggatattggtgggggggcgaactggcagtcccaggcttcnttaaggannccttgaaggcanganaaatccncttggaaccctgggaaggcgggaggtttgccattganncttaaaaacacccccttttncnctccaaccctttgggaacaagggcnaannaatttncgttttaaaaaaaaaaaaat

SEQ ID NO: 5105 - DNA, 937 bp, Homo sapiens
  misc_feature 37, 369, 384, 394, 399, 406, 409, 412, 418, 432, 437, 439,446, 450, 465, 480, 486, 539, 546, 551, 555, 565, 575, 586,599, 606, 614, 617, 624, 627, 631, 637, 639, 644, 648, 663,683, 684, 696, 699, 707, 708, 709, 710, 717, 734, 735: n = A,T,C or G
  misc_feature 741, 743, 750, 754, 759, 771, 785, 792, 793, 801, 802, 803,807, 813, 817, 819, 823, 829, 834, 835, 840, 847, 849, 855,862, 864, 865, 872, 878, 884, 885, 888, 899, 903, 904, 915,916, 919, 929, 930, 931: n = A,T,C or G
agtcgacccacgcgtccggagatccaagattcaaggnaaaaaaatgaatcattaatttctaaactaagtactctgtctatgcctgccttttacatctacgaatattagctcccagaagctacatacacttacaaaaatggtgaaatcttactaaatataatttagaattatcatggccatttaacaacactacactttaagatgtacatttaaaaatggaggctcctggctgggcatggtagttcacacctctaatttcaatgcttttggaggccaaagcaagaggatcacttgaggccaggactggggcaacatagcaagaccccttctctacaaaaaaattatctctacttggggaggctgaggcanaaaggatcacttggngcccaggagntcaangattacnagnggnggctantgaatcattgccancttgnanctccaancctnggggtaaacaagaanttaaagacccttttntttttnaaaaaaaaaaaaccttaaaaattaaaaaatggagggggccccctgggattaanggccccnccccnaaanaatgcccccntttttttggnggcagaaaagncttttttaaaaantttttcnaaaaaaanggntttttanttnggcntctttncnaaaangacntcccaaacccccaanttggaaaaggcttaaggggnncttatttggganaanaaaaaaannnngggcccngggccctgggggggctnncccccntnttaaatncccnccccnttttttgggggncccaaggggggccnaaatacnnaaaggggnnngggnaaacgnaaancntccntggttnaaaannggggnaaccccncncttttntaaaaancnnaaaaatnttcccnggcccnnggngggggggcccntttnntccccacctanntcncggggggggnnngggccc

SEQ ID NO: 5106 - DNA, 604 bp, Homo sapiens
  misc_feature 166, 251, 276, 394, 450, 472, 542, 546, 547, 550, 557, 558,559, 562, 563, 566, 576, 579, 581, 582, 588, 589, 590, 601,603: n = A,T,C or G
atagggcgaattggagctccaccgcggtggcggccgcccgggcaggtacttccaaattttcatcttccctgggatgcttttcccctttccttaaacagatgtatatgcccatccctgtgaccagtgtgatggaacccaagcttattacagacagagctactaaggngggcatacaagacacagattctaccttcctatgagtcggttctattgagatttgtggttctttctcctctatattaatctctggntcttttcttaaaagactctcaatgnaactctcattactgacagtgtcattgacaaataggttcaccatgactgtggagtggagaggctcgggataaccatgatcactcactttcaccagtaagcgatggagcccataatctgnctgcagcaatgcctcttccaaagtaatgtttgccagttttagggtcaatcctgaangactcaggcctaggacctcttntccctatgatgctgtaagctatgacagcattcatgcctgtgtcttttgtcgacagcatagactttctggnaccnnggngccctgnnncannttnctaacgccgncancnnggcccnnnttctttttaanant

SEQ ID NO: 5107 - DNA, 627 bp, Homo sapiens
  misc_feature 458, 465, 485, 486, 492, 494, 495, 496, 498, 507, 511, 515,528, 530, 557, 569, 574, 597, 606, 607, 608, 613, 620, 627: n = A,T,C or G
taatacgactcactatagggcgaattggagctccccgcggtggcggccgaggtacgcgggggaataacagcggtgggagtgaaatcaaggagaaggtggaacaagtgaggcttaaaaagagcccaaggaggatgggaagaagaaatgccagatggaggaaatagaatatcacagcacagtcaaaagaggagaggtggcaagaatggcagggcatgtgtctgccagggaagggttggttgaggcctgcactcaagaccttggcaaagcaaccagagccagaaagaaccatgagagaagctttcaatgactttcagacactttgtcctccttttttacccttctcctctcctgcttttttccccatctccaagtatattttgggatggtggatgccattcgccacacaaaaacacttgggattcattcctgataccccaattcatcccactttccccccnccaaagncagatctcacccacctgttnncccagnannnangtgccgttntttnaatnccccccccccccncncgcaggggtcttgtgccccttgaagantgattatcgggnggaanagggggtttttattgccttaatnccccccccnnnaaggngaattgnttggttn

SEQ ID NO: 5108 - DNA, 996 bp, Homo sapiens
  misc_feature 16, 310, 334, 340, 363, 370, 398, 400, 412, 435, 444, 467,474, 477, 507, 548, 577, 591, 593, 620, 623, 629, 637, 654,656, 666, 668, 672, 676, 686, 698, 710, 718, 719, 730, 739,744, 749, 759, 761, 770, 792, 807, 825, 829, 834, 835: n = A,T,C or G
  misc_feature 837, 839, 843, 859, 872, 874, 880, 882, 888, 894, 908, 909,911, 923, 924, 939, 940, 944, 948, 957, 970, 977, 979: n = A,T,C or G
gaattggagctccacncgcggtggcggccgaggtacaaaacaaattcaaagggttaagaatttcaagttggtagcttcagagcattaagccccaaatgtggggtcccttctgagcccaggattatgtgtgactgcactggtcacattgccatgaagccagccctggtggttggtagaggggtgggcactggacctaagcggggccaatcagagccattcctggaaatggatatataaatattaggaatgcaaagttatttattttgttagagtttgaacaacgtgatctgtaaaaaaccagtcacatttncttaaggatgcatcaataaatatngagctnaaatgtaataattagaacttttnggtttcncaagccagatttccatgcttctaaattncnctgggataggtngaatataaataaagaatggattnttctcccantgaaataaagtttacctttttancatttgnccnaaaggggaccaggatgttaaaataaaggcntaccttaaatcaagttttgaacccttaaaaaataaaagggnttattccctgggaattattcccatggtangggtcccaggtgcnanatcaccatggaggccccttattaaacnagngggccngaaagttntttagtttaggggaaantngccagccatntnaaanttgnggaagatccnaaaagggacaanggaaaaggaatncccaccannatttggttacnatccttttngaaanatttnaagggcccantngggcagaanggaaaaccaaggcttgcccctnttataaagggtaagnaaattaaccctttaattnaaangaacnngnanaggnaaaacaagttcccttngcccgggcggggncnattttnanaactanggggantccccccgggctgnngnggaaattcgggnnttaaaccttattttnncccnctgnaccttatangggggggcccggntaacccnancttttttttcccttttg

SEQ ID NO: 5109 - DNA, 939 bp, Homo sapiens
  misc_feature 394, 395, 441, 453, 475, 486, 520, 552, 571, 605, 609, 611,613, 616, 657, 680, 715, 726, 732, 767, 768, 778, 783, 786,799, 806, 808, 810, 822, 834, 842, 843, 848, 856, 860, 862,871, 875, 883, 888, 891, 894, 909, 914, 921, 922, 925: n = A,T,C or G
  misc_feature 926, 930, 931, 934, 939: n = A,T,C or G
gtaatacgactcactatagggcgaattggagctccaccgcggtggcggccgcccgggcaggtaccacaagctgtgtgtctttaagcaacagaaatttcttccctcacagttgcggaggtcagaggtcagaaaacaaggtgtctgcaggaccaacctctcctctggatgctctaggtgagaatcttttccatgcctttctcttagcttctgatgttgccgtcagaacttcagatggtgttccttggcttcattttcttgtagggggattcccctgggtctgtgccactcctgggtgaatggttgatctgtctcactcttctccgtgatccgaaggtcacactatgtcactgatgaatccttatgtgtccacctggatgttccggttgaagagctnntgtctcaccactctttctgctatttgtgagaagtggcacacactanccgctttttagntcaaccatcttggccccacctnactcacttttntcaagttattcaaaaagaccagaaaagggatgtnctttacaagagcagatccccccaaaatgtaangagttcacctgaaaaggtngggagcttaaaacccaaagagaaggaccttattnttcncngncantaaaagacaactttgttccctcggcccgcttctagaactangtggatccccccgggcctggcangggaattcgatatcaagcttatcgaatacccgtcngaccttcgaangggggnggcccggtaccccaaccttttgtttccctttaatnngggggtaaantgccnccncttgggcgtaaancattggngnanaagactgttttnccggtgtgaaantgttattnngtttncaaatttnccananaataccgancccnggagcaanaaaanggnaangcttggggggggccntaatngaggggnnctnncctnncanttaan

SEQ ID NO: 5110 - DNA, 1015 bp, Homo sapiens
  misc_feature 165, 193, 203, 239, 253, 260, 287, 317, 335, 344, 348, 354,374, 385, 387, 392, 415, 425, 426, 429, 431, 433, 439, 453,455, 456, 458, 466, 484, 486, 490, 513, 524, 532, 540, 550,553, 556, 567, 568, 576, 600, 606, 617, 620, 631, 640: n = A,T,C or G
  misc_feature 646, 652, 653, 667, 670, 676, 680, 688, 693, 699, 702, 707,731, 738, 746, 748, 749, 754, 755, 758, 759, 761, 762, 764,767, 768, 777, 788, 789, 791, 800, 803, 807, 811, 812, 818,821, 823, 825, 826, 835, 837, 846, 847, 849, 853, 855: n = A,T,C or G
  misc_feature 857, 861, 862, 864, 865, 866, 873, 878, 882, 883, 898, 900,903, 912, 913, 918, 921, 930, 935, 937, 940, 945, 947, 949,956, 960, 962, 967, 970, 974, 975, 980, 981, 986, 988, 993,1008, 1009, 1013, 1014: n = A,T,C or G
ggagctccaccgcggtggcggccgcccgggcaggtacacgatcctgtattgcccacccttctctattgctttgtccccgcgcgccctctgttttgcctaaatgggttccaggccatagccaccgactctcgctttgccttctggcctctcggcagtgcgcttcancaccattgcgccaggtgacgctgctganaacagctgantggccggcactagtgcagctggaagccaaggcccanaattctcaggaatntgcactntacccaggcgaaaagcccaagggcttntccccacagcttcccaacattcctctacangagtttttaaatattaanaccttattnaccntgttanagatgggagagaatcaaaanaaaattcacangngtttnttttgaggggaaaaaaaggaaantagccacccnnccngntnaaaatncacctttaaaaagntnntnggaaaccnagcccaagcccaggtgantntggnagaaattgggaattggaaaaacntgacacgggantgacctgncagtaggnatgggttccnttnggnccggctcttannaacctaantggggattcccccgtggcttgcanggaaanttctaatatcnaangcctttattcntaataccgntcttanccctcnnagggggggggcccnggntacccnaacnttttggtntcccntttaantgnagggnttaaatttggccccccttggggtngaaatcnatggggananngccgnnttnncnngngtnnaaaaattgnttattcccttnncnaaattccanaanaaanatannaagccnggntngnnttaaatggngntaaagctcnngngggngncnaaanngnnngggccantcctnacannaaattggcgatgggncntancatgcccannttttncantatgtaaanctgangntgntcacntngnttttatnaaantngcccnatnctcnngggannagggntntgctntcgctgattatggcnncttnnc

SEQ ID NO: 5111 - DNA, 955 bp, Homo sapiens
  misc_feature 486, 495, 527, 559, 578, 579, 584, 623, 624, 641, 643, 647,652, 654, 683, 691, 692, 694, 696, 697, 708, 710, 714, 718,720, 721, 724, 728, 735, 737, 738, 742, 744, 751, 752, 755,762, 773, 774, 775, 779, 785, 786, 794, 826, 852, 859: n = A,T,C or G
  misc_feature 874, 878, 879, 889, 895, 896, 897, 910, 914, 918, 929, 930,937, 947, 949, 953: n = A,T,C or G
cgaattggagctccaccgcggtggcggccgaggtactctatacccaggcaaaggcaagcaagcagccttgaacaagtcattcaactcattgaagctgatgtatccattgccatcagtatcaactttggcaaaagcttctctgagctccatcatttccccatcggacactgatcctctggtcattttttattgctttaggtaacagatctcagcagcacgaaaagctctgtctagatgcattctcctcactggccccaggcagatgcccccgcgtacatgttattcacttgggtctcccatgcttcaaaaacacctaacgctgttaacattgagaagaggattgagaggagcagaatacaaaggtatttattaaaggtaattataatagccgtagaaataacaggccagagaactgaaaagtgattgaataatgagaataaaaacaaagggaagagggttgagtgtggcagtacctgcccgggcggncgctctagnaactagtggatcccccgggctgcaggaattcnatatcaaagcttatcgataccgtccgacctcngaggggggggcccccggtnncccancttttttgtttcccttttaattgaaggggtaaaattgcnncccttggcggtaaattnantggntcaanangctggttttcctggtggtgaaaattgggntattccgnntnannaaatttccacnanaaanattnannaanccgnggaggcntnnaaangngttaaannccnttggggntgccctaaatnnngggngcctannttcaccanttaaattgggtttggcgcttcacttgcccggnttttccaattcgggaaaaacctgttntggccanctgctttaatgaaanttgnncaaccccccngggggnnnaggcgggtttggngatntggncgccttttccnntttcttngtaaaatgantncgtngg

SEQ ID NO: 5112 - DNA, 972 bp, Homo sapiens
  misc_feature 309, 409, 425, 450, 485, 500, 598, 610, 613, 620, 628, 638,645, 681, 704, 721, 727, 740, 746, 753, 757, 761, 807, 814,835, 842, 852, 853, 854, 857, 864, 865, 871, 875, 877, 880,885, 886, 887, 890, 893, 896, 897, 903, 914, 924, 926: n = A,T,C or G
  misc_feature 929, 935, 944, 945, 947, 951, 956, 959, 961, 962, 968: n = A,T,C or G
tatagggcgaattggagctccaccgcggtggcggccgaggtacatagccccagaagggcggactggccggagtccagggatggcagccaacgccccataacagagatcagcattggactacaagaagaggcaaggagaaatcaaggatcaaaatttaagtaaaagaaaagccaagtcattaaaaatagccccctcattgaagagtgggaacgtaggtgtgatgttctggcataaggagtgaaaaagaaaaagctctattacttgaagcttttcaccaggggcagagagaatggccggaagtgagaaacngtgtgtgtggatgcttacacccgatgccgtctcctaatattggaacatggctccagaaagggagaaccaattattcctaattccacgggcggcattcttnttgactcccaaaactnccaaagtggaagggcagggagcttncccctttacccttgaggaaaagctcagagttgttntgggtaaaaactttnccggggggtgccgacataagggattgcttttttcagaagctcccttggacaattgggtacctgccccgggccgggcccgtttcgaaacatttttgagncaaaaagggccnagncaaaaanggcccatngtaaaccgtnaaaaaanggccccgccgtttgcttggccgtttttttcccatanggcctcccggccccccttgacgnagccattaacaaaaaanttcgancgcctcaaagttnagaagntgggctnaaancccngacagggactttttaaagataccagggcgtttcccccttgggaagnttccctngggcgcttttcttgtttcccnacccttncccggttaannnggntaacctnntcccgncctntnttnccttnnnggnaancgnngggccnttttttataanttcaccctgntnggnttttangtttctggnnanggtncattncgntnnaaaccntggc

SEQ ID NO: 5113 - DNA, 970 bp, Homo sapiens
  misc_feature 289, 347, 402, 419, 509, 544, 556, 567, 570, 593, 630, 631,661, 662, 674, 679, 695, 696, 714, 717, 719, 726, 727, 730,732, 740, 743, 753, 759, 763, 767, 778, 779, 791, 792, 794,795, 802, 803, 815, 816, 822, 823, 828, 834, 840, 845: n = A,T,C or G
  misc_feature 847, 876, 877, 878, 879, 885, 893, 903, 905, 913, 917, 919,921, 922, 927, 930, 947, 948, 953, 955, 957, 963, 964, 967: n = A,T,C or G
gtaatacgactcactatagggcgaattggagctccaccgcggtggcggccgcccgggcaggtacgcgggggtgtccaaagcactgaatacataaaacccgtgtgaatctcaactttcatttactttttactttcccctgctggtgcccaagaccaccgtggaaggaatggctaaaggataaggtggaggagacaagtgagttataatggggcttgttacccccagaagaattttcccaagtgaatggaatcattcttcaaaagaaaatgtgcgatttctgggataaganctggaacttccaagccaagcctgatgacctgctcattgcttcttaccccaaagcaggnaaccacttggacacaggaaattgtagatctgatacaaaatgatggcgatattganaaaagcaggcgcgcttncattcaactttcaacaccctttcctgggagtggataagaatgaacacactgtgggattgaccaggctaaccacaatgccttttccccaanggacccagaaaaacctcatctttccttgtaccctnggcccgctctanaacttagtggnatncccccgggcttgcaaggaattcnaatattcaaagctttattcgataccgtctaccctcgnnggggggggcccccggtaccccaactttttnnttccccttttanttgangggttaaattggcgcnnctttgggcgttaatacantgngnaattagnntgntnttccttgnggngaaaaattgntaattncggnttanaaattttcacnncaaaccataacnnanncccgggnngccttaaaagtnntaaaannccctnggggtnccctanatggngnggggtctaccttaccatttaattgcgatnnnngtttcnctgccccnctttccatgntngggaaaancttngncnngcccnacntgcattttaattgaatnngccancncncggggnnggnggg

SEQ ID NO: 5114 - DNA, 613 bp, Homo sapiens
  misc_feature 19, 428, 442, 481, 557, 558, 570, 585, 598: n = A,T,C or G
ctcctactaccactcactntagggcgaattggagctccaccgcggtggcggccgaggtacacggaccgcacggagaagctgaggcctgagatggaggggcccggcagcttcaccatcttcgcccctagcaacgaggcctgggcctccttgccagctgtgagatgacctccgtctgcccgggggactcttatggggaactgccttacttccccgaggggtgggcatgatgaatgggagtctgcagtcatttcttactgtttcaggaagctttctccttaaccccttagaaaaggctgtggaacttgagctaaaatatgtcttaccaggttgcgtctaatgccccccgttccctactgggcagaaagacttgggtgcttcctgaggagggatccttggcagaagagaggcctgggctcacgagggctganaacatgttttccanagttgcaaggacccatctcttaaacacagagtctgcagnccctaactgacaccctgtccttcctcctaggaagtgctggactccctggtcagcaatgtcaacatttgaactgctnnaatgcccctccnttaccattattggtnggggccaggcganttcctggacttgatg

SEQ ID NO: 5115 - DNA, 885 bp, Homo sapiens
  misc_feature 571, 612, 669, 678, 683, 700, 705, 729, 748, 762, 771, 778,784, 789, 793, 801, 810, 813, 814, 817, 819, 829, 832, 840,845, 857, 871, 874, 876, 885: n = A,T,C or G
gtaatacgactcactatagggcgaattggagctccccgcggtggcggccgcccgggcaggtacgcgggggctgtaggctcaggaggcagagctctgaatgtctcaccatggcctggatccctctcctgctccccctcctcattctctgcacagtctctgtggcctcctatgagctgacacagccatcctcagtgtcagtgtctccgggagagacagccaggatcacctactcaggaaatgtacctcggccgcccgggcaggtacttcactgcggacttgacttcttgagcaagaaggctggcactgttcattaagagaatcacagagatgaatctcacaatgcaggaaaactaggtcataatgtccagcaaacatgaacatctgaactgagaaccggctttccgaggactgcccattctcctccacgtggatggtggaatcacgttgatttgagcagctgtttctgatgatgaaatacttcacaaggtcagccttgtcttcagtgggggtggcatagcagttcctcaacaccaggttaaaccgggaggtgtccccttggtccaagatggcncccacatacagcgcggactcaacagacagttcaactgcatncccttcgtaaggattcgtgtagttctggtcttggaagaaggccattccctgacaatnaaacttttncattnccgttcccacttgaccnttcangggaacttacaattgggcttgcanggcagcttttggaaggctnaccttttcattgtnccagtgggntaggccncatttngaaantttncttgtttnaggatgggngtnnttntngttgatgganaancctttggnccaanggggaagggggntttttgggagaaanggngntggggtttn

SEQ ID NO: 5116 - DNA, 877 bp, Homo sapiens
  misc_feature 3, 698, 717, 719, 732, 734, 735, 743, 761, 763, 765, 772,774, 779, 780, 783, 798, 800, 807, 827, 843, 850, 853, 860,862, 867, 870, 872, 873, 875, 877: n = A,T,C or G
gtnatacgactcactatagggcgaattggagctccaccgcggtggcggccgggggccattgagactgccatggaagacttgaaaggtcacgtagctgagacttctggagagaccattcaaggcttctggctcttgacaaagatagaccactggaacaatgagaaggagagaattctactggtcacagacaagactctcttgatctgcaaatacgacttcatcatgctgagttgtgtgcagctgcagcggattcctctgagcgctgtctatcgcatctgcctgggcaagttcaccttccctgggatgtccctggacaagagacaaggagaaggccttaggatctactgggggagtccggaggagcagtctcttctgtcccgctggaacccatggtccactgaagttccttatgctactttcactgagcatcctatgaaatacaccagtgagaaattccttgaaatttgcaagttgtctgggttcatgtctaagcttgttccagctatccagaatgcccacaagaattcaactggatctggaagaggaaagaaactgatggtgttaactgaacccattttgattgagacctacacagggctgatgtcattcattggaaaccgcaaacaaaacttggctattcccttgccccgtgggagtatttggttttttggagagtcttttttggtaccttcggcccncttctagaactaagtgggntncccccgggctttncnnggaaattngatattcaagctttattngnantcccggncnacctnnggngggggggggcccggntnccccaanctttttggttcccttttatngaggggttaaattgcnccccttnggncgtaaanantgggncananntngn

SEQ ID NO: 5117 - DNA, 884 bp, Homo sapiens
  misc_feature 2, 3, 4, 5, 17, 720, 728, 733, 736, 741, 765, 774, 775, 776,778, 784, 787, 795, 797, 799, 800, 802, 814, 815, 816, 819,821, 822, 828, 830, 834, 837, 838, 851, 858, 861, 862, 864,869, 873, 875, 876: n = A,T,C or G
gnnnngacgcgcgtagngcgcgtaatacgactcactatagggcgaattggagctccaccgcggtggcggccgcccgggcaggtaccccagactgagttacagcatgtcctacaaggcatgacaacttacctgtttacatttatgttagttcttcaagggtagaggctacatcttccttggctcagtgtccctagcagtaaacattgtacctcggccgctctagaactagtggatcccccgggctgcaggaattcgatatcaagcttatcgataccgtcgacctcgagggggggcccggtacccagcttttgttccctttagtgagggttaattgcgcgcttggcgtaatcatggtcatagctgtttcctgtgtgaaattgttatccgctcacaattccacacaacatacgagccgggagcataaagtgtaaagcctggggtgcctaatgagtgagctaactcacattaattgcgttgcgctcactgcccgctttccagtcgggaaacctgtcgtgccagctgcattaatgaatcggccaacgcgcggggagaggcggtttgcgtattgggcgctcttccgctttctcgctcactgactcgctgcgctcggtcgttcggctgcggcgagcggtatcaagctcacttcaaaggcggtaataccggtattccaagaatcagggggattaccccaggaaaagaacaatgtgagccaaaagggcngcaaaaanggccnggnaaccntaaaaaaggccccgttgcttggcnctttttttnnnanaggttnccncccccctngngnngntttaaaaaaaannnccncnntaaaantnaganggnnggggaaaaccccnccggggnttnnanaaaancccnanncttttcct

SEQ ID NO: 5118 - DNA, 808 bp, Homo sapiens
  misc_feature 9, 15, 23, 51, 62, 82, 110, 112, 116, 122, 129, 142, 174,184, 185, 191, 227, 229, 230, 234, 236, 238, 241, 244, 250,251, 257, 266, 271, 278, 279, 286, 290, 292, 295, 296, 304,305, 306, 309, 325, 326, 342, 349, 350, 351, 353, 354: n = A,T,C or G
  misc_feature 355, 366, 369, 370, 386, 387, 396, 399, 402, 420, 426, 430,433, 450, 460, 466, 512, 535, 536, 538, 539, 548, 555, 556,573, 579, 582, 603, 604, 607, 608, 636, 637, 639, 640, 641,642, 655, 663, 671, 675, 692, 700, 701, 705, 710, 711: n = A,T,C or G
  misc_feature 715, 719, 733, 739, 741, 742, 746, 747, 748, 753, 763, 766,770, 777, 779, 784, 786, 790, 796, 798, 803, 807: n = A,T,C or G
agccatatngactanttgtggcngattggagctccccgcggtggcggccgntaaacatgtgncactgggcaggcggtgcctntaatactggtgatgctagaggtgatgtntntggnaaacangcggggnaagatttgccganttccttttacttttttaacctttacttatgancatgcctgtnntgggtngacacgtgagggtaataatgacccgcgtacctgccngnncggncncncgngcnggtacnnctggantcactactnggggnggccgcnnctctgcnacananganngctttttnnnggntgaattgaaaatggannttatgaataccggtgngctggannngnnncccgacacagntcnnatgcttgttccttggnngaaaaatanatntcnatcctgaaattatggttnattcanattnagncctcacattgtgcaatnggcttttaanagccanaaacagggttctggggaattttgcaagttattcctgtgaccagggngtggtcttcggttaccaaatacnngnnacctgcagntttttannccctttgggctcccacnggtcancanaatcccatcttgcccaaaggnnttnnaagcttgacagggatgtttcatttactnnannnntccaggcacttgntggtcctnagggattnattngtcggggggggagaagntaaacaanntttnaacanngttntttnaaaatgttttaaanggaatngnnggtnnnataanatccaatccntgntggncttattntnaaatntncctnttgggntnccccnaggna

SEQ ID NO: 5119 - DNA, 725 bp, Homo sapiens
  misc_feature 1, 2, 3, 4, 11, 18, 607, 624, 625, 626, 627, 628, 629, 630,631, 632, 633, 634, 635, 636, 637, 638, 639, 640, 641, 642,643, 644, 645, 646, 647, 648, 649, 650, 651, 652, 653, 654,655, 656, 657, 658, 659, 660, 661, 662, 663, 664, 665: n = A,T,C or G
  misc_feature 666, 667, 668, 669, 670, 671, 672, 673, 674, 675, 676, 677,678, 679, 680, 681, 682, 683, 684, 685, 686, 687, 688, 689,690, 691, 692, 693, 694, 695, 696, 697, 698, 699, 700, 701,702, 703, 704, 705, 706, 707, 708, 709, 710, 711, 712: n = A,T,C or G
  misc_feature 713, 714, 715, 716, 717, 718, 719, 720, 721, 722, 723, 724,725: n = A,T,C or G
nnnnacgtatngacatanttgagggctgattggagctccccgcggtggcggccgaggtaccccaaacaagttttcctattttatttttatgcttacagatactcaaatattaacaatttaattaatcaccagctattaaaatcatgaaaacatcatgaacacacactaccggtgtggatctccacagtgctgagtttttagatgacattccctacaccccttcctctatgaagagtttcacaaaagacgtctttagaaggtaaatctagcctatgaaatattttaagcaaaagacagaaagaagtctcaaatgtatgtggtgtatgtggggtgtgtgtgtgtgtgagagagagagagaaagagagagggaaagaaagacacagagacagagacagacagacactacagtcatgtcatttttacccgagcataacccaggcatcctggtgggtacctgcccgggcggccgctctagaactagtggatcccccgggctgcaggaattcgatatcaagcttatcgatccgtcgacctcgagggggggcccggtacccagcttttgttccctttagtgagggttaattgcgcgccttggcgtaatcatggncatagcttgttcctggnnnnnnnnnnnnnnnnnnnnnnnnnnnnnnnnnnnnnnnnnnnnnnnnnnnnnnnnnnnnnnnnnnnnnnnnnnnnnnnnnnnnnnnnnnnnnnnnnnnnnn

SEQ ID NO: 5120 - DNA, 868 bp, Homo sapiens
  misc_feature 10, 11, 28, 451, 452, 453, 454, 455, 456, 457, 458, 459,460, 461, 462, 463, 464, 465, 466, 467, 468, 469, 470, 471,472, 473, 474, 475, 476, 477, 478, 479, 480, 481, 482, 483,484, 485, 486, 487, 488, 489, 490, 491, 492, 493, 494: n = A,T,C or G
  misc_feature 495, 496, 497, 498, 499, 500, 501, 502, 503, 504, 505, 506,507, 508, 509, 510, 511, 512, 513, 514, 515, 516, 517, 518,519, 520, 521, 522, 523, 524, 525, 526, 527, 528, 529, 530,531, 532, 533, 534, 535, 536, 537, 538, 539, 540, 541: n = A,T,C or G
  misc_feature 542, 543, 544, 545, 546, 547, 548, 549, 550, 551, 552, 553,554, 555, 556, 557, 558, 559, 560, 561, 562, 563, 564, 565,566, 567, 568, 569, 570, 571, 572, 573, 574, 575, 576, 577,578, 579, 580, 581, 582, 583, 584, 585, 586, 587, 588: n = A,T,C or G
  misc_feature 589, 590, 591, 592, 593, 594, 595, 596, 597, 598, 599, 600,601, 602, 603, 604, 605, 606, 607, 608, 609, 610, 611, 612,613, 614, 615, 616, 617, 618, 619, 620, 621, 622, 623, 624,625, 626, 627, 628, 629, 630, 631, 632, 633, 634, 635: n = A,T,C or G
  misc_feature 636, 637, 638, 639, 640, 641, 642, 643, 644, 645, 646, 647,648, 649, 650, 651, 652, 653, 654, 655, 656, 657, 658, 659,660, 661, 662, 663, 664, 665, 666, 667, 668, 669, 670, 671,672, 673, 674, 675, 676, 677, 678, 679, 680, 681, 682: n = A,T,C or G
  misc_feature 683, 684, 685, 686, 687, 688, 689, 690, 691, 692, 693, 694,695, 696, 697, 698, 699, 700, 701, 702, 703, 704, 705, 706,707, 708, 709, 710, 711, 712, 713, 714, 715, 716, 717, 719,721, 722, 723, 724, 725, 726, 727, 728, 729, 730, 731-867: n = A,T,C or G
gagcccgtanngacatactatatggctnattggagctccccgcggtggcggccgaggtaccttgcacatctctgcctgcgctgctcacccactgtcaagaaagaaaggtagagcctggtgctctccctaagcactgtgggcctcacagttcgggcgggagcccccagcacctggctcttcctgatggaaagcttggtttcactcttcagaggtggtggcaacatccccagaaaaccggtaggcgtgggcacagtggctggaggccgagggctcctcgccatagcagaagcacggccgctctagaactagtggatcccccgggctgcaggaattcgatatcaagcttatcgataccgtcgacctcgagggggggcccggtacccagcttttgttccctttagtgagggttaattgcgcgcttggcgtaatcatggtcatagctgttcctgannnnnnnnnnnnnnnnnnnnnnnnnnnnnnnnnnnnnnnnnnnnnnnnnnnnnnnnnnnnnnnnnnnnnnnnnnnnnnnnnnnnnnnnnnnnnnnnnnnnnnnnnnnnnnnnnnnnnnnnnnnnnnnnnnnnnnnnnnnnnnnnnnnnnnnnnnnnnnnnnnnnnnnnnnnnnnnnnnnnnnnnnnnnnnnnnnnnnnnnnnnnnnnnnnnnnnnnnnnnnnnnnnnnnnnnnnnnnnnnnnnnnnnnnnnnnnnnnnnnnnnnnnncngnnnnnnnnnnnnnnnnnnnnnnnnnnnnnnnnnnnnnnnnnnnnnnnnnnnnnnnnnnnnnnnnnnnnnnnnnnnnnnnnnnnnnnnnnnnnnnnnnnnnnnnnnnnnnnnnnnnnnnnnnnnnnnnnnnnnnnnnnnnnnnnnnnng

SEQ ID NO: 5121 - DNA, 731 bp, Homo sapiens
  misc_feature 2, 3, 4, 7, 9, 65, 170, 200, 268, 296, 461, 467, 530, 549,583, 585, 586, 599, 611, 628, 654, 664, 689, 704, 724: n = A,T,C or G
gnnncgnancgactactatagggcgaattggagctccaccgcggtggcggccgaggtacctattnttataagtccctccggtctgcttctgatttttgcttattcactgcacccatagacacaatttataccatgaaggtgcctaatgcttttctgattctacttctgcncagagcaaggacatgagtgcagtgatggtntaagggccaacaagttgagaggctgtaagcccagctctcctccatcctgctactgacatcagagcctntactagatctgagagtgccatgcaccangacctactgtaatcgtgaaaccaatgatccatatgaccctaaagttattgtatactggtgttcaatgatcagtgcgattgggtccttttaaattttttcctttcaatttttattcattcagcaaatactaagctcccactatgcacataagagatgttcaatcantgttanatgaaggggaaaatattcagaaattcacaagtcactccagcactccaaaaacatacaactctncatgctcctccttctccgntcttggcctcatctctgcccacatcacaggttgntnnaatgctccatgancaagaacttaanccacaggttgacatggnctgtgactttatacaaatgtcttgtncccccaagangccatcttttaaagtaagtacctgncccggccggccgctntaaaactagtggatcccccnggctgca

SEQ ID NO: 5122 - DNA, 758 bp, Homo sapiens
  misc_feature 7, 9, 23, 362, 363, 364, 365, 366, 367, 368, 369, 370, 371,372, 373, 374, 375, 376, 377, 378, 379, 380, 381, 382, 383,384, 385, 386, 387, 388, 389, 390, 391, 392, 393, 394, 395,396, 397, 398, 399, 400, 401, 402, 403, 404, 405, 406: n = A,T,C or G
  misc_feature 407, 408, 409, 410, 411, 412, 413, 414, 415, 416, 417, 418,419, 420, 421, 422, 423, 424, 425, 426, 427, 428, 429, 430,431, 432, 433, 434, 435, 436, 437, 438, 439, 440, 441, 442,443, 445, 446, 447, 448, 449, 450, 451, 452, 453, 454: n = A,T,C or G
  misc_feature 455, 456, 457, 458, 459, 460, 461, 462, 463, 464, 465, 466,467, 468, 469, 470, 471, 472, 473, 474, 475, 476, 477, 478,479, 480, 481, 482, 483, 484, 485, 486, 487, 488, 489, 490,491, 492, 493, 494, 495, 496, 497, 498, 499, 500, 501: n = A,T,C or G
  misc_feature 502, 503, 504, 505, 506, 507, 508, 509, 510, 511, 512, 513,514, 515, 516, 517, 518, 519, 520, 521, 522, 523, 524, 525,526, 527, 528, 529, 530, 531, 532, 533, 534, 535, 536, 537,538, 539, 540, 541, 542, 543, 544, 545, 546, 547, 548: n = A,T,C or G
  misc_feature 549, 550, 551, 552, 553, 554, 555, 556, 557, 558, 559, 560,561, 562, 563, 564, 565, 566, 567, 568, 569, 570, 571, 572,573, 574, 575, 576, 577, 578, 579, 580, 581, 582, 583, 584,585, 586, 587, 588, 589, 590, 591, 592, 593, 594, 595: n = A,T,C or G
  misc_feature 596, 597, 598, 599, 600, 601, 602, 603, 604, 605, 606, 607,608, 609, 610, 611, 612, 613, 614, 615, 616, 617, 618, 619,620, 621, 622, 623, 624, 625, 626, 627, 628, 629, 630, 631,632, 633, 634, 635, 636, 637, 638, 639, 640, 641, 642-758: n = A,T,C or G
atgaatncncataatcgacttantatagggctaattggagctccaccgcggtggcggcccgaggtacaatgtttgctgctagggacactgagccaaggaagatgtagcctctacccttgaagaactaacataaatgtaaacaggtaagttgtcatgccttgtaggacatgctgtaactcagtctggggtacctgcccgggcggccgctctagaactagtggatcccccgggctgcaggaattcgatatcaagcttatcgataccgtcgacctcgagggggggcccggtacccagcttttgttccctttagtgagggttaattgcgcgcttggcgtaatcatggtcatagctgtttcctggannnnnnnnnnnnnnnnnnnnnnnnnnnnnnnnnnnnnnnnnnnnnnnnnnnnnnnnnnnnnnnnnnnnnnnnnnnnnnnnnntnnnnnnnnnnnnnnnnnnnnnnnnnnnnnnnnnnnnnnnnnnnnnnnnnnnnnnnnnnnnnnnnnnnnnnnnnnnnnnnnnnnnnnnnnnnnnnnnnnnnnnnnnnnnnnnnnnnnnnnnnnnnnnnnnnnnnnnnnnnnnnnnnnnnnnnnnnnnnnnnnnnnnnnnnnnnnnnnnnnnnnnnnnnnnnnnnnnnnnnnnnnnnnnnnnnnnnnnnnnnnnnnnnnnnnnnnnnnnnnnnnnnnnnnnnnnnnnnnnnnnnnnnnnnnnnnnnnnnnnnnnnnnnnnnnnnnnnnnnnnnnnnnnnnnnnnnn

SEQ ID NO: 5123 - DNA, 729 bp, Homo sapiens
  misc_feature 6, 14, 23, 24, 448, 449, 450, 451, 452, 453, 454, 455, 456,457, 458, 459, 460, 461, 462, 463, 464, 465, 466, 467, 468,469, 470, 471, 472, 473, 474, 475, 476, 477, 478, 479, 480,481, 482, 483, 484, 485, 486, 487, 488, 489, 490, 491: n = A,T,C or G
  misc_feature 492, 493, 494, 495, 496, 497, 498, 499, 500, 501, 502, 503,504, 505, 506, 507, 508, 509, 510, 511, 512, 513, 514, 515,516, 517, 518, 519, 520, 521, 522, 523, 524, 525, 526, 527,528, 529, 530, 531, 532, 533, 534, 535, 536, 537, 538: n = A,T,C or G
  misc_feature 539, 540, 541, 542, 543, 544, 545, 546, 547, 548, 549, 550,551, 552, 553, 554, 555, 556, 557, 558, 559, 560, 561, 562,563, 564, 565, 566, 567, 568, 569, 570, 571, 572, 573, 574,575, 576, 577, 578, 579, 580, 581, 582, 583, 584, 585: n = A,T,C or G
  misc_feature 586, 587, 588, 589, 590, 591, 592, 593, 594, 595, 596, 597,598, 599, 600, 601, 602, 603, 604, 605, 606, 607, 608, 609,610, 611, 612, 613, 614, 615, 616, 617, 618, 619, 620, 621,622, 623, 624, 625, 626, 627, 628, 629, 630, 631, 632: n = A,T,C or G
  misc_feature 633, 634, 635, 636, 637, 638, 639, 640, 641, 642, 643, 644,645, 646, 647, 648, 649, 650, 651, 652, 653, 654, 655, 656,657, 658, 659, 660, 661, 662, 663, 664, 665, 666, 667, 668,669, 670, 671, 672, 673, 674, 675, 676, 677, 678, 679: n = A,T,C or G
  misc_feature 680, 681, 682, 683, 684, 685, 686, 687, 688, 689, 690, 691,692, 693, 694, 695, 696, 697, 698, 699, 700, 701, 702, 703,704, 705, 706, 707, 708, 709, 710, 711, 712, 713, 714, 715,716, 717, 718, 719, 720, 721, 722, 723, 724, 725-729: n = A,T,C or G
aagtancgacttantatagggcnnattggagctccccgcggtggcggccgaggtaccttgcacatctctgcctgcgctgctcacccactgtcaagaaagaaaggtagagcctggtgctctccctaagcactgtgggcctcacagttcgggcgggagcccccagcacctggctcttctgctggaaagcttggtttcactcttcagaggtggtggcaacatccccagaaaaccggtaggcgtgggcacagtggctggaggccgagggctcctcgccatagcagaagcacggccgctctagaactagtggatcccccgggctgcaggaattcgatatcaagcttatcgataccgtcgacctcgagggggggcccggtacccagcttttgttccctttagtgagggttaattgcgcgcttggcgtaatcatggtcatagctgtttcctggannnnnnnnnnnnnnnnnnnnnnnnnnnnnnnnnnnnnnnnnnnnnnnnnnnnnnnnnnnnnnnnnnnnnnnnnnnnnnnnnnnnnnnnnnnnnnnnnnnnnnnnnnnnnnnnnnnnnnnnnnnnnnnnnnnnnnnnnnnnnnnnnnnnnnnnnnnnnnnnnnnnnnnnnnnnnnnnnnnnnnnnnnnnnnnnnnnnnnnnnnnnnnnnnnnnnnnnnnnnnnnnnnnnnnnnnnnnnnnnnnnnnnnnnnnnnnnnnnnnnnnnnnnnnnnnnnnnnnnnnn

SEQ ID NO: 5124 - DNA, 841 bp, Homo sapiens
  misc_feature 5, 9, 10, 11, 13, 25, 34, 633, 693, 704, 706, 722, 727, 740,747, 768, 776, 806, 818, 841: n = A,T,C or G
gctanttgnnncngatggggctgancggagctgnccgcggtggcggccgggggccattgagactgccatggaagacttgaaaggtcacgtagctgagacttctggagagaccattcaaggcttctggctcttgacaaagatagaccactggaacaatgagaaggagagaattctactggtcacagacaagactctcttgatctgcaaatacgacttcatcatgctgagttgtgtgcagctgcagcggattcctctgagcgctgtctatcgcatctgcctgggcaagttcaccttccctgggatgtccctggacaagagacaaggagaaggccttaggatctactgggggagtccggaggagcagtctcttctgtcccgctggaacccatggtccactgaagttccttatgctactttcactgagcatcctatgaaatacaccagtgagaaattccttgaaatttgcaagttgtctgggttcatgtctaagcttgttccagctatccagaatgcccacaagaattcaactggatctggaagaggaaagaaactgatggtgttaactgaacccattttgattgagacctacacagggctgatgtcattcattggaaaccgcaacaaacttggctntttctttgcccgtgggagtattggtttttgaagaagtcttttttggtacctgcccgggcnggccgttcggntnttaaactagtgggatnccccnggcttgcaggaantcgaatntcaagcttatcgatcccgtcnacctcganggggggggcccggtaccccaccttttgttnccctttaatgangggttaaatgccccccttggcgn

SEQ ID NO: 5125 - DNA, 970 bp, Homo sapiens
  misc_feature 1, 12, 17, 33, 35, 40, 51, 55, 57, 151, 183, 279, 290, 307,328, 329, 339, 444, 445, 449, 452, 453, 454, 457, 458, 459,461, 462, 463, 482, 483, 484, 485, 488, 493, 494, 499, 510,514, 533, 536, 541, 542, 543, 544, 556, 566, 571, 577: n = A,T,C or G
  misc_feature 578, 587, 588, 603, 604, 605, 606, 607, 614, 617, 618, 626,627, 630, 640, 656, 657, 658, 659, 662, 666, 670, 671, 672,673, 674, 675, 680, 692, 703, 713, 719, 726, 730, 734, 735,736, 741, 743, 744, 749, 750, 761, 784, 790, 791, 808: n = A,T,C or G
  misc_feature 814, 817, 830, 835, 838, 839, 859, 870, 872, 873, 880, 881,912, 913, 925, 935, 936, 937, 942, 947, 952, 958, 959, 968: n = A,T,C or G
nagtcgacatanttgtngctgattggagctccnangcgcnttatggactanttgntngctgattggagctccacccgcggtggcggccgccgggcaggtacgcgggtggcgtcacgccctcccagtgtgcaaataaggggctgctgtttcnacgacaccgtcgtgggggtcccctggtgcttntatcctaataccatcgacgtccttcaagaaaaaggagtgtgaaattttagaacctttttgcaggggatctgcctgcattcctgacgccggtgccgnccccaaccacngtgattaatccccagangctcgggttgccacttcaccnnacacctcaanaacacgctttttgaagttgtgcctttggcttaaaacacagattgactggttctgactttgactactcaaaaattggcctaaaattaaaaagagatcgatccaaannaaanaannnttnnnannntttttttccccccccgggnnnnggnggggnnccccnccctttttttncccnccactttttcaaaaaaaanttnttggnnnnaaaaaaggggcncctttttttnggggngggggnnaaaaaaaannttttttttttttttnnnnnttccccnggnnttgttttnnggngttttccctnaaaaaaatttggtttnnnnccntttnaaannnnnnaaaancccttttttttncaaaaaatgtntttttttttngggggnttccccnaaantttnnnccccnannggggnnttttttccccnaaggggggattttttcccccccngggggnnaaaaaaaaatttttttnaaaganccncggggggcttttnaaaanatnnggtccccccgggcggggggnaattttttttnannttttttnncccccccccccccccgggggggggcccgggnncccctttttttnccttttaaannnggganaaatngcccncggggnnaaaaagggnaa

SEQ ID NO: 5126 - DNA, 913 bp, Homo sapiens
  misc_feature 1, 4, 10, 13, 17, 576, 631, 632, 633, 634, 635, 639, 640,644, 645, 646, 647, 648, 649, 650, 651, 652, 653, 654, 655,656, 657, 658, 659, 660, 661, 662, 663, 664, 665, 666, 667,668, 669, 670, 671, 672, 673, 674, 675, 676, 677, 678: n = A,T,C or G
  misc_feature 679, 680, 681, 682, 683, 684, 685, 686, 687, 688, 689, 690,691, 692, 693, 694, 695, 696, 697, 698, 699, 700, 701, 702,703, 704, 705, 706, 707, 708, 709, 710, 711, 712, 713, 714,715, 716, 717, 718, 719, 720, 721, 722, 723, 724, 725: n = A,T,C or G
  misc_feature 726, 727, 728, 729, 730, 731, 732, 733, 734, 735, 736, 737,738, 739, 740, 741, 742, 743, 744, 745, 746, 747, 748, 749,750, 751, 752, 753, 754, 755, 756, 757, 758, 759, 760, 761,762, 763, 764, 765, 766, 767, 768, 769, 770, 771, 772: n = A,T,C or G
  misc_feature 773, 774, 775, 776, 777, 778, 779, 780, 781, 782, 783, 784,785, 786, 787, 788, 789, 790, 791, 792, 793, 794, 795, 796,797, 798, 799, 800, 801, 802, 803, 804, 805, 806, 807, 808,809, 810, 811, 812, 813, 814, 815, 816, 817, 818, 819: n = A,T,C or G
  misc_feature 820, 821, 822, 823, 824, 825, 826, 827, 828, 829, 830, 831,832, 833, 834, 835, 836, 837, 838, 839, 840, 841, 842, 843,844, 845, 846, 847, 848, 849, 850, 851, 852, 853, 854, 855,856, 857, 858, 859, 860, 861, 862, 863, 864, 865, 866: n = A,T,C or G
  misc_feature 867, 868, 869, 870, 871, 872, 873, 874, 875, 876, 877, 878,879, 880, 881, 882, 883, 884, 885, 886, 887, 888, 889, 890,891, 892, 893, 894, 895, 896, 897, 898, 899, 900, 901, 902,903, 904, 905, 906, 907, 908, 909, 910, 911, 912: n = A,T,C or G
ntantggacntanttgnggctgattggagctccccgcggtggcggccgaggtacgaagataaccaaatctgctactggcacattagactcaagtatggtcagcgtattcacctgagttttttagattttgaccttgaagatgacccaggttgcttggctgattatgttgaaatatatgacagttcgatgatgtccatggctttgtgggaagatactgtggagatgcgcttcagatgacatcatcagtacctgcccgggcggccgcccgggcaggtacccgcctgggcaggccttcaccagcacctctgttttccagaaacagcagttgccactccaatgggcacaggcagtgtggttggtgatgccatccccaagggcagggtgggtcccattcagccacatgggagcgcctgtctggcatcggtgcacctggacacaggtctccgacatccttactcctccttcccctacaaagcggtacctcggccgctctagaactagtggatcccccgggctgcaggaattcgatatcaagcttatcgataccgtcgacctcgagggggggcccggtcccancttttgttccctttagtgagggttaattgcgcccttggcgtaatcatggcataannnnntttnncggnnnnnnnnnnnnnnnnnnnnnnnnnnnnnnnnnnnnnnnnnnnnnnnnnnnnnnnnnnnnnnnnnnnnnnnnnnnnnnnnnnnnnnnnnnnnnnnnnnnnnnnnnnnnnnnnnnnnnnnnnnnnnnnnnnnnnnnnnnnnnnnnnnnnnnnnnnnnnnnnnnnnnnnnnnnnnnnnnnnnnnnnnnnnnnnnnnnnnnnnnnnnnnnnnnnnnnnnnnnnnnnnnnnnnnnnnnnnnnnnnnnnnnnnnnnnnnnnnnnnnnnnnnnnng

SEQ ID NO: 5127 - DNA, 827 bp, Homo sapiens
  misc_feature 235, 420, 468, 491, 676, 745, 780, 814, 824, 825, 826, 827: n = A,T,C or G
gcgacatagtatgttggctgattggagctccaccgcggtggcggcccgcccgggcaggtacgcggggagacacacaccagcccagccagaagcaagtcccagcccccagccctcccctggcctaccttttggggcccttctctgaaccaggctcccctgtcctgcaactctgtcattcacagggatgatccaggctctggctggattctttacctactttgtaatcctggctganaatggttttaggcctgttgatctgctgggcatccgcctccactgggaagataaatacttgaatgacctggaggacagctacggacagcagtggacctatgagcaacgaaaagttgtggagttcacatgccaaacggccttttttgtcaccatcgtggttgtgcagtgggcggatctcatcatctncaagactcgccgcaactcacttttccagcagggcatgaggtgaacatntcacaaaacaagccccagcactntcccaagccccacacaccaggacatgccatttccccctgccttttcttctccctccccgccacacccatgaatgtttcttcccagaaacaaagtcttaatatttgggatcctggaggagacactcttggctgcatttctgtcctacactccaggcatggacgtggcccttgcgaatgtcctcggncgctctaaaactaatggatcccccggctgcaggaattcgatatcaagcttatcgattccgtcgactcanggggggcccggtcccagcttttgttcctttatgangggtaattgccccttggcgtaatatggggatagnttttttttgnnnn

SEQ ID NO: 5128 - DNA, 903 bp, Homo sapiens
  misc_feature 3, 10, 11, 18, 427, 541, 553, 561, 582, 597, 616, 627, 629,642, 646, 662, 681, 701, 711, 718, 721, 722, 729, 730, 732,733, 734, 735, 736, 737, 738, 739, 740, 741, 742, 743, 744,745, 746, 747, 748, 749, 750, 751, 752, 753, 754, 755: n = A,T,C or G
  misc_feature 756, 757, 758, 759, 760, 761, 762, 763, 764, 765, 766, 767,768, 769, 770, 771, 772, 773, 774, 775, 776, 777, 778, 779,780, 781, 782, 783, 784, 785, 786, 787, 788, 789, 790, 791,792, 793, 794, 795, 796, 797, 798, 799, 800, 801, 802: n = A,T,C or G
  misc_feature 803, 804, 805, 806, 807, 808, 809, 810, 811, 812, 813, 814,815, 816, 817, 818, 819, 820, 821, 822, 823, 824, 825, 826,827, 828, 829, 830, 831, 832, 833, 834, 835, 836, 837, 838,839, 840, 841, 842, 843, 844, 845, 846, 847, 848, 849: n = A,T,C or G
  misc_feature 850, 851, 852, 853, 854, 855, 856, 857, 858, 859, 860, 861,862, 863, 864, 865, 866, 867, 868, 869, 870, 871, 872, 873,874, 875, 876, 877, 878, 879, 880, 881, 882, 883, 884, 885,886, 887, 888, 889, 890, 891, 892, 893, 894, 895, 896: n = A,T,C or G
  misc_feature 897, 898, 899, 900, 901, 902: n = A,T,C or G
agngactaanngacatanttggggctgattggagctccccgcggtggcggccgaggtacattttgaactcccaattcccacccacagagcttggtgctagctctgcacacggtagatataagcaagaacttaggccgaagtgaattgaatgacccattcttaccagataattctgttcttgcaggggtatttcggatctgggttctgcctcaaggctgacggaatcaatacattcagcaagtgtatcctcagtcacgtctccattgagagggggctccagggcgttggcatcctgaggctgcacagggggcccaatggcggcagcccctgcaccctgcacagctgcattttcatgcccctcccctctggggtcagctggtgttggcttatgtgaaactgcagctgaatcacaatgcacttctgcatnctcaggtaaaagaatcactattaggcatcttcaataactttttgcttttgtctccagtggcttaaggtggtcaccagccttcattaagaacatttttagtattcgcttaaggcnggccggttttanaactaatnggaatcccccggggcttgcanggaattccaatattnaagccttattgaataccgnccgaaccctcnanggggggggccccnggancccaacctttttgttncccttttaatgaagggttnaattggccccccttggcgtnaaacaatggncaataanctnnttttccnngnnnnnnnnnnnnnnnnnnnnnnnnnnnnnnnnnnnnnnnnnnnnnnnnnnnnnnnnnnnnnnnnnnnnnnnnnnnnnnnnnnnnnnnnnnnnnnnnnnnnnnnnnnnnnnnnnnnnnnnnnnnnnnnnnnnnnnnnnnnnnnnnnnnnnnnnnnnnnnnnnnnnnnnnnnng

SEQ ID NO: 5129 - DNA, 826 bp, Homo sapiens
  misc_feature 1, 8, 11, 18, 22, 23, 477, 602, 637, 651, 654, 655, 656,657, 658, 659, 660, 661, 662, 663, 664, 665, 666, 667, 668,669, 670, 671, 672, 673, 674, 675, 676, 677, 678, 679, 680,681, 682, 683, 684, 685, 686, 687, 688, 689, 690, 691: n = A,T,C or G
  misc_feature 692, 693, 694, 695, 696, 697, 698, 699, 700, 701, 702, 703,704, 705, 706, 707, 708, 709, 710, 711, 712, 713, 714, 715,716, 717, 718, 719, 720, 721, 722, 723, 724, 725, 726, 727,728, 729, 730, 731, 732, 733, 734, 735, 736, 737, 738: n = A,T,C or G
  misc_feature 739, 740, 741, 742, 743, 744, 745, 746, 747, 748, 749, 750,751, 752, 753, 754, 755, 756, 757, 758, 759, 760, 761, 762,763, 764, 765, 766, 767, 768, 769, 770, 771, 772, 773, 774,775, 776, 777, 778, 779, 780, 781, 782, 783, 784, 785: n = A,T,C or G
  misc_feature 786, 787, 788, 789, 790, 791, 792, 793, 794, 795, 796, 797,798, 799, 800, 801, 802, 803, 804, 805, 806, 807, 808, 809,810, 811, 812, 813, 814, 815, 816, 817, 818, 819, 820, 821,822, 823, 824, 825, 826: n = A,T,C or G
ncgccgtnatngacatanttgnnggctgattggagctccaccgcggtggcggcccgaggtacccgcgtggctaggggagccctaggaagcgagtatagctctcgtggccgaatggaatgaagcgaagccttcatgtcagcattgggcttgcaggtgctgagcccccgatggtggcccctcttcccggctttctctcaggggcatgggtggggtggagatattcaactacttccaacggaaaccaacacttgaaaggttatgaaggcccctaaacctcctgctcttccatggtgatggctgacagctaaagccacactgccactaccctaagcccaagcttgatcacctggaaatggggactgagagaggacgagaacagcacagcctttgagctctcatggggtggcgtaaatttatggtcaatatgcctccagatcaaaggtcctgctgttagagagttttctttttttgctttantggtacctgcccgggcggccgctctagaactagtggatcccccgggctgcaggaattcgatatcaagcttatcgataccgtccacctcgagggggggcccggtacccaacttttgttccctttantgaagggttaattgcgcgcttggcgtaatcatggncatagcttgttccnggnnnnnnnnnnnnnnnnnnnnnnnnnnnnnnnnnnnnnnnnnnnnnnnnnnnnnnnnnnnnnnnnnnnnnnnnnnnnnnnnnnnnnnnnnnnnnnnnnnnnnnnnnnnnnnnnnnnnnnnnnnnnnnnnnnnnnnnnnnnnnnnnnnnnnnnnnnnnnnnnnnnnnnnnnnnnn

SEQ ID NO: 5130 - DNA, 844 bp, Homo sapiens
  misc_feature 6, 7, 12, 19, 24, 53, 551, 610, 648, 692, 737, 740, 768,783, 788, 798, 822, 831, 842: n = A,T,C or G
gccatnnttggncatagtntgttngctgattggagctccaccgcggtggcggncgaggtacgcggggacctcattcatttctaccggtctctagtagtgcagcttcggctggtgtcatcggtgtccttcctccgctgccgcccccgcaaggcttcgccgtcatcgaggccatttccagcgacttgtcgcacgcttttctacatacttcgttccccgccaaccgcaaccattgacgccatgtcgggttattcgagtgaccgagaccgcggccgcccgggcaggtactcaagtcacttaatgaggaagctgtgaagaaagacaactctgtccattgggagcgccctcagaaacccaaggcaccagtggggcatttttacgaaccccaggctccctctgctgaggtggagatgacatcctatgtgctcctcgcttatctcacggcccagccagccccaacctcggaggacctgacctctgcaaccaacatcgtgaagtggatcacgaagcagcagaatgcccagggcggtttctcctccacccaggacacaggnggtggctctccatgctctgtccaaatatggagcagccacatttaccaaggactgggaangctgcacaagtgactatccagtcttcagggacattttncacaaattccaagtggacaacaacaaccggctgctatgcagcangtctcattgccagaattcctgggggaatcaacatgaaagtgacanganaaggatgtgttttaccttcaagaacatncttggaaatcaaatnttctnccaaaaaaanggaaaaagttcccctttgctttangaagtgcanaactctgcctnat

SEQ ID NO: 5131 - DNA, 876 bp, Homo sapiens
  misc_feature 6, 17, 23, 27, 392, 484, 485, 486, 487, 488, 489, 490, 491,492, 493, 494, 495, 496, 497, 498, 499, 500, 501, 502, 503,504, 505, 506, 507, 508, 509, 510, 511, 512, 513, 514, 515,516, 517, 518, 519, 520, 521, 522, 523, 524, 525, 526: n = A,T,C or G
  misc_feature 527, 528, 529, 530, 531, 532, 533, 534, 535, 536, 537, 538,539, 540, 541, 542, 543, 544, 545, 546, 547, 548, 549, 550,551, 552, 553, 554, 555, 556, 557, 558, 559, 560, 561, 562,563, 564, 565, 566, 567, 568, 569, 570, 571, 572, 573: n = A,T,C or G
  misc_feature 574, 575, 576, 577, 578, 579, 580, 581, 582, 583, 584, 585,586, 587, 588, 589, 590, 591, 592, 593, 594, 595, 596, 597,598, 599, 600, 601, 602, 603, 604, 605, 606, 607, 608, 609,610, 611, 612, 613, 614, 615, 616, 617, 618, 619, 620: n = A,T,C or G
  misc_feature 621, 622, 623, 624, 625, 626, 627, 628, 629, 630, 631, 632,634, 635, 636, 637, 638, 640, 641, 642, 643, 644, 645, 646,647, 648, 649, 650, 651, 652, 653, 654, 655, 656, 657, 658,659, 660, 661, 662, 663, 664, 665, 666, 667, 668, 669: n = A,T,C or G
  misc_feature 670, 671, 672, 673, 674, 675, 676, 677, 678, 679, 680, 681,682, 683, 684, 685, 686, 687, 688, 689, 690, 691, 692, 693,694, 695, 696, 697, 698, 699, 700, 701, 702, 703, 704, 705,706, 707, 708, 709, 710, 711, 712, 713, 714, 715, 716: n = A,T,C or G
  misc_feature 717, 718, 719, 720, 721, 722, 723, 724, 725, 726, 727, 728,729, 730, 731, 732, 733, 734, 735, 736, 737, 738, 739, 740,741, 742, 743, 744, 745, 746, 747, 748, 749, 750, 751, 752,753, 754, 755, 756, 757, 758, 759, 760-796, 798-876: n = A,T,C or G
agggcntatcgacatantatatngctnattggagctccaccgcggtggcggcccgcccgggcaggtactcatggcagaaccagcccctctggggacagggtctaagtttagaaggaaacaccaggagagcggttaattgacattccttcaaatgctgcttcacacacccaaaacaatttcatctggaaaatgggtggaaggaacgaaggggttggttctgaggctatccagagggatgagggaggagcacagcgcaggctcatgggccagaagaagagacgcttccacggggtaggagagggttctcactttccctcagtacctcggccgctctagaactagtggatcccccgggctgcaggaattcgatatcaagcttatcgataccgtcnacctcgagggggggcccggtacccagcttttgttccctttagtgagggttaattgcgcgcttggcgtaatcatggtcatagctgtttctgannnnnnnnnnnnnnnnnnnnnnnnnnnnnnnnnnnnnnnnnnnnnnnnnnnnnnnnnnnnnnnnnnnnnnnnnnnnnnnnnnnnnnnnnnnnnnnnnnnnnnnnnnnnnnnnnnnnnnnnnnnnnnnnnnnnnnnnnnnnnnnnnnnnntnnnnntnnnnnnnnnnnnnnnnnnnnnnnnnnnnnnnnnnnnnnnnnnnnnnnnnnnnnnnnnnnnnnnnnnnnnnnnnnnnnnnnnnnnnnnnnnnnnnnnnnnnnnnnnnnnnnnnnnnnnnnnnnnnnnnnnnnnnnnnnnnnnnnnnnnnnnnnnnnnnntnnnnnnnnnnnnnnnnnnnnnnnnnnnnnnnnnnnnnnnnnnnnnnnnnnnnnnnnnnnnnnnnnnnnnnnnnnnnnn

SEQ ID NO: 5132 - DNA, 394 bp, Homo sapiens
  misc_feature 2, 6, 14, 21, 22: n = A,T,C or G
cntatngactactntggggcnnattggagctccaccgcggtggcggccgaggacagcccacggaactgtgagccaattcaatcccttttctttttcaattacccactctcatgtatatctttatagcagtgtgagaacagattaatacactcctcctcagaaagcattcaatttagctgtgtctaaagtatgccaggtgtcctagggtgttatcttagtcaataattcttcctcttcagcaagatctatttgcctatgacagcttgacctacagttcctaccatacttgtcagtaacaagtagcccataacatctgaagggacttcattgaaatcacagaggttctttagttctttacctcattagtaggcattagggaagcacatcaactttc

SEQ ID NO: 5133 - DNA, 408 bp, Homo sapiens
  misc_feature 3, 7, 18, 23: n = A,T,C or G
gcntatngacttactatngggcnaattggagctccaccgcggtggcggccgcccgggcaggtacgctctccaactggccaatacaaatcccttgtatccgtcttccgggctgcagggctccctcaggcagaggctatgacctgcagataggccacaccattcttggactggtcctgtagagcagggttccccaatccctgttactgcttcatggcctgttcagaagtgggccacacagcaggagggacttcagtacctcggccgctctagaactagtggatcccccgggctgcaggaattcgatatcaagcttatcgataccgtcgacctcgagggggggcccggtacccagcttttgttccctttagtgagggttaattgcgcgcttggcgtaatcatggtcatagc

SEQ ID NO: 5134 - DNA, 717 bp, Homo sapiens
  misc_feature 8, 13, 20, 29, 30, 296, 306, 308, 309, 315, 321, 322, 324,325, 332, 336, 342, 349, 355, 358, 366, 368, 372, 374, 379,381, 384, 386, 389, 395, 396, 399, 402, 403, 405, 410, 411,413, 423, 424, 425, 426, 432, 434, 440, 443, 445, 446: n = A,T,C or G
  misc_feature 447, 448, 449, 453, 459, 460, 472, 476, 477, 479, 484, 489,492, 495, 496, 497, 498, 499, 500, 501, 503, 504, 505, 506,509, 510, 513, 515, 516, 517, 519, 521, 522, 524, 527, 528,529, 530, 531, 532, 535, 537, 538, 539, 540, 541, 542: n = A,T,C or G
  misc_feature 545, 546, 547, 548, 549, 551, 552, 554, 556, 557, 558, 559,560, 561, 562, 564, 565, 566, 568, 569, 570, 571, 572, 573,575, 577, 579, 580, 582, 584, 586, 588, 589, 590, 591, 592,598, 599, 600, 601, 602, 604, 605, 606, 607, 608, 609: n = A,T,C or G
  misc_feature 611, 614, 615, 616, 617, 618, 619, 620, 621, 626, 627, 629,630, 631, 634, 635, 636, 637, 638, 639, 640, 641, 643, 645,646, 647, 648, 649, 652, 653, 654, 655, 657, 658, 662, 666,667, 668, 669, 670, 671, 672, 673, 675, 676, 678, 679: n = A,T,C or G
  misc_feature 680, 681, 682, 683, 684, 685, 686, 687, 688, 696, 699, 700,701, 702, 704, 705, 706, 707, 710, 711, 712, 713, 714, 716: n = A,T,C or G
gaatcgcntaatngacttantatagggcnnattggagctccaccgcggtggcggccggaaggcacgggggctgcgggccggcgcgagttcagaggcttctttttccgcggacggagacactgtacctcggccgctctagaactagtggatcccccgggctgcaggaattcgatatcaagcttatcgataccgtcgacctcgagggggggcccggtacccagcttttgttccctttagtgagggttaattgcgcgcttggcgtaatcatggtcatagctgtttcctgacccaatacnaccaaatccntnnactccnaccttnncnnatacctncccnggcggncctctanaactantgnatcccccngnctgnangaatncnatntnaancttatnnatnccnncnacctnnanggggggcccnnnncccatntntataanacntnnnnnatcnttattnnatcactggaaantatnntnaattnacaanttnctnnnnnnntnnnnaannatncnnntntnntnctnnnnnnttntnnnnnnttnnnnnanntntnnnnnnntnnnannnnnntnantnntncntnannnnnaacttnnnnncnnnnnncnttnnnnnnnncttanncnnnatnnnnnnnncncnnnnnaannnntnntttnaaannnnnnnntnncnnnnnnnnnnntttaaaanttnnnnannnnccnnnnntnc

SEQ ID NO: 5135 - DNA, 410 bp, Homo sapiens
  misc_feature 8, 13, 20, 25, 31, 410: n = A,T,C or G
gatccgcntaatngacatantatgntggctnattggagctccaccgcggtggcggccgcccgggcaggtacccagacaccctgataaggacttctgacctacataactatgagctaataacgtgtgttgttttaagctgctaaactcatgataatttcttttgcagcaatagaaaaaaaaagtgacaatcctctagaagaagggtgacctatagcccatagagccctgttattcacaagaaaccatggtctttccacagtggtaaggagatgaaccatggggtcaaaaagctacactttatgcatcatttcggaagggcagaaatcaggaaggataaatgctaaaagtatcacaagcttcttctggaattcatggttttcatccttgaaggagtgctccatgaagactgn

SEQ ID NO: 5136 - DNA, 894 bp, Homo sapiens
  misc_feature 22, 226, 575, 578, 599, 634, 641, 668, 711, 735, 736, 737,738, 739, 740, 741, 742, 743, 745, 746, 747, 748, 749, 750,751, 752, 753, 754, 755, 756, 757, 758, 759, 760, 761, 762,763, 764, 765, 766, 767, 768, 769, 770, 771, 772, 773: n = A,T,C or G
  misc_feature 774, 775, 776, 777, 778, 779, 780, 781, 782, 783, 784, 785,786, 787, 788, 789, 790, 791, 792, 793, 794, 795, 796, 797,798, 799, 800, 801, 802, 803, 804, 805, 806, 807, 808, 809,810, 811, 812, 813, 814, 815, 816, 817, 818, 819, 820: n = A,T,C or G
  misc_feature 821, 822, 823, 824, 825, 826, 827, 828, 829, 830, 831, 832,833, 834, 835, 836, 837, 838, 839, 840, 841, 842, 843, 844,845, 846, 847, 848, 849, 850, 851, 852, 853, 854, 855, 856,857, 858, 859, 860, 861, 862, 863, 864, 865, 866, 867: n = A,T,C or G
  misc_feature 868, 869, 870, 871, 872, 873, 874, 875, 876, 877, 878, 879,880, 881, 882, 883, 884, 885, 886, 887, 888, 889, 890, 891,892, 893, 894: n = A,T,C or G
gccgtatcgactacttagggcnaattggagctccccgcggtggcggccgcccgggcaggtacaagttgtctttatgctgcgagataagtcctctcttggtttgagttcccaccttttcagtgaactcttacattttgggggatctgctcttgtaaaggacatcctttctggtctttgattacttgagaaaagtgagtgaggtggggccaagatggttgactagaancagctagtgtgtgccactctcacaaatagcagaaagagtggtgagacactagctcttcaaccggaacatccaggtggacacataaggattcatcagtgacatagtgtgaccttcggatcacggagaagagtgagacagatcagccattcacccaggagtggcacagacccaggggaatccccctacaagaaaatggtgagtgagtgagagtcccgtgggatgcatatttctgccacgaacctttgaatccctgggctcaggagataccccagctggggtctccagaccaaaacagagagccatgtggagtctgggtagagctgcttcttaggtaggtgtggagtcccantancatttgttccctgggtacctnggccgttctaaactaatggatcccccgggctgcangaattcnattcagcttatcgatccgtcacctcanggggggcccggtcccactttgttcccttaatgaggttaatgcnccttgcgtaatcatggtcataacnnnnnnnnngnnnnnnnnnnnnnnnnnnnnnnnnnnnnnnnnnnnnnnnnnnnnnnnnnnnnnnnnnnnnnnnnnnnnnnnnnnnnnnnnnnnnnnnnnnnnnnnnnnnnnnnnnnnnnnnnnnnnnnnnnnnnnnnnnnnnnnnnnnnnnnnnnnnnnn

SEQ ID NO: 5137 - DNA, 721 bp, Homo sapiens
  misc_feature 23, 260, 450, 451, 452, 453, 454, 455, 456, 457, 458, 459,460, 461, 462, 463, 464, 465, 466, 467, 468, 469, 470, 471,472, 473, 474, 475, 476, 477, 478, 479, 480, 481, 482, 483,484, 485, 486, 487, 488, 489, 490, 491, 492, 493, 494: n = A,T,C or G
  misc_feature 495, 496, 497, 498, 499, 500, 501, 502, 503, 504, 505, 506,507, 508, 509, 510, 511, 512, 513, 514, 515, 516, 517, 518,519, 520, 521, 522, 523, 524, 525, 526, 527, 528, 529, 530,531, 532, 533, 534, 535, 536, 537, 538, 539, 540, 541: n = A,T,C or G
  misc_feature 542, 543, 544, 545, 546, 547, 548, 549, 550, 551, 552, 553,554, 555, 556, 557, 558, 559, 560, 561, 562, 563, 564, 565,566, 567, 568, 569, 570, 571, 572, 573, 574, 575, 576, 577,578, 579, 580, 581, 582, 583, 584, 585, 586, 587, 588: n = A,T,C or G
  misc_feature 589, 590, 591, 592, 593, 594, 595, 596, 597, 598, 599, 600,601, 602, 603, 604, 605, 606, 607, 608, 609, 610, 611, 612,613, 614, 615, 616, 617, 618, 619, 620, 621, 622, 623, 624,625, 626, 627, 628, 629, 630, 631, 632, 633, 634, 635: n = A,T,C or G
  misc_feature 636, 637, 638, 639, 640, 641, 642, 643, 644, 645, 646, 647,648, 649, 650, 651, 652, 653, 654, 655, 656, 657, 658, 659,660, 661, 662, 663, 664, 665, 666, 667, 668, 669, 670, 671,672, 673, 674, 675, 676, 677, 678, 679, 680, 681, 682: n = A,T,C or G
  misc_feature 683, 684, 685, 686, 687, 688, 689, 690, 691, 692, 693, 694,695, 696, 697, 698, 699, 700, 701, 702, 703, 704, 705, 706,707, 708, 709, 710, 711, 712, 713, 714, 715, 716, 717, 718,719, 720, 721: n = A,T,C or G
cctaaacgacttactatagggcnaattggagctccaccgcggtggcggccgtgcttctgctatggcgaggagccctcggcctccagccactgtgcccacgcctaccggttttctggggatgttgccaccacctctgaagagtgaaaccaagctttccatgcaggaagagccaggtgctgggggctcccgcccgaactgtgaggcccacagtgcttagggagagcaccaggctctacctttctttcttgacagtgggcgancagcgcaggcagagatgtgcaaggtacctcggccgctctagaactagtggatcccccgggctgcaggaattcgatatcaagcttatcgataccgtcgacctcgagggggggcccggtacccagcttttgttccctttagtgagggttaattgcgcgcttggcgtaatcatggtcatagctgtttcctggnnnnnnnnnnnnnnnnnnnnnnnnnnnnnnnnnnnnnnnnnnnnnnnnnnnnnnnnnnnnnnnnnnnnnnnnnnnnnnnnnnnnnnnnnnnnnnnnnnnnnnnnnnnnnnnnnnnnnnnnnnnnnnnnnnnnnnnnnnnnnnnnnnnnnnnnnnnnnnnnnnnnnnnnnnnnnnnnnnnnnnnnnnnnnnnnnnnnnnnnnnnnnnnnnnnnnnnnnnnnnnnnnnnnnnnnnnnnnnnnnnnnnnnnnnnnnnnnnnnnnnnnnnnnnnnn

SEQ ID NO: 5138 - DNA, 733 bp, Homo sapiens
  misc_feature 7, 64, 73, 80, 82, 84, 91, 97, 101, 104, 110, 113, 114, 115,118, 125, 128, 132, 135, 139, 145, 147, 151, 155, 157, 158,161, 162, 163, 164, 166, 170, 176, 184, 189, 192, 213, 214,220, 233, 241, 244, 263, 280, 297, 305, 309, 362: n = A,T,C or G
  misc_feature 411, 417, 435, 444, 517, 532, 534, 583, 598, 604, 617, 619,626: n = A,T,C or G
ccgtaancgacttactatagggctaattggagctccaccgcggtggcggccgaggtactttatnttttttttnttttttntnanaatattntttttntttnttnaggggnatnnnttntttttanagnggcngcncggncatttncnattntgcnannatnnnntntttntaaaantttggganaattnaantttagtttctgatttcacacnnttaggnttttagttgtccngaaaagcnggnccttacactcacagtttgngagtgtctgcatggcancggctgcagggaaccanagaatggntccnatgtgggcctgggacccgcagcaattgcgctcatgattttggcctttctgctnctgctattggtacctcggccgaggtacagtggccccccgtgaaagacanaattgnggttttcctggggtcacnccctcccantgtgcaaataagggctgctgtttcaacgacaccgttcgtggggtcccctggtgcttctatcctaataccatcnacgtccctccagaanangaagtgtgaattttagacacttctgcagggatctgcctgcatcctgacncggtgccgtccccancacggngaattagtcccananctcgggntggcaccttccaccggaacacctcaaaacacgcttcttgcaagcttggcctcggctcaacaacacaaaattgactggctcttacttttgactaacttaaaaattggg

SEQ ID NO: 5139 - DNA, 809 bp, Homo sapiens
  misc_feature 94, 190, 208, 257, 304, 318, 326, 522, 535, 575, 609, 620,633, 642, 650, 652, 680, 701, 707, 717, 736, 748, 749, 758,760, 763, 786, 787, 804, 806, 807, 808: n = A,T,C or G
gtaatacgactactatagggcgaattggagctccaccgcggtggcggccgaggtactttatttttttttttttttttttcctctcacccttggngatctcaaccatttccatggttttacttactatctatatattaatagttatatattaaacttgtatctcttacccagatctcatttctgtctgttnaattacctactcagcctnttggtttgactacctaatggcaaacaatctccccttcaccccagtcttntttattcagtaaatggagccaatgtttttggctcaggctaaccccanaagtaggacacatnttgcattnttgcctttccctcacacacaatatccaatccaatggtagattctttcaggatcgagcggccgcccgggcaggtacctggctggggaggccaggctgacggtggtgccagtgtctgaggaggaggtgagggaggccctggtgcgtagtggctacaaggtccgggacctccgcacctatatcatgcctgcccaccttnaaaacaggcgtanatgaatgtcaagggcgtttttttcgcctgggctcaaaaangtttgggctgtgagggctgtaccttcggccgctntaaaaactaantgggatccccccnggctgcagngaattccnanttcaagcttatcgataccgtcgacctcnaggggggggcccggtacccancttttnttccctttangggaggggtaaattgcccncttgggcgaaannaatgggcananctnttttcctggggggaaaattgttnntcccttcaaaaattccnannnt

SEQ ID NO: 5140 - DNA, 833 bp, Homo sapiens
  misc_feature 92, 177, 179, 181, 211, 243, 252, 277, 301, 328, 336, 344,358, 361, 381, 390, 410, 450, 458, 513, 516, 523, 560, 568,572, 577, 578, 579, 586, 587, 604, 605, 621, 622, 627, 628,629, 653, 658, 662, 666, 681, 682, 683, 684, 703, 707: n = A,T,C or G
  misc_feature 729, 732, 744, 750, 752, 756, 759, 763, 770, 779, 808, 812,822, 824: n = A,T,C or G
gactcactatagggcgaattggagctccaccgcggtggcggccgcccgggcaggtactttttttttttttttttttttttttttacttatgnaaagaattgtttaatcagccgtgaattggggacttcaaacattttaaccatatgctgccagattgttcatcataaaatttccttntntntcccagaaaccggcgagagtttggcaagcnagttcctgttctccgatgtgtgtagggtgganagtgggganaactgctcctctcctgcacccaganaaggtagggcctcctaactgtaanccccatgttaatatcggactcctccanaggcttanctgatgcnggtgatgttggaanaanattaaatttactgctcaggngtaaggctntagcaaaggggaaaggctgngaaagaggagggagatgaagggaaaagaaggttacacctnaagaaaanatctgatgtgattcagccgatttatactgagtgccccccatttgccagggactgnggngtacctnggccgctctaaaactagtggatcccccgggctgcaangaaattcngatnttaannntttttcnnataccgtcggccctttnngggggggggcccccgnncccannnttttgttccttttagtggaggggnttaanttgngccnccttgggcgtaaatnnnntggggcataagcttgtttncctngtggggaaaattgttttcccgnttnacaatttgcccnccaacnantccnagnccgnggggccnttaaagtgnaaaagccctgggggtggccctaaatgggngganccctcccctncncttttattg

SEQ ID NO: 5141 - DNA, 831 bp, Homo sapiens
  misc_feature 2, 6, 7, 8, 9, 470, 579, 644, 645, 661, 669, 670, 677, 678,692, 694, 700, 702, 711, 718, 719, 724, 736, 760, 761, 762,772, 777, 782, 790, 791, 792, 795, 797, 799, 813, 820: n = A,T,C or G
gnaagnnnnggcgcgcgtaatacgactactatagggcgaattggagctccaccgcggtggcggccgaggtaccatggcagtcatgcaaagcatgggacagaagaaataccacggcagtgaactgtgaggataacttccattttttccctcggagagaacagtttacggggcagaggtgatatgttctgccttttgaagattactggcacacgttcagctttttcacctctctaatcgactggaagcagccagccgatcactagtcctccatccccctcgagtcctccgattgtcatgcctaggccttgccacaaagacagcacctttatgtgaaaaaaaacttagaaaaaatgcaggttaaagaaagcaataaactttctttaaaaaagttaaatggagatcttctgggaaaccaagccatgaatgcgagtttgtacattttgcccttagctttttgtttcctagcttgncttttttcttctgcttcctacttttcaggtttaaatttatcttttttcttctaaaagtatgtttttatcttctaatttccctatcttctctattcttttcttcgccttnccggacctggcccgggcgggccgttctagaaactagtggatcccccgggcttgcaggaattcgannttcaaccttttttggnacccggcnnacctgannggggggggcccggnancccccncnttttgggtnccttttnnagagngggggaaattgngcgccctggggggaaaaatagggnnnaaagggtttnctcgnggggnaaaaaggnnntcncncncaaatttcccccancaaaaanagggggggggg

SEQ ID NO: 5142 - DNA, 894 bp, Homo sapiens
  misc_feature 414, 462, 468, 499, 533, 547, 558, 564, 580, 591, 614, 621,632, 635, 637, 646, 652, 654, 668, 675, 678, 689, 695, 708,709, 747, 759, 761, 765, 772, 773, 775, 777, 779, 780, 781,782, 790, 792, 805, 813, 816, 817, 818, 849, 850, 854: n = A,T,C or G
  misc_feature 857, 859, 862, 866, 867, 870, 876, 879, 882, 883, 890, 891: n = A,T,C or G
gatcgactactatagggcgaattggagctccacccgcggtggcggccgaggtaccgctttgtaggggaaggaggagtaaggatgtcggagacctgtgtccaggtgcaccgatgccagacagacgctcccatgtggctgaatgggacccaccctgcccttggggatggcatcaccaaccacactgctgtgcccattggagtggcaactgctgtttctggaaaacagaggtgctggtgaaggcctgcccaggcgggtacctgcccgggcggccggctgttatgctcatcatggcacttaagagatgcttaacaaacctttcctacaatgttcctcagattttcagagcttatttgatctagcatctggttcctaaattctgagtcacatcagaagccaaacttgaatgctttttgnaaagagctagcctcataccactttcagttgggaaggggagtaccttcngcccgntctagaactagtgggatcccccgggctgcangaattcgatatcaagcttaatctgataccgtcgncctcgagggggggnccggtacccancttttngttcctttagtgaggnttaattgcgcnttgggcgtaatcaatggtcatanctttttnctgggtgaaantgntntccccttanaatttncncacaacatactganccgggancantaaagtttaantctggngtgcctaatttanngaacttactcacatttaatttcgttcgcttaattgccnttttctagtcgngnaaanctgtttnncnantnnnntaattaancngccaccccccggntaaagcgnttnnntattgggcgctttttcattttttagttaatnnattnttngnttngttnnatnggtttnggnaanngtttaannttt

SEQ ID NO: 5143 - DNA, 934 bp, Homo sapiens
  misc_feature 5, 6, 294, 315, 554, 579, 661, 662, 696, 702, 712, 770, 773,774, 775, 776, 798, 826, 831, 834, 853, 861, 865, 870, 877,878, 886, 894, 895, 902, 904, 907, 915, 921, 927: n = A,T,C or G
tacgnncgctacgactcactatagggcgaattggagctccccgcggtggcggtcgaggacccagccagtatttctttcctttattttatttagttgtttatggaaggaggttaagtccagtctttgtttctccatcatggctagatcacagattttgaacataggcagtctcacatcataatcaatgttctaaacattacattctcattcctgtctatatagctaaaatgggatgaaagatgaactttctggggaagtatgtaatttaagtgctatataaggactttcaaaatngaatatacagccaggtgtggngggcttgtgcctcaatcctagctattcagggaggctgaaagggatcacttgaggccaggagccagagatcagcctgggcaacataacaagaccccatcttttaaaaaaaaaaattaagtacctgcccgggccggccgctctagaactagtggatcccccgggcttgcaggaatttcgatatcaaagcttatcgatacccgtcgacctcgaggggggggcccggtacccagcttttggtnccttttagtgaagggttaattgccncgcttggccgtaatcattggtccataagctggtttcctgtggggaaattgttttccgctcacaaatttcccaacaacatacnnagcccggagcattaaagtggtaaaagccttgggntgcctnaatgagtgancctacctcccattaattgcgttgcgctcacttgcccgtttttcagtccgggaaacctntcnnnncaacttgcattaaaagaatccngccaacccccggggagaggcgggttgcnaattnggngctttttccgctttcttgnttaattanttcntttgngcttggnncgttcggnttgggctnncggtatnanttnacttaaanggcggntatacnggttttt

SEQ ID NO: 5144 - DNA, 1031 bp, Homo sapiens
  misc_feature 6, 7, 9, 11, 12, 13, 15, 16, 17, 18, 21, 22, 26, 31, 32,34, 42, 43, 44, 48, 52, 54, 64, 66, 68, 69, 70, 71, 72,73, 74, 75, 76, 78, 79, 82, 90, 97, 103, 251, 302, 376,528, 537, 547, 558, 573, 583, 617, 625, 631, 641, 643, 649,661: n = A,T,C or G
  misc_feature 667, 669, 683, 693, 702, 712, 713, 722, 723, 728, 731, 734,753, 764, 775, 777, 778, 779, 791, 795, 798, 806, 808, 811,820, 826, 833, 834, 843, 844, 849, 850, 863, 866, 869, 878,907, 926, 928, 945, 946, 949, 950, 970, 974, 979, 981: n = A,T,C or G
  misc_feature 982, 984, 987, 989, 996, 1001, 1017, 1020, 1024, 1025, 1028: n = A,T,C or G
tttgtnnantnnntnnnnaanntttntcctnnantaattgtnnntttnatgntntttacatttntntnnnnnnnnngnnggncatcattngttaggngattgnactcccgcggtggcggccgagtaccttccgtgttcacttcgcgctcctggggatactagaagctccacttcagatccttcttgtgacaccatctgagcttcctccaatagataagaaaaaaggcagaggatacactacagttatcagntcccgtcttaagcaggctgaattaaaagaagatctcttagcctgcccagtnacgcataattggtaaagcgatcagatacctaaagggttaaaaaaagggcattagaagctagagctgcattgccnagcaagcagtaagaaaaaaaaaaaaaaaaagtacctgcccgggcggccgctctagaactagtggatcccccgggctgcaggaatttcgatatcaaagctttatcgattaccgtcagaccttagagggggggcccggtacccaagcttttgcnccctttagngagggttaanttgcgcgcttnggcgtaatcatgggncataagctgnttcctggtgtgaaattgttatccgctcacaattncacacatnattacnagccgggagncntaaagntgtaaagcctgnggtgcntnatgagtgagctaantcaacattanttgcgttgncgctcactgnnccctttttnnattcnggnaanactggtttgccatgcttgnatttattgaantcgggccaacncnnnggagtaaaggtnggtnttncgttattngngcnccttttccngcattncttggtnnaatgtcttnnttggnntttgtttgtttcngantgnctgccaacnggggttctatcctccttctaaaggccggnagtactggtatttccactngnaatcaagggggtataannccnnggagaaagaaccttgtgganctanaaggncnngntananggcctgnggaancgataataaaggggcnccnttanntancct

SEQ ID NO: 5145 - DNA, 935 bp, Homo sapiens
  misc_feature 1, 2, 518, 548, 613, 631, 634, 637, 647, 673, 679, 689, 698,704, 715, 717, 720, 730, 763, 765, 767, 784, 793, 796, 807,814, 827, 844, 846, 864, 872, 874, 877, 882, 891, 903, 904,908, 911, 912: n = A,T,C or G
nncgatcgactcctatagggcgaattggagctcccccgcggtggcggccgaggcacatcttcctccatgagtgggatcaagaaatattgagatggctaagctggaaattacaaaaatgttggcatactattatagcatatggttatgaaaatcaatgaatatttatatttagtattatgctttaagtatatatcccaagctgatcaattaattacactttcactggatgagatgtcaattctacatttagctgaactctcatctgaactgtgtggcttctcaatgacaggacatattaaagaacatgatgaatgtttgtaatgtaatgatataaattattataatgtgttgcattaaaagacatatggtgtagcattctaccgttcagcttttgcatttattttctcagtgtccatgatttgctcctggggattccaagatcagttttcttccttatcagtcagcatatacatattggtattaacacctttttgcaaaaatcatatataaatggttgnagaatgttgttggcattctacagcaactgnttaagtttttggtcagcgattagcttggttttcatttattttaaaaattcaggccagtccggggnggctcccgcctgtaattncanccnctttgggganggccgacccccggccggatccacaanggttanggagaatccnagaccattncttggnccaataccggngnaanccccatcttntacttaaaaaataccaaaaaaattagccccggncntngtgggtggggtgccctngaatccccnctncctcttggganggctganggcaggaaaaatngccgggaaccttgggangncggacctttggaaccagnccagaacncnccngggcncctcaagtngggccaccaagnnggtnccnntccaaaaaaaaaaaaaaaaaaaa

SEQ ID NO: 5146 - DNA, 916 bp, Homo sapiens
  misc_feature 2, 4, 6, 37, 312, 385, 389, 407, 506, 555, 576, 619, 630,633, 638, 648, 656, 679, 680, 683, 687, 690, 700, 701, 703,711, 712, 730, 741, 758, 759, 760, 768, 781, 784, 786, 797,800, 803, 811, 813, 820, 821, 847, 860, 873, 875, 876: n = A,T,C or G
  misc_feature 881, 882, 889, 899, 908, 909, 911, 913, 915: n = A,T,C or G
ancncnactactatcccgcgaattggagctccaccgnggtggcccccgaggtacagcacccgcttggctgtgctgagcagcagcctgacccattggaagaagctgccaccgctgccgtctcttaccagccagccccaccaagtgctggccagtgagcccatcccgttctctgatttgcagcaggtctccaggatagctgcttatgcctacagtgcactttctcagatccgtgtggacgcaaaagaggagctggttgtacgaccagacactatttcagctaaaaccccagctcgaagaccaaagaagtgggtnggcttgtctctgacagtcacgcttttgattcttttacttcctttgtggacacaagatggtggagatggctcanaagntgggaagctgctctccangtttggggaggcactggtctggaccaaaccaagttaaagatcccaaatcaaagcaccagaccacttcaaccagcaaacctgccagtttccagcagcctntgggctctaatcaagctctaggacaggcaatgtcttcagcagctgcatncaggacgctccccttaggtanaaccattacagagcttccatgaagacctgccaggtccctgccngggcgggccgnccnggcangtaccagggntgtaacanattgaactggattaatccttggnnttnaagnccncgaacacaannanaccttcanncctaaaagtggcaacccnaaaacctatangaggttgtttatctacnnngggggccngaaaaaaatgtgnctncngccgcccagantanaanagggctangngagactnnctgtattccaaacccctgcctacctngaatgttttttgnggccttcggactngnnacttnntttttgnttttttcttntaccttatnnangnant

SEQ ID NO: 5147 - DNA, 841 bp, Homo sapiens
  misc_feature 2, 731, 751, 784, 797, 804, 810, 815, 822, 829, 831, 840: n = A,T,C or G
gnccgtatcgactactatagggcgaattggagctccccgcggtggcggccgggggccattgagactgccatggaagacttgaaaggtcacgtagctgagacttctggagagaccattcaaggcttctggctcttgacaaagatagaccactggaacaatgagaaggagagaattctactggccagacaagactctcttgatctgcaaatacgacttcatcatgctgagttgtgtgcagctgcagcggattcctctgagcgctgtctatcgcatctgcctgggcaagttcaccttccctgggatgtccctggacaagagacaaggagaaggccttaggatctactgggggagtccggaggagcagtctcttctgtcccgctggaacccatggtccactgaagttccttatgctactttcactgagcatcctatgaaatacaccagtgagaaattccttgaaatttgcaagttgtctgggttcatgtctaagcttgttccagctatccagaatgcccacaagaattcaactggatctggaagaggaaagaaactgatggtgttaactgaacccattttgattgagacctacacagggctgatgtcattcattggaaaccgcaacaaacttggctattcccttgcccgtgggagtattggttttgagaagtctttttggtacctcggccgctctagactaatggatcccccgggctgcaggaattcgattcaancttatcgatccgtcgacctngagggggggccggtcccacttttgttccttaangagggtaattgcnccctggngtaatnatggncatactntttctgngngaaatggtnt

SEQ ID NO: 5148 - DNA, 875 bp, Homo sapiens
  misc_feature 448, 504, 556, 559, 562, 595, 625, 663, 676, 679, 714, 719,721, 737, 764, 807, 808, 809, 810, 824, 825, 856: n = A,T,C or G
tactatagggcgaattggagctccccgcggtggcggcccgggggccattgagactgccatggaagacttgaaaggtcacgtagctgagacttctggagagaccgttcaaggcttctggctcttgacaaagatagaccactggaacaatgagaaggagagaattctactggtcacagacaagactctcttgatctgcaaatacgacttcatcatgctgagttgtgtgcagctgcagcggattcctctgggcgctgtctatcgcatctgcctgggcaagttcaccttccctgggatgtccctggacaagagacaaggagaaggccttaggatctactgggggagtccggaggagcaagtctcttctgtcccgctggaacccatggtccactgaaagttccttatgctacttttcactgagcatcctatgaaatacaccagtgagaaattncttgaaatttgcaagttggctggggttcatgtctaaactttgttccagcttatcanaaatgccacaagaaattcaactgggatctggaagaagggaagaaacctgatnggngtnaactgaaccccatttttgattggagaccctccncaggggcttgatgtcattcatttgggaaanccgcaaccaaacttgggctattcccctccccgtgggantattgggtttttnganagtcttttttgctcactttaccccccccccccccntttgncngccctcaacttgtggntttccccccccctcccccctccccccntttttcttcccccccccccttttgggggccccccccccccccnnnnttttttcccccctnnttttttttttccccccccccccccctttttnccccccccctttttccccc

SEQ ID NO: 5149 - DNA, 876 bp, Homo sapiens
  misc_feature 504, 516, 517, 541, 556, 558, 593, 594, 595, 596, 600, 601,602, 603, 604, 605, 608, 609, 610, 611, 612, 613, 614, 626,641, 646, 676, 690, 697, 699, 713, 717, 719, 726, 733, 736,747, 748, 749, 750, 760, 767, 770, 774, 776, 805, 824: n = A,T,C or G
  misc_feature 838, 856, 857, 860, 864, 865, 866, 869, 871: n = A,T,C or G
tagggcgaattggagctccccgcggtggcggcccgcccgggcaggtacagcaaaggaccagcaatatgtcctatgaagaggatttctatttccactaggcggcgctgttggcttagaaataccttgggctcgccagaggattactagccggtaatctcactgttggaggtggaaaaggggagaactctgttcctagaaggttgcaatggcattttcctgagctatatcccaggtctacagcatttcctgatcttgcctaacaggattacttctctaggctgtaaaaattcccacacattcaacacacagaaagtaagagatcgcagacagagaaaccaggaaagaaggaaggttttgcaacaggatagccggcagacagccttgagattaaaggacagatctgagattgagatttgctccatactcacccgctccgatgaatgaattcctgccaatgcaccaaaatgatccgctccgatgactggaggaacaccagggtccttnggtctcgcaccnntttaagataaaatgacacagaccncctgtaatggttttnanggagtggagagtttattaaggcaagaagggaaaannnnaaannnnnntannnnnnngggtcccttggncggtttaaaactagnggatncccccgggctgcaggaattcgatataagcntaatcgatacccgncaccttngngggggggcccgganccancnttttttncccttanggngggttaaattnnnnccttgggctnaatcaanggncaanancttggtttcctgggggaaatggtattccngtccaattcccccaaaatnacaagccggagcanaaaggttaaagcctgggnngcntaannnggncnaacct

SEQ ID NO: 5150 - DNA, 899 bp, Homo sapiens
  misc_feature 446, 489, 555, 556, 562, 582, 614, 616, 620, 628, 637, 640,652, 692, 695, 705, 720, 725, 733, 736, 742, 744, 748, 753,762, 763, 770, 783, 785, 793, 796, 803, 806, 808, 809, 812,816, 817, 822, 823, 824, 825, 827, 832, 833, 836, 837: n = A,T,C or G
  misc_feature 838, 846, 847, 852, 858, 860, 868, 870, 871, 873, 874, 878,884, 886, 888, 889, 892, 894, 897: n = A,T,C or G
gcgatcgactactatagggcgaattggagctccccgcggtggcggccgccgggcaggtactgtaggcggcaggagaaaaaaagctaattattacttgttggagtcttgtctcaggcatgctgtggggctgtgcaagattcgctgctctgctgctgttgtcattttgatgctacaattacagagaggcggttcagcacccagcccgatcggtgtggctgccaaacacatttgagcatgacaagataaatttgttagacaccagcacagggtgggtgagaggacatcctgctgactttataaagtgatgtggggcagggttgtcgaggtaagtgatgattgtcaagtttgccagagatgatagataactcctttggcagaacacctaggtcattccttttaaagtcaggtagcttaagaggctgtttggtttctgcagcgctggctanctacttggggaacatggttgctcacaaaacattcagtacctcngcccgctctaaaactatggatcccccgggctgcaggaattcgatatcaagcttaatgatacccgtnnacctcnagggggggccccggacccancttttggtccctttaagtgagggttaaatgcncncttnggcgtaancaatggcantanctgtttctgggngaaattggtatcccctcccaattccccacaacataccaanccngggagataantggtaaacccggggngcctnaatgagtnagnctaacntnacantaaanttgcgttgnncttactngccccttttcaantngggaaaanttntctgccnacntnnttnaatnnaatcnnnnanccccnnggnnnagctggtnnctatnggcccnanttcctttntnntnnattnactttntngnnttngnttntc

SEQ ID NO: 5151 - DNA, 833 bp, Homo sapiens
  misc_feature 640, 652, 656, 708, 713, 734, 774, 782, 783, 786, 794, 795,806, 822, 826, 830: n = A,T,C or G
agctatcactacttagggcgaattggagctccccgcggtggcggccgcccgggcaggtacttttttttttttttttttttgtatctctggccaggactgcgcagtcagggcacaattatctgatactgattccagagctgcaagagaacaccagctcctcttttctccctaatgacttgatgtcttttcttcattttctatgatcccctatcttaaatttgactttcagcagaagggctagaagccagcaagctctaagtggcaggcagctagaaatttctaatgtttttactctacagtcctgagaaaatagcatctatgcttgaaaaataaacaaatggagcctcctcgctcagccagggcaatgcacagggtgtcaagacactatgctcaatgcaaaaatgtgcagccagcccttctctgtgccctgagcttccctaagcaattcacactataggtgaaggtatttataaggaggctattccttgctggtacctcggccgctctagaactagtggatcccccgggctgcaggaattcgatatcaagcttatcgataccgtcgacctcgagggggggcccggtacccaacttttggtccctttagtgaggggtaaatgccccttggcgtaaacatggncatagctggttnctgngggaaaatggtattccgttacaaattcccacaacatacgagccgggagcatnaaagngtaaagcctggggggcctaanggggggcctactccaataaatgcgtgggcccactggccgntttcaaannggnaaaccggnnggccactggantaatgaatcggccacncccngggnggg

SEQ ID NO: 5152 - DNA, 859 bp, Homo sapiens
  misc_feature 324, 394, 399, 415, 431, 439, 446, 461, 462, 476, 481, 483,513, 515, 522, 524, 525, 533, 536, 541, 546, 549, 552, 554,561, 564, 565, 568, 569, 570, 571, 577, 580, 581, 585, 587,588, 596, 599, 600, 601, 608, 610, 611, 612, 615, 617: n = A,T,C or G
  misc_feature 623, 635, 636, 637, 638, 639, 644, 647, 655, 657, 661, 662,667, 669, 672, 674, 675, 676, 681, 682, 683, 685, 688, 692,694, 696, 699, 703, 704, 708, 709, 711, 712, 721, 724, 730,731, 732, 733, 736, 738, 741, 743, 745, 746, 750, 751: n = A,T,C or G
  misc_feature 752, 753, 755, 756, 769, 770, 772, 778, 784, 785, 787, 792,795, 797, 801, 802, 803, 804, 805, 806, 807, 808, 814, 816,821, 822, 827, 828, 829, 830, 831, 844, 846, 847, 853, 855,859: n = A,T,C or G
ggcgtatcgactcactatagggcgaattggagctccaccgcggtggcggccgccacagtcgctgcggaggggtctgaggacaggcggtcctgactcccgctgcccggtggaactaagaccagggacgaggccacgcaggagatcaaggtacctcggccgaggtacgcgggtggtgacaagattcgattcttctttgagaaaggcgtttttgatgagaaaggaaatttcctggtccctccggagaaatccatcaacaaaattggccacgctctgcacgcccacgaccccgtcttcaagagcatcacacactccttcaaggtgcanaccttggccagaagtctgggcctccagatgcccgtggtggtgcagagcatgtacctgcccgggcggccgntctanaactagtggatccccngggctgcaggaattcnatatcaancttatcnataccgtcgaccttnnaggggggggcccgntaccnanctttttgttccctttattgagggttaattncnccgcttngnngtatcatnggnaatancttgnttnctntntttaaanttnnatnnnnttacanttnnactnannataattcncgnnngcattanannntananccttgngtgttttttgannnnnctaanttntatttttnantttnnctatnantgncnnnttttnnntntanaacntntnttnctannattnnannaataaaaanttnttaccnnnntgntnatntntnnttannnntnnaaaaatttttttnncnattttntttttnnanaatangtnanaatnnnnnnnnagaaantnttttnntattnnnnntttttattattantnnattacntnaatn

SEQ ID NO: 5153 - DNA, 623 bp, Homo sapiens
  misc_feature 537, 565: n = A,T,C or G
gtatacgactcactatagggcgaattggagctccaccgcggtggcggccgggggccattgagactgccatggaagacttgaaaggtcacgtagctgagacttccggagagaccattcaaggcttctggctcttgacaaagagacaaggagaaggccttaggatctactgggggagtccggaggagcagtctcttctgtcccgctggaacccatggtccactgaagttccttatgctactttcactgagcatcctatgaaatacaccagtgagaaattccttgaaatttgcaaggtaggaggcatcttgggtattactctcagattagctttgttgctggagctatgtgcttctagggacgtgtacctcggccgctctagaactagtggatcccccgggctgcaggaattcgatatcaagcttatcgataccgtcgacctcgagggggggcccggtacccagcttttgttccctttagtgagggttaattgcgcgcttggcgtaatcatgggcatagctgtttcctgtgtgaaattgntatccgtcacaattccacacaacatacnagcccgggagcataaagtgtaaagccttggggtgcctaatgagtgagctaactcacat

SEQ ID NO: 5154 - DNA, 642 bp, Homo sapiens
  misc_feature 4, 578, 610, 617, 631: n = A,T,C or G
gtanacgactactatagggcgaattggagctccccgcggtggcggccgcccgggcaggtacattcccgggctggttgattggtaagctttcatctgctgagaagattcagaaatcttttccgatttcaggctgaaattagaaccaatttcttgtcttccagctcttattgtgggcctttattctgcaaagaaggctgcagtgccagcggagctgactgccagtgccaagtgtgtgactgacataacgtatggaggtaatccacacgtgtagctcaggaaggctattaataagaggtgctatttatgctggtttcctggggactatacctaaactgaaaaggccagttcagtacctcggccgaggtacagggtcccaaaatgcgctgactcagcttcaccagcccatctcggatctcattgccaaaaatgtctcttcggtcatgaatgaggatccagcccaacctccagccaggaaccagccagcgcttggccagccctccacaggacagggatggggacatcggtgctgagggtggcccagtggttcatatttgcaatccgaaaacaccatgtctccntagattctcatcagctaaagatggggacacanctgcccngcaaccactgccanaaatctttctg

SEQ ID NO: 5155 - DNA, 642 bp, Homo sapiens
  misc_feature 4, 495, 508, 543, 563, 589, 590: n = A,T,C or G
actnctatagggcgaattggagctccaccgcggtggcggccgggggccattgagactgccatggaagacttgaaaggtcacgtagctgagacttctggagagaccattcaaggcttctggctcttgacaaagatagaccactggaacaatgagaaggagagaattctactggtcacagacaagactctcttgatctgcaaatacgacttcatcatgctgagttgtgtgcagctgcagcggattcctctgagcgctgtctatcgcatctgcctgggcaagttcaccttccctggggatgtccctggacaagagacaaggagaaggccttaggatctactgggggagtccggaggagcagtctcttctgtcccgctggaacccatggtccactgaagttccttatgctactttcactgagcatcctatgaaatacaccagtgagaaatttcctttgaaattttgcaagtttgtctgggttcatgtctaagcttggtnccagctatccagnaatgcccacaagaattcaacctggatctgggaaanagggaaagaaactggttggngttaacctgaacccatttttgattgnnaccctacacaggggctgatgtcattctttggaaaccgcaacaaacttggcta

SEQ ID NO: 5156 - DNA, 648 bp, Homo sapiens
  misc_feature 94, 96, 121, 201, 224, 227, 278, 284, 299, 301, 303, 330,331, 381, 387, 395, 418, 427, 428, 436, 448, 453, 462, 463,472, 480, 494, 505, 524, 539, 540, 548, 555, 556, 557, 559,562, 566, 567, 571, 579, 580, 588, 589, 595, 596, 599: n = A,T,C or G
  misc_feature 608, 617, 618, 621, 622, 626, 629, 630, 633, 638, 641, 642,645: n = A,T,C or G
cgtaatacaattcactatagggcgaattggagctccaccgcggtggcggccgaggtaccttttttttttttttttttttttttttccagaattnanagagaactcgtcaggtatttcatanagtgtccctcggtctaggttataatccaattgttatcagtttgggcatttgggagcccttttagttggctcccgtttccntttggatgtaactacatcctttnggngttttttttttcttttttactgggataaaacatacccagtttacaaaaatntgaaangctttactaattcgngngncatccatgctaatcatctttctattgnnccaattttaggaccccgccccgggcgggccgcccgggcaggtacccgggngccttnaaactggnctcctaccctctgctcttggagnagatggggnnaagggctnggagtcaaaacncttgnaatttttgnnattcttganggctttgntaaaactgctgaanaattatttttntttttttataaaaaaggantaaaacccccccttnnttccttcntttcatnnnanaantttnntggnttttgggnnggctgggnnagcccnnctnggggttttntttttgccnngannaacnttnnaantgccnagnnccncgg

SEQ ID NO: 5157 - DNA, 898 bp, Homo sapiens
  misc_feature 154, 542, 564, 607, 618, 653, 660, 663, 673, 700, 708, 710,718, 725, 732, 736, 790, 794, 811, 827, 831, 832, 836, 853,857, 861, 863, 868, 874, 892, 893, 898: n = A,T,C or G
gactcctatagggcgaattggagctccaccgcggtggcggccgaggtacaccattttgacatacttttgcagtgtttcagcagggaagagtgagaggaagatttttcatgtttgtggagaatggcttaagagagttaaatgagtctttcaaagngagtagctgattgaaattgagctaaactcagagcataatagtttagatagtctaagaaattgaaaaaaaagttgatgccaagcatacaagaaataacaccaccaaaaaatagacctaaatacagacaaaattagattaaaaacaagaatatgttcaatgttaataaaagcaaaaggaacatagacatagttatggaggagttttgttttgttttaataagataaaaatatggttagttttatagcaatacacctggaaatctggatcaattctgtccactatagtcattactagtgacatgtagatattgaacacttgaaatatggtggatttgaattgatttatgctatatgtaaaatacaaactagatttagtttaaaaaatgtanaactgaataattttaatattgnttttatgctgagatgacaatattttttggatatactgggattnaaatacatatnaaatattgtttaaaaaatcaaaggtagtattagtnaaaattnggnctttttgggnttaccttttttattttttggttttggnttttttgnanggggttangaaaatnattggcntaanaatgggacccctgggggccatattcatttggacccaatcattggaaacattgcncctngtttttccccaaatggntttatttttccctggnggcnngttnttaaaaaatcaccattncccnttantngtttnaaaaanaccttaaaattttttggnntaccn

SEQ ID NO: 5158 - DNA, 913 bp, Homo sapiens
  misc_feature 104, 117, 394, 626, 630, 634, 644, 692, 706, 711, 720, 761,763, 791, 802, 810, 813, 816, 817, 825, 835, 843, 850, 852,854, 857, 858, 879, 880, 884, 885, 888, 893, 898, 902, 904,909, 913: n = A,T,C or G
gtaatacgactcactatagggcgaattggagctccaccgcggtggcggccgggggccattgagactgccatggaagacttgaaaggtcacgtagctgagacttntggagagaccatncaaggcttctggctcttgacaaagatagaccactggaacaatgagaaggagagaattctactggtcacagacaagactctcttgatctgcaaatacgacttcatcatgctgagttgtgtgcagctgcagcggattcctctgagcgctgtctatcacatctgcctgggcaagttcaccttccctgggatgtccctggacaagagacaaggagaaggccttaggatctactgggggagtccggaggagcagtctcttctgtcccgctggaacccatggnccactgaagttccttatgctactttcactgagcatcctatgaaatacaccagtgagaaattccttgaaatttgcaagttgtctgggttcatgtctaagcttgttccaactatccagaatgcccacaagaattcaactggatctggaagaggaaagaaactgatggtgtttaactgaacccattttgattgagacctacacaagggctgatgttcatttcatttgggaaaacncgcnaacnaaactttggnttttttcctttgcccgtggggaagtaattggttttttgaagaagtctnttttgggtacctcnggccngcctcttanaaactaggtgggattcccccctgggccttgttaggaaattncnatttttccaccctttatcaattacccgnaaaacccttcnaaaggggnggnccnngaagcccnaatttttttntttccttntattttnangnttnncttggcccccttgccttattnntgtnngtnagttngtttncggnanaaaantttn

SEQ ID NO: 5159 - DNA, 847 bp, Homo sapiens
  misc_feature 24, 25, 29, 34, 461, 561, 577, 593, 654, 656, 663, 691, 735,742, 760, 770, 778, 786, 788, 803, 818, 836, 838, 844, 846: n = A,T,C or G
tacgcactactatagggcgaatcnntatngggcnaatgtggagctccaccgcggtggcggccgaggtactgacaacaccaaagttgcaagtgagctaacctgcaggtgcctggtgataagttgggtgcaggagggctacatgttctgaaccatgaagaaaagcagacttatagtttacctgctttctctttttgctttcccctggttctgccagcctgactcctttttcccaaaaggactccataaaaagtgttctcggtcagctagctggtcagctgttgtcaacttgcctgagctgattatccttttctttttaaatttgaccctacaattagcaaccagcaaaaccatgtaaagcctatggaatactaagggggctggggattagaagctgcctcatgtttttctcactattttccaaatgcaaaacctggttgactagtctttggccacagatccanaccccagaggtggcatggagctagaaccaccaccatttgaatgtatgttctaaaagaagagcaagggattaagggcctgtgatcagaagaaagggaaatnaatgcaaaagcaagcngaaagatgacaagaanccaatgcaccctgcacaagaaaatgtctttgctactgctgagcaaaaatggtagggtttgncnttctganggcacctgaaaaggattttgtgcatttnaaatatgcccttcttttcagttttccaccctttcattggaaatnaggtccncaaccattacagaaagtnttgggacttnaaagttcnaattgggncnccagacaaaagccanctaaaattttttttngcccaaaaaatgccaaananttttantnt

SEQ ID NO: 5160 - DNA, 860 bp, Homo sapiens
  misc_feature 2, 3, 4, 5, 368, 606, 609, 615, 667, 690, 695, 704, 721,724, 725, 728, 732, 737, 744, 762, 779, 790, 792, 807, 820,836, 844, 845, 852: n = A,T,C or G
gnnnngacgcgcgtaatacgactcactatagggcgaattggagctccaccgcggtggcggcccgaggtacgcggggccagcctggtggccaaaaacgggatagtccaaatttgtctcctacgggaatattagagttctcacttttttcttgggctggagctgaggccggcttgcattccagtggcaatcggcgtgagttctgcttatatgagaagtgtatgctgacttgtaaagtgaagaaccagtggtgctgcgggtgttcttttggggtagtgtctgggatccagtacctgcccgggcggccgctctagaactagtggatcccccgggctgcaggaattcgatatcaagcttatcgatacccgtcnacctcgagggggggcccggtacccagcttttgttccctttagtgaggggttaattgcgcgcttggcgtaatcatggtcatagctgtttcctgtgtgaaattgttatcccgctcacaattcccacaacataccagccgggagcataaagtgtaaagcctggggtgcctaatgaagtgagctaacttcacattaaattgcgttgcgcttcactgcccgctttccaatccgggaaaacctntcntgccancctcaattaatgaatcggcccaaccccccggggaagaggccggtttgcgtantgggcgcttttttccgtttcctnggttnacttgactnccttgccctcgggtccnttnnggnttgngggcnaagcggntttaaacttacttaaaanggcgggaataccggttnatccccaaaantnagggggataaccccnggaaaaaaatttngaacaaaaaggccccnaaaaggcnnggaaccntaaaaagg

SEQ ID NO: 5161 - DNA, 389 bp, Homo sapiens
  misc_feature 308: n = A,T,C or G
cgcgtaatacgactcactatagggcgaattggagctccaccgcggtggcggccgaggtacccccacatgaatggcttcccttgacatgcacaaggtcccttctctgcaaagtgccccaagcccagcaccttctccagctgcaactccacagcctcagcaaacctctgtctttcacagctgtgtcctctcacacgaagtctggatctcagcccggatctcagccctgagctttcttctttgagttgttctgtctcagcctggggtgaaaagcccatatcggctgttccatgcatctgcccaggcttctntttattccttactacccaatccccattccaatcctctgttaataactcttacggacagtccccaactcatgatgacttgac

SEQ ID NO: 5162 - DNA, 377 bp, Homo sapiens
cgtatacgactcactatagggcgaattggagctccaccgcggtggcggccgcccgggcaggtacgcggggtttgaaccacctgcttcccaagtgcagcatccctcacctattgaagctctcctggggccctttcactttctcactcagcactgagggtgtctgccattggaccccattggatttcactacctggaagtgcttggtggcagctgttgacctggtttctttgtgctttcccagttctagaggtttttggcagtggtaaatactcttgctcccagaatgaattccaaaaaaaaaaaaaaaaaaaaaaaaagtacctcggccgctctagaactagtggatcccccgggctgcaggaattcgatatcaagct

SEQ ID NO: 5163 - DNA, 904 bp, Homo sapiens
  misc_feature 19, 218, 284, 412, 479, 490, 507, 627, 639, 687, 692, 699,711, 723, 724, 736, 746, 748, 749, 759, 763, 767, 770, 782,789, 794, 798, 807, 815, 820, 829, 832, 847, 857, 858, 863,875, 876, 880, 885, 886, 891, 894, 896, 899, 904: n = A,T,C or G
cactactatagggcgaatnggagctccaccgcggtggcggccgcccgggcaggtacgcgggtttgtaagctttgtgggagcttccaggcctgctctaagatgccttgcttgtcctttgacccatcagcatggagctcagtggttgctgtttggttctgcaggctggtggggagaccgccatcgtggtggggcatctgtccagccccattgccactcanggcatccaaacaggaggcacccgctgggaagggtctaaagatactccttgtggccactgctactgntcacacttgactaggtggagaagcgaagggctgaggggaggtttgtgtacctcggccgctctagaactagtggatcccccgggctgcaaggaattcgatatcaagcttaatcgataccgtcgacctcnagggggggcccggtcccaaactttgttccctttagtgagggttaattgcgcgcttggcgtaatcatngtcatagctgnttcctgtgtgaaattgntatcccctcacaatttcacacaacataccaacccgggagcataaagtgtaaagcctggggtgcctaatgagtgagctaactcacattaattgcgttgggctacttgccgcttttcaatcnggaaaactgtcngccaactgctttatgaaatcggccaacccccgggagaggccggttgcntattngggcctnttcccttcttcnttacttgaattnntgcgctcggccnttcggttgcngnnaccggtttancttncttnaangcgggtaattcnggttatncacanaaantaaggggantaccccangaaanaaacatttnganccaaaaaggccaccnaaagggccannaaccntaaaaaaggccnntttnttggnnttttncananggntcccn

SEQ ID NO: 5164 - DNA, 917 bp, Homo sapiens
  misc_feature 120, 561, 589, 613, 638, 657, 695, 702, 722, 727, 728, 747,781, 782, 794, 796, 801, 812, 815, 829, 833, 837, 846, 860,879, 901, 905: n = A,T,C or G
acgcactactatagggcgaattggagctccccgcggtggcggcccgaggtacaatgtttgctgctagggacactgagccaaggaagatgtagcctctacccttgaagaactaacataaanggtaaacaggtaagttgtcatgccttgtaggacatgctgtaactcagtctggggtacctgccgggcggccgctctagaactagtggatcccccgggctgcaggaattcgatatcaagcttatcgataccgtcgacctcgagggggggcccggtacccagcttttgttccctttagtgagggttaattgcgcgcttggcgtaatcatggtcatagctgtttcctgtgtgaaattgttatccgctcacaatttccacacaaacaatacgagccgggagcataaagtgtaaagcctggggtgcctaatgagtgagctaactcacattaattgcgttgcgctcactgcccgctttccagtcgggaaacctgtcgtgccagctgcattaatgaatcggccaacgcccggggagaggcggtttgcgtattgggcgctcttccgcttnctcgctcactgactcgcttgcgctcggncgttcggctgcggcgagcggtatnagctcacttaaaggcggtaataccnggtattccacaagaatcangggataccgcaaggaaagaacatgtgagcaaaaaggcnacaaaanggccaggaacccgtaaaaanggccnngttgcttgcgttttttcanaaggctccgcccccttgccagcattacaaaaatnnacgcttcaagtnanagggnggcaaaacccnccnggcttttaaagatnccangcgnttccccctnggaacttccttctngcccctttcctgttccgancttgccgtttcccgataccctntccncctttttccttt

SEQ ID NO: 5165 - DNA, 912 bp, Homo sapiens
  misc_feature 2, 5, 122, 129, 511, 560, 576, 602, 643, 657, 664, 703, 705,715, 748, 751, 773, 779, 785, 788, 789, 833, 839, 843, 862,875, 886, 909: n = A,T,C or G
angcnctactatagggcgaaattggagctccccgcggtggcggccgaggtacacgtccctagaagcacatagctccagcaacaaagctaatctgagagtaataccagaggatgcctcctacnttgcaantttcaaggaatttctcactggtgtatttcataggatgctcagtgaaagtagcataaggaacttcagtggaccatgggttccagcgggacagaagagactgctcctccggactcccccagtagatcctaaggccttctccttgtctctttgtcaagagccagaagccttgaatggtctagtccagaagtctcagctaccgtgacctttcaagtcttccatggtaagtctcaatggcccccggccggtctagaactagtggatcccccgggctgcaggaattcgatatcaagcttatcgataccgtcgacctcgagggggggcccggtacccagcttttgttccctttagtgagggttaattgcgcgcttggcgtaatcatggncatagctgtttcctgtgtgaaattgttatccgctcacaattcacacaanatacgagcccggagcntaaaagtgtaaagcctggggtgcctnatgagtgagcttacttacattaattgcgttgcgcttactgnccctttttcaatcnggaaaanctgtcgtgccagctgcatttaatgaattcggccaccccncngggagaggcnggttggcgtattgggcgctttttccgctttctnggntacctgactcgctggcttcggncgttcnggttgnggnnagcggtttaacttacttcaaaggcgggaattccggttttcccanaatcangggntaacccccggaaaaacctntgaccaaaggccnccaaaaggccnggaaccttaaaaaggcccgtttntgg

SEQ ID NO: 5166 - DNA, 928 bp, Homo sapiens
  misc_feature 9, 14, 17, 35, 387, 480, 548, 573, 590, 599, 652, 654, 687,715, 751, 763, 768, 780, 815, 818, 828, 830, 838, 839, 841,846, 860, 864, 867, 874, 882, 889, 898, 902, 906, 908, 920,922: n = A,T,C or G
acgcgactnactangantcactataggggcgaatnggagctcccccgcggtggcggccgaggtacacttgccccccaccacggacagcagcacgcccagagcaaccacaatgatgctgatgataacgagggcgcgggccgcctgcaggtcctgcggcagtgccagcagcgagtcgtacctgcccgggcggccgggggccattgagactgccatggaagacttgaaaggtcacgtagctgagacttctggagagaccattcaaggcttctggctcttgacaaagatagaccactggacaatgagaaggaaagaattctactggtcacagacaagactctcttgatctgcaaatacgacttcatcatgctgagttgtgtgcagctgcancggattccttttgagcgctgtctatcgcatctgcctgggcaagttcaccttccctgggatgtccctggacaagagacaaggagaaggccttangatctactgggggagtccggaggagcagtctcttctgtcccgctggaacccatggtccactgaagttncttatgcttcttttaacttgacatnctatgaaatacaccaangagaaattncttgaaaatttgcaaagttgtctggggttcaatgtcttaaactttgttccaantnttccagaatggccacaaagaattcaacttggantctggaaaaagaaaaaaaacttatggtnttaacctgaacccattttgatttgaaacctaaacangggctgatgtcntttanttggaaaccggnaacaaaattgggtttttcctttccccgggggaggnttngtttttgaanantttttttnntnccttnggccgttttaaaantaanggntcccccnggcttganggatttnatattaaancttnttcntnccggtcgccttnangggggg

SEQ ID NO: 5167 - DNA, 936 bp, Homo sapiens
  misc_feature 123, 124, 377, 419, 588, 594, 598, 608, 638, 651, 689, 729,735, 739, 750, 786, 805, 807, 818, 831, 839, 849, 865, 871,872, 892, 915, 918, 929, 936: n = A,T,C or G
cgccttatcgactactatagggcgaattggagctccccgcggtggcggcccgcctcatgcattcaggggacctgtgcctgtcattcaggcacaaggtgacggggctgcactctggcacactcnnggtgtttgtgagaaaacacggtgcccacggagcagccctgtggggaagaaatggtggccatggctggaggcaaacacagatcaccttgcgaggggctgacatcaagagcgtcgtcttcaaaggtgaaaaaaggcgtggtcacactggggagattggattagatgatgtgagcttgaaaaaaggccactgctctgaagaacgctaacaactccagaactaacaatgaactcctatgttgctctatctctttttncaatctcatcttctctcctcttctcccttttatcaggcctangagaaagaagtgggtcaagtgggtcagaaggaagtctatttggtgacccaggtttttctggcctgcttttgtgcaatcccaatgaacagtgataccctcctttgaaatacaggggcatggcagacacatcaaagtcatctgtgggtgttgccttccatcctgtgtcttntttcangaangcattcacantgccgtgaagccattaccattcctccattncctgattaccaanggggctccttggtagcaaaatttatgaagaagtgaagnttaccgggagcaattttttttaaaaaaaaattttttgcanatggcntatnatggttatggngttccggggttgtaccttcggcccctcttaaaactngtggatccccccgggctgnanggaattcgatnttcaaccttattngatacccntcgacccttnaaggggggccccggtnccccannttttgttcccttttaatggngggttaattgccccccttggcgnaancatgggcatanttttccn

SEQ ID NO: 5168 - DNA, 894 bp, Homo sapiens
  misc_feature 2, 3, 4, 5, 501, 674, 700, 714, 737, 762, 786, 787, 788,805, 809, 821, 828, 838, 841, 848, 849, 874, 878, 887, 889,890, 892: n = A,T,C or G
gnnnngacgcgcgtaatacgactactatagggcgaattggagctccaccgcggtggcggcccgaggtacgcggggacctcattcatttctaccggtctctagtagtgcagcttcggctggtgtcatcggtgtccttcctccgctgccgcccccacaaggcttcgccgtcatcgaggccatttcagcgacttgtcgcacgcttttctatatacttcgttccccgccaaccgcaaccattgacgccatgtcgggttattcgagtggccgagaccgcggccgccgggcaggtaccatcttcaaaaggtgtcccttctggtccaaatataactgcattccactgcatgatgttgttttcagatggtgcgccactgacacccacaggtgggtcctcttgtaaccgcttgaaatcccgcatgagcctcctccgggccggggtcgacatgctccgcagctgccccgcggtcaagtcttgaaaaaaaaaaaaaaaagaagtacctcggncgctctagaactaagtggatcccccgggctgcaggaattcgatatcaagcttatcgataccgcgacctcgagggggggcccgggacccagcttttgttccctttagtgaggggttaattgcgcgcttggcgtaatcatgggcatagctgtttctgtgtgaaaatgttatccgntacaatttcaccacaacatccaaccnggagcataaagggnaaagcctggggggcctaatgagngaactaacttacattaattggggtngcgcttacttggcccgttttcagnnnggaaacctgtcggccanttgnattaatgaatcngccaacnccccgggganagnggtttgnntattggggcccttttcgtttcttcnttantgattcgtngnntngg

SEQ ID NO: 5169 - DNA, 876 bp, Homo sapiens
  misc_feature 216, 227, 285, 290, 317, 326, 332, 334, 365, 491, 494, 543,561, 565, 576, 609, 619, 633, 637, 659, 665, 671, 681, 682,683, 697, 700, 701, 714, 725, 726, 731, 734, 737, 738, 757,758, 762, 763, 766, 768, 774, 781, 784, 790, 794, 807: n = A,T,C or G
  misc_feature 809, 835, 837, 838, 841, 844, 845, 848, 856, 863, 872: n = A,T,C or G
gtaatacgactcactatagggcgaattggagctccccgcggtggcggccgcccgggcaggtactttttttttttttttttttttttttacttttctttctgttggaaacaaaagagttgtcttaatttttaatctgaattctgattatacaagtaaattcatcacagttattcagaccatttaaataggatcataaacacattcagcattctgctnttgcccaaggngtcaggcaccatgctagagccccacaatgtcaccctccaagtctcatagcaaatgcanatganactttttgcattgattatgaagccttntatgacatntgcttnanaaccctaaagctgcccatgcccacctagagngacctaaacctcctagtatctgccaccataaatgggttcgccacctgcctgcgattcccaggccagctgaatgcttgacctgtggaagctgaccatgaacatcatcccattcccctcctgcacttnttnatgcctggctttgccccactgaccagccagggcagtcaagcagtacctnggccgctttagaactagngganccccgggctgnaggaattcgatattaaagcttatcgatacccgncgaccttgangggggggcccgggnccancttttggttcccttttaagggnggggtnaattgngcccttgggnnnaaaaaatggggaanaanngggtttcctgggngggaaaaattnnttttnccnttnncaaatttcccaaaaaaaannaacnnacncngggggnattaaanggntaaaancctngggggggccctantngggggggggctaccccccattaattngnngtnggnntcnctggcccntttttcnaggtggggnaaat

SEQ ID NO: 5170 - DNA, 881 bp, Homo sapiens
  misc_feature 179, 324, 633, 650, 683, 685, 706, 707, 725, 752, 763, 785,787, 797, 805, 806, 813, 826, 831, 835, 845, 848, 854, 862,876, 877: n = A,T,C or G
gcgtaatacgactcactatagggcgaattggagctccaccgcggtggcgaccccaatctcatcatgagggccctaccctgatggcttatctaaactgaatccctcccccaaggccccgcctcctaatcgactcccattggaggtcaggatttcagcatatgggtctgggggggacacanatgtgcagtccacaaccccgtctctgcgcgtctccttgcaggagcaatgtgggtcttctaagagccgtggatgggaaaaatgtatgcccaggcctatgcctgcatacacagtttagataccactgtgcccagcctcagtgtgcanacctggcccggctgtggctcttgaagtgtgccagcctctgaccgcccaagggcttggccagcatccagttgcaggtgtggctccttccttggggttcctgcagcatttattggccataactcatttggcacaggttggatgctgtctcatagcatcacttacactgcgggctgtatcttcagagtccttctgctggtatttgtaatgtgtgtttgtcacattcctcccatcgtgatcccctgaggagtgggtctgggaacaatcagccttgtgtaccttcggcccgctctagaactagtggatcccccnggctgcaggaaatttcnatattcaaacttattcgatacccgccaacctcnanggggggggcccgggaccccanntttttggttcccctttantggaggggttaaattgcgccccttggncgtaaatcaanggggcataagcttgttttcctngnggaaaaattntttttccnnttacaantttccccacaaanaatancaancccggggggnatnaaaaanggaaaaancccgggggggcctnnaaat

SEQ ID NO: 5171 - DNA, 919 bp, Homo sapiens
  misc_feature 2, 544, 594, 621, 667, 693, 734, 745, 754, 787, 796, 798,801, 806, 823, 824, 830, 832, 834, 840, 845, 853, 867, 869,871, 877, 882, 892, 899, 901, 903, 905, 912, 913, 915, 917,919: n = A,T,C or G
gnggccgcgtaatacgactcactatagggcgaattggagctccccgcggtggcggcccgaggtacctttctttccaggccatggcaaaaaaatccaattatgtccgtcttgagtctgtggtcttgcttcttatgtagtatttcctttgtgagctgaagattaatgcatggattcacctccttcagcacatttcatttcaattgtgaagaaaagattccaggcactgaatgtaaaattgaacatgacattttgacattccttcttctgagagctgggttggtcttagttgctgtgaggctctagacaccgaccatacagggcgtggggctgctcctggacatgaacatcctccgaagtccccgcgtacctgcccgggcggccgaggtacaggtctttgcggatgtccacgtcacacttcatgatggagttgaaggcggtctcgtggatgccgcaagattccatacccaggaaggaaggctggaacagcgcctccggacaccggaaccgctcattgccaatggtgatgacctggccatcgggcagnttcgtagctcttctccagagaagaggaaggatgccgcgggtggccatctnctgctcgaagtcccagggcgacgttancacaagctttcttctttgatgtcgcgccacgaattttccccgctcngcccgctcttaaaacttagtgggatnccccccgggcttgcaggaaattcgatattcaaggctttttngatacccgccnaccctccanggggggggccccgggaccccaaacttttttttncccttttangnggnggggnaatttgccccccttggnngaaaananangggganaaaanttttttcntggggggaaaattngntnttcccnttccnaattcccccnaaaaaananananccggggnncntnan

SEQ ID NO: 5172 - DNA, 606 bp, Homo sapiens
  misc_feature 40, 50, 82, 92, 120, 121, 387, 415, 421, 436, 484, 490, 499,501, 504, 522, 541, 553, 560, 568, 583, 602, 605, 606: n = A,T,C or G
ggcgaattggagctccaccgcggtggcggccgcccggccnggtacgcggngatggctggccagaggaggaacgctttgtgtnctcatcgganctgcatgggaagtctgcatacagcaaanngacctgcatgcctcaccttatggaaaggatggtggactctggcctcctgtggctggccttggtctcctgcattctgacccaacatctgcagagcagcgaggtaagtattctgctcacctggcatctcagatgtcaaggaagacctagcaagtgaggatagaagtgcagagaaggtggctcaggcaaggaagaggaattggcagttctaaagcaaaaactcagagctagaagtcaagggaaacataatgagaaacaatggaaatcangtcacaatctttcaaagagcctaatcanaaattnctctgaaagggccantgggagccagttaacataaattttcccatgccccatatctttggggangattangagaccccngnttnaaagaaggatcccagganaattcattaaccttcagtnctccctttgttncttggcnaaggggcnctttcttcccttttntccctgaaaaggggcttancann

SEQ ID NO: 5173 - DNA, 642 bp, Homo sapiens
  misc_feature 2, 3, 391, 409, 413, 422, 424, 464, 490, 496, 497, 500, 540,555, 559, 586, 588, 591, 602, 623, 625, 636, 641, 642: n = A,T,C or G
gnntaatactactcactatagggcgaattggagctccaccgcggtggcggccgaggtacgcgggatgaccagccacatctgaaaaggaaagcattctgctctttccagatctacgctgtgccttggcagggcacaatgaccttgtcgaaatccacctgtcaggacgcctaggggtctgtacctgcccgggcggccgcccgggcaggtaccgcgggggtcttttcacatttcaaacctccagtttaattcctctctggaagatcccagcaccgactactaccaagagctgcagagagacatttctgaaatgtgagtgatgtgccatttcctttctctgcccagtctggggctggggtgccaggctggggcatcgcgctgctggtgctggtcncccttctggttgcgcccnccantgtctatcncnttgctttggcttgtcggtcaattgcccgcccgaaagaacnacggggcaggcttggacatctttttnagcccnnggnttacctacccatccttattgagccgaaggtacccccgggncggtttcttagaaanttangtggggaatccccccggggccttgggnanggnaaatttctaanttttcaaagcctttattcggntnccccgtcgaanccttnn

SEQ ID NO: 5174 - DNA, 592 bp, Homo sapiens
  misc_feature 141, 287, 291, 297, 349, 358, 363, 457, 507, 514, 567, 568: n = A,T,C or G
gactactatagggcgaattggagctccaccgcggtggcggccgcccgggcaggtggcggcccaaagcagtgagcgggagagccgcgacatcgtgtcctcagcgctggcgttcgggagaaagctaaggctcgcaacgctcantcaaccccccccgcgtactccataatttggaattgctgcccacgttgaatcataatgaaccttaattaatcatcagttttggcatcataggcttctttccaacaggggagccgctgttgcagcagaggccaacccaatcagtagtncctnggccgntctagaactagtggatcccccgggctgcaggaattcgatatcaagcttatcnataccgtcnacctngagggggggcccggtacccagcttttgttccctttagtgagggttaattgcgcgcttggcgtaatcatggtcatagctgtttcctgtgtgaaantgttatccgctcacaatttccacacaacatacgaaccgggagcataaagnggaaaancctggggtgcctaatgagtgagctaactcacattaattgcgttcgggctcacnngcccctttcccagaccgggaaaat

SEQ ID NO: 5175 - DNA, 592 bp, Homo sapiens
  misc_feature 361, 410, 419, 426, 443, 460, 479, 503, 509, 510, 527, 538,548, 552, 555, 567, 572, 573, 576, 580, 587, 589, 592: n = A,T,C or G
ctatagggcgaattggagctccaccgcggtggcggccgaggtacacgcaaaacccacctgtgtaaacacacacagcaaagtgatgtaagaagtttccatataaagggctgcagtatggagaggtaatgtgcaggctggtttgcggctgtaggggccaccttgctgcagctctccactgatatggtacctgcccgggcggccgaggtacgcgggggatgaagagtaacgccattaccgccggagccgccgagagccttagccgacggaaactggacactggaccggcagcgccatgagactcctcccccgcttgctgctgcttctcttactcgtgttccctgccactgtcttgttccgaggnggccccagaggcttgttagcagtggcacaagatcttacagaggatgaanaaacagtanaagattncataattgaggatgaanatgatgaagccgaggtngaagaagatgaacccacanatttggtagaaagataaagaggangaaganntgtctggttgaacctgnagcttcaccgngttgcagatnccanctntactgttttgtnaaaannganaagnatttttncngcn

SEQ ID NO: 5176 - DNA, 762 bp, Homo sapiens
  misc_feature 7, 8, 10, 15, 26, 571, 574, 686, 688, 689, 696, 705, 706,711, 712, 713, 714, 728, 729, 730, 735, 736, 739, 750, 752,754, 758, 759, 760: n = A,T,C or G
gaggtanncntcgcncgcgtaatacnactcactatagggcgaattggagctccaccgcggtggcggccgaggtaccaaccaggccacacaacagcatagaactggggggaccaagcttctttctataaacaaagctccttggcaacactggacttgtgtgtacttcttttccctttgtgtctagaatgccctcaacccccaagtctcacaccttctacttctacctctccctaatgtatttaactcattccttcactctcaactcctagttaatttcttcagtaaaatcttccctgactctccggatgagtttagaacatgtatatgctctctaggcaccatttatgtaacagcttttttgagatatgatttacataccatacaatgcacccgtttaaaatgtacctgcccgggcggccgctctagaactagtggatcccccgggctgcaggaattcgatatcaagcttatcgataccgtcgacctcgaggggggggcccggtacccagcttttgttccctttagtgagggttaattgcgcgctttggccgtaatcatgggtcatagctgnttnctgtgtgaaattgttatcccgctcacaattccacacaacatacgagccggggagcataaagtgtaaagcctgggggtgcctaatggagtgagctaactcacattaaatttgngnnagccctngcgtgcccnnatttnnnngggctgaaaaaccnnntaatnngcngttggggtttnantngaannngg

SEQ ID NO: 5177 - DNA, 586 bp, Homo sapiens
  misc_feature 48, 134, 273, 445, 463, 474: n = A,T,C or G
ctcactatagggcgaattggagctccaccgcggtggcggccgcccggncaggtacgcgggggtggtcgcgagggagccggaaagatggtggttaccagatctgcacgagctaaggccagcatccaagccgcgtnggctgaaagttccgggcaaaagagttttgctgctaatgggattcaagcgcatccagaaagtagtacctcggccgcccgggcaggtacgcgggattcctggctttttaacttttccaaatgtaacctcccaggtgctganagaaaggaaaatttaagacagtttatgaaagggaggagaatcaacaaatggcacaggtcacccaaatgccaaccagaaagtgctcattttctaggctaaaaattgaacctgaactcaggccaccattgtgaaaagacaaagccttaactgctaagctacagcattgggcagnttccactgcttttcccanaaggagcccanagcagtaaattttgggcttgcaaaggcttttaactgctcaagataatttgtagagcttaactactacccccaaaatccctgttgcctggaaggcaggagaccaaagaagaaa

SEQ ID NO: 5178 - DNA, 586 bp, Homo sapiens
  misc_feature 61, 199, 526, 538: n = A,T,C or G
gactcactatagggcgaattggagctccccgcggtggcggccgaggtacttttcctacctntttcgcctgcatccttagaaaactcccgtggatgagaagatccccaggcctttacaagctgttgttttacaaaaggagaaactgaggcaggaagaggcggtggatgtgcaccagagcacgtggtgcgtcggtgcatanctgagggcacatggaacattcaccaagataaaccatatgctggaacataaaatttatggatgtcacccatgaagcagagtccttcagaccctcaatcaaaaacaagtctcattttacattaaattggaggactatctggagtctctgaccaccgtgtgacagaaaagagagcagaattgttgcatgatgggtaacactcatcagtaatcgctgtttgccaagccatctgggaggagaccaaagagctataaaataagttcaggcacggtggctcatgcctgtaatcccagcacttttgggaggccgagggtgggtgaatcacctgangtcaggagttcnagaccagcctggccaacatggtgaaaaccctgtctctactaaaaaata

SEQ ID NO: 5179 - DNA, 1586 bp, Homo sapiens
  misc_feature 2, 3, 12, 13, 14, 16, 21, 23, 25, 26, 30, 31, 61, 76, 86,107, 156, 185, 204, 219, 228, 232, 245, 253, 282, 285, 287,377, 408, 411, 415, 424, 437, 563, 579, 580, 582, 583, 586,593, 597, 652, 668, 673, 680, 690, 705, 727, 735, 748: n = A,T,C or G
  misc_feature 762, 765, 779, 840, 912, 914, 918, 919, 1001, 1009, 1022,1025, 1028, 1034, 1036, 1039, 1091, 1133, 1136, 1164, 1198,1224, 1227, 1241, 1248, 1277, 1284, 1289, 1300, 1316, 1339,1369, 1399, 1404, 1418, 1433, 1439, 1452, 1456, 1462: n = A,T,C or G
  misc_feature 1484, 1489, 1493, 1510, 1517, 1537, 1543, 1547, 1558, 1561,1577: n = A,T,C or G
gnngagggttannncntttcntnanntacnntaaattacgtaactttcactttataagtgnggcggaaaatttggngaaagccttnccaacccgggcggggtggggncggggcccggcaatttcaattgggccggttggggggggaagggttcctngctttggtttggggcgaaaacaacccaangggaagggaacaagcaatnccccgggaagcttcngtcccttcnggcncaaggcaatcccntcaatggnaagccttcccttcaacggggggcccttcngtntnaacaaccgccttcttccttgttcaattggcttgtcccaacccaacggaaaaggaatcaaggggcccttttggtggttggttttcttgggnaaaagttaagttgggcccgccccaaccaagnggngggncccccgggnaatccttttggtncccttggggcccaacccccaacgttcccccaacaaccaagttgggaaaaagccttggaatggttttcctttttggttaaccccttcggggccccggcttccttaagaaaacctttaaggttggggnaattccccccccccgnngnnccnttgggcnaagngggaaaaatttttccggaaatttaatttccaaaaagggcctttttaaattcccgnaattaaacccccgggntcccngaaaccncctttccccnaaaaggggggggggnggggggggggcccccccccggngggtttanccccccccaaagncccttttttttttnggngtttttcccccccnttttttttaaaagtttggggaaggggggggggtttttaaaaatttttgggccggacccggnccctttttggggggcccgggtttaaaaaattcccaaattggggggttcccaaatttaaaggccctttgggtntntttnnccctttgggttggggttgggaaaaaaaaaaattttggggttttaaatttccccccgggcttttcaaacccaaaaattttttncccccaanccaaacccaaaanccnaantttaancnctnaaaaggcccccccgggggggggaaaaggccccaattttaaaaaaaaagggtntgggtttaaaaaaaaagggccccccttggggggggggggttnggncccctttaaaaaaattgggaaaaggttngggaaaaggcccctttaaaaccctttccaaaccnaatttttaaaaaaatttttgggcccnggntttttgggccgggncctttcnaaccttggggcccccccggcctttttttnccccaanagaanccccggggggnaaaaaaaccccttggntcccgggttgggccccaaaaacnttgggccatttttaaaattggaaaattccnggggccccaaacccccccccccgggggggnaaaanaaaggggcccgggnttttttggccggttnaatttngggggggcggccntttntttttncccgccttttttcctttcgggntttcnaaantttggaactttcccgcntttggcnggcctttcgggggttccggntttccngggnatttggccggnccnaaaagcccgggtttanttcaaacct

SEQ ID NO: 5180 - DNA, 898 bp, Homo sapiens
  misc_feature 5, 6, 15, 298, 356, 394, 428, 461, 519, 527, 561, 573, 582,595, 608, 621, 622, 628, 637, 646, 647, 659, 661, 681, 699,704, 708, 716, 717, 720, 727, 740, 742, 748, 751, 759, 767,768, 769, 778, 782, 792, 793, 800, 805, 811, 812, 813: n = A,T,C or G
  misc_feature 814, 816, 820, 821, 828, 830, 837, 857, 873, 874, 878, 882,883, 884, 887, 897: n = A,T,C or G
ggctnngccctatcnactcctatagggcgaattggagctccccgcggtggcggccgaggtacaagttgtctttatgctgcgagataagtcctctcttggtttgagctcccaccttttcagtgaactcttacattttgggggatctgctcttgtaaaggacatcctttctggtctttgattcttgagaaaagtgagtgaggtggggccaagatggttgactagaagcagttagtgtgtgccactctcacaaatagcagaaagagtggtgagacactagctcttcaaccggaacatccangtggacacataaggattcatcaagtgacataagtgtgaccttcggatcaccggagaanagttgagacaagatcaaccattcacccaggagtgggcncaagacccagggggaatccccctacaagaaaatnaagccaaggaacaccatcttgaagttcttaccncaacatcagaagcttagagaaaggcatggaaaaagattcttaacttagagcattccanaaggaganggtgggtcctgcaaaccccttgttttctgacctnttgaccttcccnaactgtgangggaagaaatttntgttgcttaaaanaccacacagcttnntggttnccttgcccnggccggccnntcttaaaacttnangggattcccccggcctgcangaaatttcattattaaanctttnttcnattacccnncancctcaanggggggggcccgngnaccccnacnttttgttnccctttannnagggttaanttgncccccttggnnaaataangggcnataacnnnntnccanngggaaantngaatccntcccaatccccaaaaaatcnaacccggaccttaatnntaancccnnnggncctaataaant

SEQ ID NO: 5181 - DNA, 481 bp, Homo sapiens
  misc_feature 2, 3, 8, 10, 12, 14, 161, 168, 219, 228, 410: n = A,T,C or G
gnnaagcnancntnctatagggcgaattggagctccccgcggtggcggccgaggtactgaattgtctaaggttccagaaaaaggagcccgctttgttattcattttgctctccactgaaacacttccaaatggcttcaaagttgtcaacatgaaaccaacntcacttntactagtgaaaaagaacacgtgctgtcgttttcctgtaggggaagaagttnttggaaaanaattaaaatttaaaacaaaacttttacttaaagaaatggaaatgcatttaacagaagagaaaatggggaacctatggagccattaaacatttacataaaacagtaaaagtttttttttaccaatgtgggctccctccaatctaccacaatgtgtccagtttcaaagaagccaggtcactttnggaagtagtcattgtattaatggaggatttttctggtgcaaaaagccgttccataaaagcttttctctgta

SEQ ID NO: 5182 - DNA, 474 bp, Homo sapiens
  misc_feature 2, 3, 8, 12, 20, 231, 234, 417, 433, 460, 469: n = A,T,C or G
gnnaatgnagcnctttatangaccactatagggttaattggagctccaccgcggtggcggccgcccgggcaggtactttaaacatgtaagagaaaaatgccaaaaaccattttgattagtttaatttttttttaaataaaaaagtaagtaaaaatcaaccccaaaatggaagggttagtatagttgacccttgaacaacacgggtgtggactatgtgggtttactttctanttnggtttttttaaaaagtacctcggccgctctagaactagtggatcccccgggctgcaggaattcgatatcaagcttatcgataccgtcgacctcgagggggggcccggtacccagcttttgttccctttagtgagggttaattgcgcgcttggcgtaatcatggtcatagctgtttcctgtgtngaaaattgttatccgntcacaattccacacaaacatacggagnccgggagcntaaaa

SEQ ID NO: 5183 - DNA, 493 bp, Homo sapiens
  misc_feature 2, 3, 4, 5, 24, 230, 240, 241, 242, 244, 250, 254, 260, 266,273, 297, 301, 396, 486, 488: n = A,T,C or G
gnnnnagccgcccgaatacgactnctatagggcgaattggagctccccgcggtggcggccgcccgggcaggtacagatgcagcctggctaggcagagaatcccttgtagaaaggtgggggagaatcataggatattataactgtaaggaacatgcaagattttccagattatacccttgatagaatagataagttccttaaggctcagatcttgcttaaaagcccttccngcccttgttnnnanaccaantatnaacacngaagcntggcctnttggagtcttttattgagtacctnggcncgctctagaactagttggatcccccgggctgcaggaattcgatatcaagcttatcgataccgtcgacctcgagggggggcccggtacccagcttntgtaccctttagtgagggttaattgcgccgcttggccgtaattcatggtcattagactggtttccttgttgtttgaaatttgataattcncntcttc

SEQ ID NO: 5184 - DNA, 502 bp, Homo sapiens
  misc_feature 139, 140, 141, 142, 195, 206, 207, 211, 212, 217, 220, 225,238, 244, 255, 261, 269, 345, 405, 428, 432, 437, 463, 466,470, 491, 493, 496, 498, 500, 501, 502: n = A,T,C or G
ggcgaattggagctccccgcggtggcggccgcccgggcaggtacacacatgagaactgaaatggcccaaacccagaaagaaagcccaactagatcctcagaagacgctggtagggacaataaccgatgaggaaaagatnnnnttcttgtgccaccgtctgttatgatttctctccattgcagcagaaagccggtnttttttcagcnnaccnnccttngtnattgnatgggcaaaattngaccancactttttganggagcnaggagagnggtaccctcgggctcgctcttagaaactaagttgggatccccccgggcttgcaggaattccgatatcatagcttantcgatacccgtccgaccttcgagggggggcccggtacccagcttttgttccctttagtgngggttaattgcgccgctttggcngtanaattnatgggttcattaggcttggtttcccntgntggngcaaaatatggtttaatcccncnttnancnnn

SEQ ID NO: 5185 - DNA, 467 bp, Homo sapiens
  misc_feature 2, 3, 4, 7, 8, 9, 426, 445: n = A,T,C or G
gnnnagnnnccctaatacgactacttagggcgaattggagctccaccgcggtggcggccgtgcttctgctatggcgaggagccctcggcctccagccactgtgcccacgcctaccggttttctggggatgttgccaccacctctgaagagtgaaaccaagctttccatgcaggaagagccaggtgctgggggctcccgcccgaactgtgaggcccacagtgcttaagggaagagcaccagggctctacctttctttcttgacagtgggtgagcagcgcaggcagagatgtgcaaggtacctcggccgctctagaactagtggatcccccgggctgcaggaattcgatatcaagcttatcgataccgtcgacctcgagggggggcccggtacccagcttttgttccctttagtgagggttaattgcncgcttggcgtaatcatggncattagcctgtttcctgtgtga

SEQ ID NO: 5186 - DNA, 450 bp, Homo sapiens
  misc_feature 198: n = A,T,C or G
ggcgaattggagctccaccgcggtggcggccgcccgggcaaggtactctctctctctctctcacacacacacacacacacacacacacacacacacacacccaccaaacaacagtgtatccacaaatgaatgaatgaaagttttacttataacttcactgaaacacagcttttgcttattctagtttaggaaccattnggggatatttttggggaaacctttttatgggattttaagaaatgatccctggctgggcgcggtggttcacgcctgtaatcccagcactttgggaggccaaggttgggtggatcacgaggtcgggagatcgagaccatcctggctaacacggtgaaaccccgtctctattaaaaaatgcaaaaaattagccagacatggtggcgggcacctgtagtcccagctacttgggaggctgaagcagggacaatggcg

SEQ ID NO: 5187 - DNA, 521 bp, Homo sapiens
  misc_feature 2, 3, 4, 218, 221, 239, 240, 248, 275, 332, 345, 353, 373,379, 423, 427, 455, 460, 471, 472, 478, 484, 487, 490, 493,494, 500, 506, 511, 512, 515: n = A,T,C or G
gnnnaagccgaaacactacttagggcgaattggagctccccgcggtggcggccgaggtacttgttgttgctttgtttggagggtgtggtggtctccactcccgccttgacggggctgctatctgccttccaggccactgtcacggctcccgggtagaagtcacttatgagacacaccagtgtggccttgttggcttgaagctcctcagaggaaaggcnggnaacaaaattgaccaaagnnggcaagcnctttggggctgacctaagaacggtcangcttttggttccctcccgcccgaaacacccccaaattgccactaccccaatatacangcaccacaagtanataatcancattcatcatcttgcctggncccccntgatggtagagggcaagctttgttcccaaggatggagccaaganaaancgatcagggaaccccataaaaaaagccnagttnttttgttgctnnaaaatngagttnttnccnatnngaagcnctggcncttgnnggntcttgc

SEQ ID NO: 5188 - DNA, 826 bp, Homo sapiens
  misc_feature 631, 634, 646, 668, 728, 730, 732, 743, 744, 749, 760, 765,768, 773, 781, 802, 819, 823: n = A,T,C or G
gactcactatagggcgaattggagctccaccgcggtggcggccgggggccattgagactgccatggaagacttgaaaggtcacgtagctgagacttctggagagaccattcaaggcttctggctcttgacaaagatagaccactggaacaatgagaaggagagaattctactggtcacagacaagactctcttgatctgcaaatacgacttcatcatgctgagttgtgtgcagctgcagcggattcctctgagcgctgtctatcgcatctgcctgggcaagttcaccttccctgggatgtccctggacaagagacaaggagaaggccttaggatctactgggggagtccggaggagcagtctcttctgtcccgctggaacccatggtccactgaagttccttatgctactttcactgagcatcctatgaaatacaccagtgagaaattccttgaaatttgcaagttgtctgggttcatgtctaagcttgttccagctatccagaatgcccacaaagaattcaactggatctggaagaggaaagaaactgatggtgttaactgaacccattttgattgagacctacacagggctgatgtcattcattggaaaccgcaacaaacttgggcttnttncctttgccccgnggggagtatttggttttttgangagttcttttttggtaccctgggcccgcttttaaaaactaagtgggattccccccgggcngngnaaggaatttcnntttcnaagcctttttnggttnccncccgncccctgangggggggggccccggggcccnccttttttgtggccccntaanggg

SEQ ID NO: 5189 - DNA, 829 bp, Homo sapiens
  misc_feature 570, 655, 702, 720, 733, 748, 769, 770, 771, 776, 779, 790,795, 815, 816, 825, 826, 827: n = A,T,C or G
actcactatagggcgaattggagctccccgcggtggcggccgcccgggcaggtacgcggggggttcgttcatcattgttgtttatttttttaaaataaataaataaatatatatatagatgctctgcaacaaactctgtgacagtatccttcagtagagaaagtttcttacttgtgagtacgcgggcacccggctgatttttgtatttttagtagagacagggttttgatgtgttggccaggctgttctcgaactcctgaccgcaggtgatccacccacctcagcctcccaaggtcctgggattacaggtgtgagccaccgtgccccagccaaaaggaattcattttaacaacacaaatccattattacttataaaggtaaattatactatagaggttagatatacttgtcttcacttttaatatagagtagaaaatccattttacatactactgactttaaataatgagcaacatttacttgcactcttttaattgtgaatcaagggattttttggtgtgtggtgtctaccatttcttattttctttcaattttccaatcaatcaggtncaatcaaatcaataaggtatgtgggtggagccacctgtaaatatacccaagcactcttgctttggccctgaagaatgcagtgggngaacccaagacacaagttcctgccctcaatgggatttatagtgaggngggaagtcagaaaagttntaccaccattacngggttacctttagtnaattctttagagtttaaaagnnngtggngtngatttaaaatnagggnggaaagcccctcaattccanntcctgggannngc

SEQ ID NO: 5190 - DNA, 845 bp, Homo sapiens
  misc_feature 549, 561, 599, 632, 642, 671, 688, 695, 709, 719, 722, 734,750, 760, 761, 764, 783, 785, 792, 794, 795, 799, 800, 801,812, 813, 817, 820, 824, 828, 830, 838: n = A,T,C or G
tcactatagggcgaattggagctccaccgcggtggcggccgcccgggcaggtacacgggagtgtatggcctagaactcccatcatacctgtgcaccaattgaggagagacacatgggtgggaaattgcaataaaaagacggcccacagcaggctgcattcccatggctggccagaggaggaacgctttgtgttcacatcggagctgcatgggaagtctgcatacagcaaagtgacctgcatgcctcaccttatggaaaggatggtgggctctggcctcctgtggctggccttggtctcctgcattctgacccaggcatctgcagtgcagcgaggtaagtattctgctcacctggcatctcagatgtcaaggaagacctagcaagtgaggatagaagtgcagagaaggtggctcaggtaaggaagaggaattggcagttctaaagcaaaaactcagagctagaagtcaagggaaacataatgagaaacaatgggaaatcaagtcacaatctctcaaagagcctaatcagaaattttctctgaaagggcantgggagccagtnacataatttcccatgcccatatctttggggaagatttnagacccccagattaaagaagatcaagaaatacnttaacttaantcacctttgtgctggcaaagtgcctttcntccttttccttgaaaangggctanaatttaaggggatntccttttatnaangtgggccaattncataatactttgccanaaaaaggggnnttnatgccttttgaaatttttnanaggaganannaaannncccccccccanngaanggngtgnggananacgctccncccccct

SEQ ID NO: 5191 - DNA, 847 bp, Homo sapiens
  misc_feature 86, 158, 164, 165, 168, 170, 171, 172, 176, 177, 181, 186,191, 193, 195, 197, 213, 214, 215, 218, 221, 225, 226, 229,230, 231, 232, 233, 234, 235, 238, 240, 246, 247, 251, 255,261, 265, 273, 278, 282, 285, 289, 295, 300, 302, 309: n = A,T,C or G
  misc_feature 310, 317, 319, 323, 324, 326, 327, 328, 330, 338, 339, 340,341, 346, 347, 352, 354, 356, 358, 365, 367, 373, 375, 377,381, 382, 383, 385, 387, 388, 391, 398, 403, 404, 407, 414,420, 421, 427, 428, 429, 433, 439, 442, 443, 452, 453: n = A,T,C or G
  misc_feature 455, 459, 469, 471, 472, 473, 474, 479, 483, 489, 495, 498,501, 502, 504, 509, 511, 524, 540, 544, 546, 547, 548, 557,559, 563, 568, 582, 586, 588, 589, 591, 594, 596, 600, 608,611, 612, 618, 619, 637, 653, 656, 659, 665, 679, 681: n = A,T,C or G
  misc_feature 683, 689, 695, 697, 699, 705, 709, 712, 715, 716, 718, 721,723, 724, 733, 736, 739, 748, 756, 766, 773, 777, 781, 785,790, 796, 798, 805, 806, 808, 815, 821, 827, 829: n = A,T,C or G
gtaatacgactcactatagggcgaattggagctccaccgcggtggcggccgcccgggcaggtactttttttttttttttttttttngctttttttttttttttttttttttttttttttttttttttttttttttttttttttttttttttttttttngccaannctnannntttnntgcnaaaanccttnantntnccctggccccaggctnnnttnatnaaannggnnnnnnnagngnttccanntttntggntcccangttnaggttccncccancggnggngggngggganccctnanacctggnncccctgngngccnnannncnggaaaaannnnttganntgggnanangntgccccntngggggngntncggnnnangnnttnaaagggnatttnnttnatccaanttttcnngtccannnggtnccttgnccnntttaaaaanngnggancccccgggcngnnnnaattntatntaaagnttattnatnccnncnccccnangggggggcccggnccccaatttttttccntttntnnnggggaaaantncccncggcngaaataaaggaaanaagntnntnttntngggnaaaaattnttnntcctcnncacattgaatgaaggaangggggagtgtccccgnacnctnaaaaanttttgagcccttgntngnttcttnaggggnancnaggaanttgnttnaanngngananngcccccccnccnttnttttttttntttttagnggaaaaaaanatccggnctgngccncgcnaaaanatttantngactggnncntttttgngaaaanaggggncnccccccccccccccccct

SEQ ID NO: 5192 - DNA, 847 bp, Homo sapiens
  misc_feature 384, 395, 396, 485, 486, 495, 499, 508, 512, 517, 536, 565,595, 603, 604, 605, 606, 608, 635, 636, 641, 672, 677, 678,681, 693, 707, 715, 716, 722, 728, 750, 756, 759, 807, 808,811, 813, 818, 822, 841: n = A,T,C or G
ctactatagggcgaattggagctccaccgcggtggcggccgcccgggcaggtacgggtgcctggcctcgcttctgccccaccactctgcccaagaactggctggctccaggattggtgccttctcttatggctctggtttagcaacaagtttcttttcatttcgagtatcccaggatgctgctccaggctctcccctggacaagttggtgtcccgcacatcagacctgccaaaacgcctagcctcccgaaagtgtgtgtctcctgaggagttcacagaaataatgaaccaaagagagcaattctaccataaggtgaatttctccccacctggtgacacaaacagccttttcccaggtacctcggccgcccgggcaggtactttnttttttttttnntttttcagaatgcaaggtcttgtatttaagtagcctgaaataatcttttaaatggaaaataaagattaatcagagtgaaaattaaatgnncttttgacncacngaatcacangccncgatnaaatgtatatatttcctgnatctatatgttttccagggccaatctttnaaaatggagctgaaaaaccaacttgtttanaaaatagnnnngntttttgcaagtcttttggcctttgctnnttaanagtattaaaaaaaaaaattttgggcccacanatacnnttntatttttttccngttctggggaatgnttccttgnnaggggnttttanaagattgacccatttgggggtngggaanaanaaaattggttttggggataagggccttcccccccccccccccccccannttntnttttnccanttgggggggaaaccccccnccccct

SEQ ID NO: 5193 - DNA, 837 bp, Homo sapiens
  misc_feature 10, 286, 407, 585, 588, 612, 644, 647, 660, 662, 669, 674,686, 687, 688, 700, 703, 706, 711, 720, 721, 726, 733, 735,742, 749, 755, 763, 766, 777, 782, 783, 784, 791, 794, 795,797, 799, 804, 807, 808, 809, 811, 812, 817, 818, 819: n = A,T,C or G
  misc_feature 822, 823, 824, 825, 830, 833: n = A,T,C or G
tcactactcnctaatacactactatagggcgaattggagctccccgcggtggcggccgcccgggcaggtacattcccgggctggttgactggtaagctttcatctgctgagaagattcagaaatcttttccgatttcaggctgaaattagaaccaatttcttgtcttccagctcttattgtgggcctttattctgcaaagaaggctgcagtgccagcggagctgactgccagtgccaagtgtgtgactgacataacgtatggaggtaatccacacgtgtagctcangaaggctattaataagaagtgctatttatgctggtttcctggggactatacctaaactgaaaaggccagttcaagtacctcggcccaggtactctgctctcattaggatcaataagtgcanaacgggaagttttctgctgaagcctgactattggttaacacattgaaagaaagtagatttcccaacatttggcaatccaacaataccaattttcagtgaggttccaaatcttccaatgattgggggtggtttaattccatcaccttcctttttagggggcatcgtgctcggctgggcnatnacaccggggtcccaagcggcagcnaagagaaaaggtcctgcccgcagctggaggcnggnaggaaaccccccntncaagggntgacnccctataatccnnnactttgggaaantgnggngggcnggacacctnnggtcnggagtcnanactaccntaccaanatgganaaacccanttntacctgcccgncggcnnnttagaanttnngnanccccngcnnnannaattnnnttnnnnttatnttnccct

SEQ ID NO: 5194 - DNA, 878 bp, Homo sapiens
  misc_feature 210, 279, 290, 323, 340, 391, 408, 430, 544, 549, 559, 593,594, 612, 618, 621, 629, 672, 676, 680, 695, 705, 710, 715,725, 757, 766, 767, 777, 790, 795, 800, 808, 809, 838, 847,857, 860, 866, 872, 877: n = A,T,C or G
tcactactatagggcgaattggagctccaccgcggtggcggccgtgcttctgctatggcgaggagccctcggcctccagccactgtgcccacgcctaccggttttctggggatgttgccaccacctctgaagagtgaaaccaagctttccatgcaggaagagccaggtgctgggggctcccgcccgaactgtgaggcccacagtgcttanggagagcaccaaggctctacctttctttcttgacagtgggtgagcagcgcatgcagagatgtgcaaggnacctcggccgntctagaactagtggatccccggctgcaggaatncgatatcaagcttatcnataccgtcaacctcgagggggggcccggtacccagcttttgttccctttantgagggttaattgcgcncttggcgtaatcatggtcatanctgtttcctgtgtgaaattgttatcccgctcacaattccacacaacataccgagcccgggaagcataaaagtgtaaagcctggggtgcctaatgaagtgaagctaactcacatnaattncgttgccgcntactggcccgctttccaatccgggaaaccttgcnngccagcttgcatttaatngaatcnggnccaccccnccggggaaaagccggttttgcatatttggggcgcttctttccncttncttnggtcacttgacttcngcttagctcnggtcngttcngcttgcggcnaaccggtatttaacttaactcaaaaggccggnaaataccgnnttttcacaanaatcaaggggaanaaccncaggnaaagaaanntgtggagcccaaaggccaacaaaaggccnagaaccctnaaaaggcccnttncttgcntttttnattant

SEQ ID NO: 5195 - DNA, 868 bp, Homo sapiens
  misc_feature 6, 11, 128, 250, 372, 423, 470, 492, 501, 537, 577, 582,592, 618, 625, 631, 636, 645, 656, 667, 668, 696, 730, 752,758, 760, 766, 770, 777, 779, 789, 798, 802, 803, 806, 812,832, 838, 839, 846, 857, 861, 865: n = A,T,C or G
tcactnactcncgtaatacgactactatagggcgaattggagctccacccgcggtggcggcccgcccgggcaggtacgcggggcagggcagtcagactggaaccatggagctcagcgtcctccccttncttgcactcctcacaggcctcttgctactcctggttcagcgtcaccctaactcccatggcaccctcccaccagggccccgccctctgccccttttggggaaccttctgcagatggacagaanaggcctactcaaatcctttctgagggagtggatctgattgccgtcaatcaataatacctttgaccaagggactccaatcaattcagcatgttttgcctaatgccttttgtttgtaatactgntgcgggacaatcaaagactggagagatcaaaaaaaaaaaaaaaaaaaagtncctcggccgctctagaactagtggatcccccgggctgcaggaattcnatatcaaagcttatcgataccntcgacctcnaaggggggcccggtacccagcttttgttccctttantgaggggttaattgcgcccttggcgtaaacatggtcatangatgntttcctgtgntgaaaatggttataccgttcaccaanttcacanaacatnccaancccggaacnaataaaatgtnaaagcctgggnngccttattaggtggcctaactccaattnaattgggttgcgcttaacttgcccctttttcaantcgggaaaaccctgggttgccnacttgnantaaaanaatnggccaancnccccgggaanagccgtttncgtnnttngggccnttttccattctttgttaatngacttnntagcctngacaattcggnatanaganaat

SEQ ID NO: 5196 - DNA, 845 bp, Homo sapiens
  misc_feature 2, 3, 4, 5, 6, 7, 10, 18, 684, 729, 737, 745, 751, 777, 797,804, 815, 822: n = A,T,C or G
tnnnnnnccncttatacnactactatagggcgaattggagctcccccgcggtggcggcccgggggccattgagactgccatggaagacttgaaaggtcacgtagctgagacttctggagagaccattcaaggcttctggctcttgacaaagatagaccactggaacaatgagaaggagagaattctactggtcacagacaagactctcttgatctgcaaataccacttcatcatgctgagttgtgtgcagctgcagcggattcctctgagcgctgtctatcgcatctgcctgggcaagttcaccttccctgggatgtccctggacaaagagacaaggagaaggccttaggatctactgggggagtccggaggagcagtctcttctgtcccgctggaacccatggtccactgaagttccttatgctactttcactgagcatcctatgaaatacaccagtgagaaattccttgaaatttgcaagttgtctgggttcatgtctaagcttgttccagctatccagaatgcccacaagaattcaactggatctggaaaaagaaagaaactgatggtgttaactgaacccattttgattgagacctacacagggctgatgtcattcattggaaaccgcaacaaacttggctattccctttgcccctgggaatattggttttttgagaagnctttttggtaccctcgggccgtcttagaactaagtggatcccccnggctgcangaattccnatatcnagcttatcgataccggcacccttgangggggggcccggtccccacntttggtncctttaatganggttaantgccccccttggctaaatcatgg

SEQ ID NO: 5197 - DNA, 732 bp, Homo sapiens
  misc_feature 401, 424, 485, 540, 551, 560, 571, 585, 590, 598, 615, 632,640, 643, 660, 661, 667, 679, 685, 691, 692, 695, 703, 730,731: n = A,T,C or G
tagggcgaattggagctccaccgcggtggcggcccgaggtactcagcaaagtgatccacacgttcttttatactggggggtggagagccgccggcactagttccaaaagttctggtccacctcctctcggagttcaaagccccagcactccggcccggccgaggtactttcaattagttttcattaatatcttctgagttttcctcttaggtggttggtttctgggtaaggcagagttaggctggtgcacacactatttaggaagtcctgtctcgtggctgacaacatacatgtagtgctcaaggaagtgagttaaggagtgacatgggaatcaaaatgatgcctagaatagtgtaatttgggaaacagccctagatttgacattttggaagttcactgtnaagaaagagaccccaaaaagaangaaaaaggggaaaggggttcctcagctaaatatcccactcatccatgcctactcaagcggncactgtgaacaaaggccatcttaatcggggccaagagattacactttttcccctngtaactttaanctggctttntcttttggggnatgttgccttaatngggangggtgaangggggcacttaaacagntttacacttgacccagnggaatttnaangagcctaaaaatggcanngtactngtcccggggctngccccnttcttnnaantaagtggnatcccccccgggcctgtcaaggaaatnnc

SEQ ID NO: 5198 - DNA, 907 bp, Homo sapiens
  misc_feature 3, 12, 378, 415, 607, 675, 684, 732, 739, 762, 775, 781,793, 801, 813, 814, 815, 817, 831, 844, 850, 867, 869, 873,890, 891, 895, 900, 902, 906: n = A,T,C or G
gtnggccgcgtnatacgactactatagggcgaattggagctccaccgcggtggcggccgaggtacgcgggagtaagttataacctctggcctttgtctttacattttcaactttctggatccctaacctttggtcccaagttactacccttgcctatatccactaaccactcactaggtcacaaagttgatggctctggcttgacccagtgaatgagaagtgtcctagctgtttttttttttttttttttcgcaaatcttcataggcacagttgcctgtttaattttttcttcagcccttcccttagaggagggagccttaagttacctttcaaggttgggggttaggaatctatcataactagtctagagatttctnaccaagggaaattttccttatctaaaagaggaacttnaggtctcaaccctgccagtcacacccaattaaatgtccttcacaaaaataaacagcatatgttccctttcaatttgagttcagtgagctcacagcaaaatttaccttttaattttcttcagcaaatcccaagacgaatttacaaaggatgagattagataaagatttcagtttcccgtatgcccaccgctgnccgcccaatttttcaaaaaagcctggctcctcttttcctggtccctccatccaagcccccaaaggatnttttaaccnagaaaataaacccggggaaggacttcagtggattttacaaaaagacanttttaantttttaaaccggtacctttgggncggttttaaaaanataagngggatccccccnggcctggnagggaaatttcnnnanttaaagcttttttngatacccgccaancctccnggggggggggccccggncncccncctttttgttccctttnngggnggggngnaatng

SEQ ID NO: 5199 - DNA, 637 bp, Homo sapiens
  misc_feature 2, 3, 4, 9, 19, 27, 38, 291, 511, 531, 620, 635: n = A,T,C or G
gnnngacgncgtaatacgncttactantcactataggngcgaattggagctccaccgcggtggcggccgcccgggcaggtacgcggggagatatactgagtgagccctgagaagcagtctcagatcctgacggtgcagcagcccgcagcctcagccagggagtcccagccgctttcaatggaggagaagcccggccaagtatctcttttctacagccttattaaactaactacaaacatttattttccaatttagttttactttcagtgcatatcaaagttgttgtacctnggccgctctagaactagtggatcccccgggctgcaggaattcgatatcaagcttatcgataccgtcgacctcgagggggggcccggtacccagcttttgttccctttagtgagggttaattgcgcgcttggcgtaatcatggtcatagctgtttcctgtgtgaaattgttatccgctcacaattccacacaacatacgagccgggagcctaaagtgtaanagcctggggtgcctaatgantgagctaactcacattaattgcgttgggctcactggccgctttccaagtcggggaaacctgtcgtgccagctgcattaaaggaatcggncaacgccccgggggnga

SEQ ID NO: 5200 - DNA, 867 bp, Homo sapiens
  misc_feature 3, 9, 12, 276, 312, 313, 343, 347, 354, 355, 363, 365, 366,375, 382, 384, 389, 390, 392, 395, 396, 397, 404, 405, 408,409, 417, 422, 423, 424, 427, 428, 438, 446, 449, 452, 470,474, 476, 478, 480, 482, 486, 493, 505, 507, 510, 511: n = A,T,C or G
  misc_feature 528, 529, 530, 533, 536, 546, 547, 551, 554, 557, 558, 560,561, 563, 564, 565, 568, 570, 574, 576, 583, 584, 585, 586,588, 591, 596, 599, 600, 601, 602, 605, 606, 609, 610, 614,616, 617, 618, 621, 630, 631, 638, 639, 640, 644, 645: n = A,T,C or G
  misc_feature 646, 647, 654, 666, 667, 669, 674, 675, 678, 681, 684, 690,691, 692, 694, 700, 701, 706, 707, 709, 722, 725, 727, 729,730, 742, 747, 752, 753, 754, 756, 757, 759, 763, 767, 772,775, 780, 781, 782, 784, 785, 812, 813, 827, 833, 834: n = A,T,C or G
  misc_feature 835, 840, 841, 843, 846, 851, 852, 856: n = A,T,C or G
gtnttacgncgngcgtaatacgactcactatagggcgaattggagctccaccgcggtggcggccgcccgggcaggtacgcgggaagcagtggtaacaacgcagagtacgcgggaagcagtggtaacaacgcagagtacgcgggaagcagtggtaacaacgcagagtacgcgggaagcagtggtaacaacgcagagtagccattcttttgttcctttactttcttaataaacttgctttcaccttaaaaaaaaaaaaaaaaaaaaaaaaaaaaaaanataaaaagaaataaaaaaaaaaaaaaacccccccgnntagaaaaaaaaataaaaaaattttaattcnatangaaaaannttgggggncnncccacaacnatatttntnggttnntnaannnggggttnnccnncctctttnaaaannnggnngttccccggngttttggnggnaanataaaaaaaaaaattttntaancncntnanaaanaaaaatnagggggggcccngnaannaaaaaattttttttccnnnccntgnggggcggcgnnaaanaangannanncnnnccntntaananaaagtgnnnnanggnctttnctnnnnggnnttnnaaanannntanaaaaaaaannaaaatgnnnttcnnnnaaaattnttattaaaattnntnccgannacnccnatntaaaannncngggggnnttttnnanttgggggggggcncanananncctcttttaatnttagnttggnnntnncntttntggnccaanttnttttnnngnnagggaaaaaagcgggggggggcatatnntttttatttaagangggtgnnnataannanaanttatnnaaanaaaaagggggg

SEQ ID NO: 5201 - DNA, 754 bp, Homo sapiens
  misc_feature 3, 4, 5, 6, 16, 649, 681, 702, 724, 728, 741, 751, 754: n = A,T,C or G
ggnnnngcgcgcgtantacgactcactataggggcgaattggagctccacccgcggtggcggccgaggtacaatgtcctcgtgtcttgttctggtggccaccttgggtcccagtccacctggacatcaggctgacgtcatctcaacaatggccgggttgttaattcgccaccttgaagccatctctggaactgtgcaactgggtctccaggcttggtctgtttcaagattagctcctagaacttctaatctcacctggccgctagttattgatggagcccatatgtgaactcagccaattcttactcttttcctctatggcaggctccctgccagtgtttgtcatggcaggtcagcacacgggatactggatctgagaatctgatctccagggatcttccccttattctgttccccttggaggattcagcagatacctgtagataagaagctgagcactggagaaattaactagtcccagtcttctagttaactactaagtaaaggatccttgattcatacccagctctgagttctgagcattaattactttgttgcattgcatctggtgttgagtgattattctgtccccatccccgcgtacctgcccgggcggccgcttctaaaactagtggatcccccggctgcangaattccatattcaagcttatcgatacccgtnaacttgagggggggcccgggnccccactttttgttccctttantggngggtaaattgccnccttgggggnaan

SEQ ID NO: 5202 - DNA, 833 bp, Homo sapiens
  misc_feature 4, 6, 7, 8, 9, 11, 12, 13, 389, 543, 556, 587, 598, 607,632, 645, 658, 673, 685, 700, 721, 738, 751, 753, 760, 761,769, 770, 773, 789, 797, 810, 820, 826: n = A,T,C or G
aggntnnnncnnngcgcgcgtaatacgactcactatagggcgaattggagctccaccgcggtggcggccgaggtacagggtgtttagagaatctttctatggctttttgtgttagatttcaaagacctgtgcactttgacgggatgggattttgtcagttctgtgacttcacgtccgtgtgaaagaggtctttaaggcagttcggttttgtagatcccatgcgaaaggagtcgctcaaaatcagggggcgaactacgcgggcgtgaactcgcaggatttatttttcgggtgcacagtaagtattcagtgaccttcagcggtgccctgacgggtgggtaatcagagctctatatcaccggcctcctctggccctttggcagagggcttcncagctggcactgggccagaggagaacttcaggacccagcagtgactgtgaagataagcacatccatgatcctggacttcacgttctgattgcttgcttttttcattggttttcttgaaaacaaattttgggggcctttttgttgtcttaaactnttgacacttcggnctttcatcttgtcatttgacattttccttgnaactgctggancctgaaagnttggggaaaatttttttctttcgcnggttggcccccanttgcccggccccncgttaccttggcccngggccgggccgnttttaaaaacttagngggaatcccccccggcctgcnaggaaattccaattttnaaactttttttgnanacccttnnaacccttnnaangggggggggccccggntcccccanctttttgtttccnttttaaaggngggggngaaaatg

SEQ ID NO: 5203 - DNA, 848 bp, Homo sapiens
  misc_feature 2, 3, 5, 6, 23, 518, 648, 662, 678, 692, 695, 704, 714, 722,738, 768, 782, 784, 803, 807, 808, 809, 815, 824, 835, 836,844: n = A,T,C or G
gnntnnacgcgcgtcatacgacncgactcactatagggcgaattggagctccaccgcggtggcggccgcccgggcaggtacaaaaagcaaagaccccttctccatctctggattttaaaaactggaaaaggatgctgagaggattgagccaaagagccagtcctgggacagtcactgtggtcagctagtggtgtgctttgtctggccacgctgggtcctgctgctcgctccaaaggggcaacatacttgatttgcagccctggcagaatcatatgattaaagtgtgggagggcggtggtgagggaagtatctccccaaaggaaagaaggggtatggaacaggtaaaattaacagatgtttacaaaattgtcttaattattttccccaaaatgcatagccagttttcccaatcctagtttttctctatttacttaaaatgccatctttattatatatcatatagtaaattatctgtcttttcatttgccagtgccacagtgtcttcattttttttaaanctttaaattaaaaaggaaaaaatcagagcttattcaactattctggtcaatggaaattttaacagtgatgccagtagtttttaagaatgtattacaaaatttttttccagcctggggccaatattggcgnaaacccccatcttnttgcaagaaaaattcnaaaaaaatttagtncanggtggtgcntggtgcattncccttgtngggtttcccagcttcntttgggaaaggcttgaaaattgggagaaantcacccttaacccntngggggggtttgagggcctnaggnnnaaactngaaaattgnggccccctggnnttcccaancctg

SEQ ID NO: 5204 - DNA, 615 bp, Homo sapiens
  misc_feature 117, 193, 218, 230, 312, 335, 345, 379, 395, 415, 422, 429,458, 464, 467, 471, 478, 479, 490, 507, 515, 519, 520, 525,529, 531, 559, 565, 567, 572, 573, 589, 604, 607, 609: n = A,T,C or G
ggcgaattggagctccaccgcgtcgagcggccgcccgggcaggtacttttttttttttttttttttttcttttgattttcaagtcagtgaaccaggcaatcaccgacactgcccgcncattatgggcctaattctgcagaggtctgacaaacctgcccagagacagaagattaagctattccaaattacccanacggaggcaagcccagattgggctntctgggacagangtgggggtggggggacctttcatttctgctctttggagacctccaagactaaacagtttaggccacattttgaagaaaattngctttatcctttcacctttaagnggattccggngcaatcagttagatttgggagcaccgtggaggtnagcgcacccacgccanggatgggggtggggggattntgggcanagtcttnggaaaagacaggtggccatgttaaaaatnaggggnggnattntaaaaanncttggggcggnccggttttgtaaccctntaacaatntggnngccanaaananggaaggggttacctttggccggctttanaaactnanttggnntccccccccggggctngcaaagaaaattccnatntncaaaac

SEQ ID NO: 5205 - DNA, 587 bp, Homo sapiens
  misc_feature 552, 554, 570: n = A,T,C or G
gactcactatagggcgaattggagctccccgcggtggcggccgaggtacagtattgagaagtagggaaagaatagaaggaggagttgaatctgtaattgactgagcaatcagttgagataactcactgcctccacataaccttgggctgtcctatgagtcagtggagagcaacccctctcatgtaggttcagtctgaggtagctcactggcactgggaaagttgatcagggtagtcccatctcatgcacagccccatttccccatgagccgctagagtggctcgtatcagaaagatgccataccaaatgctggcaaggacctggagcaactagaatgcatgtgcatttaccttgtcctgacagccactttggagaactctttggctgtttcttataaagctaaacataatcttcccaaaataacatggcaatcccacttccacttgtttatgtgaaaaaaatggaaacatgtccacgaaaaagacttgtagaagcttgtccatagcagccttattcttaataataggtcttaaactggaaataatccaaacntncccaaaccagagattngattaagaaaattgttt

SEQ ID NO: 5206 - DNA, 628 bp, Homo sapiens
  misc_feature 273, 451, 480, 486, 509, 524, 536, 546, 547, 552, 578, 581,595, 596, 611, 613: n = A,T,C or G
actactatagggcgaattggagctccaccgcggtggcgtccgtctctcacatttgagactggggaaggaaggcatacatgacaggctgggcctcaccacacccacctggacctcagatcccttgtgatgggaagcccacttggggagtagaacccttggcaataccgactcagggttggtgaaatcgccttttcatgacaattgatgattctcatccactgaggaaattacatttcacctgaactccccagtccctcaggcaatggccagcanagtgtcagagggcacagctgaaggtgccgagagtcagcatagtgcatttgctgcagggtggaagctttgcaaacgaggaaggctggcaataaatgtaccttcggccgctctagaactagttggatcccccgggctgcaaggaatttcgatatcaaagctttatcggataccgtccacncttgaggggggggccccggtacccaagcnttttgntcccttttagtgaggggtttaantggcgcgctttggcngtaaattcattnggttcaatannttggnttacctgtggtggaaaatttggtttnttncggctcacaaattnncaccacaaaacattncngaaccccggggagct

SEQ ID NO: 5207 - DNA, 874 bp, Homo sapiens
  misc_feature 156, 202, 221, 351, 353, 370, 371, 411, 412, 443, 456, 459,571, 577, 616, 635, 636, 652, 675, 696, 710, 722, 753, 755,768, 787, 791, 798, 799, 802, 825, 830, 835, 846, 853, 858,869, 872, 873, 874: n = A,T,C or G
ttgggagttccctactatagggcgaattggagctccccgcggtggcggccgaggtacgcggggaagcgcaaaagaagaaagatgaggcagaggtccaagtaaaccgctagcttgttgcaccgtggagaccacaggagcagaaacatggaatgccanacgctggggatgctggtacccgtgcccgcgatgacgccgagctccngccccgagccctggacatntactctgccgtggatgatgcctcccacgagaaggagctgatcgaagcgctgcaagaagtcttgaagaagctcaagagtaaacgtgttcccatctatgagaagaagtatggccaagtccccatgtgtgacncntgtgagcagtgtgcagnnaggaaaggggcaaggatcggcaagctgtgtgactgtcccnnaggaacctcctgcaattccttcctcctgaantgcttatgaaggngcntccattctcctccatacatccccatccctctactttccccagagggaccacaccttcctccctggagtttggcttaagcaacagataaagttttttatttttcctcttgaanggaaanggctctttttcttgctgttttcaaaaaattaaaggaacnccattttgatgtttactgnngtggaagaaataatgnccttggattgggggttgataccntgttgttgaaggattccttanttttaatttgggcntgaaaaaaaatntttggggtaccttggcccgggcggggccggntntaaaaaattaatngggatcccccccgggcctngcanggaattnnatntttaaagcttttttggattcccncgganccccnagggggggggnccggggncccanctttttttccnttnnn

SEQ ID NO: 5208 - DNA, 594 bp, Homo sapiens
  misc_feature 2, 5, 10, 17, 20, 24, 551, 570, 572, 587: n = A,T,C or G
tntcnactcntatacgnctnactntagggcgaattggagctccccgcggtggcggccgaggtacatagccccagaagggcggactggccggagtccagggatggcagccaacgccccataacagagatcagcattggactacaagaagaggcaaggagaaatcaaggatcaaaatttaagtaaaagaaaagccaagtcattaaaaataggcccctcattgaagagtgggaacgtaggtgtgatgttctggcataaggagtgaaaaagaaaaagctctattacttgaagcttttcaccaggggcagagagaatggccggaagtgagaaacgtgtgtgtggatgcttacactgatgccgtctcctaatattggaacatggctccagaaaggagaaccaattattcctaattccacgggcggcattctctgactcccaaactcccaaagtggagggcaggagctgcccttaccttgaggaagctcaaagtgttgtggtaaaactctcccggggtgcgacataagatgcttttcagagctccctggacaatgggnaccttgcccgggcggccgntntaaaactagtggatnccccggg

SEQ ID NO: 5209 - DNA, 829 bp, Homo sapiens
  misc_feature 1, 2, 3, 6, 9, 16, 33, 209, 268, 349, 464, 624, 625, 643,664, 683, 700, 717, 723, 735, 757, 758, 777, 794, 796: n = A,T,C or G
nnnagnttngacgctngtaatacgactactatngggcgaattggagctccaccgcggtggcggccgaggtacctttttttttttttttttttttaaaactccctttccttgttatctgaacttccaaacatcagctttgatgtctattgttgggacttcaagaggactcttagcacatcggcaggtgttggttttagtgagcaggcganagtcccacattcttccaaggagagagatgggtcccaccacattcctacccctagagcanaagttcccgcgctgtgcctcttctctggctgcttgctgaggacgtctcccagtggggtacctgcccgggcggccgctctanaactagtggatcccccgggctgcaggaattcgatatcaagcttatcgataccgtcgacctcgagggggggcccggtacccagcttttgttccctttagtgagggttaattgcgcncttggcgtaatcatggtcatagctgtttcctgtgtgaaattgttatccgctcacaattccacacaacatacgagccgggagcataaagtgtaaagcctggggtgcctaatgagtgagctaactcacattaattgggttgcgctcactgcccgcttttcanncgggaaaccttgtcgtgncagctgcattaatgaatcggncaaccccccgggaaaagcngtttgctattgggcctntttcgcttcttggttantgattnctggcttcggcnttcggttggggggaacggtttnnctaattcaaaggcgggaanacggttttcccaaaatnanggggaaaccccggaaaaaaaaatttggaccaaa

SEQ ID NO: 5210 - DNA, 842 bp, Homo sapiens
  misc_feature 9, 508, 628, 727, 733, 741, 743, 758, 774, 778, 797, 819,824, 827, 838: n = A,T,C or G
cgtaatacnactcactatagggcgaattggagctccccgcggtggcggccgcccgggcaggtacctagagagaaagtggtccaagcacagggaattgtgagtgcaaaagctttaaggtggagtcatgtgtggtatgttgaaagacaaggtaggaggccagggtggctagagtgcagtgagccagcagacagcagtagacactgaggccagagggttagaggacagggcctgggcaccatcaaataagctttggagttcctgttagggtcggagatctcactcagtgtgacatggggagcctctccggaggctttgggcagaagagtggtatcatcccactcaagtcacgtcggctgccatgtggtgatgaggctattaggtggctagtgtcaaagaagggagaagcagcgttatattggaatgggctcctaccaactcagcagaagccatgtgtgcatctcttcctgaaccatgccctcatgtcacttgaaattagccacggcgaaangtaagtccatgtggaaatctgcaaatactatagaggatttcttctccctcccttgtcccttccccttctcgtctttcctgcatttcttcctttcttcttcttcttcctcctcctccagtncttcttttctcttttttttttacaacattatatatacttattttattggttattaagccaaagttgttggataaaaccactttaccacacacccttaanaaaganactttttnanaagtgtatttgcaanccatttattttaaaangatngggggtggctttaaactanccatggtaaacaaaaaggaggngattnggnaagtggttganaatt

SEQ ID NO: 5211 - DNA, 843 bp, Homo sapiens
  misc_feature 2, 3, 4, 5, 6, 9, 725, 828: n = A,T,C or G
gnnnnnccncgtaatacgactcactatagggcgaattggagctccccgcggtggcggccgcccgggcaggtacgcgggagttgtagagaatttttaccctgctcctggagtggtctggaggctcccatgaggtcctccatgtggaggcgctcagcaaaacaccttagcaggaagcaagcgcctggatccttccatgcagctttcaagttcactggtggccccgcactgctccaggcactggggagacaggtgtgaaccagcctaatgcaggcccctgtctttgaagagccccattgagaaggacaaccagatgtataaacagataaattaggagacagggtgacaagggagatggggcagcgggacgaggagataacccccaaacactagatttgaagtctaacgactcagagataaaaaccctcttccaccggacagctgggtcatttgaccttgaccttctgtgtcttctataaatagaatggtaacaactaccatgattagtgagctgactatgtggtaagctagtgtttttcttactctacctgtagcctctccatgctcctgtgagatgtgttattcctatcttacagatggggaaatggaagcacagagaggccaatacacttgttcaaggtcacacagcccgtaagtggtaaggccaggacttgaatctgagcagtccaactacagaagcccacatgctgagaccaccgtgctgtgcnattttctggcagggtggatgcttgatgacaatgatgacactttttgacaccacgcttttggtgaagcgccacatgcatttaatattgtggggaaccctgcttntggccacctaaaaaa

SEQ ID NO: 5212 - DNA, 578 bp, Homo sapiens
  misc_feature 297, 427, 532, 566: n = A,T,C or G
tagggcgaattggagctccccgcggtggcggccgcccgggcaggtacctggcgcttcctaagtcctggcagctaatgattgtggtggttgtcatggtttttatttctatttatctttcttttcatcattatcttggctagtttcttctctccctagaggcagacttagtttgtatgccaaaatcctataattagtgagaaataatgatccaggaacaggtatcatccgatagccacagatcctgtgagttctctgcaaaagtcatctctactgagcagtcgcctgccagccctcttnctttagctcccataagcaaaacagaccaactcccaagttgcttgttatgcatttcctggctcactgctactgtctttctttttagggtttcactaagaatcaatgccttcaactgggccaagggtgcggnaagctgagcttcaagaggaagccgctttctcatcaagctccggccagatgccaatgtaagtgggcctggcgggaaaggggacccgttgagccattggggatggcngtgtgtccctgcaagggggtggaggtctggcttngggcagggcttc

SEQ ID NO: 5213 - DNA, 657 bp, Homo sapiens
  misc_feature 448, 475, 525, 527, 528, 547, 551, 567, 576, 580, 581, 590,599, 601, 614, 622, 623, 638, 644, 647, 649, 652, 657: n = A,T,C or G
gcgtaatacgactcactatagggcgaattggagctccaccgcggtggcggccgcccgggcaggtaccatggaggggggaaaatagggcattttctgagagaaaggagccttggatatttgcattccattttgattagtattttttgtttctctcagttcattcagaatcaagggaaaacatatttaaatggatataatgtgatgccaagtgcctctggacaccaaaagcgccccctccacacacaccctacggtcagctcaggcatgaaggtgcatgtcccctcaaggccaggctaatggtggccctgactcagaggcaggcctcaccagcatggatcaactataaactaaactgcagaaggcactcatgccctgggtgggctatgggcagagaaaaactcaggagccccatacacatgtggtcagtgtgtatctgggtggaggcggnaacgttccgagcattggagctgacccnatgcacaggtctctcaggctggaaccaggcgtttttttaagtggaagaantnnaaggggagttccattaganaaanggaacccttctgtgtntcaacttgntgcnnccttggganccaagggtntncttaccaaacaanaactcttnnttttttgaaaaaaanttaatnggntnggngtttn

SEQ ID NO: 5214 - DNA, 879 bp, Homo sapiens
  misc_feature 1, 3, 8, 10, 11, 12, 13, 17, 20, 25, 27, 28, 31, 32, 39,41, 44, 47, 49, 51, 52, 53, 57, 58, 63, 65, 66, 68, 69,70, 75, 79, 82, 84, 85, 87, 97, 103, 105, 108, 111, 114,119, 366, 438, 454, 457, 474, 500, 511, 517, 518, 519, 525,529: n = A,T,C or G
  misc_feature 538, 540, 543, 545, 548, 549, 553, 576, 585, 588, 592, 605,612, 614, 625, 631, 633, 638, 644, 647, 654, 667, 670, 696,699, 710, 716, 718, 722, 730, 735, 737, 738, 744, 745, 767,775, 780, 785, 795, 799, 803, 815, 824, 843, 852, 854: n = A,T,C or G
  misc_feature 855, 862, 879: n = A,T,C or G
nanccganannnngcgnagnattgngnnggnntattcantnttnccncnannnttanntgctnannannntgttnaatnacntnncncttttagtanagttgnanatnacncanttcanaatacgactcactatagggcgaattggagctccaccgcggtggcggccgaggtacgcgggaggctcggtgggcgcgggcggcgagatatgccacacttctgcctgctgttgacaaccctcctggactaggctgctcttgttaatcacatggatgttgtgagtattatattcacaagtggatgtagagaagatatttttatttaactataaatgcttaccacatgagctactcatgcttcgcaaaaanatatttaaacatttgtgatcttgggagttttcattaatctccagggatttatgctgcttgttccattggttnaaataatggtgggttncantatctttccccctaatncaatatttggacttttttttattganaaaagaaaacntttttnnnaaccancaanaagccttgntnggntnttnnaagnaaaatggctttttttggaattgntttaaaaanggntaangccttggccttgnattcctntnaaatttttggnccaaantntggtngggganttncaatttnttccattcctttnggngaattggccttctttattgggtttantanggggcttcccnttaaangngggnttggcccngccantnngaaaannttggccttttccaagaaatggngccttttnggaangtttnccttaaattncttntggntggggatttccntggttatcnaccttggaaagaaataaanctacggctnannttttttnctgaattaatttttttn

SEQ ID NO: 5215 - DNA, 594 bp, Homo sapiens
  misc_feature 546, 559, 580: n = A,T,C or G
gcgtaatacgactcactatagggcgaattggagctccccgcggtggcggccgaggtactctactttcttctacaacgtcccagccgagctgaggtctgagctgtgctgctcaaggctgtcccatgtgaatacagatgcggagaccctgtaagggtaacagaggaagctgtgaacccaggggaagaagataaacttgtggacatatgtgcaaggagcaattttaagtatattgcactaaccaactcatgatctgtaactcctttgttaaggaaaagaatgtatatctacgtcaaacttccatttcagaaagccgaggtcaaaataatgagtcctggggaattcaaacttgtgttaagaaaatgtgtcccagtgtgcaatggctgcaaacagcagcttccttggtagtgtatgcagcctgtttgttgtattgtatgggttgctctaagggaccctggagacagtccttttcagatggatgttcatgtttctgaccttgccctaccccagtggtaaggttccaaacaggcatgccgagggtgccttttngggaaacccccanggccacttgtgggcccagggnttcaccacctgggg

SEQ ID NO: 5216 - DNA, 612 bp, Homo sapiens
  misc_feature 481, 517, 532, 552, 566, 578, 580, 610, 612: n = A,T,C or G
gcgtaatacgactcactatagggcgaattggagctccaccgcggtggcggccgaggtacaccgccgagtcccatttctcacctttcacacccccatcctcacacaagtaacccgggtgtctgacacgttacttaggtttttaatccgcgctgagacaatctcacagagaccctacttcacctctcagtaacttgcatttctcagctctgctgtgtgtgtgtgtatgtgtgtgtgtgtgcgcgcgcgcgcgccggcgtgtgccgtgttgggggagtgtgatgtgggggaatcagttaatttggtgattgcaatgaaaattcgacaccgctagatgtattttccctgccaatctgtgtgtgctggccccggccgctctagaactagtggatcccccgggctgcaggaattcgatatcaagcttatcgataccggtcgacctcgagggggggccccggtacccaactttttggttccctttaantgagggttaaatttgcgcgcttggccgttaatcatngggcaataagcctgntttccctgtgttgaaaattngttattcccgcttnaccaatttccanancaaacaataccggagcccgggggagcaatnan

SEQ ID NO: 5217 - DNA, 609 bp, Homo sapiens
  misc_feature 258, 609: n = A,T,C or G
gcgcgtaatacgactcactatagggcgaattggagctccccgcggtggcggccgaggtacgcgggctggatccctaacctctggtcccaagttactacccttgcctatatccactaaccactcactaggtcacaaagttgatggctctggcttgacccagtgaatgagaagtgtcctagatgttttgttttttttttttttcgcaaatcttcataggcacagttgcctgtttaattttttcttcagcccttcccttanaggagggagccttaagttacctttcaaggttgggggttaggaatctatcataactagtctagagatttctcaccaagggaaattttccttatctaaaagaggaacttcaggtctcaaccctgccagtcgcacccaattaatgtccttcacaaaaataaacagcatatgttccctttcaatttgagttcagtgagctcacagcaaaatttaccttttaattttcttcagcaaatccaagacgaatatacaaaggatgagattagataaagatttcagtttcccgtatgccaccgctgccgccaattttccaaaaaagcctggctcctcttttcctggttcctccatcccaan

SEQ ID NO: 5218 - DNA, 645 bp, Homo sapiens
  misc_feature 218, 222, 237, 312, 346, 356, 407, 436, 458, 461, 462, 469,483, 504, 533, 536, 551, 552, 554, 560, 568, 572, 575, 576,578, 581, 583, 585, 586, 589, 591, 593, 597, 610, 611, 621,622, 627, 634, 641, 642, 645: n = A,T,C or G
cgcgtaatacgactcactatagggcgaattggagctccccgcggtggcggccgaggtacttttttttttttttttttttttttttttcttcttacctttcctttctctctccttgacccatttcaattcaactgccacctactgagaacctgttatatgccagggatagggatatcaagatggatgaggtccaaccctaacttcaaggaactcacagngtantggaaaacccaggtntctaaagaaattatttcagtcccatgtgctaaggatggtggagtgtggtggtcaaaagtgcggactgaattcaanatcttgcctgctgggggtgacgtcagttgatctnactaagcctnagtttttcctctgggaaaatggtaattacatcttccacaaaaggtttttanaaaaattaatatgggataatcattgactntttgtgttgggggccaaggtanctnntgagatnttaactgcttactnattaacaattgactttttccngtgaacctttcattattttcttccccaanttncagttggtcattcanntngaccanaaagaaanaaanccnngnggnancnncananangaancctttttttaaannaatatggggnntgccnctttttnccctttnnctn

SEQ ID NO: 5219 - DNA, 598 bp, Homo sapiens
  misc_feature 483, 558, 581, 583, 598: n = A,T,C or G
gactcctatagggcgaattggagctccccgcggtggcggccgaggtactctattgaataaggggaagggattgtagaggtatggataccaggaggtggagatcatggggccatttttagagtctgtcagccattgtccatcatctgggcttcagtgattcatgtcccttccccatgcaaaacacattcattccctcccaagatctccaaaactctcatcctattacagcatctattgaaagttcagaatttcattatataaattaagtccaggcatggatgagtttccttggatgtagctcttcttgatgcatggatctcagtgttgatgtctgctggactgatcagcgtggtggctgctgaaggttgaggtggctgtcataatttcttaaaattaaacaacaaaaatttttctacaactattgactcttcctttcataaaagttttctctgtagcgtgttatgctgtttgacaacattttanccacagtataattttatttcaaaattggagttcgggaggagccaagatggccgaatggggaacagctccagtctncccgccgtaccttgcccggggcngncgctctagaaacctn

SEQ ID NO: 5220 - DNA, 872 bp, Homo sapiens
  misc_feature 496, 567, 577, 585, 593, 618, 639, 640, 645, 653, 657, 660,661, 666, 667, 669, 674, 679, 683, 686, 690, 699, 702, 709,711, 712, 713, 718, 722, 726, 730, 732, 736, 737, 743, 745,757, 764, 768, 772, 774, 777, 781, 782, 784, 786, 787: n = A,T,C or G
  misc_feature 789, 795, 796, 797, 798, 800, 803, 806, 807, 818, 819, 820,823, 824, 830, 831, 833, 839, 841, 844, 845, 846, 849, 850,851, 862, 865, 866: n = A,T,C or G
ggagctccaccgcggtggcggccgaggtacgcgggggcgtttgtagatggaaggaagaacttgtgtgcttagacctgacgctgggaggagatgctgccacctaggttacttgtaggaccctatacggcaacctcctttgccaggaactatttataaacatcctgcaggaaaatgagtctatatgtcagaatacacatttcccaccttgcccaacagtagaaaaacataagaagagaaaaacattaaaaaatgacaaggaagttaatggaagtcagcaatgtgatggtgtttggaggtggagccttcagaaggtaattaatgcccttgtaagaagaggccagagagcttgcgcaccttcttcctgccatgtgaggagccaagaagccggctgtctgcaacctgcaagaggaccctcactagaagctagccatactggcatcctcatcttggctttccaacttccagaactgtgagaagtatattgtttgtgggtttnagtcaatggtctatgggaaatttttttatagcagtccccagccaagacaggtgccctcattttacttacanacccaatctnatagttanttataatnggggcttccttttcagcaaacccantgggttccaataaacgagganntagantacttggnaacnccnntagcnncnttcanctagntttngancatnccgaataantgnagaaaanannnttggncttnaacntttntngtgnnaaaaancncacatgtccttntaggtanttcngtcntntcncctnngnannanactgannnncnttnccnntcctcaccctnnnctnngtcccnnantccatntncgnnnttnnnccctttgggangcnnggggcc

SEQ ID NO: 5221 - DNA, 824 bp, Homo sapiens
  misc_feature 631, 674, 700, 726, 727, 734, 739, 740, 747, 748, 758, 759,763, 765, 770, 776, 783, 786, 787, 790, 797, 800, 811, 812,820, 821, 824: n = A,T,C or G
ggcgaattggagctccaccgcggtggcggccgcccgggcaggtactataataattgaagaaatgaaaaaggcagttttctctggtttgcagaattattttagtttgttaattgaaagggtttactaagttccaggaaggactgatggaaaaagacacatttaggcaaatcgtcctgaagtttctgattcaaaaaaaaaagagaaaatttttatgagttctcaaacaaaaagttacacacaaagaaaaaaatgtaaactttcatgggatttcttctctttaatgctagaagagaaaagcacagtgtaaaaacatctgctaactactgaaagaaaagcactgcaacgcaagcatccgtcccgcacatggatgagataacattcacctatcagggtaagaagatgtaagaactgagagggttggagcaagatggccaaacagaagtctccactcaacataacccctacagcaacaccaaatttaacaagtctctacacataaaaagcaccttcataaggaccaaagaatcgggtgagcatgacagtaggcagttttaacttcatattgctgaatgattcactgaagagggtaggaaagacagtcttaaattgcagatgtcccccctcccctgtnccctcaggggttgcctggtatggagacagtcccgtgcccttgncggggagggaaagtgaaagagattgnggagacttttggtgtagaaacttcanntggctgntcccnngcccctnngggaaaagcnnaatnangggcngaactnttttttngcnnttnccccctnttnggggggggggnnttttttcnnccn

SEQ ID NO: 5222 - DNA, 1212 bp, Homo sapiens
  misc_feature 2, 7, 8, 10, 12, 16, 17, 18, 25, 27, 31, 39, 40, 44, 45,49, 50, 53, 57, 58, 59, 60, 67, 81, 82, 84, 85, 89, 90,92, 93, 97, 98, 104, 346, 431, 463, 480, 500, 538, 621,639, 674, 724, 729, 732, 734, 753, 758, 769, 771, 777, 792,799: n = A,T,C or G
  misc_feature 806, 817, 818, 823, 825, 832, 853, 859, 880, 883, 892, 927,959, 970, 987, 997, 1005, 1012, 1020, 1046, 1073, 1075,1078, 1080, 1098, 1109, 1112, 1117, 1125, 1135, 1167, 1179,1181, 1184, 1185, 1193, 1198, 1204, 1205, 1206, 1211, 1212: n = A,T,C or G
anatatnncntntatnnntatgagntngatntatatgtnncatnngatnngtntaannnnatgtatntaatatatatatanntnngtcnnannggtnngggagntgtgtacgtgcttcatacgactcactatagggcgaattggagctccaccgcggttggcggccgaggtactcagagtgaggattttctgcaacctgcgtttgtccctccagcatctgctctggctccatggcggaccctgcaagtcacagtccccggataccagtccgcgcccaagccgttcgttcttaagagccctgcaccgctccaccagctcccagcacaaacagcttcggccgctctanaactagtggcatcccccgggctgcagggaattctgatatcaagcttatcgatacccgtcggacctcgaggggggggccccggttncccagcttttgttcccttttagtgaaggggtntaatatgctgcgccttnggccggtaaatcattgggtncattagcttgttttcctgtgttgaaaatttgtttaatnccggcatcaaccaaattttcccacaaccaaacaattaccgaaggcccgggggaagccattaaaaaggtggtaaaaaagccctngggggttggcccttaatnggaaggtggaagccttaaaacttcaaccaatttanaattttggccggttttgccggctttccaacttggcgccccggcttttttnccaanatncngggggaaaaaacccttggnttccnttggccccaangnccttgncattttaaaattggnaaaaatnctgggcnccaaacccttnntcccngnggggaangaaggggccgggttttttgcnctttanttttggggggccgccttcttntcnccggctttncccttcggcttcaacttggaacattcgccttggcngctttcgggtccaattcccggttttcctggcnaaagcccggtnattcaagcctttacttnaaaaaaggcngggataanatacccngttttttncccacaaaaaatccaaggggggaatnaaccgccatgggaaaaaaaaaacaatntngananccaaaaaaggccctatcnaaaaaaggggnccnagggnaaaccctnttaaaaaaangggcccccgttttgctttggcctttttttatncaataagggccntnccnncccccccntgaanacaagnnnttaann

SEQ ID NO: 5223 - DNA, 1064 bp, Homo sapiens
  misc_feature 1, 3, 4, 9, 11, 19, 21, 24, 25, 27, 28, 32, 37, 38, 43, 44,49, 53, 58, 62, 68, 69, 70, 74, 75, 76, 78, 79, 82, 86,88, 90, 158, 183, 451, 471, 509, 514, 534, 584, 594, 599,606, 635, 666, 669, 670, 676, 678, 693, 707, 708, 726, 732: n = A,T,C or G
  misc_feature 744, 748, 781, 798, 808, 810, 817, 838, 863, 876, 879, 905,911, 914, 925, 936, 938, 942, 952, 955, 957, 959, 963, 973,981, 989, 991, 994, 1002, 1004, 1010, 1011, 1029, 1033,1036, 1042, 1048, 1051, 1054, 1057, 1058, 1061, 1062: n = A,T,C or G
ntnntatancngtttaatntnttnncnntttnttaanngttanntttantatnatttntttnatcctnnncagnnngnnggngggngngnctttcatatagggcgaattggagctccaccgcggtggcggccgcccgggcaggtacgcgggatagcangggcccagttcatctgcctgaaganaagaagatgtatcaagttcaaggatatccaagaaatggatctcactgtggtccagattatagactctacaagagtgaaccagagttaacaacagtggcagaagttgatgaatctaatggagaagaaaaatcagaacctgtttcagagatagaaacttcagttgttaaaggttcccactttcctgttggagtagtccctccaaggaggcaaaaatcaccaacacccggaatcttcgacaatagcttcctatgtaacccttggaggaaanactaaagaaaggatgattgngatcttaaggaacgggaaagacccaaggaaaggtgcangtggnaaacagctcttggtttgggncttgaaaaggtacctcgggccgctcttagaaactaggtgggatccccccnggcctgccanggaanttccganatcaaagcctttatcggaatacccgttcngaccctcggagggggggggccccgggtcccnagnntttttngntcccttttagatganggggttaaaattgnncgcctttggccgtaatcnatgggncaatagccttgngttnccctgggggggaaaaattggtttattcccggcntccaccaattttcccancacaaaccantnccggaanccccgggggagcccttaaaangtggttaaaaaggcccctggggggngggcccttaaatnggnggtggaagccttaaaccttcaccaanttaaanttnggcgttttgcngcctctaactngncccngcttttttcncantncngggnaaaaaccttngttgcggngccccagncntgncatttaantnaaaatnnggcccaaaacgcccccgngggnagnaaaggnccggtnttngcnttnnttnngg

SEQ ID NO: 5224 - DNA, 652 bp, Homo sapiens
  misc_feature 585: n = A,T,C or G
ggcgaattggagctccaccgcggtggcggccgcccgggcaggtacacctcacaaatgatagtggctgagagccaaatgatgagcttctctgtgttatgtctacctagctgtgattatatcaggcacaggattgtgcgcgtgtgctctaatcccactgtgtcatgcaggatttttacctcggcctatgcctgcctggcagcaacacagccatgttccttacactccgccccctaggccaagggggtcctcttaatgggaactcgtgcacataggggagcaccctggacccagaggccacagcaacaataaagagagcaacaacctactactaatattcctgctatgctacctatgattataagagcccagtgtaggccagagcccagagacacccaccatctctgcaggcggtcatcagtaaggtattcaattgccttaatctcccatgacatgacaccccccgcaaagctgccactatgttctggtggttgtcagggatgaatgtacctcggccgctctagaactagtggatcccccgggctgcaggaattcgatatcaagcttatcgataccgtcgacctcganggggggcccggtcccagcttttgttcccttttattgagggttaattgcgcgcttggcgtaatatggg

SEQ ID NO: 5225 - DNA, 649 bp, Homo sapiens
  misc_feature 332, 387, 457, 477, 494, 522, 555, 578, 593: n = A,T,C or G
tccaccgcggtggcggccgaggtacctgggagtggccttctgtgcctgccactgtgcttcccacattgcttagtcacacacataactgggaggtgctgtgttcccagtttttgtgagtgcattgagcccctagtggttctaccccttagcaataactgcccctggaacaggtgtcatcactgtagaaatgcaggttacagcccttgcagaacacagagattgggcccatgaattacacctgagctgccctccttttgttaattgatgagattgatcagatcaggaaggtggttgatgcaaaaccggatggccttagacatagtcacagctgntcaaggtggcacctgtgcccttgtagggacagagtgttgtacctgcccgggcggncgctctagaactagtggatcccccgggctgcaggaattcgatatcaagcttatcgataccgtcgacctcnagggggggcccggtacccancttttgttccctttaantgagggttaattgctcgcttggccgtantcatgggccatagctgttcctgtgtgaaattgntatccgctcacaatttcacacancatacgagccgggancattaaagtggtaaaagcctggggtgcctaatgaggtgagcttaacctcacattaa

SEQ ID NO: 5226 - DNA, 1684 bp, Homo sapiens
  misc_feature 2, 3, 4, 5, 6, 7, 8, 10, 11, 12, 13, 14, 15, 17, 18, 19,20, 22, 23, 24, 26, 27, 28, 30, 33, 35, 36, 37, 38, 41,42, 43, 44, 45, 46, 47, 48, 49, 50, 51, 52, 53, 55, 56,58, 59, 60, 63, 64, 67, 68, 70, 71, 72, 73, 76, 78, 79,80, 81: n = A,T,C or G
  misc_feature 82, 83, 84, 85, 86, 89, 90, 92, 93, 94, 96, 98, 99, 101,102, 103, 104, 105, 107, 110, 111, 112, 113, 115, 116, 117,118, 119, 120, 121, 122, 123, 124, 125, 126, 128, 129, 131,132, 133, 135, 136, 137, 138, 139, 143, 144, 147, 148: n = A,T,C or G
  misc_feature 149, 152, 156, 157, 158, 159, 164, 178, 189, 223, 244, 251,264, 355, 362, 373, 407, 447, 449, 474, 488, 521, 540, 548,566, 577, 584, 595, 607, 617, 620, 656, 663, 665, 666, 685,688, 695, 715, 718, 724, 729, 750, 782, 784, 787, 801: n = A,T,C or G
  misc_feature 816, 828, 833, 851, 853, 861, 871, 881, 905, 940, 954, 974,994, 1017, 1031, 1051, 1066, 1103, 1153, 1161, 1205, 1213,1225, 1252, 1260, 1264, 1279, 1296, 1310, 1332, 1342, 1353,1387, 1390, 1399, 1403, 1412, 1420, 1450, 1496, 1504: n = A,T,C or G
  misc_feature 1523, 1528, 1546, 1549, 1560, 1580, 1587, 1611, 1615, 1630,1632, 1640, 1665, 1674, 1679, 1683: n = A,T,C or G
tnnnnnnntnnnnnntnnnntnnntnnnanaantnnnnttnnnnnnnnnnnnnanntnnnttnnggnntnnnntantnnnnnnnnntannannntntnntnnnnntnatnnnnannnnnnnnnnnntnntnnntnnnnngggnngannnttntttnnnnttctnacttattaggggcnggatattgggnagccttccaccggcgggtgggccggggcccgggncccgggggccagggtaccttnttatggnagaacccaggccngggtccataatttggccttgaagggttaaagggaagttttgaagaaccaagcctgggcttaaaccattggggtggaaaaacccctggtctntacttanaaaaattacanaaaaaattaagcccgggggccattgggtggggcntcaacgccctggttatgttccccaaacttgccttttgggngnaagggtttggaagggccaaaggaanaaattccggctttnggaaacccccagggaaaggggttggggaagggntttgccaagttggaaggcnccggaagnaatccggcccgcccaacntggcaacctcnccaagcnaattggggggnccggaaccatgnaagcccaaanggnaccttccccaattccttcaaaaaaattaaaaaaagnaaaaaangnnaaaaaaggaaaaaacccanaanaagtaanaaaaaagggaaaaaaaaggnccntttaanttaanttttggggaaaacctttttcntttcctttaaaaaaaaaaaaaaaggggaaaananaanaaaaaaaaaagggnaaaaaaagggccccnttgggaattggnccaancaacccaaaaaaaaattncnttaaaggnaatttttttnggggccaaanaggggttccgggaattccaaaaanttttaaaaaaggggggaatttaattttttaatttntttggccaatttcnaaccaaaaaaaattaaaaanttttcctttttttaaccttnccccccccccccaaaaaaaaaanttccaaaaatttanaaaaaaaaaaagggttttcnaaaaaaattaaaggnccaaaaacccttttttttcccccttaaaaattgggtnggtttttttaaaaaaaaaatggggttaaaatttccaacccccaaaaaaanttacccanttgggttggttccccccccaaaaccttttcttttttccccaagnttttattnaaaattttcctnaattttgggtggttaaaaaagtggganggggttanttancccttggaaaaggtngaaggggccaaattaanaaggaaaggaaagntttggaaggcctttttcaaaanaacccctggnccttgggaaanaaagaaagccggtgggttttcctttttctttaangangttccttgngaanggaaaaatngggttttngggggggggcccaccaaaaaattttctttnttcaaaattctttttttttctttttttcccccttcattccctgggnaacctccntttaattttttccttgggncctcnaaactttggccccttttnttngggtaaaaacntttttggtttccaccctttnccccggnggtttaccctttggggggcccggntttnttaaaaaaaccttangngtgggggnttcccccccgggggccttggggaanggaaatttncggantttnt

SEQ ID NO: 5227 - DNA, 838 bp, Homo sapiens
  misc_feature 2, 3, 4, 9, 10, 22, 31, 671, 714, 833, 834: n = A,T,C or G
gnnnttacnncctttactcctntagggcganttggagctccaccgcggtggcggcccgaggtaccaaggcaaaaaaagaaaaaaaaatcaggatcctctgtgagaaacagaagttagagcaactgaattgcttaaacagctgggagttgagccaagtgccaacattcacaagctggtgagtttgggtcttagtttctgctttagttatatgagaaatttgccccctgagtgatgataattgctccttatagtaaatccgtgtctgcataaaggcaaggagtccttggataggggttgagtaggtctgcaaactctaatatcatttttatttttctgaatattgctctgggcttttctgtctctgccaggtaacttcaacatctccgctgatgagcctataactgtgacacctcctgactcacaatcatatatctccgtcaattactctgtgagaatcaatgaaacatatttcaccaatgtcactgtgctaaatggttctgtcttcctcagtgtgatggagaaagcccagaaaatgaatgatactatatttggtttcacaatggaggagcgctcatgggggccctatatcacctgtattcagggcctatgtgccaacaataatgacagaacctactgggaacttctgagtggaggcgaaccactgagccaanggagctggtagtttacgttgtccgcaatggagaaaacttgganggttcgctggagcaaatctaataagccccaaacttttcctcagctgcataaaatccatttgcagtgggagttccatgtttattggcccttatgcccttcttctttcattttattcccannacct

SEQ ID NO: 5228 - DNA, 1263 bp, Homo sapiens
  misc_feature 6, 7, 8, 11, 13, 16, 17, 19, 20, 21, 22, 24, 26, 27, 28,29, 30, 31, 32, 35, 38, 42, 44, 46, 47, 48, 50, 51, 53,54, 55, 58, 59, 60, 61, 66, 67, 70, 72, 73, 74, 75, 82,84, 86, 91, 93, 94, 95, 96, 97, 99, 104, 106, 152, 165,199, 200: n = A,T,C or G
  misc_feature 227, 284, 313, 427, 435, 453, 464, 478, 480, 499, 502, 519,533, 632, 686, 701, 706, 714, 736, 743, 761, 764, 779, 784,796, 840, 845, 848, 857, 859, 892, 903, 908, 917, 918, 928,939, 942, 955, 974, 1001, 1002, 1013, 1014, 1021, 1026: n = A,T,C or G
  misc_feature 1027, 1031, 1034, 1048, 1056, 1059, 1077, 1084, 1096, 1106,1107, 1111, 1123, 1130, 1132, 1135, 1140, 1141, 1143, 1148,1150, 1154, 1160, 1168, 1177, 1180, 1193, 1200, 1201, 1202,1204, 1206, 1207, 1209, 1213, 1220, 1221, 1223, 1228: n = A,T,C or G
  misc_feature 1229, 1231, 1233, 1246, 1248, 1255, 1259, 1260, 1262: n = A,T,C or G
ctttcnnntantnttnngnnnntntnnnnnnnttncangtgngngnnngnngnnnggnnnngctgnnttncnnnnttttttntntnttttntnnnnngnagggncncgtaaacgactcactattggcgaatgcagcttcccccgcggtgggnggccgcccgggcnggtacgcgggaggcaggaagtgtctgcgccgccnntggccggccacagcctaacgctcttcnctgtcgtttgtgggctcgcgcagggcgggccccggttctgggtgttttgggccgtcngaattaaaacaaccaccatgtccagcaanaaaggcaagagaccaagaaccaccaagaagcgccctcagccgttgcaaccatccaatgtgtttgccatgtttgaccagtcacaagattcagggagttcaaaagaggcccttcanaccattgnattgaatcaggaaaccancagatgggctntcatttcggaccananggaaaagaattctggccantgnatattgcctttggcttntcttcttagggggnaaagaaattcccccacctggaatggccattaccctttgggatggccccattggaatggaaaattggaagggccccccccaaggggcccccaattccaanatttttcaacccaattgttttcccttggaccccattgttttttggggtggaagnaaaggtttaaaaatngggcnaccaggantcccttggaaagaatggttcanttccagnaaaaaccggccctttttnggnctttggcctttttgnattgngaaaggaaaagncaaaacaagggcctccccattttcaggggaaaggaatttacccntaaanaanaaagccttncnttgaaccaaccccattgggggggggattccggnttttaacaagnatttnaaggggaannttgggattgnaacctgggtanccnttcgggcccggcntctttaaaaaccttaagtnggggttccccccccggggcttggcaannggaaattttcnnatttatnaaaanncttnatncggaatacccggtngacccttntangggggggggccccggttnccccaancttttttggttnccctttttanntggnagggggtttaantttgccncnccnttggnngntaaancnattnggggcnataacctnggtttcccntgnggtggaaaattgntttttcnnncntnncnaaanttccccnncnaaaanntncnaaacccggggagncnttaaagnggtnnant

SEQ ID NO: 5229 - DNA, 878 bp, Homo sapiens
  misc_feature 459, 489, 529, 594, 612, 628, 631, 654, 683, 702, 707, 715,729, 751, 775, 797, 801, 802, 807, 820, 843: n = A,T,C or G
gactactatagggcgaattggagctccaccgcggtggcggccgtgcatagactagtcagcttctggggtgactagagcagggctgttgtctccacaagcttcagccgtgcgtggactggtcagcttccggagtgaccagagcagggctgttgtcatctcactggcaccttggttccatcgtaggatcagctgggttgcatggtctaggtcctgttggctggtccacttgtcctgggctgctggtttcagctgactggatggatggatccaaggcacaattcctgcaacatttctaggcttccagtgggtcctggcgtcttagctgtggatctcccaatacctgcaggtaacgaggccacagaagctgggcctctaggagcagaagacacagagcagtgaagactacaccagaagctccggctgccaccagagacaaaggccccgccccccgcgtacctnggcccgctctagaactagtggatccccccnggctgcaggaattcgatattcaagcttatcgataccgtcnacctcgaggggggggccccggtacccaacttttggttccctttaatgaggggttaaattgcgccncttggcgtaatcattggncataactggtttctgnggngaaaatggttattccgcttcacnaattccacacaacattaccagcccgggangcattaaaaggggtaaaangcctngggggggncctaatgaggtgancctaacctcacatttaatttgncgtttggcgcttaacttgcccgcnttttccaatcggggaaaaaccnttcnngccancttgatttaatgnaattcggccaacccccccggggnagaaggcgggtttgcgttttgggcgcctttcccct

SEQ ID NO: 5230 - DNA, 1613 bp, Homo sapiens
  misc_feature 2, 3, 5, 6, 8, 10, 12, 13, 14, 15, 16, 19, 20, 22, 23, 25,26, 27, 28, 29, 31, 32, 33, 35, 36, 37, 38, 39, 40, 41,42, 43, 44, 46, 47, 48, 49, 50, 52, 53, 54, 56, 58, 59,60, 61, 62, 63, 64, 65, 66, 68, 69, 70, 72, 73, 75, 77,79: n = A,T,C or G
  misc_feature 80, 82, 84, 85, 86, 88, 89, 90, 91, 93, 94, 97, 98, 99, 102,107, 109, 111, 112, 113, 117, 118, 119, 120, 121, 122, 123,124, 125, 126, 127, 128, 129, 130, 131, 133, 134, 135, 136,143, 146, 148, 154, 159, 161, 169, 176, 180, 186: n = A,T,C or G
  misc_feature 187, 215, 236, 239, 265, 269, 271, 272, 277, 278, 287, 290,297, 302, 311, 313, 315, 338, 390, 399, 421, 503, 521, 556,577, 602, 626, 640, 673, 678, 697, 722, 763, 765, 767, 833,873, 895, 902, 913, 922, 929, 958, 964, 974, 996, 1021: n = A,T,C or G
  misc_feature 1059, 1075, 1079, 1096, 1132, 1138, 1166, 1205, 1214, 1228,1282, 1308, 1310, 1339, 1343, 1348, 1358, 1361, 1372, 1373,1381, 1392, 1398, 1402, 1420, 1424, 1427, 1428, 1444, 1452,1473, 1476, 1485, 1518, 1535, 1554, 1555, 1573, 1580: n = A,T,C or G
  misc_feature 1582, 1592, 1593, 1596, 1599, 1602, 1606, 1608, 1612: n = A,T,C or G
annannananannnnntannannannnnntnnngnnnnnnnnnntnnnnncnnnangnnnnnnnnntnnnannanananntncnnnannnnannaannnacncatancnannnatgnnnnnnnnnnnnnnngnnnncggattnaanancctttngaaancncctcactntttttgngcanaattgnncagctccacccgcggtgggccgggccgnaggttaccacttcaagcaagnatngtctggccgggtccttggaagcttgngggngnnaaganngagcgatcnccnaaaaaanaaaantaatttttntntnttcttccccagtgtcttgggccngaaagggcctacgggcccaccccttgccgggtttcccgccccttcccgttanaccagggtnggggtgggaattcaaggggtcngggcccgccttcttaagaaaacttaaggtggggaattccccccccgggggcttgccaagcggaaaattttccggaataatcnaaaggcctttaattccgnaataacccccggttccgggacccccttccggaagnggggggggggggcccccccgnggttaaccccccaagcctttttttnggttttcccccctttttttaaagnttggaaaggggggnttttaaaaattttgggccggccccggccttttnggggnccgggttaaaaattccaanttgggggttcccaattaaaggcccntggggttttttcccccttgggggttggatgggaaaaaaatntngnttttaaattcccccggcctttccaaccaaaaatttttcccaaccaacccaaaaccaatttaacccngaaaggccccccggggggtaaggccaatttaaaaaaaggntgggttaaaaaaaggccccctnggggggnggttggccccnttaaaattnggaaagnttgggaaggccttaaaaaccttccaaccnattttnaaaaattttnggccggttttgggccggccctnccaaccttggcccccgccttttttncccaagttcccggggggaaaaaacccccttggttcccngttggccccaaggccnttgnccatttttaaaattggnaaaattccgggggccccaaaaccgaccgccgggggngggaangaaaggggccggggtttttggccggttnattttggggggcccgcccttcttttcccccgcccttttncccttccgnctttcaaccttggnaaccttcggccttggccggccttccgggggtccccgattcccgggcctttggcnggggcccaaaagccgggttaattccnangcttcaccttccaaaaaggggccggggtnaaanataanccggggtttnaantccccaccaannaaaattcnagggggggaantaaaanccgnccaagggaaaaaaaaaanacantgnnggaaaccaaaaaaaanggcccaanccaaaaaaaaggggcccaagnganaaaccccgntaaaaaaaaaaagggcccccccgttttgccttngggccgttttttttccntaaaagggcctttcccggnnccccccttgggacccaanccattcncnccaaaaaaanntcnaanccncctncnaaang

SEQ ID NO: 5231 - DNA, 1155 bp, Homo sapiens
  misc_feature 1, 2, 3, 5, 6, 8, 11, 12, 18, 20, 22, 23, 25, 29, 30, 35,36, 38, 42, 44, 45, 46, 49, 54, 58, 62, 63, 64, 65, 67,68, 69, 71, 74, 76, 77, 79, 81, 82, 83, 85, 86, 87, 88,91, 93, 94, 95, 99, 102, 107, 108, 109, 111, 112, 113, 114,115: n = A,T,C or G
  misc_feature 124, 403, 428, 436, 440, 459, 470, 520, 554, 562, 571, 611,626, 737, 746, 757, 764, 767, 779, 794, 812, 821, 824, 861,890, 892, 895, 898, 901, 904, 906, 910, 916, 917, 919, 922,923, 941, 950, 951, 962, 967, 970, 978, 979, 990, 999: n = A,T,C or G
  misc_feature 1011, 1020, 1028, 1035, 1047, 1050, 1051, 1060, 1064, 1074,1085, 1091, 1094, 1095, 1102, 1109, 1110, 1119, 1120, 1121,1128, 1138, 1141, 1143, 1144, 1146, 1150, 1151, 1153, 1154,1155: n = A,T,C or G
nnncnncnttnnattatntntnntntatnnatatnntnttantnnnaanaatgnattntttnnnntnnntntgnanntnannntnnnntcntnnnaagnaanggtgnnnannnnngtacgactnactataggcgaattggagctccaccgcggtggcggcccgcccgggcaggtacgcggggggcgctgagaacgcgggtccacgcgtgtgatcgtccgtgcgtctagcctttgcccacgcagctttcagtcatggcctccggtaacgcgcgcatcggaaagccagcccctgacttcaaggccacagcggtggttgatggcgccttcaaagaggtgaagctgtcggactacaaaggggaagtacctcggccgctctaagaactagtggatcccccgggctgcnagggaattcgatatcaagcttattngattaccngtcngacctcgagggggggggcnccgggtacccnagctttttggttccctttaagttgaaggggttaaatttgccgccgccttngggcgttaattcatgggtcattagcctggtttcnctgtggtngaaaaattngtttattccgcttcaccaaatttcccacacaaacattacngaagcccgggggagncattaaaagttgttaaaagccctggggggtggccttaaatggaagtggagcctaaacctcacaatttaaattgccgttttggcggcttcaacttgggccccggcttttttncaagtttcnggggaaaaacncttgttncgnggcccaaccttntccattttaaaatgnaaattcgggcccaaaccncccccgggnggnaagaagggcagggtttttgcccgttattttggggggncgggcttcttttcccggcttttcctttangnatncangtngancncccngtttgnncnccnncagggttttatttcgggntttgtctgnncgaaggcgggntattnaangcttcacnnttaaaaaaggnccggttaanttactggttttnttccaacangaaatttnagggggnaatttaaacccncannggaaaaaanaaanaatgttttantccaaaaaaanggcccntcnntaaaaangggcccnntggaaaccnnnctaaaanaagggcccgngtntnngntttnncnnn

SEQ ID NO: 5232 - DNA, 1238 bp, Homo sapiens
  misc_feature 4, 6, 8, 11, 15, 20, 23, 26, 28, 30, 31, 33, 35, 36, 43,44, 47, 48, 49, 50, 53, 55, 59, 60, 62, 63, 64, 70, 71,73, 78, 79, 80, 82, 86, 88, 89, 90, 91, 96, 98, 103, 106,112, 115, 117, 126, 134, 143, 146, 152, 169, 182, 183, 184: n = A,T,C or G
  misc_feature 187, 193, 216, 219, 220, 221, 222, 223, 224, 226, 227, 235,244, 257, 383, 407, 414, 417, 457, 472, 510, 515, 542, 547,549, 558, 562, 572, 581, 587, 602, 605, 612, 613, 630, 647,690, 696, 707, 721, 738, 755, 759, 765, 778, 785, 790: n = A,T,C or G
  misc_feature 812, 831, 838, 840, 841, 849, 851, 860, 861, 864, 868, 880,886, 891, 892, 901, 905, 910, 921, 949, 970, 979, 980, 984,989, 998, 1005, 1006, 1024, 1025, 1026, 1028, 1029, 1031,1034, 1038, 1041, 1045, 1046, 1052, 1054, 1060, 1061: n = A,T,C or G
  misc_feature 1071, 1073, 1080, 1081, 1083, 1085, 1088, 1092, 1098, 1105,1110, 1113, 1126, 1127, 1141, 1142, 1155, 1156, 1157, 1164,1165, 1180, 1187, 1190, 1194, 1204, 1209, 1211, 1216, 1217,1219, 1220, 1221, 1222, 1226, 1227, 1228, 1232: n = A,T,C or G
acgncncncanaatngttgnatnaantncnntncnntatatannttnnnntgngnaatnntnnnaataanntntaatnnnanaccncnnnngcgtntntcttnagncagggntgngngcattgganaaccctcnctttttggnaanttgccncctccactcgcggttgncggccgcccgggnnnggnaccggntttagatgtagctgtgtagtctncgnnnnnngnngctctaanggggcaaanaacttttgctcancaggcttgccccagagccatggcaaagaatggactttgtaatttgcatcctggtgatcaccttactcctggaccagtaccaccagccacacatccaggattaaaagccaggaagcacagtcaaacngtcgagtgaggagcacaaggatgnggagatnctngaagactcaaattggaaaaagctctgggacaagaaagtcnaatgccctttgaagngtaaaattccaagccccttggccagaccagggtcttgntcctncggaggccacctaaaaggtttcacaangaaanantgcctaccnttgncttttcaagnaaggggttngaaagncatttttcccattgnagngcccaannggaaaggaccttggcanttttccccaaaaagggnagggaaattccctgggtttaattcccccccaagggaaacctcnccgtancggaaaaattncaaccggccccctnccaaaggaacttaatgnggtaaaaaaggggaagncccntggccnaagggtggttccnaaattgnacctntttttggggccctgggggccantttcaaaatgggaaccgtnggggttncnnccgggaananggggccaannggntttngtttggaacctnacaaancgggnnaatccgccntatnccttnccttttccctncaaaccttgggggaaacccgttggccancatgcccttaacccggggggngcaaagccnnaganaaaanctggtgggntccttgnntttctcccccaaattcannncnncnagngccnaanagtnngaaagntngaatannagggccctgngnccgccanncntntcnaggnaaaaantaccatnatcgnccngaagttctccccnntccccctccccatnnaggggcctatttnnntccacanntgaggtccctcccanaggcacnagntatncacatccctntaccntntattnngnnnntcannncacntccccg

SEQ ID NO: 5233 - DNA, 1246 bp, Homo sapiens
  misc_feature 4, 6, 13, 14, 15, 18, 20, 30, 33, 36, 38, 40, 47, 54, 55,59, 60, 62, 71, 75, 81, 87, 89, 93, 100, 102, 104, 107,111, 117, 119, 120, 121, 123, 126, 127, 130, 133, 146, 156,163, 180, 184, 222, 236, 238, 239, 240, 242, 249, 250, 285: n = A,T,C or G
  misc_feature 372, 391, 414, 435, 467, 482, 494, 503, 511, 537, 538, 561,578, 617, 626, 632, 636, 642, 646, 659, 662, 663, 678, 681,686, 690, 699, 706, 714, 719, 726, 741, 750, 760, 775, 806,824, 829, 836, 839, 847, 857, 862, 878, 879, 881, 899: n = A,T,C or G
  misc_feature 906, 910, 913, 914, 922, 927, 934, 946, 952, 959, 960, 962,965, 966, 968, 979, 986, 992, 1001, 1005, 1012, 1023, 1025,1033, 1048, 1051, 1058, 1068, 1070, 1073, 1078, 1086, 1096,1097, 1102, 1103, 1104, 1109, 1113, 1115, 1116, 1148: n = A,T,C or G
  misc_feature 1150, 1152, 1161, 1165, 1171, 1174, 1175, 1180, 1188, 1199,1202, 1205, 1225, 1227, 1228, 1229, 1233, 1236, 1246: n = A,T,C or G
cccntnccctttnnntantntttatttttntanatntntnttttttnatgtttnntcanntntttcgtatnttcntttctnaattcntncatnaaccttntntngtngggnggaatntnnntntannttnctnactattgggcganattgcagctncaccgcngtggccgcctatgtacncggntattgcccctgtaacctgtcaaagaagagctagagggngctttccgggaaangnnnantgttttnnttgctttctcctttacttggaaggcttcgctagtngatggacccatacatgattcagatgagcagcaaaggcaacctccccccaattctggacgtgcatgtcaacgttggtgggagaagctnttgtgccgggaaaaatganaaggccattaataggccaaggtngggtcttgtgaggccctcaanaccatggccaaggaaaaaacttttcaaccccncattcccggagcccntttgtgtggacnaaccattgnaagggtgncaaacccataattcccataaacaaannacccaattgatttttccccctgntccccattttggggggncccccttaccttggtggtttttggggaaaaaccctttgnccttacaangacccncttngaaagntttnaccccccaagggncannttggaaaaaggaatngcnccctngggnactttctgngggccanaaatattnaattngggcctnattgcccccccaatncccattccnggccttttcnccttattcccaagtntcgggggaagggggaagaatttgccctttcnttttattttaccccaacnttggntcccttnganggggccanccccccttangaaangccttttaagggaacnntntattttctttgatcaaangttgggnttgngannccccaaanccctnatttggnccccctttttgngatttnatccctnntnggnntngggcccaaacnccctagnggggcnaaaaaaccntttncctgggntatccccaaanancccttggntttacctccttcttnttnacaaaanaatttcttgngnttnagttntattgggngaaatttgtnnggttnnnaaacnttcntnncaattttttgtgtggcccagaaaaaaaaatcntntnggtgaaaanattngacccntgnnaaacnaaccctgnggaaatatttnttnaantttgaatgcaaaaaaaaaanannncttntgntttttatatn

SEQ ID NO: 5234 - DNA, 1238 bp, Homo sapiens
  misc_feature 2, 6, 7, 8, 12, 18, 22, 23, 27, 28, 31, 33, 35, 36, 38, 40,41, 45, 46, 48, 51, 52, 59, 75, 76, 77, 78, 79, 80, 81,85, 87, 89, 95, 96, 99, 102, 105, 106, 111, 120, 124, 133,141, 144, 146, 180, 255, 361, 426, 446, 452, 459, 515, 528: n = A,T,C or G
  misc_feature 534, 547, 552, 555, 566, 575, 578, 608, 656, 669, 670, 715,729, 736, 737, 748, 754, 756, 763, 772, 773, 777, 780, 783,787, 800, 834, 835, 860, 870, 887, 896, 908, 917, 920, 924,926, 933, 935, 945, 947, 948, 956, 958, 962, 963, 977: n = A,T,C or G
  misc_feature 982, 994, 995, 1006, 1011, 1016, 1018, 1019, 1022, 1023,1028, 1031, 1033, 1043, 1049, 1057, 1060, 1064, 1069, 1079,1082, 1086, 1089, 1090, 1094, 1095, 1100, 1101, 1106, 1112,1114, 1116, 1117, 1119, 1121, 1127, 1128, 1130, 1131: n = A,T,C or G
  misc_feature 1135, 1140, 1144, 1145, 1160, 1165, 1168, 1169, 1170, 1173,1175, 1177, 1178, 1186, 1187, 1188, 1191, 1192, 1198, 1206,1207, 1223, 1225, 1226, 1227, 1232, 1233, 1234: n = A,T,C or G
cntttnnnaaancttctnattnntatnnatntnannantnnattnnanttnnctgtcantaaaatttaatatctnnnnnnnactntntntttgtnnggnggntgnnatctnctcactatncggngaatggcgnctccaccntcnancgcggtggcggccgaggtacggaccccacatganggtgaggctctctgcacactccagaaaaggaccaaccacgccgagctcagttatggcacacacagtgggacctanacaaagggagagggtgaccgacatcccaactagatttcagtggagtgaagttcaggaggcatggagctgacaaccatgaggcctcggcagccaccgccaccaccgncgcccgccaccaccgttagcagcagcagcagcagcagcagcagcaagagtaactctgactttagngaaattaggagacagccagnagtagnaaatgtngatcaatggaaagggaagacaattcttgggagttgttgccgttgctttcttttcangaagggggaccgngggtgnaatgggggccaanatttnggnaaaaaaaaggncaccccgtnatnaatgggggaaaccctttaaaatcctttttnctttttttcctaaaaaatttggattgcctaatttgaaaaaaatttttngccggttttttcnntggttaaacttttggttaaaaaaaaccttaaaaaaaggtttggcntttgggtactttancattggnnaatgaacatgntcgtantnttgatgnattataaannaatnaanggngtanccccttggccccngggggccggggctcgggttttcttaagaaaactnnggttgggggattccccccccggggncctttgcaanggaaaattttctatatntttcaatgnctttaattatgnattacccgnttnatgncntctatangngggggggggntnncggtgtantncccnncgactttttttggntgccncttttttaagannatgggggttanaaatnttgtncnnccnnttggnccntnaattatcatngttgtntattaacnttnattntcctngtggttaaanaancttnttnntttnngtctnncaacnatttcncncnntntnattatnnannggcnttggnatcnntaaaaatatttttanacgcnttnnnggncncnnttcttttnnnttnncctttnttttaatnnttattttgtcgttgangnnnaacannntccc

SEQ ID NO: 5235 - DNA, 943 bp, Homo sapiens
  misc_feature 299, 357, 380, 427, 433, 471, 491, 493, 517, 526, 529, 545,554, 555, 561, 563, 570, 571, 574, 598, 599, 602, 605, 608,609, 653, 654, 662, 668, 674, 676, 678, 682, 700, 701, 705,719, 721, 749, 752, 758, 768, 774, 778, 782, 785, 789: n = A,T,C or G
  misc_feature 795, 800, 801, 805, 806, 826, 828, 830, 839, 846, 850, 851,866, 871, 875, 882, 883, 884, 886, 900, 905, 906, 911, 914,927, 928, 929, 932, 938, 939: n = A,T,C or G
ggagctccaccgcggtggcggccgaggtactgacttttggagttacttaagaaccacagttcctaaaacattttatttgggagctcaacttctggcttcctacttaccaagaggcagtaagttataacctctggcctttgtctttacattttcaactttctggatccctaacctctggtcccaagttactacgcttgcctatatccactaaccactcactaggtcacaaagttgatggctctggcttgacccagtgaatgagaagtgtcctagatgttttttttttttttttttttttngcaaatctttcataggcacagttgcctgtttaattttttcttcagcccttccccttangaggagggagcccttaaggttancttttcaagggttgggggggttagggaaattttatcataaactagtnctaagnagattttcctcacccaaggggaaaattttttccttatnttaaaaagagggaaactttngngggtttttaaacccctgccaagtncacaccccnaanttaaattgttcctttnacaaaaaannaaacangncaatttnnttncccttttcaaattttggaagtttnnagnggnggnntccccaagcaaaaaatttttaccctttttaattttttttttccnnccaaattnccaaanaacganantnttcnaaaggggttggggaattnngaantaaaggattttcangnttttcccccgttatggccccccggtggnccnccaatntttttcaaanaaaagncccngggnctncctntttttnccggnncccnnccaccaaagccccccaaaangntnttttaaccnagaaaantaanncggggaaggacttcntgggntttncaaaaannnantttttaattttacnacgtnnccttnggnccgttttaaaaannntangggganncccc

SEQ ID NO: 5236 - DNA, 1081 bp, Homo sapiens
  misc_feature 1, 3, 4, 5, 6, 8, 9, 13, 14, 15, 17, 36, 40, 44, 46, 48,52, 53, 56, 64, 70, 73, 76, 81, 85, 87, 89, 93, 94, 95,97, 99, 100, 102, 103, 105, 107, 109, 111, 112, 119, 120,121, 124, 183, 196, 201, 268, 279, 312, 361, 364, 390, 393: n = A,T,C or G
  misc_feature 425, 427, 433, 469, 480, 484, 492, 506, 513, 514, 523, 527,535, 545, 548, 553, 561, 566, 567, 574, 614, 627, 629, 634,670, 677, 683, 685, 689, 695, 696, 697, 707, 714, 716, 726,735, 745, 747, 758, 759, 774, 777, 779, 780, 785, 787: n = A,T,C or G
  misc_feature 794, 797, 799, 802, 808, 817, 825, 838, 840, 866, 869, 882,886, 900, 901, 904, 908, 909, 911, 913, 918, 920, 931, 943,951, 954, 967, 970, 997, 1008, 1014, 1026, 1033, 1043, 1050,1053, 1058, 1060, 1064, 1067, 1068, 1080: n = A,T,C or G
nannnncnnttannntntttagtcttttatttatanaatntgantnanttannttntactattngtgatnttntcnttttntttnantngaannntngnngnntnanantnnttaatcnnntcnctatagggcgaattggagctccaccgcggtggcggccgaggtacccgtgcccaggaggncgccgagctccanccccnagccctggacatctactctgccgtggatgatgcctcccacgagaaggagctgatcgaagcgctgcangaagacttgangaagctcaagagtaaacgtgttcccatctcatnataaagaagtatggccaagtccccatgtgtgacgccggagagcagtgcncantgaggaaaggggcaaggcattcgggnaanctgtgtgacttgtcccctgaggaaacctcctngnaaattnccttcctcctgaaagtgctttatggaaggggggccntgcatttctancctnccattacnatcccccattcccntcttacnntttcgcccncagnagggaacncaaccacccnttnccctncccattgnggagnnttctggngccttttaaagggccaaaccaaggaattaaacaaggttcngtgttaatttttntnccctnccttggaaaagggggaaaaaggggggccttcttttntttcccnttggcntnggantttccnnnaaaaaattgntaaaaangnaagcccaccnattttaatnaatggtttancntggtgcccccnnaattatttaaaaatnttntnnattananggttatnagngnttncccttnccccccggnggcggggnccggttttttaananaatctaaggttgggattccctatttnggngtttttgggatgngganatttttttttattnnaanaggnntnanccggntnaaacgttcccnccctttccatanggggtggnggnccccccccccccnttnttttttttttgcccccccccttttttntcgaaggggtncataantatggcgggccnttgggcngttaaaatanttgggtnaantaagngnttanctnncccctccccccnt

SEQ ID NO: 5237 - DNA, 798 bp, Homo sapiens
  misc_feature 139, 173, 190, 212, 247, 260, 261, 262, 267, 281, 284, 291,294, 300, 302, 310, 315, 316, 320, 324, 331, 332, 333, 337,339, 346, 351, 353, 362, 364, 373, 374, 391, 396, 399, 400,404, 414, 416, 419, 421, 422, 423, 425, 428, 432, 433: n = A,T,C or G
  misc_feature 438, 444, 455, 463, 464, 465, 469, 470, 472, 481, 484, 486,487, 494, 497, 504, 505, 508, 510, 511, 512, 515, 517, 524,526, 527, 540, 542, 545, 550, 551, 554, 559, 561, 565, 566,571, 572, 578, 580, 587, 590, 594, 603, 605, 606, 611: n = A,T,C or G
  misc_feature 618, 620, 628, 629, 630, 639, 640, 644, 648, 652, 657, 658,660, 663, 670, 712, 718, 719, 725, 732, 734, 735, 738, 773,774, 778, 780, 789, 791: n = A,T,C or G
ggagctccaccgcggtggcaggccgaggtacacggagtccaattgtggtgaagatggtctggatcatattgctcctcaggggcccattgagtgcctggatcttggctgtgtagtgggtggatgggctcaggtctgccangctgtacgaggtggtatctggacccacaatgacntccttgactgtgccatncactgatacataaaccatcatngtaaccggtgactgatgcccgggggggtcagccangtaaggagggcannnttccnactgacctcattancantcatagnctnttgganantctgatgnctganntagnactncttcaannnatgngnttgagcnctttntngggcccttntnttcttgcannagaatctcaattgttanatttnccnngggnatgcctttangnatntnnnanaanaaanncaacncactcntcctagccccnggacaccnnnaacnntnaaaatttanttngnnacttttnaancccaatnntgntnnntananatacctnanncttgtcttctcananttncaaannggnatttncngtannacccnnattccncnaatcttngantttnccaattcgnannttttnactatcngncaaatatnnnattttgtgnntttntcanacanatccnncnttngaaattntattttttttcccccccccccccccccccccccccccctgtntttttnnttttanaatctcncnnccnacacccccgccctaaacatggtaattttgataatnnctantncctcccccncncccccct

SEQ ID NO: 5238 - DNA, 675 bp, Homo sapiens
  misc_feature 642, 675: n = A,T,C or G
ctatagggcgaattggagctccaccgcggtggcggccgaggtacaatagggagcacccaggttccctacgatgccccccaaatcagacccaggggctgccttccaaacagtgacaggcacctaaagaagggacagggcagatgctgcttcaagccagtcaaagccaagacaggcaggctgtgtggcacggttgtgctcccctgaatctcttcctgcctcgggcaactcttgtggatcacttcctgcctctgcctttccattcccttcctttgcctggttttctttcctcctaccaaatttttgacctgcaattgccaggagttacctgggtcctccctggaccttttctcaatgcaatctcctccttccagcacccccaagaagcgtcgctcctgtgttcaagaccaaccagggatgtgtccaagaccaacaggatggttgttcacctatgaggctcatgtaggcaaggagcgattgtggccacagagctgccctcagcactgcccttgcagtcaacgaggaaagggttagctaagcaaatgaatagcaaaagtgagagaacagtgctgcagctacttaaaagtaccccagattttatatgccttagccctgaggatgactcccctcatgggttaaatagangggttttctgctgggcctgcaaaacagtcttgn

SEQ ID NO: 5239 - DNA, 769 bp, Homo sapiens
  misc_feature 588, 613, 639, 646, 647, 656, 657, 658, 661, 667, 668, 689,691, 703, 709, 717, 764: n = A,T,C or G
ctatagggcgaattggagctccaccgcggtggcggccgaggtgcagcaccagccccctaaaccaatgctgcagccctgtgtcttttggcttcagggcagatgctgtgctgaatgtaaaagaaacgaaactcaacagtggtattgtgccaaacctttgaaataccataagcaaaaatagctgatctggctactctaaaagttgtgtatcttcctgtatcctgtcttgcctgctgcgtgtctcactgcacctgacgacttttctctgtcccttttcatgtatttaacaggacaagcatgagagctcagccaccagactgcccagttccagcccaggctctgtgtctcacttgctgtgtggccttgggtcagttacttgacccttccgtgcacatctccacatctataaaatggggagaaccaggccaggggcataggctcaaagcctataatcccagcactttgggaggccaaggcgggtgaatcaattgaggccgggagttcgagaccaagcctggccaacatggcgaaaccctgtgtctactgaaaatacaaaaattagctgggccgtggtggtgcatatctgtaatnccagctacttgagaggctgaggccnagaatcacttgaacctggggaggcanaagttannagtgggccnnnatnatgccnnttggacttcagcctgggacananaataaagacttntgtttnaaaaaaanaccccaaaaaaaactggggggagaaaccagggggttttgctttcatnagggg

SEQ ID NO: 5240 - DNA, 769 bp, Homo sapiens
  misc_feature 527, 602, 615, 617, 638, 722, 724, 730, 738, 748: n = A,T,C or G
ctcactatagggcgaattggagctccccgcggtggcggccgcccgggcaggtacgcgggggcgggcagtgggggcaaccgcgaagacagaatttcacaaactttcagctccagcagtttcaaggaaatgtcaaatgacaagatggaagaccgagtgtcaagagctaagacaacaaaaaggcccccaaaatttgttttcaagaaaaccaatgaaaaaagcaagcaatcagaacgtgaagtccaggatcatggatgtgcttatcttcacagtcactgctgggtcctgaagttctcctctggcccagtgccagctgcgaagccctctgccaaagggccagaggaggccggtgatatagagctctgattacccacccgtcagggcaccgctgaaggtcactgaatacttactgtgcacccgaaaaataaatcctgcgagttcacgcccgcgtagttcgccccctgattttgagcgactcctttcgcatgggatctacaaaaccgaactgccttaaagacctctttcacacngacgtgaagtcacagaactgacaaaatcccatcccgtcaaagtgcacaggtctttgaaatctaaccaaaaagccntagaaagattctntnaacaccctgtacctcggccgnttttagactagtggatcccccgggctgcaggaatttcgatattcaagctttatcgatacccgcgaccttcgaggggggggcccngnacccanctttttgnttccctttangggagggggtaattgcgccct

SEQ ID NO: 5241 - DNA, 765 bp, Homo sapiens
  misc_feature 351, 499, 549, 583, 591, 593, 622, 653, 658, 661, 663, 670,673, 702, 707, 708, 711, 712, 714, 717, 720, 721, 729, 730,732, 736, 738, 740, 745, 751, 752, 753, 754, 761, 763, 765: n = A,T,C or G
actcctatagggcgaattggagctccccgcggtggcggccgaggtaccgtctgggttttcatcctggctccaccacttctagcaagtaggctgctgcctcatctgaaaattcatataacaatattcattccctaagtttgttgtgaggatgaattaaaagagctaaagtccatgcgttgggagaaccctagtgtgtttagtagataatccttccaaacattgattccatgggaggggataaatgataaaaggtaacaatagctaagagtgggagggggaccttgtggatattgaaagaatcagagaataggaatgatgttgggaggatgatgttatctctgtctagctttntaagtgctctttgtcctcaaggctatgtattgtaaatgatgagctatttgtgcggaatgccagttctgaagagatccaaagagccttcgctatgcctgcacccacgccttcctccagcccagtgcccaccctctctccagagcagcangaaatgttgcaagcattctctacccagtctggcatgaaccttgagtgggncccagaaatgccttcagggcaaccactgggactncggcagangnggccatccttcactaatctcaagggcaanggcgagatcccgaggggcctcctggcggggncgttntcntnccttaanaanaaaaaccccccctttaaaaaggtcctggnaattnnccnnanggnttnnggcctggnnanattntncncggtnggggcnnnngccccancncn

SEQ ID NO: 5242 - DNA, 651 bp, Homo sapiens
  misc_feature 578: n = A,T,C or G
atagggcgaattggagctccaccgcggtggcggccgcccgggcaggtaccgcgcccagctaatttttttatgtttgtagtagagacgagtttcaccatgttggtcaggatggtctcaaactcctgacctcaggtgatctgcctgcttcggcctcccaaagtgctgagattagaggcatgagccaccatacctcttttgcttcatccatcccttaatttctttgctggagcattttaaagcaaatatcagacataccctttcacgcctcacacttcaacatgcggcttgttgaaattcgtgctccactccagcaactgctttcaatcggagttccatcctccgccgcagtatgccctaacgcagcgttatcttcagagctaccaccagcttccgaaacctttcggaggagcgcttcgccaccacctgcacggcgaagcggcgcgtaaacgaacctcccccgcgtacctcggccgctctagaactagtggatcccccgggctgcaggaattccgatatcaagcttatcgataccgcgacctcgagggggggcccggtacccagcttttgttccctttagngagggttaattggcgcgcttgcgtaatcatggggcatagcttgtttcctgtggggaaactgttatcccgctcc

SEQ ID NO: 5243 - DNA, 679 bp, Homo sapiens
  misc_feature 564, 580, 582, 593, 605, 623, 626, 633, 655, 660, 664, 668,673: n = A,T,C or G
gggcgaattggagctccaccgcggtggcggccgcccgggcaggtaccctatgccaggcaccatgggaggcactggggagataatgtgaacaacagacaaaaagctctgccctcatggaacttacattctggttgaggagatagattgcagatacttgaaaggcctagttgttaataatttatacctgctaaggagggaaaaattaagcaagaaagggtgatatgaactgtagggggtggggatgctgggatgttaggggaacagggagccctttgcgtaactctggaaggaaacaaagtcagccatgcaggaatgaaagaacatcacgttgggcagagaaaacagcaagtgcaaagaccctgcaagcaaagaagtagcctgactggaacagagcatgaggaggcaaagggtggaaacggggtcagagcggcagccagacagccagctcatacagggctttgcagatcagttaggacttctgaccttggctctgaattaaagctggagtcctaggagggctcttgtgcagaggagtgggccctgacctgaggttttaacaacatnattctgggctgcttgngnaaaaatgggcngctaagggcacnacccagaaggtcaatttnaanaggccantgccttgattccaggcccaggngatgnccangttngcccntggagc

SEQ ID NO: 5244 - DNA, 1519 bp, Homo sapiens
  misc_feature 8, 18, 20, 22, 35, 52, 60, 72, 91, 93, 114, 130, 142, 180,240, 242, 249, 270, 279, 288, 290, 319, 325, 455, 508, 518,539, 555, 569, 573, 575, 608, 617, 623, 645, 663, 667, 707,737, 751, 762, 765, 813, 837, 850, 851, 890, 896, 933: n = A,T,C or G
  misc_feature 975, 1007, 1031, 1051, 1071, 1076, 1080, 1130, 1227, 1231,1239, 1263, 1268, 1322, 1346, 1357, 1358, 1383, 1385, 1415,1435, 1438, 1442, 1449, 1453, 1454, 1465, 1476, 1477, 1482,1496, 1500, 1507, 1512, 1515: n = A,T,C or G
acttcacnttatttaagngngncggaaaatttggnggaagaccttcccaacnccggcggnggtggggcccgnctccaaattgctatttttnanaccaaaatctatcggaagatntacctgctttggggcnccttgggggganagaaaaaaggaaaaaaaaggttttattccccacctttnaccaaaggggttattaccggttattttggaccaaccattggggaattggttttaccaagntncccaaanaccaaaccaaggccaccaaanaaattccanaccccaatngnttaccaattggttaaccaattaagttggnaaaaanttggacggttccccaccggtttttttccttaccaaccggccttaccaggggaattacggggaaaaggaaggccttggggccttccttttaaagggggccccccaaggggggccttccaccaattggaatnttaattggccaccttttgggttccaaaaggccaaggcctttccttccaaggtnggggttggtnggggccaattccttggggggnaattttttccttttcntttcgggggggccnttcncnttggggaaaggggcccccggggggtgggggttnggggggggncccttnttttttttttcctttttgggtnaaaaattttttccaaaancccnaagggcccaattgggttggggggaaaaaacccaagggccntttcccccttgggcccaacccaaatttttnccaaacccaatttnccggggggttnccntttttgggggggcccttggggaaaaaaaaaatttccttttcccccaanttgggaaaaaagggggggcccggnccccaaaaatttnnttccccccaaaccttttccccccaaatttcccgggcccnaaaccnaagggggggtttgggggggcccaacccccccaatttnccaaattttttcccaaaaggggggggggcccccaaacccccntttcccccccggggggtttggggggggggttngggtttcccaaatttcccaaaccntttttttttttaaaattttngggcccccccccaaaccccnaaagncccnaacccgggaaaattgggggggggggggaaaaaaccctttttaaatttggncccaaaggggggtttttggggttttttaaccccccttttttttgggaaattccctttttggcccaagggaaaattccaaaggccctttcccaaattnaagnaaaaaaanggggccccctttttccaaggcccntttcntttttcccccaaaggggggggggttttttccccccttttccttttttggggggnggggaaccttgggaaggtttaagnaaaccccccanngggggaaaccccaaaaagggggccngnttggggccccccccgggggggcctttattnaaacccgtttgggggcccgnccnttgngccaaanaaanncccgcccgggntttttggcccnngtccncccccaacaatttntttngggcgtnggtancgngacg

SEQ ID NO: 5245 - DNA, 1032 bp, Homo sapiens
  misc_feature 1, 2, 4, 9, 11, 12, 17, 18, 24, 30, 32, 33, 35, 36, 38, 39,40, 42, 43, 45, 48, 50, 52, 56, 60, 62, 64, 65, 76, 80,86, 88, 89, 91, 92, 93, 94, 95, 96, 98, 99, 100, 103, 108,111, 115, 116, 117, 118, 120, 121, 123, 125, 128, 171, 440: n = A,T,C or G
  misc_feature 452, 510, 515, 518, 559, 571, 578, 600, 601, 603, 617, 618,622, 623, 625, 630, 641, 646, 654, 656, 660, 677, 682, 692,696, 711, 712, 713, 715, 716, 718, 721, 726, 736, 750, 758,762, 768, 770, 773, 775, 781, 785, 791, 792, 793, 794: n = A,T,C or G
  misc_feature 800, 803, 806, 809, 814, 825, 827, 840, 842, 846, 848, 853,865, 871, 873, 874, 877, 885, 899, 903, 917, 929, 930, 932,934, 938, 947, 948, 949, 951, 952, 957, 958, 967, 973, 986,994, 995, 1002, 1015, 1016, 1019, 1021, 1026, 1028: n = A,T,C or G
  misc_feature 1029, 1031: n = A,T,C or G
nntnctctnannatatnntctaanactttntnntnntnnntnntnttnantntgantganananntcttggggtgngttntatttntnnannnnnngnnnagntattnatntttnnnntnncntnatnctactcactatagggccgaattggagctccacccgcggtggcnggccgaggtacaagtcaaaaaaaaaataaaataaaatagtgccagaccatcctttactttttcatgtccttgaaatgagaagagtaatgtacaaaaccagtaaggcatcactttgggaaggtcagcaccgaagaggtcaggcaaggctcgtccagacggggcttctgggagggagtgaccctcacccttattgagctgcgtcatgtttggttcttgagggaaagttgcaagtcttttgcaggggtggacccgcatcacccccacccggnaagcttggggcngggggaccgcctgggaggtgtttggtgttgtggtttctaaaaccccttcaaagggacngaagnaanggggaagggcaaggttccattgggcttcaacccccacaatngccccccgccgntaccctnggcccccgggggcggggggccnngntttttttaagaaannttanngnggggnattcccccccnggggnctttggcngngggnaaattttctttattttnaaaanccccttttantttntatataccccgggcnnnanncntcncaaangggggggggngggcccccccgtgntcccccanacantttttntntgngnctcccntttntaaagnnnngggggngtntanaantttgncccccccttcngngggctaaaaatcnantggngntaaanaaaatttttttntcttcntnnggnaaaaaaantttttttttttttnctcnaaaaaatttccccnaaaaaaaaaaannantncccnggggggggnnnannaaaanntttaaaaancccgcnggggggggccccnttaaaatnngagggcnctccccccccccnnatntnatatntnngng

SEQ ID NO: 5246 - DNA, 739 bp, Homo sapiens
  misc_feature 374, 387, 390, 395, 408, 412, 414, 417, 439, 440, 442, 458,466, 468, 470, 477, 479, 483, 486, 488, 489, 491, 492, 507,513, 514, 515, 516, 517, 523, 524, 537, 538, 549, 550, 551,553, 554, 555, 570, 575, 581, 583, 585, 586, 587, 599: n = A,T,C or G
  misc_feature 606, 609, 610, 616, 619, 621, 627, 629, 637, 639, 647, 648,657, 665, 668, 677, 680, 687, 703, 705, 711, 713, 718: n = A,T,C or G
ctatagggcgaattggagctccaccgcggtggcggccgaggtacaagtcaaaaaaaaaataaaataaaatagtgccagaccatcctttactttttcatgtccttgaaatgagaagagtaatgtacaaaaccagtaaggcatcactttgggaaggtcagcaccgaagaggtcaggcaaggctcgtccagacggggcttctgggagggagtgaccctcacccttattgagctgcgtcatgttggttctgaggaaagtgcaagtcttttgcagggtgaccgcatcaccccaccggaagctggggcggggacgctggaggtgttggtgtgtgttctaaaccctcaaggactagaagggaaggcaaggtccatggcttncccacatgcccgngtnccttnccgggcgggcgantctnanaanttgggggaatccccctggggcnngnaggggaattccccttntcggggcntntnggggttncncgtnaancnngnnggggggggccccccngccccnnnnntttttnnttccctttttaanngggggggtttnnntnnncccccccgggggggnttttnttttcntntnnnaaaggggggggnttttttnggnntttttnccncnaaaaangngggggggnancccccccnnaaaaaaaantttttttnttnaaaaaaagnccnccaaaanggggggggcccccccnanaaaaangngctcnttttttttttttttttttttt

SEQ ID NO: 5247 - DNA, 990 bp, Homo sapiens
  misc_feature 2, 4, 6, 7, 8, 10, 11, 12, 15, 16, 17, 18, 23, 24, 25, 26,28, 29, 31, 32, 33, 37, 38, 39, 40, 42, 43, 48, 49, 55,56, 59, 60, 61, 63, 64, 66, 68, 69, 70, 72, 74, 77, 78,82, 83, 86, 89, 90, 93, 95, 99, 100, 103, 106, 107, 111,424: n = A,T,C or G
  misc_feature 442, 489, 594, 638, 657, 689, 731, 740, 755, 759, 762, 776,786, 803, 852, 858, 860, 871, 879, 882, 916, 917, 922, 925,936, 938, 952, 956, 957, 963, 965, 968, 969, 978, 980, 983,984, 988, 989: n = A,T,C or G
tntntnnntnnnttnnnnttttnnnncnntnnncatnnnntnnaatannttattnnaannntnntncnnntnantcnnagannagncannatnanaggnnatntcnnatanggcttactatagggcgaattggagctccaccgcggtggcggccgaggtacaaggagtttgtaggagggaaggtggcagttaatgagccttcctggtgggaccggatggtgagggcaggggcatctggcccagcgtggactcgggccatagatgggaagtggtcatttggaggtcaccatctctctgacaccctgaccatagcacctgcacccctgtgctgagctgcaggtccccggcaccagcgttctgtgcagctcaggtgttgctgagcacgtggcctccgcaagctctccatcaggatttctcaagcttnattctgaattatctctgngtggagctcacaacggtgacctgcaagaggtccccaggttcatcttntcagatctttctgaaatcaaaacaattatggttcctgcagtttgcccgcgccatgtcttttggcccgattttcttgacaaattcaaaagtgaaagaagttttctngaagcctaccggggaaaggtttgggggtttgaaaagggcattgnatggggggaaaaaaaccantggaatttaagttttggaccaagccttttttnccccaaagaagaaagttttttttaagaaccaaaaaacttcanaaccctttnggtttaaaccctttnttcnagntgggggctttattngaataaaagnaaacccctttcaaattngttgccccaaaaaaaaaataaaaaaaaaaaggcccggccaccttcccangggttnangtttaaattcnttttggtnttnaaaaaaaaaccccttttccccccccaccccccannttccnttngcgaatacccnanccaaaaccaatacnaaannaatttnangannaattaatcntntannttannt

SEQ ID NO: 5248 - DNA, 866 bp, Homo sapiens
  misc_feature 2, 3, 4, 5, 6, 9, 10, 11, 12, 13, 14, 15, 16, 17, 18, 19,20, 21, 22, 23, 24, 25, 26, 27, 28, 29, 30, 31, 32, 33,34, 35, 36, 37, 38, 39, 40, 41, 42, 43, 44, 45, 46, 47,48, 49, 50, 51, 52, 53, 54, 55, 56, 57, 58, 59, 60, 61,62, 63: n = A,T,C or G
  misc_feature 64, 65, 66, 67, 68, 69, 70, 71, 72, 73, 74, 75, 76, 77, 79,80, 81, 82, 83, 84, 85, 86, 88, 93, 94, 96, 98, 99, 100,105, 106, 107, 109, 110, 111, 112, 113, 118, 580, 582, 583,586, 587, 593, 600, 601, 651, 720, 731, 733, 764, 787: n = A,T,C or G
  misc_feature 801, 802, 805, 808, 809, 820, 823, 828, 836, 841, 855, 856,863, 864: n = A,T,C or G
gnnnnnatnnnnnnnnnnnnnnnnnnnnnnnnnnnnnnnnnnnnnnnnnnnnnnnnnnnnnnnnnnnnnnnnnnnnncnnnnnnnngnaaggnngngnnngagcnnntnnnnngactnactatagggcgaattggagctccaccgcggtggcggccgaggtaccagtgccgctgggcacactggcttcacgccggctccacctcaccagcaagcgcattcccagaggagaaaatgagacactgggtgggactcagggattgctccaggccacacagtcagcaggaggcaaagcccagattcaaatgcagattactcagctccacaatccacatcctcacaggaggctgcactccttgcccaagcgtcagacaggagcaaagagaaagaaggcaaccagctggctactttcttcccttcttggatgcctccaacagggtgaggaaggactaaacaaatgaccaagtgtcatcccattttggacatacttaaaacaccccatggaatttttattctggactttcttctgcctgtgtggcatttatgtttaaataaaaggagaattcaacttcgtggaaaaanannatnnaaaaanaaaaacnnggttcctgcccgggcggccgttctagaactagtgggatcccccgggctgnaggaattcgatatcaagcttatcgataccgtccgacctcgagggggggccccggtacccagctttttgntcccctttagngnggggttaattggggcgcttgggggtaaatcntggggccataagcttggtttccngggggggaaaattnnctnatnngggttaaaaanttnccccnacaaacantaccnacccggggggggcnntaaaagnngt

SEQ ID NO: 5249 - DNA, 706 bp, Homo sapiens
  misc_feature 45, 451, 599, 621, 653, 673, 682, 683, 690, 692, 696: n = A,T,C or G
gaattggagctccaccgcggtggcggccgcccgggcaggtaccangtcaagagacatccatactgcaagatgatagaaaggtaagtggaacccaaccacctcattctctaccctcatgtctaccacggacagctgaacctctccctgtggaacctggaaaagtagctcagagaggagtagcaggtggcaaggaacatcagggaaacaaagctagaaggagcatgtaggcacctttgacctgaaatagacaagatgcaagatctcaggattgtcagggaccttaggaaccatctaggccacatcccggctttggcctgcagtgcaggcaaagggtttgcctctgccagccatcgcatccagctttgctgtaggtggaatcgggcctgtatgtgagttaccagggttgcagaggacactgtggtctgggtggcagtctggtgccacatggcanaattcatcacagtagcaacttcccctcttgcaagcggtggaccgtcccaagacagcaaaggttcttgggggttggggagcagctgcctggagaaaaaaggaacatttaaaaaaaaaaaaaaaaagattaaaattagtcgggttatggngggtgcacgcctgtagtcccanctaccccaaggaggcttgggacagggagatcncctgagccccaaaagcaggnaacttgaanntgagccntngacncccccacccc

SEQ ID NO: 5250 - DNA, 1028 bp, Homo sapiens
  misc_feature 3, 5, 8, 9, 12, 13, 14, 15, 16, 17, 18, 19, 20, 21, 22, 23,24, 25, 26, 27, 28, 29, 30, 31, 32, 34, 35, 36, 37, 38,39, 40, 41, 42, 43, 44, 45, 46, 47, 48, 49, 50, 51, 52,53, 54, 55, 56, 60, 61, 63, 64, 65, 68, 69, 71, 72, 73,74: n = A,T,C or G
  misc_feature 75, 76, 77, 78, 79, 80, 81, 82, 83, 84, 85, 86, 87, 88, 89,91, 93, 101, 102, 105, 107, 110, 112, 117, 120, 127, 135,136, 140, 141, 142, 144, 147, 412, 456, 464, 504, 572, 577,673, 685, 716, 721, 730, 751, 762, 786, 793, 799, 821: n = A,T,C or G
  misc_feature 831, 834, 849, 851, 862, 890, 891, 908, 909, 945, 956, 957,960, 961, 963, 967, 970, 979, 986, 991, 993, 994, 1003,1004, 1006, 1011, 1018, 1021: n = A,T,C or G
ccncnctnnttnnnnnnnnnnnnnnnnnnnnntnnnnnnnnnnnnnnnnnnnnnnngggnntnnntcnntnnnnnnnnnnnnnnnnnnngnanggagttgnngcntngcntnctacnacncactatntgtcgagnnggtnnntnccnccaccggggtggccggccgcccgggcacgtactttaggagacccaggcgggcagattgcctgaggtcaggagtttgaggccagcctggctaacatggtgaaaccctgtctctactaaaaatacaaaaattagccgggcatggtggctcacgcctgtagtcccaactgcttgggaggttgaggcaagagaatcgcttgaacccaggaggtggaggttgcagtgagcccgagatcgcgccacttgcactccagcatgggccgacagnagcaaggactccatctcaaaataaaggaaaggaaaggaaacaangtaaaagnaaaagcctttattattggaacttctctaaaaaaaggaaanaaaaggaaagccctggatgccacacaaaatctaaaattttggcaaggtcgaatcaattaaaagggatntttantttgcattcacaaaaaataaattcttttactccccccccaaaaaaatcaaataaaaaaaaggtttcaaaaattaggccaaacttttttcccctaantggggggttttnaaaaaattggtgaaatttcaccccaaaaatnaccantggtggttnccccccaaacctttccttttnccaaggtttantaaattttcccattttgggggttnaaaaagntgggangggtattaccccctggaaagtnggagggccanatnaaaggaaaaagtttngnagcctttaaanaaccttgcccttggaaaaaagaagccgnngtttcttttttttttannaagtcttgaagggaaaatggggtttggggggggccncaaaaattccnnccnncnaaanccntttttttcnttttttnccctnannccccggggnntnttttnttttttnttngggccca

SEQ ID NO: 5251 - DNA, 1070 bp, Homo sapiens
  misc_feature 5, 6, 8, 9, 11, 12, 13, 15, 20, 22, 23, 24, 25, 27, 29, 30,31, 32, 34, 36, 37, 38, 42, 43, 44, 49, 50, 52, 53, 55,58, 65, 66, 67, 70, 71, 76, 78, 79, 81, 83, 86, 88, 92,97, 105, 115, 117, 118, 119, 345, 398, 399, 429, 443, 568: n = A,T,C or G
  misc_feature 632, 650, 672, 707, 708, 729, 766, 769, 782, 783, 819, 820,829, 832, 839, 845, 851, 858, 860, 863, 868, 900, 915, 925,938, 939, 945, 947, 954, 960, 968, 991, 1007, 1009, 1014,1031, 1032, 1033, 1034, 1035, 1039, 1040, 1042, 1043: n = A,T,C or G
  misc_feature 1055: n = A,T,C or G
ccccnncnntnnntnatttntnnnnanannnnantnnncttnnntattnntnntnaantcccttnnnttnnatttntnntntnttngnatanatacngggggggngggggggggnannntatgtacaaattggagctccaccgcggtggcggccgaggtactgggataaatgaagaagaaggcataaggacaataaacatggaactccactgcaaatggattttatgcagctgaggaaagtttgggcttattagtatttgctccagcgaacctccaagttttctccattgcggacaacgtaactaccagctccttggctcagtggttacgcctccactcagaagntttccccagtaaggttcttgttcattatttgttgggcaccaataaggcccctnnaattacaagggtggatattaaggggccccncatggagccgctcnctcacatttgtggaaaaccaaaaataataggtatccattccatttttctgggggcttttcttccatcaccacttgagggaaggacaggaacccattttagccacaagttggacaatttgggttgnaaaatatggtttttcatttggatttctcaccaaggaaggtaaaatttggaccgggaggataatnattggattttggtgggangtttcaaggggaggggtggttncaaccaagttttaattaggggccttcaattccaanncggggaaggaattggttttgnaaaaggttttaccccttggaaaggccaaggaagtaancgnccaaaggaaaagnnaggttcctttttgggttttaaattaattcccaaaannaaaaggggnttnttttttncccaanttcaanggggccnanggntaaangaaaccttgggggccttggcaaaccggttttngggaattttccccgncggttacccnttttggggcccgnntttttnangaaaacntaaggnggggaatnccccccccggggggcttgggcangggaaattttcccaantntttcnaaaagcttttttttcgnnnnncccnncnnaaccccttcaanggggggggggggccg

SEQ ID NO: 5252 - DNA, 698 bp, Homo sapiens
  misc_feature 591, 618, 643, 653, 671, 674, 688: n = A,T,C or G
ggcgaattggagctccaccgcggtggcggccgaggtaccccagccaggcgcacgatgtcgtgtaagcagggtatccttgtgccagcatttgcttctctgtgaaaacacagcgccgtcaacattttgcactttccagggcccttcggaattggaggtgcctgtagctaagctgtttcccctggagagtccagctgtttcccctggagagtccagctgtttcccctggagagtccagctgttctcctgatccggccctgcacacacacacccagccacaaattactaggatgtcaaacccaggtgatcaggatactctcacggactgccctgctcccccagggctctccctacagtgtaatcctaaagccaaacttcctttcagcagtggctgaagcaaactctgcagtcagaggtcatacccagcaggcttcaccatgcagacttgaatgttgatttgagggcctagctgctcagcacagggcatttgggaaagacaatgtgtacctgcccgggcgggcgctctaaaactagtggatcccccgggcttgcaaggaattcgatatcaagcttatcgataccgtcgaacttgangggggggccccggtaccccagcttttngtcccttttagtgagggggtaattngcgccgcttnggcgtaatcaatgggcanaanctggttttccttgnggggaaaatc

SEQ ID NO: 5253 - DNA, 1114 bp, Homo sapiens
  misc_feature 3, 5, 8, 10, 16, 19, 21, 23, 24, 27, 28, 29, 30, 32, 34,37, 39, 41, 45, 49, 50, 57, 58, 60, 61, 62, 64, 65, 66,68, 69, 70, 72, 75, 76, 80, 82, 83, 87, 88, 89, 90, 93,94, 95, 104, 105, 107, 109, 111, 112, 118, 119, 123, 125,130: n = A,T,C or G
  misc_feature 131, 141, 143, 144, 148, 150, 162, 229, 403, 426, 429, 432,516, 524, 540, 550, 610, 616, 647, 649, 689, 694, 695, 709,713, 723, 734, 744, 767, 775, 801, 810, 814, 815, 816, 819,821, 823, 825, 832, 839, 840, 851, 854, 859, 860, 876: n = A,T,C or G
  misc_feature 878, 889, 890, 900, 913, 914, 919, 920, 925, 931, 932, 936,938, 946, 949, 961, 963, 971, 976, 977, 982, 984, 988, 1008,1009, 1016, 1017, 1018, 1019, 1025, 1031, 1045, 1051, 1059,1064, 1066, 1074, 1078, 1081, 1092, 1097, 1098, 1099: n = A,T,C or G
  misc_feature 1101, 1102, 1108, 1109, 1112: n = A,T,C or G
ccncnccncncctatnttnanannttnnnnangnttnancncaantcgnnactcatnncnnnannntnnngnctnntttncnncccnnnnttnnncagcagagnnantntnntgatanntttntnccgcnngggtttcttngnnagantngcacctccaccngcggttggcgtgccgaggtacccgtgcccaggaggacgccgagctccagccccgagccctggacatntactctgccgtggatgatgcctcccacgagaaggagctgatcgaagcgctgcaagaagtcttgaagaagctcaagagtaaacgtgttcccatctatgagaaggaagtattggccaagtccccatgtgttgaccgcccggtggagccagtgttgccacgtggagggaaagggggncaaagggattcgggggaaggctngtngtngacctgtccccccggagggaaacccttctctgccaaatttcctttcctttccctggaaggtggcttttatggaaaggggggcgntccccatntcttttctcccattancattcccccncaatcccccttcttacttttttcccccccaggaagggaattcaccaaccctttttccttncccctngggaagtttttggggctttaaaggccaaacnangaattaaaagggtgtttttttaatttttttccccttcctngaaannggggaaaaaggggncttnccttttttcncttggccttgngttttcaaanaaaaattacaaaaaggaaaccanccattttnaggaattggttttaaaaaagagaaanaagtcaacncccnnnatnancnanatgtganaaagtcnnccccttggccnccnggggnnccggggcctgtttttntnaaaaaaaactnnggggggaatnccccccccggggnncttgnngatgngaaaannttcntntgtataanaanaagttttaattntntccccccngtccnnccccntntagntgggggggggggccccgggnnccccccnnnncttttntgggtnccccctttttaagngggggngggataanatttntncccccccnttgngcntaaaaatatanggggnnnannaccccnnttncc

SEQ ID NO: 5254 - DNA, 717 bp, Homo sapiens
  misc_feature 520, 546, 581, 584, 585, 586, 592, 609, 613, 620, 626, 647,674, 678, 681, 684, 697, 703, 716, 717: n = A,T,C or G
ggagctccaccgcggtggcggccgcccgggcaggtacgcgggaagtgagttaagtccagcaataactatatctctgcatatttcgggccaggaacagctgaggtgaaccaggataactgaattccctccctgtggctggctttatttggttactgtgaaagggacctatttccagcccagtgagggcactggggctgaagagtgttctctagaaccccagccagtcctcaagtttcatctctcacctgtcctgtaggtgaggagcctgagtgcaacgacatcactgccaggctgcagtatgtcaaggtgggaagctgtaagtctgaagtagaggtggatatccactactgccaggtaagggctctgcttcaataagggctgggtgtggagggctgagcctccgtgttcggatacctatccttagttgcattctagaaggatctggaaaattcccagggaagagaagggaaaataaaactgggaagcatttttttttttaagcaaatggttgtattggaantaacctggaaaattttttgacttccngggaaaaaaaacaaaaaaatgggggggaaaggacncannnaaattncttttacagaaaaaatngggngagtttntttttntgccaaagatgggggggcccnccaatccctttggaagaatcaggtccnaacnatnttnttaaaaatttttncttgcnttaaaaaacaatnn

SEQ ID NO: 5255 - DNA, 812 bp, Homo sapiens
  misc_feature 16, 644, 654, 669, 676, 693, 761, 772, 805, 807, 809, 812: n = A,T,C or G
gactcactatagggcngaattggagctccccgcggtggcggccgcccgggcaggtactattacagtcattacctttaaaattatagcagcatgcccaacaagacacagtggaggcaaagggtcgttggacagaactcagctgaatgccaatgttagttttgtttccttaacgtgtagtatcggttccaaatggaattgaatcatcaagtatgcttacctggtttattatgccaagtaacaagattggccaatccttcttatttattgttcagaaactatagaagaaagcagccaacaaatgatgatggtttttcagtgactcatgcctcctttgattagaatccaatgtagcctactccttatcctggcatcattactagatattgccttttattttgactaatggagcacatgaatggatagattttaaagaaatgcctaggctgggcgcagcaagttcgcgcctgtaatcccagcactttgggaggccaaggcaggcggatcacctgaggtcgggagtttgagaccagcctgatcaatatggagaaacgccgtctctactaaaaatgcaaaattagcccggtgtggtggcacatgtctgtaatctcagctacttgggaagctgagcaggaaaaattgcttgnaccccaggangtggaggttgcaatnagcttanaatgcaccattgcactncacctgggcaaccaagacgaaactccatttcaaaaaaaaaaaaaaaaaaaaaaaaaaaaggtcccttnggccggtttanaaactagtggatccccccggctggaaggaattngntntcn

SEQ ID NO: 5256 - DNA, 731 bp, Homo sapiens
  misc_feature 599, 617, 641, 646, 669, 670, 671, 687, 688, 693, 702, 705,706, 707, 709, 716, 720, 721: n = A,T,C or G
gcgtaatacgactcactatagggcgaattggagctccaccgcggtggcggccgggggccattgagactgccatggaagacttgaaaggtcacgtagctgagacttctggagagaccattcaaggcttctggctcttggcaaagatagaccactggaacaatgagaaggagagaattctactggtcacagacaagactctcttgatctgcaaatacgacttcatcatgctgagttgtgtgcagctgcagcggattcctctgagcgctgtctatcgcatctgcctgggcaagttcaccttccctgggatgtccctggacaagagacaaggagaaggccttaggatctacttggggagtccggaggagcagtctcttctgtcccgctggaacccatggtccactgaagttccttatgctactttcactgagcatcctatgaaatacaccagtgagaaattccttgaaatttgcaagttgtctgggttcatgtctaagcttgttccagctatccagaatgcccacaagaattcaactggatctggaagaaggaaagaaactgatgggggtaactgaacccattttgattgagaccctacccanggctgaccgtcatttcanttgggaaacccgaacaaaaacttnggttnttttccctttgcccccggggggnnnaatttgggttttttgnngaganctttttttnggnnncnccgggcncctnnttaaaaaaac

SEQ ID NO: 5257 - DNA, 1564 bp, Homo sapiens
  misc_feature 28, 40, 44, 48, 50, 65, 69, 84, 106, 131, 138, 143, 166,172, 204, 211, 219, 286, 289, 290, 298, 333, 343, 351, 354,364, 380, 401, 402, 403, 429, 431, 437, 465, 489, 534, 536,553, 628, 682, 684, 705, 712, 773, 797, 811, 829, 836: n = A,T,C or G
  misc_feature 859, 900, 915, 954, 969, 987, 1022, 1043, 1062, 1070, 1126,1131, 1139, 1146, 1156, 1165, 1170, 1183, 1198, 1203, 1229,1243, 1266, 1280, 1282, 1287, 1288, 1316, 1351, 1374, 1389,1391, 1395, 1398, 1411, 1427, 1440, 1446, 1447, 1448: n = A,T,C or G
  misc_feature 1457, 1458, 1468, 1472, 1475, 1493, 1497, 1499, 1513, 1523,1527, 1543, 1552, 1553, 1554, 1557, 1562, 1563: n = A,T,C or G
ggggaccggaagaatttgggggaaaggnccttccccaacnccgncggngntgggggcccggggcnccgnaaggggtttacccgncccgggggggggaaaggaaagntttaaggtttgggggtttttctttncgggccnagggngaaccccccaaaggccaaccggnccaagncctttgggggaagggtaattcctttgggaagnaaaaccnggggaacnaagggaaccttggcccctttccctttcaaaaagggttgggggggtttccccccaaagaaaccccccnttnngaaagttnaggccccttaaaaacttggggggaaagggggcaancccccccccnaaaagttnaangggggggccnaagaaacttttgaaanaaacctttttaaaaaaaaacnnnccccccggggggtttcaccctctttngncccccnggggggcccgggggcccccgttttttcnttaaaaaaaaaaacattaagggtnggaggaaattcccccccccccgggggggtcccttgggccaaaggngnaaaaaatttttcccggnaattaattttccaaaaagggcccttttttaatttccgggaaattaaaccccccggttcccggaaaccccctttcnggaaagggggggggggggggggggccccccccgggggtttaaacccccccaaangncctttttttttttggtttttnccccccnttttttttaaaggtttggggaaagggggggggttttttaaaaaattttggcccggccccgnccctttttgggggggcccggtttnaaaaatttccaaanttgggggggttcccaaanttaaagnccctttgggtttttttttccccnttggttgggttgggaaaaaaaaatttttgggttttaatttncccccgggctttccnaacccaaaaatttttcccccacccaacccaaaacccaantttaacccgaaaagncccccggggggggaaggnccaatttaaaaaaaaggttgggttaaaaaaaaggnccccctttggggggggggttnggccccctttaaaattggnaaggtttnggaaggccctttaaaacttccaaccaaattttaaaatttttggccgggttttggcnggccntttcaaanttttggnccccccggcntttttttcnccaanattccgggggggnaaaaaaaccccttgntttcnggtttggccccaaagcctttgccaanttttaaaatttggnaaaatttgggggccccaaaaacngccccccccggggngngaaannaaaagggcccggggtttttttggcccgnttaattttggggggccggccttttttttcccgccntttttctttttgggtttttaaanattggaactttcccncnttgnggncctttcggggggnccccgttttttcgggnctttttcccgggnccaaannnccggggtanntttaaaagcntttnaanttcaaaaaaagggggcgngggntnaaaattaaccgggnttttttttcnccancaaaaaaaatttaaangggggggannnaanccccnnt

SEQ ID NO: 5258 - DNA, 714 bp, Homo sapiens
  misc_feature 602, 608, 626, 669, 670, 693, 701, 705: n = A,T,C or G
ctcactatagggcgaattggagctccaccgcggtggcggccgcccgggcaggtacgcgggatcctccctccctttacttcctcactgtgcagtctccctcaaggatctactgtgaaaggtgtgtttgtagtgatatccaacctaactcagtaacgaagtcgttacttagctcttagctgtgaaataactctggaaacttccccaccccaaccataaattcttacttataaagaaacaggtccccaaactggaaacagcttagtccaggcctcagcgagaaggaaggacaccatgactgctccatgctgggcacagccgggcagtcttgccaagtgcctgctggaggctgtgccggcaagagacctgcagcaaggagattcccttccctcgggccattatcaatactgtctttatctggaggtggggaagccgcagccctcttgagacagcaggacaatggtcagttcagagagggtgagggcagcaaacgcttcagagggacacagaagccagaggaccccccccccccacagctgggtcagcctggaaaatccatctattagggactttttggcagccagatggcagcaatagcccattangtcttnatcccgagttccaaagtnttggctgcaaatggagccttaagttcgccttactgggaaagcnnccccccaaattcctgggcacagntcattttncagncctttttaa

SEQ ID NO: 5259 - DNA, 756 bp, Homo sapiens
  misc_feature 2, 3, 4, 6, 9, 12, 13, 16, 18, 65, 68, 69, 80, 84, 90, 91,109, 110, 116, 121, 123, 125, 133, 134, 136, 140, 144, 149,160, 162, 163, 164, 175, 222, 225, 227, 238, 240, 245, 249,250, 251, 256, 258, 281, 285, 310, 325, 329, 338, 343: n = A,T,C or G
  misc_feature 352, 356, 362, 409, 448, 485, 495, 521, 529, 537, 570, 580,597, 598, 607, 623, 627, 631, 632, 635, 641, 647, 651, 653,655, 658, 673, 682, 684, 687, 692, 693, 694, 695, 696, 702,703, 707, 708, 715, 718, 720, 721, 724, 732, 733, 735: n = A,T,C or G
  misc_feature 742: n = A,T,C or G
gnnnanggnganntgnanctccaccgcggtggcggccgaggtacttttttttttttttttttttnttnnggagacagagnctcnctctgnnacccaggctggagtccannggtgcnatctnancncaatgaanncntcgnctanctggnccacaccattntnnngcctcagcctnccgagtagctgggatgggaggattacacaaacccaggagttcaaggntgnanagagccgggancntggcnctgnnntacanantgggcaacagagagatgccctgnctcntaacaaaataaataaaataaaaggnatgtgtgatgtgtgngtgngcacctgcnggtgngtgacaccntttntattgngcaccagccaccgatggggaactttatgcaaggttgttacctttgancttgcagatcagctcatagaaggccttcagctcttccanggttccttcttggtgactgattagaccaggacgaaangcgtgggccncgggctataacgtgggcgctgcaaancgcggttnccggtcgncaactcttgctgtcggtgatggtgccagggaangcacaaccgngggcttgcaagccccanncaactggcnagtaaggttatttttnaaanggtnnggnaaggtnaccttngggncngnttnttaaaacttagtggnaatcccccncnggncctgnnnnnaaattnngaanntaaaacnttntnnatnacccgctnnancctttangggggggggcccgg

SEQ ID NO: 5260 - DNA, 727 bp, Homo sapiens
  misc_feature 571, 661, 679, 705, 727: n = A,T,C or G
tcactatagggcgaattggagctccaccgcggtggcggccgaggtacttgtctaaggctctggcggctccgcgaatctcatgtgctgggccatcatggacgagagtggtcttcagcaccgcttgtaaagcagtgttaacaaccatcacaccgccagcagcaatgccctcctcagccaccaaggcaggccacaggtaacgagtgatgccccatcttgaacgcacccaagcctccgcctccataactcaacagcagcagggaaaaagcatggtctcaattctcttgacaaatctcagaggtattatactcttattccaactacatctccctccccaaagaagcgcacacaaaacaattttaaaacttatgttttctacggaaaccttacctcaaagtgatgcacaaaactgaaatttatatggctgcttaaatgtcacatcctggctcctagcagggaaacaaaacgctctgaagagaggatggttcctgcttgagggggaaaaagtctgtctttcttagcagtgctccttcccacaataaacaaatgatccagggaattttgtacctgcccnggcggccgctctagaactagtggatcccccgggctgcaggaattcgatatcaagcttatcgataccgtcgacctcgagggggggggcccngtacccagctttttgttncctttagtggaggggttaatttgcgncgctttgggcgtaaatcatggn

SEQ ID NO: 5261 - DNA, 1087 bp, Homo sapiens
  misc_feature 1, 3, 5, 10, 11, 13, 14, 15, 16, 17, 19, 21, 22, 24, 25,26, 27, 28, 31, 32, 37, 38, 39, 41, 42, 43, 47, 50, 54,62, 63, 66, 69, 73, 75, 76, 78, 79, 80, 81, 83, 85, 94,96, 99, 100, 101, 103, 110, 111, 115, 116, 118, 120, 125,175: n = A,T,C or G
  misc_feature 179, 182, 187, 206, 376, 414, 483, 534, 557, 636, 647, 665,667, 695, 709, 714, 723, 724, 728, 750, 826, 828, 869, 903,924, 929, 944, 948, 960, 962, 967, 977, 998, 1004, 1013,1017, 1026, 1031, 1037, 1050, 1058, 1082: n = A,T,C or G
ntntntattnntnnnnntntnntnnnnntcnntatannnannnattntcnattnttttgtannttnttnattnanncnnnnangnaagggtgangngtnnngnccccctnngccnnantntaggncgaattggagctccaccgcggtggcggccgaggtacagattgtttggacngatnganggggngggacttgggaaaactaanttttgtagtttttggtttcctgatgaaaaatttgtaatttcaacacataagcaaaataattagacatctggcctagtgtttgacaatttatatggtgtatttcatctcctttcgtcagtcctgtcaatgttcctatgttatatcttccaaaacccttctggaaaattagnagcagggaggtcaccgatcaccctacaaattcttcatngttttatggaccatcaattttttcacccaaaaattagtggccaaactttccctcaaaaaaaattgttcntcccctgcctttccagggaatttaagttcattcctcccaaacctttttatntccttccaatatttccccaggtngggggaggtcctttcttaaaaaattaatttccattaattgaaaattttggtggccttggcctttttcccttggttgttnaccaaaccaanggaaattccaaaggttcntnaccaccttcctttttaaaccaatttggntgttaaccctttcngggcnccggccttnnttangaaaaccttaaggtggggaatncccccccccgggggccttggcaaagggaaatttcccgaattatttccaaaggccttttattcccgaataaccccgntnccgaaccccttcctaaggggggggggggccccccgggttancccccaaacttttttttggtttcccctttttaangtggaaggggtttaaaatttnggcgncccctttggggcgtnaaantcaattgggggncnataanccttggtttntccctggtggtggaaaaattngtttantcccccttncccnaatttcccnccacnaaacantaccgaaccccgngggaaccnatttaaaaggggggtaaaagcccntgggg

SEQ ID NO: 5262 - DNA, 1524 bp, Homo sapiens
  misc_feature 9, 13, 40, 58, 69, 85, 95, 97, 99, 101, 103, 105, 107, 109,113, 115, 117, 119, 121, 123, 130, 134, 135, 136, 141, 147,149, 151, 153, 155, 160, 164, 167, 174, 176, 192, 202, 206,213, 215, 217, 219, 236, 248, 259, 268, 279, 304, 321: n = A,T,C or G
  misc_feature 331, 340, 359, 399, 413, 418, 426, 442, 450, 478, 480, 485,490, 501, 503, 517, 535, 540, 558, 572, 581, 585, 602, 604,633, 640, 650, 651, 652, 655, 669, 672, 687, 692, 698, 718,726, 745, 746, 752, 762, 767, 779, 783, 787, 798, 818: n = A,T,C or G
  misc_feature 822, 825, 831, 838, 846, 852, 881, 893, 902, 904, 913, 917,921, 949, 970, 984, 994, 1013, 1032, 1051, 1072, 1079, 1084,1105, 1114, 1125, 1127, 1131, 1146, 1155, 1172, 1208, 1222,1231, 1240, 1243, 1260, 1267, 1274, 1276, 1285, 1291: n = A,T,C or G
  misc_feature 1305, 1315, 1323, 1350, 1351, 1370, 1373, 1381, 1387, 1388,1392, 1400, 1406, 1423, 1427, 1441, 1459, 1463, 1465, 1471,1483, 1491, 1497, 1499, 1500, 1502, 1505, 1509, 1520, 1522,1523: n = A,T,C or G
ccggaaaantttnggggaaaggcccttccccaacccccgnccggggttgggggtccgnggcccccggcnccccggggggccaagnggtaaacctntntntntntntntntatntntntntntntatatanaatnnnaaatntgtatntntntntnaacanaganaanaaaacanancggtctttctggggtncagacactcnaagnggccttngngnanaagattggcaacattgnggtttggcccgnaaattccttcnggggccttncaacattggcnaaaaaggccttcctgcccttggttnaaaaaggcccttccccnggcaccttcnccggggggnggtttttcaaaccaggccnccaatttttccttccccttgggcgccttacaaagaccccnttccccccaaaagntttangtcctttngggggggaacctttanccaaaggnggttaacccccttccggggggcccccgncntttcnttaanaaaaaaaaccntnaaggtttggggggnaattcccccccccccggnggggncccttgggccaaagaggngaaaatttttcccngaaatttanttcnaaaaagggccctttttnanttccggggaatttaacccccgggttaccnggaaacnccttttctgnnnaangggggggggggggnggnggccccccccggggnttaancccccncaaaaccctttttttttttnggttgttnccccccttttttttaaaanntggggnaagggggggnttttnaaaaattttggncccncccncccctttttgngggccggggttaaaaaattncaanttngggggntccaaanttaaaggncctttnggttttttcccctttggggtgggttgggnaaaaaaattttngttattaantnccccgggcnttcnaacnaaaatttcccccacccaaccaaaaaccnatttttccttaaggcccccgnggggggaaggcccntttaaaaaanggttgggttaaaaaaaganccccttggggggggggttngcccccttaaaatttgggnaagtttgggaaaggcctttanaaccttnccaancaaatttttaaaatttttggnccgtttttnggccggccttncnaaantttggcccccccgcnttttttttnccaagtttccggggggngaaaaaaaacccctttgtttccggttgggcccccanagcctttggccaantttttaaanttggaaaantcngggggccccaaaaacanccccccnggggggngnaaaaaaaangggccncgtttttttggccntttattttgngggggccngccctctctttcccccctttttccttnngggctttcaaaacattggnaanttccggcnttttcnncccnttccgggnttcccngtatttccggggctttntccngggcaaaaaccccngggtttattttaaaggcntttnanactttnaaaaaaaggggncggggggntaaaananncnggntttnatattccccancnng

SEQ ID NO: 5263 - DNA, 932 bp, Homo sapiens
  misc_feature 1, 2, 6, 8, 10, 11, 14, 15, 17, 18, 23, 24, 25, 26, 27, 28,29, 30, 31, 32, 34, 36, 37, 38, 39, 40, 41, 42, 43, 44,45, 51, 52, 53, 54, 55, 56, 57, 61, 63, 65, 66, 67, 68,69, 71, 72, 73, 76, 81, 82, 84, 85, 88, 92, 93, 95, 98,102: n = A,T,C or G
  misc_feature 104, 174, 176, 192, 201, 343, 479, 622, 646, 647, 668, 670,693, 721, 723, 732, 747, 753, 756, 759, 768, 771, 782, 786,797, 827, 841, 842, 845, 865, 870, 872, 880, 885, 892, 896,897, 906, 913, 914, 915, 923, 930: n = A,T,C or G
nnttcntnannttnnannctttnnnnnnnnnntntnnnnnnnnnnattttnnnnnnnattntntnnnnntnnnagnaaggnntnntanaatnntntanactnantatatggcgaattggagctccaccgcggtggcggccggcgggaggctgacgagagccgggaggcgttagngnaggaagagaaaaaccnaatactaantccactacagcgtcgcagcgcggcgcggcgtctgctttataggagagggcgcaggcccccgcgtacctcggccgctctagaactagtggatcccccgggctgcaggaattcgatatcaagcttatcgataccgtcgacctcnagggggggcccggtacccagcttttgtttccctttagtgagggttaattgcgccgcttggcgtaaatcatggtcatagctgtttttcctgtgtgaaaattgttatcccgctcacaattccacaccaacattacgangcccggggagcataaagtggtaaagccctgggggtgccctaatgaagtggagctaacctcacatttaatttgcggtttgccgcttcacttggccccgctttcccagttcggggaaaacctgtcgtgcccagcttgcattaatnaaatcgggcccaaacgccccgggnnggagaagggccggtttttgcngntaatttgggggccgccttctttncccgctttccttcggcttcacttggacntnagcttggcngcttccggttccagntttcgnganatngccgggcanaancccggttattncaanccttcaacttnaaaaaggggcggggttaaattaaccggggntatttcccaaccannganatccaagggggggaataaanccccnangggaaaangaaancatgggntgannccaaaaaanggccccnnncaataaanggcccangg

SEQ ID NO: 5264 - DNA, 935 bp, Homo sapiens
  misc_feature 1, 2, 4, 5, 6, 7, 9, 10, 11, 12, 14, 15, 18, 19, 20, 23,25, 26, 27, 28, 30, 31, 33, 35, 37, 38, 42, 43, 44, 45,47, 48, 50, 53, 56, 58, 59, 62, 63, 64, 65, 66, 67, 68,69, 70, 72, 73, 74, 75, 76, 77, 78, 81, 82, 86, 89, 91,97, 98: n = A,T,C or G
  misc_feature 99, 100, 101, 102, 103, 104, 106, 109, 113, 114, 115, 120,168, 170, 182, 195, 196, 204, 205, 206, 209, 214, 430, 530,609, 633, 674, 677, 679, 700, 707, 719, 739, 744, 748, 756,761, 771, 779, 784, 793, 809, 824, 827, 840, 842, 858: n = A,T,C or G
  misc_feature 872, 877, 888, 889, 894, 899, 900, 903, 916, 920, 925, 927,931: n = A,T,C or G
nntnnnntnnnntnnaannnttntnnnntnntnananntaannnntnntnatntantnnttnnnnnnnnntnnnnnnnagnnaggntananattagnnnnnnnngnttntaannntatanggcgaattggagctccaccgcggtggcggccgcccgggcaggtacccngngagtcaggcctnagaaagatggcgnnctaaatannnttncatancagccgagccagccaagctctactccaggaagtgaaaatgtgctgcctcgagagccgctgggacttgctgtgctgctcaggctggagtgcagtgtgcaaacacggcttactgcagccttcaccttccggccgctctagaactagtggatcccccgggctgcaggaattcgatatcaagccttatccgatacccgtcgacctccgagggggggggcnccggtaccccagctttttgttccctttagtgagggttaattgcgccgcttgggcgttaatcatggtcataagcttgtttcctgtgtggaaatttgttatnccgctcacaaattccacacaaccattacgaagccggggagcataaagttgtaaaaagcccttggggggtgccttaaatngaggtgaagccttaactcacattnaatttggcgtttgcgctcccttgccccggctttttcccaangtncngggaaaaaccctggttccgtngccccancctggcaatttnaaatgggaaattcggggccnaaacngccncccggggngtagnaagggccggnttttgccngttantttgggggncgccttttttcccgcnttttcctttggcttnaancttgaacttcggntngcgccttcgggttcgntttccggcttgtcnggccnaacccgggtanntcaantcttnnacntccaaaaaggggncggnttaantnaccnggtt

SEQ ID NO: 5265 - DNA, 928 bp, Homo sapiens
  misc_feature 3, 6, 10, 12, 13, 15, 17, 19, 21, 22, 24, 26, 27, 28, 29,30, 32, 33, 34, 36, 37, 38, 39, 40, 43, 44, 45, 47, 48,49, 50, 51, 52, 53, 54, 55, 56, 57, 59, 60, 61, 63, 65,67, 69, 70, 71, 72, 75, 82, 83, 86, 93, 96, 99, 102, 108,112: n = A,T,C or G
  misc_feature 125, 175, 196, 199, 217, 505, 596, 619, 691, 721, 733, 746,787, 833, 837, 859, 867, 892, 910, 920, 926: n = A,T,C or G
gtnatntttncnntntntntnnantnnnnntnnntnnnnntannntnnnnnnnnnnntnnntncntntnnnnagnaaggttnnttnttatttnttntanaantcttantatngggcgaattgganctccaccgcggtggcggccgaggtacagagcatagtgaagcatgatgggnggtagtattaggagaaaaacnttnttcaaattaaatttagcngagtttatttgagcaaagaagtgactcatgaatcggacaactccctaaaccaggagagacaccacacggcagtatgggcaagcagtattcacaggcagaaaaaggaggtgacatacagaaacagcctggctggccacagatcacagcttgccttacttggtcacagtctgaggagctagcaagccttgtggtgggactgaaagcccagctgctcttgattaagccaacatttggctacttgtcgccaaggaatctattcatcttgggcccggggttgcagtgggcctnacgccttgtaaatccccaagcacttttggggagggcccaagggccgggtggggatcgcccttggggtcggggagttttgagaccagccctnggccatcgtgggggaaaactggngtcttctatttaaaaagttgccaaggaatttagccttggggccattgggtgggtggttgttgccctggttanttccccccgggcttgcccccggggcccggncccggttcttanaaaacctaaggtngggatcccccccccggggccttgcaagggaaaatttcggantaattccaaagccttttaattcgaataaccccggtccggacccttncaanggggggggggcccccgggttancccccaancccttttttgtttccccctttttangtggaagggggttaaaantttgccgccncctttngg

SEQ ID NO: 5266 - DNA, 985 bp, Homo sapiens
  misc_feature 1, 2, 4, 6, 8, 13, 14, 16, 17, 18, 20, 31, 36, 45, 46, 47,49, 51, 53, 54, 56, 58, 59, 61, 64, 66, 71, 73, 82, 84,85, 88, 91, 92, 96, 98, 101, 110, 120, 122, 183, 184, 185,196, 200, 201, 207, 208, 308, 433, 466, 474, 529, 535, 553: n = A,T,C or G
  misc_feature 602, 616, 647, 676, 689, 696, 705, 710, 750, 755, 765, 768,771, 782, 791, 794, 811, 819, 833, 843, 851, 857, 861, 918,919, 924, 925, 941, 943, 964, 965, 975, 978, 979, 983, 984: n = A,T,C or G
nntntntnatatnngnnntntattttcttanttctnatttaatannntnanannantnnanttncntattncncagaaaggngnnatntannaaangngtnttctctacntattttatangnccgaattggagctccaccgcggtggcggccgaggtacctaagtcagagttcatatgggggnnnggactttttanctgnnaaaatnntgttcccacatattaatgcatgtggcgctcaccaaagcgctgtgtcaaaagtgtcatcattgtcatcagcatcacctgccagaaaattgcacagcacggnggtctcagcatgtgggctctgtagctggactgctcagattcaagtcctggccttaccacttacggggctgtgttgaccttgaacaagtgtattggccctctctgtgcttccaatttccccatctngtaaagatagggaataaacacatcttcacaggnagccatgngagaggctacaaggttagtagtaaggaaaaaacacttaggctaccacaataagtncaagcntcactaaatcatggtagnttgttaccatttcttatttttattaagaaaagaacaccaggaaagggtncaaggggtcaaaantggaaccccaagccttggttcccggttgggnaaaggaagggggttttttttaattccttnttggaagttcccntttaggnaccttttcnaaaanttcttaaggttgtttttgggggggggggttttaattcttnccttncggtcccccngcnttncccccaattcnttccctttngtncaccccccttgtccctnccttaaantttaaatcctgggntttaataacnatttcttngggttnggtncccctttcttaaaatgggggggcctctttcaaaaaagaacagggggggcccctggcnntttannggccttgggttttcancnaccccttgttttttccccaannggcccttggnaanncaanng

SEQ ID NO: 5267 - DNA, 978 bp, Homo sapiens
  misc_feature 1, 2, 3, 4, 5, 6, 8, 9, 10, 11, 12, 13, 14, 15, 16, 17, 18,19, 20, 21, 22, 23, 24, 25, 26, 27, 28, 29, 30, 31, 32,33, 34, 36, 37, 38, 39, 40, 41, 42, 43, 44, 45, 46, 47,49, 50, 51, 52, 54, 55, 56, 57, 58, 59, 60, 61, 62, 64,66: n = A,T,C or G
  misc_feature 68, 69, 70, 71, 72, 73, 74, 75, 76, 77, 78, 79, 80, 81, 82,83, 84, 87, 101, 102, 103, 106, 108, 109, 110, 111, 113,115, 117, 118, 119, 194, 217, 554, 711, 724, 759, 804, 844,872, 905, 924, 925, 957, 958, 961: n = A,T,C or G
nnnnnnannnnnnnnnnnnnnnnnnnnnnnnnnntnnnnnnnnnnnntnnnntnnnnnnnnngngngnnnnnnnnnnnnnnnnnagnaaggggggagatannnttntnnnnantnannnacttactatagggcgaattggagctccaccgcggtggcggccgcggtctcggtcactcgaataacccgacatggngtcaatggttgcggttggccggngaacgaagtatatagaaaagcgtgcgacaagtcgctggaaatggcctcgatgacggcgaagccttgcgggggcggcagcggaggaaggacaccgatgacaccagccgaagctgcactactagagaccggtagaaatgaatgaggtccccgcgtacctgcccgggcggccgctctagaactagtggatcccccgggcctgcagggaattcgatatcaagcttatccgatacccgttcgaaccttcgagggggggggccccggttacccaagcctttttgtttcccttttaagtggaagggggtttaatttgccgcgctttgggccgtaatcaatggtncataagcttgttttcctggtgtggaaaattgtttatcccgcttcaccaattccacacaacattacgaagcccggggaagccataaaaagtgttaaaaaggcctggggggttgcccttaaatggaggtggaagcctaaacctcaaccatttaaatttngccgtttggccgncttcaaccttggccccgcttttttcccaaagttcngggggaaaaacccttgttccgttgccccagccttggcattttaantggaaaattccgggccccaaacccccccccggggggaagnaagggcccggtttttggccggtaatttnggggccgccttcttttccggcttttccttcggnttcaacttggaactttcgnnttgcggccttcgggttccgtttccggggcttnncgnggccaaaagccggtaat

SEQ ID NO: 5268 - DNA, 880 bp, Homo sapiens
  misc_feature 539, 564, 605, 628, 629, 663, 679, 691, 695, 696, 700, 702,705, 708, 715, 721, 722, 758, 761, 765, 769, 778, 780, 781,789, 790, 792, 795, 798, 803, 805, 806, 809, 820, 825, 827,831, 835, 836, 839, 843, 850, 853, 854, 855, 868, 869: n = A,T,C or G
  misc_feature 874: n = A,T,C or G
gcgtaatacgactcactatagggcgaattggagctccccgcggtggcggccgcccgggcaggtacgcgggattgtattgtgtttgtgataattgctaggagtagattttaggtgctcttaccacatacaaaaaagggggggtaactatgtgtgatgatacgttttatttgcttgactataataaccatttcactgcatatcaaaatattatgtggtatgccttgcatacataaaataaaaatacaatagcccttttagtttaattttagtaatacaatctgataaaataaagataaaattaatatgtaagaataatagtaaactggctgagccacctcgcccagcggcatcaggctttcttaaagtgagagcacgcctgtacctcggccgctctagaactagtggatcccccgggctgcaggaattcgatatcaagcttatcgataccgtcgacctcgagggggggcccggtcccagcttttgttccctttagtgagggttaattgcgcgcttggcgtaatcatggtcatagctgtttnctgtgtgaaattgtatcccgctcanaatttcacacaacataccaaccgggagcctaaagtgtaaanccctggggtgcctaatgagtgannctaactccatttaattgcgttggcgcctcactgnccccctttttccaatnggggaaaaactnttcnngccnanctncantttaatnaaaatnnggcccaccccccccgggggagaaaggcgggttttcnttntttngggngcctttttncnnttttcttnntnaanttnaaatntnnttngcttcgggtcnttttngnttgngggnnaancggntttaaanttnnnttaaaaggggggnnattcnggtttt

SEQ ID NO: 5269 - DNA, 718 bp, Homo sapiens
  misc_feature 460, 527, 529, 534, 535, 537, 538, 539, 540, 541, 542, 545,547, 548, 549, 550, 551, 552, 553, 554, 561, 567, 577, 580,605, 606, 616, 618, 628, 630, 631, 643, 648, 651, 668, 693,694, 695, 712, 717: n = A,T,C or G
ggagctccaccgcggtggcggccgaggtactagaagctagaataaaaacagaataatgcctcaaatactcaaaaggaaaatgattgccaacctagaatttgtattcagctaatttctgaatgacataaggattaaaaaacaaagataaataaaagtatttcaaaaaacacacggtttcaaaattcttccactcatacaacttgtggttcatcaaactaagggaataaatcaagaatgaagatagcatgagattcagaaattggaggattcagtgcagaagagaggcaaaggtaatcccagaacaatgaagttgaagaaagggataacacctgaataccagtcccatacagcagccagtcctgagttttggaggagaagggaggattccaggggaaggtctttcagagaaaaaagataagttgcaataatggattatcctatatgttctattgtagagagntatagaagaattaatgacaagaaccccagaaaattgtgcagctttcttgaagaggtgctcaattatncnaaaannannnnnnttntnnnnnnnngtcctgnccgggncggccccttntanaactagtggatcccccggggcctgnnggaattcggntnttcaagcttntnngatcccccgtcnacctnganggggggggcccccggtncccaaccttttttgttcccctttannnggggggttaatttgccnccctnt

SEQ ID NO: 5270 - DNA, 703 bp, Homo sapiens
  misc_feature 563, 583, 589, 602, 620, 627, 632, 648, 650, 657, 679, 682,688, 699: n = A,T,C or G
ggcgaattggagctccccgcggtggcggccgcccgggcaggtacgcgggactgtctcttttccagagctcctgagttcatactcatagggtgacagagtgggactctgtctcaaaaaaaaaaaaaaatcagcatttccttctctgcaccagaattgaggcgcacaatgcttcagtttctaggtaactacaattatcctgccagactaatacgatgacgggagtgctagtggagacctcctggagacagctgagggtcataggtcaggattgagtttgacagcagggaaaacagcctgatacggtttggctctgtgtccccacccaaatctcatgacgaatcgtaatccccagtgttggaggaggggcccggtggaaggcgactgggtcatgggagcggattttccctttgctgttctcatgataagagttttcacaagatctggttgttaaaaagtgtgtagcagctccccacactcttcctctgctccggccacgttaagacacgctggctttcccttcccttctgccatgattctaagtttcctgagggcttcccaccatnctttctgtacctcgggccgntttttngaaactagtggantccccccgggccttgcanggaattncgatntcaaagcttaatcgananccggtcnaccctcaaggggggggccccgnttnccccancttttttgttncctt

SEQ ID NO: 5271 - DNA, 737 bp, Homo sapiens
  misc_feature 2, 7, 12, 494, 591, 601, 609, 616, 627, 663, 683, 685, 689,701, 710, 727: n = A,T,C or G
gntttangcctngcgtaatacgactcactatagggcgaattggagctccaccgcggtggcggccgcccgggcaggtacgcggggccgggcgcggtggcgcgtgcctgtagtcctcagcttccctcacaggcattcactatcactcccagctaattaaaataatttgtagacggtgtctcgttatgttgcccaggctggtctcgaactcctgggtttaagtgattcccccgcctcagcctcccaaagtgttgggcttacagccttgagccactatgcttggctcaaagatatttttatgaaagccctgggactatagatttagctgattaaatttatagaaaaagtcctgtcatataaactggcaaagtctgttcttaatttaattagccaaatcagacttaacttccgtcagaacatgtcttggttttaattcagataaacacacaaacatacttctctggcacagccttcagaagcatcagtttttgttttgntttgttttgttttttgagacagggtcttgctctgttgcccaggctggagtgcactggcacaatcacagttcactggagcctcgacctcccagatccnagcaatcctnccaccctnagccctnccaagtagctnggtctataagggccgtgccaccacccatgccccagntgaattttgggtttttttgnancctnggccgcttttanaaactaagnggatccccccggggctnggagggaatt

SEQ ID NO: 5272 - DNA, 700 bp, Homo sapiens
  misc_feature 607, 617, 627, 664: n = A,T,C or G
cgtaatacgactcactatagggcgaattggagctccaccgcggtggcggccgcccgggcaggtacaaaagcacagcaatattggaacagtcatctgataacccagacagctactaagtgactaatgggtgggccgtgcatacagcatgaatgtgctggacaaagggatggttcccatcctgggtgaggcagagcaggatggtgagagacttcatcaagctatgttagtgagctggggctgctgtaatgaaatatcatagactaggtgacataatgagaaatttattgtgtcatagatctggagactggaagttcaagatcaaggtggcagcagcattggattcctctcatgtttctaccttggcttgcagataaccgccttgtcaccgtgtccacacagggccttctctctgtgcatagccctggagtccctccctctttaaaaggacaccagtcatactggattaggatcccacccttacaatctcatttaatcttaattacgtctttaaaggacctgtcctaaatacagtcacattctaaggaactaggggttagggcttcaacatatgaactcatattggacacgtttaccttcattgtaacangcatggtganaagcaatganccgtggttgactgcaagtgaactggctttgccaccanactcctgtcactggcatccttcttttatttcatcat

SEQ ID NO: 5273 - DNA, 753 bp, Homo sapiens
  misc_feature 18, 68, 450, 494, 514, 516, 523, 527, 535, 538, 547, 556,566, 583, 584, 586, 599, 621, 637, 639, 672, 684, 690, 691,696, 703, 705, 707, 722, 728, 740, 749, 753: n = A,T,C or G
gactcactatagggcganttggagctccccgcggtggcggccgtctccgatctttacacgcattcttngtgttatctgaagacactctgatgccaccacccaaagcaactggcagttgactcttggcaattttaagcttgtgtggaaagcagccgccgcccggtagctcctttttatctagagacactcaggatgtgggggacaccccagcaatgccatccctcctttgacctccagagcgcgcagaattataaagttgagtaatactttatttgaaaaaatgaaaagtgcacacacacacacacacacacacttacataggcacaggataatctggaagtatgaccagcaaatgataactgattccctcaggggagaagaaactgggtggctgaaggacaggaatgagaaagaaggacagttgcgtttgtttgtatcgtttgaaattgnccaagggggtatgtggtcttttcaaaatggttgaagaaccattngcttcctttttcaaaaatgntnaattccnaggnaaatttcnggnatttttaanaaagttttnaaaaatttcntggtaatggcctggggnnanaaatttttttttngtacccttggggccggttttanaaacttagggggggantncccccccgggccttgcaagggaaatttccgatntttaagcctttnttgaannccggnccacccntnangggggggggcccggnaccccnaagctttttggntcccctttnaaan

SEQ ID NO: 5274 - DNA, 1438 bp, Homo sapiens
  misc_feature 5, 23, 28, 30, 42, 50, 61, 66, 72, 77, 82, 90, 95, 103, 105,108, 130, 132, 138, 142, 147, 153, 163, 169, 175, 186, 212,219, 223, 228, 237, 268, 276, 280, 286, 292, 302, 304, 342,346, 378, 451, 481, 490, 531, 547, 572, 579, 584: n = A,T,C or G
  misc_feature 589, 612, 690, 710, 735, 782, 794, 847, 882, 904, 911, 919,924, 967, 968, 993, 1006, 1037, 1040, 1119, 1135, 1198,1226, 1246, 1256, 1259, 1271, 1308, 1311, 1312, 1315, 1322,1325, 1364, 1367, 1369, 1370, 1371, 1379, 1391, 1408, 1429: n = A,T,C or G
ggggnaaggccctttctccaacnccggncnggggttgggggnccgggggncccccggaagnggttnaaccgncccgnggggngtccaaanggggnaaaccaananggnaagggggaaaaggaaggcccangngcaaanaagnaaggnaaaagnccacgtaagnaagtgncaaggnaaggcccccgnctaaggttccggccaaggttccggcnaaggccnccgnccagnccaaaaggnaaggttggaaggaaagtggtaagtccaaggnaaaaaagnccgnaagggnccaagnccataaggcngnaaggtaccaaggccaaagggggccggggggccaagccnaagnccaaaggtaaaagtaaaagtaaaagtaaaagnggaaaaggaccaccttggaccccggccttccccccaaggttccccaaggaattccttccccattcccccggcnttccccggttggttccaaaaaaggggaagnccggggggnaaaaccaattggcccccaaaaggtttcctttggaaaaattnccccaaggccccaagnaagggggggaaaaaggggttcccgnaaggggnaaggnaaggnaaggttgggaagtaaaaattggncctttggggcccaacccccaaaatttccaaaggggggggggaaccccccccggggtttccccaaggggggttcccggnaagggaaattcccccaaaantttttcccccaaaaaaatttccggnaaaaaaaaccccccaaaaaaacccccttttttccccaattttccaanggaaaaatttcnaaacccggcctttcccccaagggaaattccaaaaaaaaggtttccaagggccnttttccaaaaaaaaaaaacccccccgggaattccnttccggggggttcccccaaaanggttccntttaaggnaattnccccaaagggggttccctttggcctttttcccccaaggaaatnnccggccccccctttcccccccgggnattcccttaaggnaattcctttaagggggttccccccccaaccnttncaaaaaggggggtgcccccttaaaaaccttgggggcctttattgggggcccccaacccagggccttgggggaaaaaccnttaacccccccggaangaaaagggttcctttttttttggttaacccctttggcccccccggggggcccggggcccccgnccttctttagggaaaacctttaagggtngggggaatttcccccccccngggggccttngcnaagggggaaaanttttccggaattaatttcaaaaggcctttttatttcnggnnttnaccccgngtncgggaaccccttcttaaaggggggggggggggccccccnggntnnncccccaangccttttttttngggtttccccctttttnaaggttgggagggggttttanaatttttct

SEQ ID NO: 5275 - DNA, 1569 bp, Homo sapiens
  misc_feature 4, 43, 101, 103, 105, 107, 109, 111, 113, 115, 117, 119,121, 123, 125, 127, 131, 136, 142, 146, 148, 150, 152, 155,161, 163, 167, 202, 208, 210, 212, 214, 222, 224, 226, 228,238, 242, 248, 250, 252, 254, 256, 258, 260, 268, 270: n = A,T,C or G
  misc_feature 272, 274, 276, 278, 280, 288, 298, 322, 328, 330, 350, 352,358, 362, 385, 395, 398, 406, 433, 449, 488, 496, 504, 527,529, 534, 535, 550, 562, 568, 595, 604, 614, 626, 639, 695,701, 708, 753, 754, 772, 775, 799, 866, 881, 882, 899: n = A,T,C or G
  misc_feature 917, 937, 938, 941, 948, 962, 973, 997, 1000, 1007, 1015,1016, 1026, 1040, 1080, 1132, 1141, 1154, 1180, 1230, 1262,1267, 1273, 1314, 1327, 1344, 1362, 1374, 1410, 1421, 1470,1510, 1520, 1521, 1530, 1536, 1558, 1568, 1569: n = A,T,C or G
accnttaattaagggggggcccggaaaaatttgggggaaaggnccttcccccaacccccggcgggggtgggggccggggcccccggaaggggttaaccctntntntntntntntntntntntntntntgtnttgtntgtgtntgtntntntnggnaacctntncctnttttaccaagagagatttttttttccctgggtatntgggtncntntntgggggtntntntncctgggcctntctncctctntntntntntntntctccctntntntntntntngggaaganaattgggggnaaggtttttttccaaccttaattntgggtntnggccccccaagaggccttgngngaaganttgnccaaaaatgggggccaaaaaganaattcctttntgnaacctttncaaacctttggccaaaaaacacccttntttggcccctttttcnccggggggggtgcccccaaaaaggcccaaaaattttttnttttttcncccgggcncctttacaaaggacctccttccncnccggnnaaggattaaggcccnttgggggggggnaaattnttaacccaaaggggggccaaacccccnccggggctnccaaaccccnaaccgggggccnccccaaaggaccnttaaaaaaattttttttttttttttggggcccaattttttttttttttttaaaggnttaaanaaaaagnaaaatttggggggggggggggttttttttttaaaccctttaaatnnaaccctttgggggggttnccnaaggggggccctttgggggggttnccttttttgggaaaaaaaccctttcccccttgggggaaacccccctttccaaaaggggggtgggggnaaattcccccaaacnncctttgggccccctttncgggggggccccccttcnccccccaaaaaaaagggatnnggnccctttnggggggggaaattntttaacccaangggggggccgggggggggaaaggnccnccaaccntttgggcnngccccccccngggggccttttaantttaattttttaaaaaatttttaacccaaatttttttttnccaatttctttcccaaaaaaagaaaaacccccccaaaaaaattgggcccttnggcctttcnaaaattaaccttnaaggccccaaaagggggggggggggnagggggcccacccccaaggggcccctttccccttgggggccccggggggnaaccccaaccaaaggggggggccatttggaanaaaanaggccntaaccccccccaaaaaggttaagggggggcctttttcaaangcccaacctttanggaaccaacccccccgnggggggggggggccttgnttaagggggggnaacccacccccaccttggttggggggggggcccggnccaaaaaatgntgggggccccttttttccaaaaaaaccttgggttaaaacaaagggggcnttgggggaaaattttaagggaccaaaaaaccccaaacccnatgggggttnnttccccaanacaaantttgggccctttacccccggcnggtaaccccnn

SEQ ID NO: 5276 - DNA, 673 bp, Homo sapiens
  misc_feature 595, 615, 625, 667, 672, 673: n = A,T,C or G
ctcactatagggcgaattggagctccaccgcggtggcggccgcccgggcaggtacaatgtcctcgcgtcttgttctggtggccaccttgggtcccagtccacctggacatcaggctgacgtcatctcaacaatggccgggttgttaattcgccaccttgaagccatctctggaactgtgcaactgggtctccaggcttggtctgtttcaagattagctcctagaactaatctcacctggccgctagttattgatggagcccatatgtgaactcagccaattcttactcttttcctctatggcaggctccctgccagtgtttgtcatggcaggtcagcacacgggatactggatctgagaatctgatctccagggatcttccccttattctgttccccttggaggattcagcagatacctgtagataagaagctgagcactggagaaattaactagtcccagtcttctagttaactactaagtaaaggatccttgattatacccagctcttgagttctgagcattaattactttgttgcattgcatctggtgttgagtgattattctgtccccatcacaaccccccgcgtaccttnggcccgctttagaactagtnggatcccccnggctgcaggaattccatatcaaagcttatcgatacccggccnacctnn

SEQ ID NO: 5277 - DNA, 371 bp, Homo sapiens
cgtatacgactcactatagggcgaattggagctccaccgcggtggcggccgccacgctggttttgcatcttcaggagacgctcgtagccctcgcgcttctcctcggccaattcgcggaagaagtggctcacgccttccagagccacatcatcgcggtcgaaatagaagcccagagagaggtaggtgtaggaggcctgcaggtacctcggccgctctagaactagtggatcccccgggctgcaggaattcgatatcaagcttatcgataccgtcgacctcgagggggggcccggtacccagcttttgttccctttagtgagggttaattgcgcgcttggcgtaatcatggtcatagctgtttcctgtgtgaa

SEQ ID NO: 5278 - DNA, 728 bp, Homo sapiens
  misc_feature 582, 588, 648, 667, 677, 682, 688, 692, 704, 708, 715: n = A,T,C or G
cgtaatacgactcactatagggcgaattggagctccaccgcggtggcggccgcccgggcaggtacgcgggattctcctgaggatgtgtcccatctagggaaggctggactaggccttgcggctcctcagggactcaggtggccctactgggagaggggcctcaaatgcaccatgtcaagggttcaagattgttcctgcttttccccaagtacctcggccgctctagaactagtggatcccccgggctgcaggaattcgatatcaagcttatcgataccgtcgacctcgagggggggcccggtacccagcttttgttccctttagtgagggttaattgcgcgcttggcgtaatcatggtcatagctgtttcctgtgtgaaattgttatccgctcacaattccacacaacatacgagccgggagcataaagtgtaaagcctggggtgcctaatgagtgagctaactcacattaattgcgttgcgctcactgcccgctttccagtcgggaaacctgtcgtgccagctgcattaatgaatcggccaacgcgcggggagaggcggtttgcgtattggggcgctcttncgcttnctcgctttaactgactcgcttgggctcggtcgttcggcttgcggcgaagccggtattaancttaactcaaaaggcgggnaaataccggntattncacaanaatnaagggggataancccnggaaaanaaaaattttggat

SEQ ID NO: 5279 - DNA, 1579 bp, Homo sapiens
  misc_feature 4, 34, 44, 53, 58, 64, 68, 79, 84, 101, 118, 120, 126, 128,149, 166, 173, 201, 203, 205, 209, 222, 235, 237, 303, 422,469, 489, 580, 618, 656, 687, 694, 702, 721, 758, 811, 847,858, 896, 899, 916, 939, 950, 961, 1002, 1035, 1042: n = A,T,C or G
  misc_feature 1057, 1067, 1116, 1153, 1202, 1211, 1219, 1262, 1322, 1396,1409, 1411, 1426, 1435, 1453, 1488, 1503, 1527, 1528, 1532,1538, 1540, 1561, 1563, 1564, 1575, 1576: n = A,T,C or G
ccgncgggggtttgggggccgggggccccggggnccgggggggnaaggggccnttggnaaccgnaagnaaggcccccgnggggnaagggggcccggttttnagggccgggaaaaaagngnaaaaangnaaaggaaaaaaaaaaaaaccnccgtaaaagtaaaccgnaaaaagnccccaacctttaaccaaaggccggttcngncnaagnccgggccggggcnggccggggccggntnccttggccttttttaaattaaaggggaaaggaaggggggggcccggccaaggggccccccccccgnccggttaaaccccttcgggggcccccggctttccttaagggaaaaccttaaagggttggggaaattcccccccccccggggggccttgggccaaggggaaaaaatttttccggaaattnaattccaaaaaggcccttttaaattcccggaaattaacccccgggtnccggaacccccttttccggnaaggggggggggggggggggggccccccccggggggtttaaccccccccaaaggccctttttttttttgggtttttccccccttttttttnaagggtttgggaaagggggggggttttttaaaaaattntttgggccccggccccggccctttttggggggcccggntttaaaaaatttcccaaatttgggggggttnccaaaanttaaaggnccctttggggttttttttncccccctttggggttggggttggggaaaaaaaaattnttggggttttttaatttccccccggggcctttcccaaacccaaaaaatttttncccccaacccaaacccaaaaacccaaatttaaaccnggaaaaggccnccccggggggggaaagggcccaattaaaaaaaaagggnttnggtttaaaaaaaaaggncccctttgggggggggggggttngggcccccttnaaaaattgggnaagggtttgggaaagggccctttaaaaaccctttccaaccnaatttttaaaaaatttttgggccggtttttggncgggccnttccaaccttgggcncccccgggcntttttttttccccaaaaggtttcccggggggggaaaaaaaacccccttnggttcccggtttggggcccccaaagccctttgggccnatttttaaaaaatttgggaaaaaatttccggggggcccccaaaacccgncccggcccngggggggnggaaagggaaaggggggcccgggggtttttttgggcccggttnaatttggggggggcccggcctttcctttttccccggcctttttccctttcgggcttttcnaacttgggaacttttccggcctttgggcggcctttccggggttccggttttcccggggccttggcccgggccgnaaggcccggggtnanttccaaggcctttcnaacctttcnaaaaaaggggcccggggnttaaaaattaacccggggttttatttcccccaccnaagggaaaaattcangggggggggaattaaaccccccanngggnaaaaananaaaacccaattggtttgaaancnnaaaaaaggggnncct

SEQ ID NO: 5280 - DNA, 694 bp, Homo sapiens
  misc_feature 441, 442, 448, 467, 502, 547, 609, 620, 630, 660, 692, 694: n = A,T,C or G
gggcgaattggagctccaccgcggtggcggccgcccgggcaggtactttgaggaaagaggctgttatttcttgttagagggatctggtcatcttttctgctctgttgtctttgtttatgctctcttgagagtcatggttccctctgcaccttgggcttggcccgctgcggggtagcccccgtttcccaagcatggtgggacccctgctgtgcctccacatctgtgttctccatctgctctggaatgccctccctgccaacgcacagagctctccagcctcggggaacttgctgctttggttgggaaattccccttgggattaagcgttcctgccttcccgcagcactttcctagctcagagcaggctcacagaccgtgtgagtgtccttgggtacctcggccgctctagaactagtggatcccccgggctgcaggaattcnnatatcnagcttatcgataccgtcgncctcgagggggggccccggtacccagcttttgttncctttagtgaggggttaatttgccccgcttggcgtaaatcatggncatagcttgtttcctgtgtgaaattggttattccgttcacaaatttccacacaacatacgancccgggagcantaaaaggggngaaaggccttggggtgccttaaaggagtgnggctaacctcacaattaaatttgcggtttgcncn

SEQ ID NO: 5281 - DNA, 947 bp, Homo sapiens
  misc_feature 183, 211, 292, 340, 363, 384, 435, 439, 447, 451, 452, 462,467, 476, 477, 478, 485, 487, 490, 492, 495, 498, 503, 513,514, 517, 518, 532, 539, 545, 554, 555, 578, 582, 596, 598,603, 611, 614, 615, 623, 624, 625, 630, 633, 647, 649: n = A,T,C or G
  misc_feature 652, 653, 660, 664, 669, 670, 675, 678, 688, 692, 698, 703,704, 709, 711, 726, 727, 728, 732, 743, 745, 749, 751, 756,757, 762, 767, 770, 772, 774, 779, 791, 794, 797, 808, 811,821, 824, 832, 833, 836, 837, 840, 844, 849, 852, 854: n = A,T,C or G
  misc_feature 861, 865, 870, 872, 873, 877, 893, 895, 898, 906, 908, 914,923, 924, 926, 927: n = A,T,C or G
ggcgaattggagctccaccgcggtggcggccgcccgggcaggtacgctttactaatctaaattgggtaacagaactggagaaaaggaagactacacagacttatcataagctgttagtgaacgtgatagaaatgcgtaatttgttaaagcgaattacagctctgatttgtcaaatgaggaggngaattatcctaggatttgctatgctgtngtggcgttagaagattggatctttagcagcaaaggtaacctcaacaatattttctgcttaagaaagtgccttggttaaggnagaccgtgatatcgtctttgactaagctctctgggctattgattctgncatattccaaaggcagtcttggnctgaaagccgaatctcacggncaatgtcaacatgcaatccacaaagaccctggcgcccttcccggtatgccncttnaccaaaantttnncactgcgganatccnttttttttnnnaaccggnanttnanttnganttatnaagcccgggnnttnnctttaacttgtggnaatcccnttcccnaaaggaaannggtgggccacccttttcaccctntggnaaaaggagggcctngncattngttctggnganncaaaggcnnnacctnttnggggaaaaaccccntngcnngcaaatnaatnccctnnctttncangaaaataaancaangggggntttcnnggccnanatttttttaaccttnnntttnaggaattttancnaacngnttttnncaagngaacncgncngngattncttttaaaaaanccnctntcccttttggnaanccgggccccnaanttgtggtnnccnngtnatanccccnttngnccccttntccnaaatntnnaaanttccccgggccccccngnggnttttgggntntaaaanttttttaanntnntgcccccccccggggggggg

SEQ ID NO: 5282 - DNA, 880 bp, Homo sapiens
  misc_feature 16, 136, 307, 368, 552, 560, 574, 609, 615, 641, 652, 679,687, 689, 698, 703, 708, 729, 730, 731, 732, 739, 742, 751,762, 779, 782, 797, 806, 807, 812, 813, 814, 818, 820, 825,839, 841, 843, 854, 860, 868, 869, 870, 871, 874: n = A,T,C or G
gaattggagctccacncgcggtggcggccgaggtacctttttttttttttttttttttaaactccctttccttgttatctgaacttccaaacatcagctttgatgtctattgttgggacttcaagaggactcttancacatcggcaggtgttggttttagtgagcaggcgagagtcccacattcttccaaggagagagatgggtcccaccacattcctacccctagagcagaagttcccgcgctgtgcctcttctctggctgcttgctgaggacgtctcccagtggggtacctgcccgggcggccgntctagaactagtggatcccccgggctgcaggaattcgatatcaagcttatcgataccgtcnacctcgagggggggcccggtacccagcttttgttccctttagtgagggttaattgcgcgcttggcgtaatcatggtcatagctgtttcctgtgtgaaattgttatccgctcacaattccacacaacatacgaaccgggagcataaagtgtaaagcctggggtgcctaatgagtgagctaactcncattaaantgggtttgcgctcnctgcccgcttttccaatcggggaaaaccttgtcgngccccnctggcattaatgaaattcgggcaacnacgccgggganaaggcgggtttggggtattggggcgcntattttcngnttttcttcncttanttganctagggtgggggctcgggccnnnncggcttntgnggtaaaccngttattcaagnttaatttaaaaggcggntgnttccggttttttccncaaaaaatnnggggnnntaancncaaanaaaaaaaacctttngncnaaaaggccccnaaaaanggccccgnnnnccnttaaat

SEQ ID NO: 5283 - DNA, 865 bp, Homo sapiens
  misc_feature 160, 282, 294, 374, 409, 437, 455, 458, 488, 492, 510, 511,563, 569, 573, 577, 586, 590, 608, 623, 627, 628, 638, 641,644, 650, 659, 669, 685, 686, 704, 708, 721, 722, 745, 754,755, 772, 773, 776, 779, 782, 787, 789, 790, 798, 800: n = A,T,C or G
  misc_feature 827, 828, 832, 839, 840, 851, 853, 860: n = A,T,C or G
gaattggagctccccgcggtggcggccgaggtacttcacatcataaatgacaggaaaaaacaatcgaaggatctcaaagaagtcaagttcttcttcaggcaagttagagttggttaggattttgattcccgcgtactttttttttttttttttttttttnggagtcatagattttatttaattaaaatagattaaaaacagactgtgtaaaagaattagaattctcaataatttactattatttacattagcaaatgtcggtcgttagtagacactgagcanagaagcttgaanaacggggatcctctcctgtgggcaggggagccccagcttccctcgtgattcccgtcctttcaagttcattatggcagctntgtcaatgagcaccccagggtggtgtggccgcagnaccaggacccgcgctgcccgcgtacctncccgggcggccgctctanaantagtgggatcccccgggctgcaggaattcnattnaagcttatcgataccgtnngacctctagggggggcccggtacccaacttttgttccctttagtgagggttnattggncccnttgngtaatcatngggncatagctgttttccctgnggtgaaaaatggttntccnnctccacaaanttncanacaaanattaccaanccggggagcnataaaagtgttaaaannctggggggggcctaatgnagtngagcttaacctcnnattttaatttgcgttggggctcnctgggcccnnttttccattgggaaaanntgngcntgnccccntnngtttttantnaatttgggcccaccccccggggggganngggnggttttnntttttgggccncntttcccntttct

SEQ ID NO: 5284 - DNA, 800 bp, Homo sapiens
  misc_feature 3, 428, 604, 667, 683, 707, 715, 744, 756, 757, 777: n = A,T,C or G
atnaacccttgtaatacgactcactatagggcgaattggagctccccgcggtggcggcccgaggtactgctgcagagaaaaagcatccatgtcaaaaagtaaaaggttctcattctaccttgcttccgttcccagaccttgtcttaccttcctgaactttttatattcctggattatcttgtcttccaggaccttgtattctggagttcctcgccgaactcttttaatctctgctcccagctctatgaacctttggcttgcagtcccaacacgggcatgcaggatgcggtattcagcataatctgtctcaaagtcctgctcataggcatgttgctgttctgcactgtggatggccctgtattgcaggaggtagtctggtatatcttcaggacttggggattcagaatcttcttgaactgaggaactgngttctaatctggggtccatgtcctcatcttcttgctcccaatcttctccctcttgtaaatcctgattggtcaggccttgtagggggcttggcactaaaggcagagttctgaacctcttttcttccagttctacagtggctacaggcactgaacgtttcttgtccagacgttttccngctggcaaaaggaaaggcagtgcctgaacagggttcttctggttggaacatgggtctggcttnttcacttccccactgngccatgggcctcccttgaggaatncctgggangtgaactggcccttgggtgcttgcccagngggattcttgannacttgaaaccctccttttantggccaatctggggggcttgtgg

SEQ ID NO: 5285 - DNA, 773 bp, Homo sapiens
  misc_feature 5, 83, 601, 700, 732, 746, 762, 763, 773: n = A,T,C or G
taggncgaattggagctccccgcggtggcggccgaggtacatacgccccagaagggcggactggccggagtccagggatgggngccaacgccccataacagagatcagcattggactacaagaagaggcaaggagaaatcaaggatcaaaatttaagtaaaagaaaagccaagtcattaaaaatagccccctcattgaagagtgggaacgtaggtgtgatgttctggcataaggagtgaaaaagaaaaagctctattacttgaagcttttcaccaggggcagagagaatggccagaagtgagaaacgtgtgtgtggatgcttacaccgatgccgtctcctaatattggaacatggctccagaaaggagaaccaattattcctaattccacgggcggcattctctgactcccaaactcccaaagtggagggcaggagctgcccttaccttgaggaagctcatagtgttgtggtaaaactctcccggggtgcgacataggatgcttttcagagctccctggacaatggtacctgcccgggcggccgctctagaactagtggatcccccgggctgcaggaattcgatatcaagcttatcgattnccgtcgacctcgagggggggcccggtcccagcttttgttccctttagtgagggttaattgcgccctttggcgtaatcatggccatagctggtttcctgngtgaaaattggttatcccgctcccaatttccncacaacattccaancccgggaggcattaanngttaagcctn

SEQ ID NO: 5286 - DNA, 1143 bp, Homo sapiens
  misc_feature 7, 14, 18, 19, 20, 21, 23, 30, 31, 35, 36, 38, 39, 46, 47,48, 51, 53, 56, 58, 61, 62, 65, 66, 68, 71, 81, 82, 85,86, 87, 88, 89, 92, 94, 102, 103, 105, 106, 107, 108, 110,113, 197, 338, 367, 377, 381, 392, 417, 460, 466, 477, 481: n = A,T,C or G
  misc_feature 510, 519, 530, 544, 550, 562, 576, 588, 607, 612, 615, 619,628, 641, 654, 674, 676, 687, 700, 735, 742, 754, 756, 772,821, 827, 834, 837, 839, 841, 842, 849, 882, 897, 916, 925,927, 928, 934, 941, 956, 966, 1006, 1022, 1028, 1047: n = A,T,C or G
  misc_feature 1073, 1090, 1098, 1100, 1105, 1118, 1119, 1132, 1133, 1142: n = A,T,C or G
cttcttntttttanttannnnanttttatnntttnncnnaattttnnnttntnctngnaannttnntnatnatcatttttnnctnnnnnagntnaggggggnntnnnngngcncgcgtaatacgtactcactatagggccgaattggcagctccaccgcggtggcggccgcccgggcaggtacgcggggtcctcagnttcaggcaccaccactgacctgggacagtgaatcgacaatgccgtcttctgtctcgtggggcatcctcctgctggcaggcctgtgctgcctggtccctgttctccctggctgaggattccccagggaggatgctgcccagnaagacagattacatcccaccatggatcanggatcacccnaacncttcaacaaangatcacccccaaccttgggctgaantttcgcctttcaagcccttaatacccgcccaggcttggccacnacccangttcccaaacnaagncaccccaaattattcttttccttttcctncccccccangattggaggcnatttcggcctttancaaagncccctttttggncaaaatgggccttnctttcccccttnggggggggaaccccaaaangggcnttngaancaaactttnaaaccggaattgnaaaaaaatccccnttggggaaggggggcccttngnaaaatttttcnaaaacccctttcnaccgggggaaggaaattttcccggggaagggggcnttccaangaaatcccaatngnaaaaggggcttttttncaagggaaaacctttctcttccccattaccccccttcaaaacccaaggntccaantaacaangcncnanntctttcncaagggctttgaaccccaccccgggccaaaatngggggcccttggttntccctttcaaaaccttaangggggcccntnnaaaagncttaagntgggggaattaaaangttttttttngggggaaggggaattggtttttaaaaaaaaagttttggtnaaccctttggggcccngctttnctttaaaaaaaccttaagntggggaattccccccccgggggcctngcaagggaaattttccnaattattnanaaagnctttttattttgnntaaccccgggtcnnaacccttcng

SEQ ID NO: 5287 - DNA, 713 bp, Homo sapiens
  misc_feature 6, 10, 525, 551, 587, 606, 620, 621, 650, 667, 669, 670,674, 675, 689, 698: n = A,T,C or G
gcgtantccnaatacgactcactatagggcgaattggagctccaccgcggtggcggccgcccgggcaggtaccacacaccctccactactcatcaccagacagggaaccctggcttgggcccacagcacagaccctccatcctgggccgattacactaagtgattgctaactcacatgtctctgggatggagcacccaggagacaagcaaagtgttggagcagcaagtcaggtgatgtggagcccagagggctgggacagctatctctctagggtctacttgcccttgtgagacactttatcccagcactttaggaatgctgaggtcataccagccacatctcatgtgcaagattgcccagcagagatcaggtccaagagttcctgttttaaaaaaggggacttgcttaataaaagaagtctagccatgtttgtgtagagcagctgtgctgtgctgggggttccttttgagagagttcttcctctgagacctgatctctggaggctgggcagtcttgcacatganatggggctggtctgatggcagcactnctttagtctgcttgccttccccatggccctagcctngccccacattgctttacangggcacttttttannatgccccacacttattaagcttttcccgngcttagtgggaacttgntnncctnnggcccggttttaanaaacttagnggggaatcccccccc

SEQ ID NO: 5288 - DNA, 983 bp, Homo sapiens
  misc_feature 2, 4, 5, 6, 7, 8, 9, 10, 11, 12, 13, 14, 15, 16, 17, 18,19, 20, 21, 22, 23, 24, 25, 26, 27, 28, 29, 30, 31, 32,33, 34, 35, 36, 37, 39, 40, 41, 42, 43, 44, 46, 48, 49,50, 51, 52, 53, 54, 55, 56, 57, 58, 59, 60, 61, 62, 63,64, 65: n = A,T,C or G
  misc_feature 66, 67, 68, 69, 70, 71, 73, 74, 75, 76, 77, 78, 79, 80, 81,82, 83, 84, 85, 86, 87, 88, 89, 90, 91, 92, 93, 96, 97,105, 116, 119, 120, 121, 122, 125, 127, 128, 142, 585, 594,669, 673, 674, 680, 687, 704, 709, 725, 727, 730, 733: n = A,T,C or G
  misc_feature 736, 748, 750, 754, 755, 757, 774, 779, 780, 781, 795, 796,797, 802, 815, 820, 825, 830, 831, 834, 836, 841, 843, 847,848, 849, 850, 853, 868, 877, 887, 890, 909, 912, 929, 943,953, 981: n = A,T,C or G
cnannnnnnnnnnnnnnnnnnnnnnnnnnnnnnnnnntnnnnnngngnnnnnnnnnnnnnnnnnnnnnnnnannnnnnnnnnnnnnnnnnnnnagnngtgggacncgcgtaatacnctnnnngtntnnctagggggcggggnggcgctccacccggccgaggtacttgtctaaggctctggcggctccgcgaatctcatgtgctgggccatcatggacgagagtggtcttcagcaccgcttgtaaagcagtgttaacaaccatcacaccgccagcagcaatgccctcctcagccaccaaggcaggccacaggtaacgagtgatgccccatcttgaacgcacccaagcctccgcctccataactcaacagcagcagggaaaaaagccatggtctcaattctcttgacaaatctcagaggtattatactcttattccaactacatctccctccccaaaggaaggcgcacaccaaaacaatttttaaaaacttatgtttttctaccgggaaaaccctttaccctcaaaggtggattggcacaaaaacttgaaaatttattatggcttgcttaaaatggtcacatcctnggctcctangcaaggggaaaaccaaaaaccgctcttgaaagaagagggatgggttccttgcttggagggggggaaaaaaaggtnttgnntttttntttaagncaagggggcttcctttnccccncaattaaaaacaaaantnggnttnccncgggaatttttngntacnntntttccccgggggggggngggcnnnttttaaaaaaaaannnggggnggcccccccgcgnggggnggtgnggggnngantnttccncnattnnnnaangcctttaattcgganaaccccggncggacccctncgnaggggggggggcccccggnaancccaaggcttttttggnttcccccttttaanggggaggggntttaaattgggcccccctttggggcgtnat

SEQ ID NO: 5289 - DNA, 692 bp, Homo sapiens
  misc_feature 511, 529, 562, 585, 610, 611, 616, 619, 620, 621, 631, 633,636, 638, 645, 647, 648, 656, 657, 660, 662, 684: n = A,T,C or G
ggagctccaccgcggtggcggccgaggtacagcatgtatggccataaaaccactcatcacactactgaaagaccctctgccccactctatgaacagcacatggtgagccccatggttcatgtctatagaagtccatcctttggtccaaagcatctggaagaggaagaagagaggaatgagaaagaaggaagtgatgcaaaacatctccaaagaagtcttttggaacaggaaaatcattcaccactcacagggtcaaatatgaaatacaaaaccacgaaccaatcaacagaatttttatccttccaagatgccagctcattgtacctcggccgctctagaactagtggatcccccgggctgcaggaattcgatatcaagcttatcgataccgtcgacctcgagggggggcccggtcccagcttttgttccctttagtgagggttaattgcgcgcttggcgtaatcatggtcatagctgtttcctgtgtgaaattgttatccgctcacaattncacacaacatacgagccnggagcataaaagtgtaaagcctggggtgcctantgaggtgagctaactcacaattnatttgcgttgggctcacctggcccnnttttnaannnggggaaaccntntcngnggcccantnnatttaatnnaancngcccacccccggggggaaaagngcggtttt

SEQ ID NO: 5290 - DNA, 707 bp, Homo sapiens
  misc_feature 11, 14, 481, 509, 524, 547, 552, 556, 570, 582, 595, 646,662, 680, 704: n = A,T,C or G
ttagagccttnaancgactactatttggcgaattggagctccaccgcggtggcggccgaggtactgctgcagagaaaaagcatccatgtcaaaaagtaaaaattctcattctaccttgcttccgttcccagaccttgtcttaccttcctgaactttttatattcctggattatcttgtcttccaggaccttgtattctggagttcctcgccgaactcttttaatctctgctcccagctctatgaacctttggcttgcagtcccaacacgggcatgcaggatgcggtattcagcataatctgtctcaaagtcctgctcataggcatgttgctgttctgcactgtggatggccctgtattgcaggaggtagtctggtatatcttcaggacttggggattcagaatcttcttgaactgaggaactgtgttctaatctggggtccatgtcctcatcttcttgctcccaaatcttcttcctcttgntaaatcctgatttggtcaggccttgtangggggcttggcactnaaaggcagagttcttgaaccctnttttntttncaattctacaagtnggctacaggcanctggaacgttttnttggtccaaaccttttcccggcttggcaaaaaggaaaggcaattgccctgnaacaaggttctttttntttggaacaatggggtcntgacttctcacctttcccactggngct

SEQ ID NO: 5291 - DNA, 649 bp, Homo sapiens
  misc_feature 1, 4, 6, 9, 10, 11, 16, 27, 28, 33, 46, 50, 57, 60, 74, 78,81, 91, 604, 632: n = A,T,C or G
ntgntnttnnnttccnacatttggtanntggcnactcgaccgtggnggtngccgccnggnctggtccaatgttntcgngtnttgttctggnggccaccttgggtcccagtccacctggacatcaggctgacgtcatctcaacaatggccgggttgttaattcgccaccttgaagccatctctggaactgtgcaactgggtctccaggcttggtctgtttcaagattagctcctagaacttctaatctcacctggccgctagttattgatggagcccatatgtgaactcagccaattcttactcttttcctctatggcaggctccctgccagtgtttgtcatggcaggtcaagcacacgggatactggatctgagaatctgatctccagggatcttccccttattctgttccccttggaggattcagcagatacctgtagataagaagctgagcactggagaaattaactagtcccagtcttctagttaactactaagtaaaggatccttgattcatacccagctctgagttctgagcattaattactttgttgcattgcatctggtgttgagtgattattctgtccccatcccccgcgtacctnggccgctctagaactagtggatcccccnggctgcaggaattcgat

SEQ ID NO: 5292 - DNA, 642 bp, Homo sapiens
  misc_feature 581, 612, 622: n = A,T,C or G
tttggcgaattggagctccaccgcggtggcggccgtgcatagactagtcaggcttctggggtgactagagcagggctgttgtctcctcaagcttcagccgtgcgtggactggtcagcttccggagtgaccagagcagggctgttgtcatctcactggcaccttggttccatcgtaggatcagctgtgttgcatggtctaggtcctgttggctggcccacttgtcctgggctgctggtttcagctgactggatggatggatccaaggcacaattcctgcaacatttctaggcttccagtgggtcctggcgtcttagctgtggatctcccaatacctgcaggtaacgaggccacagaagctgggcctctaggagcagaagacacagagcagtgaagactacaccagaagctccggctgccgccagagacaaaggccccaccccccgcgtacctcggccgctctagaactagtggatcccccgggctgcaggaattcgatatcaagcttatcgataccgtcgacctcgagggggggcccggtacccagcttttgttccctttagtgagggttaattgcgcgctnggccgtaatcatggtcatagctgtttcctgngtgaaattgntatccgctcacaattccaca

SEQ ID NO: 5293 - DNA, 653 bp, Homo sapiens
  misc_feature 3, 5, 6, 12, 20, 32, 38, 133, 179, 207, 212, 215, 227, 234,239, 241, 243, 244, 245, 246, 250, 251, 253, 255, 258, 261,265, 271, 275, 279, 282, 283, 284, 286, 291, 296, 310, 315,325, 327, 335, 341, 347, 352, 357, 359, 363, 372, 373: n = A,T,C or G
  misc_feature 376, 379, 389, 390, 395, 397, 402, 412, 437, 453, 454, 459,460, 465, 466, 475, 476, 477, 489, 492, 502, 607, 653: n = A,T,C or G
ttngnnaattgnagctccancgtggaggcggncgaggnacgtgccaagcatcctcgtgcgaccgcgagagcccggggagcgggggcttgccggccgctctagaactagtggatcccccgggctgcaggaattngatatcaagcttatcgataccgtcgacctagagggggggcccggtncccagattatgctccctttagtgagggntaatngancgcttggtgaantcatggncatancngnnnnctgnntnanatngtnattngtttanaatntcanacnnnanaccanccggnagcataaatcgtanagccnggggttgccnantgagtganctaacntacatnaatcnagaantnctgnatgccccgnnctnaangaataaaatnncaagntnatctntaccaatganctcgacggggggcccggagaccagntttgcgtccctttagnnagggnnaattnnccgctacgnnntaatcatggctntanctgtttctgnggcgagcggtatcagctcactcaaaggcggtaatacggttatccacagaatcagggggataacgcaggaaaagaacatgtgagcaaaaggccagcaaaaggccangaacccgtaaaaaagggccgcgttgctggcgttttttcatagggcn

SEQ ID NO: 5294 - DNA, 1156 bp, Homo sapiens
  misc_feature 2, 3, 4, 5, 6, 13, 14, 17, 19, 21, 23, 26, 27, 31, 32, 34,36, 38, 40, 42, 43, 45, 47, 49, 50, 55, 58, 63, 70, 71,72, 81, 82, 86, 99, 101, 104, 109, 116, 117, 121, 132, 136,151, 158, 159, 160, 167, 183, 214, 405, 430, 581, 600, 646: n = A,T,C or G
  misc_feature 653, 670, 672, 676, 693, 697, 700, 715, 759, 766, 768, 775,787, 807, 810, 812, 817, 830, 840, 845, 846, 847, 866, 882,883, 884, 888, 890, 892, 895, 906, 911, 921, 930, 931, 939,941, 945, 952, 957, 960, 961, 966, 973, 975, 977, 981: n = A,T,C or G
  misc_feature 983, 991, 1005, 1008, 1011, 1013, 1015, 1020, 1023, 1028,1040, 1043, 1048, 1049, 1051, 1052, 1054, 1059, 1061, 1066,1082, 1085, 1102, 1103, 1113, 1114, 1120, 1129, 1132, 1134,1135, 1137, 1141, 1146: n = A,T,C or G
cnnnnnttctgannaantntncnttnnttannantnantnanntnanannattanacnaattnatttttnnntttttattnntttnttaggggggttcnanccnttacncactctnnggcnatttggagctncggngggggggcggccgangtacccnnnacattangaaaattttctatttnaactttttattgatttttggggggagtaaanaattattttgtgatgcaaataaatatcctttaattggtcgacttgccaaatttagatttgtgtgcatcaggctttcttttttttctttttttagagaagttcaatataagcttttcttttctttgttgctttctttctttattttgagatggagtcttgctctgtcgcccatgctggagtgcaagtgggcnccgatcttcggctcactgcaacctncacctcctgggttcaagcgattctcttgcctcaaaccttccccaagccagtttggggactaccaggcgtgagccaccattgcccgggcttaattttttgtattttttagttagaagaacaggggtttttcacccatgttaagcccagggcnttgggtctcaaaaacttcnctggaccttcaaggccaattctggccccgccctgggggttcttccntaaaaantaccctggcccccgggncnggcncggcttcttagaaaacntaangtngggaatccccccccnggggcttgccaaggaaaatttcctgattattcaaaagcctttantccgaanancccggtncgaaccctttcnaaagggggggggggcccccnggnanccccnaaactttttttgntttccccttncagannngagggggttttaaatttgnccgccgccttggggcnnntaantncnatngggggccaatnaggcnttggtttttncttgggggnnggaaaaantntttnaattccngcctncannaaatntcccccnananaacnanaaccaaanccccggggaagccntanaangntnttaanaanccctngggggggccccntantgggnntnnanccctncnctcanaatttaaatttggggnttngggcttaaatgggcccnncttttttcanngtgtgngaaaaaccntgntnngncccnccctngctataaaag

SEQ ID NO: 5295 - DNA, 1152 bp, Homo sapiens
  misc_feature 4, 5, 6, 7, 10, 12, 14, 15, 17, 18, 19, 20, 22, 25, 26, 27,28, 29, 30, 31, 32, 36, 38, 39, 40, 41, 42, 43, 44, 45,47, 49, 50, 59, 61, 62, 68, 76, 78, 79, 82, 83, 89, 90,103, 104, 105, 347, 353, 361, 401, 409, 415, 433, 446, 448: n = A,T,C or G
  misc_feature 451, 525, 530, 536, 547, 558, 607, 608, 632, 650, 653, 669,685, 689, 703, 704, 721, 727, 729, 733, 738, 743, 751, 756,763, 765, 766, 774, 783, 794, 795, 799, 806, 807, 814, 822,839, 855, 862, 863, 864, 881, 892, 900, 931, 933, 934: n = A,T,C or G
  misc_feature 939, 940, 943, 947, 969, 974, 980, 984, 991, 1003, 1004,1008, 1012, 1013, 1022, 1023, 1025, 1027, 1029, 1039, 1052,1053, 1054, 1069, 1085, 1093, 1099, 1100, 1102, 1110, 1111,1127, 1136, 1137, 1141, 1142, 1144, 1150: n = A,T,C or G
tctnnnnacncnanntnnnntnttnnnnnnnnatantnnnnnnnntntnnttatttatntnnttaggnggttttantnnttnnaaggannttgtcccttcaannnctcctataggcgaattggactccaccgcggtggcggccgcccgggcaggtacagggtcccaaaatgcgctgactcagcttcaccagcccatctcggatctaaaagacacccacaagaaacatgttgtttagcttttcttaagcatctctgtcttagagtttcttgttctgacctttctatcaggtttttaatcttggaaagtgatggtgtctagtggcattcttagatcagaccctctgggntcgtancccagctntgccacacacatgctgcttgactgacaaggagaaagaaangaagggangcctcncttgtccccacttgtgcncattgaaaataantntantacccttaacattaccacatacttctttcacccataattatcaccctcattgccaaaaaaatgtctcttccggncatgnaaatgnaaggatccagnccccaaccttnccagccagggaaaccaagcccaggcggctttgggcccatgccccttccnncaagggaccaagggattggggggnaccatctgggtgcctttnaanggggttgggccccagntggggtttcaattatntatnggccaaattcccgnnaaaacccacccttgganaaaaanangggnaaccnttggntttaatgnggccngggtgtnannattagggnctaactttnttccaacttgnnggantccccannaatcccncttgggcnttcacccacccccaaantttcctttttttaatncaacttnnnggggacccaggggtttncctctgggganttcaaatntttaaatctttccccttaaacacgggggggngnnaattnncgngggnttattcccccaaaaaatacctnttttngataangggncccttanaaaaaaaaacgnngttntaannataaagggnncncncngaaaaggggncctttaaaacccnnntaaacaaaagccccngagggaaagtttgggntttttttnccatgnngntttttggnnccctttggcggggccnttccccccnnttcnncntttttnat

SEQ ID NO: 5296 - DNA, 979 bp, Homo sapiens
  misc_feature 438, 483, 506, 509, 511, 513, 538, 554, 555, 557, 567, 570,575, 581, 582, 591, 592, 618, 623, 632, 636, 639, 644, 661,665, 666, 668, 670, 679, 682, 693, 695, 696, 697, 702, 703,710, 721, 723, 727, 733, 736, 738, 748, 751, 756, 762: n = A,T,C or G
  misc_feature 765, 776, 780, 791, 795, 797, 799, 800, 801, 804, 807, 810,816, 820, 825, 827, 829, 833, 839, 842, 843, 844, 848, 849,852, 859, 863, 866, 869, 871, 872, 875, 879, 880, 883, 885,887, 888, 889, 893, 897, 898, 900, 905, 907, 910, 911: n = A,T,C or G
  misc_feature 913, 915, 920, 921, 922, 923, 932, 933, 936, 938, 940, 959,963, 965, 970, 974, 979: n = A,T,C or G
ggcgaattggagctccaccgcggtggcggccgcccgggcaggtactgagtggcttcaatgataaaaaaaaaaaaaaaaaatgactgcatttttaaggcctagcgcttcaaaggctatattgtcttacgtgtctgactttggcatctgccctttctgacttttgaccctgcagccttcagcatgccggaagtgaatgtggactataatgccagctcagagaccttgcggtgtgaggctccccgatggttcccccagcccacagtggtctgggcatcccaagttgaccagggagccaacttctcggaagtctccaataccagctttgagctgaactctgagaatgtgaccatgaaggtttgtgtctgtgctctacaatgttaccgatcaacaacaccatactcctgtaatgaatttgaaaaaatgaccattggccaaaangcaacaagggggggattattcaaaaggtggacaagggtgggggtntccttggcaatggccttttttgnaantngnaatttaacttggggggaaaaggagnttaaaaattctttaanntntaaaaatttnaancttcntttaannttgaatttnntttccccaagggcccaaaaaaaattnttttngaagatccntttntcnccttnaagaaaatttggaatcncctnnantntcccgattntanaattgggattntnnntttannaaaaaangcccaaacccncnaaanaaatantgntntggggattantanggtgnaaaaanaanaggaaaattangggnatttaatcttngatnangnnnatnatnaanataacngggntggtnangnaggnaacaantgnnnatannganttctatnatgngcnttnanngtnaacnnatntngnnntatnactnntntaatntnaanngngnggaannnngatactatnntcntngnctatttgatgtttttgatnaagngnacttnatgncaccn

SEQ ID NO: 5297 - DNA, 935 bp, Homo sapiens
  misc_feature 301, 481, 525, 535, 556, 560, 582, 592, 594, 614, 616, 641,643, 646, 650, 654, 670, 692, 695, 707, 710, 712, 721, 725,734, 735, 736, 737, 739, 740, 742, 747, 757, 769, 771, 773,774, 778, 781, 782, 790, 793, 799, 801, 803, 804, 819: n = A,T,C or G
  misc_feature 826, 828, 839, 843, 845, 847, 863, 864, 876, 878, 881, 883,888, 889, 899, 900, 906, 913, 914, 917, 931, 932: n = A,T,C or G
gaattggagctccaccgcggtggcggccgaggtacgcggggagagaaaaagagagtaagggaggagggaaggatagagaagggagtgagttagcaaaatgccacactgttagttgcaaactggcacaaaggtgaatgcggttcatgaggctcgcttgattaagaagagctgaaacaggagcaaagagcaaaaggcaacctgcagcgaaagcaaggactcagggaaccggcagacacaagcagcctctgcaggtgtgcgagcaggattgcttctgcaacaaaagcctccacccagccacatnttgtgaaaagaatggccacttcttggggcacagtctttttcatgctggtggtatcctgtgtttgcagccgctgtctcccacaggaaccagcagacttggtttgagggtatcttcctgtcttccatgtgccccatcaatgtcagcgccagcaccttgtatgggaattatgttttgatgcanggagcactggaactccgaattcatgttttacaccttttgtgcanaaaatgccanggacagctttccaatttcttnaaanggggaaagttttttgaattttntggaagcccngnacttttcttgctttttgttnanaattaaaaccctaaagcatgggttncntgntaancccntttcaaaggggctttnttataagggtgggccaaataanttnatatccccccanagntntcacttggnaaanaaagacccnnnntnngnccctngaaagggcanccagtatgaacntncnntttnttnncaagaacnacnaaaatncncnngcttttgcttttttntagtgananggagaattttnaggnantncccttttccttggtanntgcccccgggcngnccntntttannaaatatgtgnnatcccnccgggcnntgnagaatttatatatnnatc

SEQ ID NO: 5298 - DNA, 874 bp, Homo sapiens
  misc_feature 286, 551, 572, 606, 615, 625, 645, 660, 661, 676, 681, 696,704, 707, 708, 709, 717, 726, 727, 730, 735, 738, 739, 749,755, 761, 766, 771, 781, 782, 783, 788, 789, 790, 802, 804,805, 819, 837, 838, 852, 853, 854, 855, 856, 857, 858: n = A,T,C or G
  misc_feature 863, 870, 872, 873: n = A,T,C or G
ggagctccaccgcggtggcggccgcccgggcaggtactgacaggatataaacctaatccaaccatagaagttagaccctatgattgaggcttgggagagttaaataacattgggtttttgaagctctaaacttcaaaatctctgacccatgttaagaaagcaaatttcttgaatgtccttgattagctagcaatatgtggattaatcacttaggaagaattcgttaacggtgacctggccatttgttttttgaaagtgatctttgctgtgtggatgcagcactgtnatggtgtcccagttgccattctaacccaaattaggtctttacctcagtcagttagctagctggccatgtcaggattggtgaagttcaaaaattagtcttcataatgttaaaagccacaattcatcatgaacataagacagctattgatacctacctatgtatcaagttacacatctgcaatttttttttttttgatggagtcttgctctgttgcccaggctggagtgcaatggtgcaatctctgctcccccgcaaactctgcctncccagattcaaagcaattttnctggcctccaccttccaagttactggaacctacnaggcccatngtcaccaccncctgggctaaattttttggnaatttttaagtgggnnaccgggggttttcanccggngtttaaccaccaaangggtctcnagnnntccctganccttggggnnccnccccnccnnggcccttttnaaaaanggcttnggggnctaanaggggggtgnnnccccnnngccccacccccntnnaaatttttttaaanccaaccttttgggaaatnnaaaaaggggaaaannnnnnnaaggngcccccncnnt

SEQ ID NO: 5299 - DNA, 925 bp, Homo sapiens
  misc_feature 529, 540, 575, 584, 590, 612, 628, 639, 641, 647, 648, 655,669, 671, 683, 692, 701, 703, 705, 707, 721, 727, 729, 737,745, 750, 752, 753, 759, 760, 761, 763, 766, 770, 775, 778,802, 805, 812, 818, 821, 825, 826, 828, 836, 838, 840: n = A,T,C or G
  misc_feature 841, 842, 845, 855, 856, 859, 862, 866, 888, 890, 903, 904,906, 907, 908, 909, 914, 915, 916, 918, 920: n = A,T,C or G
gaattggagctccaccgcggtggcggccgaggtacgcggggagagaaaaagagagtaagtggaggagggaaggatagagaagggagtgagttagcaaaatgccacactgttagttgcaaactggcacaaaggtgaatgcggttcatgaggctcgcttgattaagaagagctgaaacaggagcaaagagcaaaaggcaacctgcagcgaaagcaaggactcagggaaccggcagacacaagcagcctctgcaggtgtgcgagcaggattgcttctgcaacaaaagcctccacccagccacatcttgtgaaaagaatggccacttcttggggcacagtctttttcatgctggtggtatcctgtgtttgcagcgctgtctcccacaggaaccagcagacttggtttgagggtatcttcctgtcttccatgtgccccatcaatgtcagcgccagcaccttgtatggaattatgtttgatgcagggagcactggaactcgaattcatgtttacacctttgtgcagaaaatgccnggacagctttncaaattcttagaaagggggaaggttttttgaattnttgtgaagnccaggnactttttcttgcttttggtagnaatcaaccctaaagcnaggggtgcttnangacccnntttcaanggggcttttttaananggtggccaaaanactttaaantccccccgnantncnctgggaaaaaaaanaacccnantgggtccnttaagggnaaacnanntggggnnntnccntttnttttnccnaaaaccaaaaacccaaggggtttnttnttttttngggggnaanaggnnanttttttgngnannntcntttttttttnnatnttntgtnggggggggggttttttaaaaanangggggaccccccnncnnnngaaannncncncccct

SEQ ID NO: 5300 - DNA, 1232 bp, Homo sapiens
  misc_feature 3, 4, 8, 9, 12, 13, 16, 17, 22, 23, 25, 26, 27, 30, 37, 39,42, 45, 50, 51, 67, 70, 78, 81, 82, 84, 90, 94, 123, 125,148, 162, 169, 173, 394, 409, 453, 469, 473, 511, 518, 523,529, 537, 584, 591, 593, 604, 614, 616, 623, 625, 628: n = A,T,C or G
  misc_feature 652, 653, 668, 697, 714, 717, 744, 749, 752, 764, 767, 772,781, 787, 795, 799, 811, 818, 825, 851, 852, 858, 863, 865,867, 874, 875, 880, 883, 886, 888, 890, 891, 893, 900, 909,920, 927, 928, 930, 946, 947, 968, 974, 976, 977, 979: n = A,T,C or G
  misc_feature 990, 1001, 1006, 1010, 1012, 1014, 1015, 1017, 1026, 1029,1035, 1044, 1046, 1047, 1058, 1064, 1065, 1070, 1077, 1078,1079, 1080, 1091, 1094, 1095, 1096, 1101, 1105, 1110, 1114,1115, 1120, 1125, 1128, 1135, 1138, 1139, 1140, 1144: n = A,T,C or G
  misc_feature 1146, 1147, 1148, 1151, 1153, 1157, 1159, 1174, 1198, 1200,1205, 1210, 1213, 1224, 1228, 1230, 1232: n = A,T,C or G
tcnnatannggnnagnnttttnngnnnacnttgcgtntnttngtnttatnnatttgcattttcattnttntattctanttnntntaaagngccnatctgcttctctcactatagggcgaattncnactccaccgcggtcgcccccgcnggtccccggggcantcagatncgangacatgttgacgtcgtccgagagtcttaaaatcctgctgtggccggattccagactcgtgggggaaaggctggatcttaatgcaagtcatgaacttgaatgtgccgatgaggcctggcattcctgtccagagacagagtaaggaagtgttggccacacccttagaaaacagaagggacatggaggcagaaggaggagaacccaaataaatgagaagcaagnagcctgagaatgctngcagtaaacctggtcaaagaatgaggatgattgggttttgccantaaaatacacacattntgtncactaggaacttcctttcagtttgtttgaaaaggccanaaaaaangtacnttttanaaagggangttgaccaattttttcttagggggagggtaaaatttggtttgtgggnattcctntngggaaattggnaaataccccncntaccccncntcnggaaaggcttaatacctttccggnngaaaccattattatnggaggaaggggaaaattggaaaggccttnaaaaaaaaaaggggttntangaaagtggaaaaagaaaaaaaatggtnaaacngtntttggactaaanccntttgnaaaaagaanttgaangggggatncctngggggcgggttntttaaanaacctangttgggaatcccccccggggcttggnngggaanttttngntnttcaaannctttnttntgntnanncncggtctnacccttganggggggggggncccccgnnancccaaactttttgggnncccctttaaatgggaggggtnataaantnngnccccctttggngcgtaaaacantgggncaanancnngngattacccntgntgtganaaattggtntnnccgttcccaanattccnncaacnacacatnnnnttagacccggnggnnnattanaagnggtanaaanncccgnggggnggnccttatntgnnngggncnnnccncncacntnaaatgggtggtgggncttaaatgatctcatcgttttatntncgggngaaanaanatttgtgtccngccncnan

SEQ ID NO: 5301 - DNA, 1173 bp, Homo sapiens
  misc_feature 2, 3, 5, 7, 12, 14, 20, 26, 28, 32, 33, 38, 44, 45, 48, 55,56, 59, 60, 63, 64, 65, 71, 73, 75, 82, 86, 92, 97, 101,120, 121, 214, 428, 546, 554, 579, 615, 620, 624, 625, 647,654, 655, 679, 684, 687, 695, 697, 714, 720, 726, 727: n = A,T,C or G
  misc_feature 731, 738, 777, 798, 799, 806, 838, 847, 850, 856, 867, 868,872, 879, 886, 920, 927, 936, 942, 943, 950, 952, 970, 971,972, 974, 981, 983, 995, 1012, 1020, 1024, 1025, 1027, 1028,1032, 1036, 1038, 1040, 1051, 1053, 1061, 1064, 1065: n = A,T,C or G
  misc_feature 1069, 1077, 1083, 1087, 1088, 1089, 1092, 1093, 1099, 1100,1104, 1108, 1110, 1113, 1116, 1117, 1118, 1123, 1124, 1126,1132, 1135, 1138, 1144, 1146, 1153, 1155, 1159, 1162, 1163,1167, 1168: n = A,T,C or G
cnnananatatntntttatntatatntnaatnntgtanataatnngtnccactcnntanntannnatatgngntntatcacntagnagaggngttgntatnctttaatccactcactatnnggcgaattggagctccaccgcggtggcggccgcccgggcaggtacagatgtccagtagacctactggatatgcaggcctgcagctcagggganagctgggttaagaaccgtcaaggcagtaatcatctgcatttagatggcgagtgaagccatgacaggggctgaaatggcccagcaagaataaatcaaaccatgagaaacacatacatttaagaataaggagatgtggtcaggcgcggtggctcacacctgtaatcccagcactttggggaggcccgaggccgggtggatcactttgaggtcagtnagtttgaagaccaagcctgggcaacctaggtggaaaatccccgttctctgcttaaaaaatacaggaactttagcttggggttgtggtggtgccgtgccctataagtccccaagcctgnattggggnaggcttgagggcaccaaagaaatcncttggaacccccgggtagggtgggaaagccttgcanttgangccnnaggattcacacccacccggtancttccannccttggggcaaccaggagaaaacnacccnttntctttaananaaaaattaattaattanggggangaatgnntcantgggctncggggggggagggggggaaaatgggggagccgcttggtnggtttggaaaatgggtaatannttttcangttttgggggaacttgagaaaccaaaattttnttgggaaanaangaaatngggtggggtgnnatgnggcttcnatcacanaacaaattatgttgaagggggccactttttattncccccantgtgaaaanataccnngatgtcncnttattaaaaaaaaaaaannncncgatatncntggtgtaccatntgggacccgttatttanaaaataanatgnnanntccncctngngnttggagagggnanttttcgtnttnnaaancttttttncgattntgannnttnncccaanngggngggntncgntannnaaaannancatganatnccntgtaantncgggagnanaaancannagcnntgagg

SEQ ID NO: 5302 - DNA, 822 bp, Homo sapiens
  misc_feature 324, 527, 555, 578, 641, 678, 705, 707, 718, 723, 727, 728,740, 747, 754, 761, 766, 774, 775, 777, 782, 784, 795, 800,803, 804, 810, 814: n = A,T,C or G
ggagctccaccgcggtggcggctggtctcgaactcctgacctcaggtgatctacccacctcagcttcccaaagtgctgggattacatgcctgagccaccaggccccaccgttagtatttcatagtcttctaccacctacctcgtatcagtttcagatttatgtttcttgtcaatgatcacaaaatcatgaagagatcaataggttcatcttttcttttaatggccaaaatggagcccactacagcctgcaataggagaaggatacccattaagtaaattcaatttgcagcagcagaaacatgttgcttttcagaaggctaaagnagacagtttcttcattttacaatctctacactgatataagtctttttctataagcagatagaatacattatatatgaacagctgttacatttctgaaatctcaatctgtaattcccaaacattaacattccttaacattaatattcctcctggtgtttcattaaaaatactgataactggacgctttctaataacaaaatctncactttataaaccttttaatgaaagctncaattttacttttaaaacccggntaggggatactattattttgaatttcctcatttttactttttagagacccagattaggtatcncttgcccccaaaaatgaagctacataggccacctttnggattgaaaattggggaattatttttncncggtttcttcntattnagannaatttttttatncccgggnggacctntgggccncgttntaaaaaannanggggnantccccccgggntgggnggnnaatttngatntttaaacc

SEQ ID NO: 5303 - DNA, 836 bp, Homo sapiens
  misc_feature 592, 606, 632, 635, 642, 644, 649, 663, 670, 676, 682, 685,688, 690, 692, 706, 710, 730, 734, 741, 742, 743, 747, 753,754, 756, 764, 787, 790, 793, 800, 802, 808, 809, 811, 818,833: n = A,T,C or G
ggcgaattggagctccaccgcggtggcggccgaggtactctgcgttgttaccactgcttcccgggactctgcgttgttaccactgcttcccgggactctgcgttgttaccactgcttcccgggactctgcgttgttaccactgcttcccgggactctgcgttgttaccactgcttcccgggactctgcgttgttaccactgcttcccgggactctgcgttgttaccactgcttcccgggactctgcgttgttaccactgcttactattaatgagaacgaaatacacattaggaaaatggagccatttcaatctagtggtttgggcaagatggggaagagaaggggaaacattctagtttctggattacattattatgcccctcctgaaaaggtggttgtcatttgcatttatttaaagcaggtaatatgcaggaatgtaactgaggattatcttcaggcaatcagcaagatatcctcctcatggtccctttagctctcaaaagcaatgaaatcctcctgttctcatttttactgctgtggttgtgctgctgaacaatactatctttcttaaattccatgccccaaattcagncaataacttttttnggattggaattttaacaactacctgnaanttggatncntgatngggacaaaaatatnattgganttccanttttcnccnccngnantggtggattggccncccncctttttttatatttggcgnggtnggggggnnntttnaaaacnnanaaaccttnttttttaaattattgttggcgcnaancgnccccttngngtttannangttgggnttgggttttaatttntaa

SEQ ID NO: 5304 - DNA, 1142 bp, Homo sapiens
  misc_feature 3, 4, 7, 9, 10, 11, 12, 13, 15, 22, 25, 26, 27, 30, 33, 35,37, 41, 45, 48, 49, 50, 52, 55, 56, 58, 60, 61, 65, 66,74, 75, 77, 80, 86, 87, 88, 89, 90, 91, 98, 100, 101, 102,103, 105, 106, 108, 109, 110, 111, 112, 115, 116, 118, 122: n = A,T,C or G
  misc_feature 127, 161, 172, 604, 608, 641, 650, 697, 715, 764, 770, 773,804, 807, 814, 822, 842, 843, 847, 848, 851, 860, 861, 862,876, 884, 901, 904, 907, 909, 911, 919, 920, 926, 937, 950,953, 964, 970, 973, 977, 988, 998, 999, 1000, 1005: n = A,T,C or G
  misc_feature 1021, 1026, 1037, 1040, 1047, 1055, 1058, 1061, 1062, 1073,1075, 1080, 1082, 1083, 1092, 1093, 1102, 1106, 1110, 1111,1112, 1125, 1126, 1129, 1130, 1134, 1138: n = A,T,C or G
ttnnttnannnnntnatttgtntcnnnaangtntntnacanttangtnnntnttnntntnnttanntcccgttnnanttntttacnnnnnnagtaagngnnnntnngnnnnnacnncnatgnctatntggcgaattggagctccaccgcggtggcggccgnccgggcaggtnctcggggaacgacgagtttcagaacgatggagagctcccgcgtgaggctactgcccctcctgggcgccgccctgctgctgatgctacctctgttgggtacctcggccgctctagaactagtggatcccccgggctgcaggaattcgatatcaagcttatcgataccgtcagacctcgagggggggcccggtacccagcttttgttcccttttagtgagggttaattgcgccgcttggcgtaaatcatggtcatagctgtttccctgtgttgaaattgttatccgctcaccaattccacaccaacatacgaagcccgggggagccattaaaagtgttaatagcctgggggtgccctaatggagtggaagctaactcacattaaattgcgtttgcgctcacttgcccgcttttccaagtgcgggggaaaacctngtcngtgcccagcctgcaatttaaatggaaatcgggnccaacagcngccggggggaagaagggcgggttttgccggtaatttggggccgcttntttcccgcctttcctttngcttcaacttggaacttcgcctggccgcttccgggtccgcttccgggcnttggcnagncgaaagccgggttatttcaaagctttcaacnttnaaaaagnggccgggntaaattaccggggtttattnnccannaanaaaaattcnnnggggggaattaaanccgcccangggaaaaaaagaaaccnttngtngntnccaaaaannggcccnagcaaaaaaanggccctgggaaanccngtaaaaaaaanggcccngcntttngccttggcccntttttttccnnntaggnctttccggcccccccntgggncgaggcctttnacnaaaaaanttcgaacntcntcnnaatgtcaaaangnggggngnnaaaaccccnnccgggggcntttnaaannngcccccagagccnnttnncccngcgngaaa

SEQ ID NO: 5305 - DNA, 832 bp, Homo sapiens
  misc_feature 222, 270, 483, 514, 516, 592, 615, 670, 679, 681, 687, 688,696, 697, 701, 702, 703, 706, 707, 708, 712, 713, 714, 745,764, 771, 773, 775, 789, 820, 821, 828: n = A,T,C or G
gcgaattggagctccaccgcggtggcggccgcccgggcaggtactaaaaaaacaaaatattagccgggtgtggtggcgcatgcctttaatctcagctattctggaggcttaggcgggagaatcacttgaacccaggaggtggaggttgcagtgagccagagatcatgacattgggcaacaagagcaaaactctgtctcaaagaaaaaaaaaaaaaaaaaaancagggacgtgggatggcgagtgatggggaagctattggagtccctcanagaagagatgacatttgagtcaacacctggagaagttagggagtgaatcacatggtcttccgggcagcaggaacaagcagtgcaaaggccctgaggcaggggtgtgtctgacgtgtttaaggagcattcaggccagactcactggttcacgcctgtaatcccagcactttgggaggccgaggtgggcagatcacctgaggtcaggagtttaanaccaacctggccaacatggtgaaaccccgtntntactaaaatacaaaaattaaccgggcatggtagcatgcccctgtaatcacagctacttaggaggctgaggcagganaattttttgaacctgggaggcanaggttgccagtgagcccagtttgtgccacttgcgctccagccttgggctacagancaaagactntnttgacnnaaaaattnnaatnnnaannntttnnnaaaaagttcctcggcccgttttaaaactaanggatccccccggcctgcangaattcnanantaaaccttttccgnttccgtccacccttgggggggggggcccggnnccccacntttt

SEQ ID NO: 5306 - DNA, 870 bp, Homo sapiens
  misc_feature 2, 3, 8, 11, 16, 36, 84, 521, 556, 563, 572, 576, 578, 583,584, 586, 594, 598, 616, 618, 619, 621, 624, 625, 629, 630,636, 638, 642, 648, 653, 656, 659, 667, 668, 669, 670, 674,677, 679, 680, 686, 687, 688, 693, 696, 697, 701, 702: n = A,T,C or G
  misc_feature 703, 704, 705, 706, 708, 710, 711, 712, 716, 718, 719, 721,723, 727, 728, 729, 730, 731, 732, 733, 736, 745, 752, 755,763, 766, 767, 768, 769, 770, 772, 773, 774, 775, 779, 780,781, 782, 784, 791, 792, 793, 796, 800, 802, 803, 805: n = A,T,C or G
  misc_feature 807, 820, 821, 822, 823, 824, 825, 827, 828, 829, 830, 832,833, 834, 835, 836, 837, 838, 839, 840, 841, 842, 843, 844,851, 852, 855, 862, 869: n = A,T,C or G
gnnaagtnttncttcnttcgactcctatttggtttnttggagctccccgcggtggcggccgaggtacatttttaatttataccngttttttaaattcctgtttttccttttgtagctgtatgcaggagctattcttgaagtttgtggatgaaaattgggaaggttccctcaagtccaaggtatataaaatttactccagtaaactgttcagtcatttaaaatcaacattttatgtgaatcgttttcactatatattcccaggaataagaatttttaggattatactttcttaacaatatatgcttttttttcaatttgttttcatggaagtggtttgttaaagtaattggtgaatgctatgttactttaaaaaaaacacaatatatgaaatttagaggccaggcgtggtgggtcacactcagctcatgcctgtaatcccagcactttgggaggccaaggtgggtggatctcgaactcctgacatcaggtgatccgcctgccttggcctcccaatgctgggnttacaggcatgagccaccacacccaccactgcttnatattcnttatcttcnacancnaggtnncntctgggantttnatggataccctacattananntntanncttnnaaatancnttgncatttnttaanggnccntttttttnnnnaaanaancnntttttnnntgganaannaatnnnnnnanannnatgntnnancntttnnnnnnngangagaaaggnaaaaaancgngggggggnttnnnnntnnnnattnnnnanaaccccnnncangggngnngntnaaaaaaaaaaaannnnnnannnntnnnnnnnnnnnnnccccccnnttncttttanaaaaaanc

SEQ ID NO: 5307 - DNA, 1126 bp, Homo sapiens
  misc_feature 4, 6, 14, 20, 26, 27, 28, 31, 32, 37, 40, 45, 46, 52, 53,57, 58, 62, 64, 66, 70, 72, 75, 76, 82, 83, 84, 86, 87,89, 91, 92, 93, 96, 101, 102, 105, 106, 114, 116, 121, 126,127, 137, 179, 231, 456, 459, 518, 519, 529, 572, 573, 600: n = A,T,C or G
  misc_feature 607, 665, 693, 754, 755, 764, 769, 833, 837, 860, 865, 886,915, 923, 925, 936, 944, 946, 949, 954, 964, 969, 970, 974,976, 980, 982, 991, 996, 998, 1004, 1008, 1013, 1016, 1018,1030, 1031, 1041, 1043, 1044, 1046, 1049, 1054, 1061: n = A,T,C or G
  misc_feature 1062, 1068, 1076, 1078, 1090, 1091, 1101, 1106, 1109, 1115,1120, 1121, 1122, 1125: n = A,T,C or G
cccntntacttacntatganataatnnnatnnttaanacngtaannatttannaaannatantnanaatntnatnncaattnnntnntngnnnagntagtnntgnnttttactncnattcnctatnnggcgtattgnagctccaccgcggtggcggccgaggtacatttgcacaatgtngaaaacaaagatgacacgagcctgttcacttctccacatgcctgtccatctncccctgcccctatcaacatgtcttgaaggtgtggccactgaccgtttgcatcacctttctgtctacgtagcacctgtcagtgacccctgaccccagagcacctgcccttagccttgagaagcctgtattttccctgctgggctcacctctgggaggtagcattcccatttgtctcttcactgggatggcactctcacaaggttaaaaagtggggccacacccaancanttagccaaaagaaccacttgtaggggaaaggaacaaggattgcctggagtttagttttnntggattttcnttttgctttcaccatgtttttggaagaaatggggaatgaaggnntgcaatggtgccttagggtttggagtnttggggnatggggataaggggggtccctttacttctttaagaagggcagccaggggggttttgtnaaggggttaaccaagaagaattcaagtngtgggggcccccaaggggaaagggggggaagccttgaaaaacaaccagactggggtctcanngaaagggangggtngggaaggggccaaaaaaggggaaaaaggacgggggggaatggggtcccattttttcaatccagnaaangccaaaaagggtttttccaaggntcccnatttaaattttttttaaccgntaaatttggcaaaaattcgggtttttatnggaaaagngnctttgaaccantggcccgntnttnttttnaaaaaaagcnattgnnagtntnccantngattaaatnttaananaccccncatncctantantntttttatttctnnggaaccattntnntnggngggantcccccnnccccancccggggngnggaaaataattnnttcacgcccncatcnaanaaatanatttnnnaanc

SEQ ID NO: 5308 - DNA, 507 bp, Homo sapiens
  misc_feature 500: n = A,T,C or G
actactatagggcgaattggagctccaccgcggtggcggccgaggtacaccgccgagtcccatttctcacctttcacacccccatcctcacacaagtaacccgggtgtctgacacgttacttaggtttttaatccgcgctgagacaatctcacagagaccctacttcacctctcagtaacttgcatttctcagctctgctgtgtgtgtgtgtatgtgtgtgtgtgtgcgcgcgcgcgcgccggcgtgtgccgtgttgggggagtgtgatgtgggggaatcagttaatttggtgattgcaatgaaaattcgacaccgctagatgtattttccctgccaatctgtgtgtgctggccccggccgctctagaactaagtggatcccccgggctgcaggaattcgatatcaagcttatcgataccgtcgacctcgagggggggcccggtacccagcttttgttccctttagtgagggttaattgcgcgcttggcgtaatcatggncatagct

SEQ ID NO: 5309 - DNA, 1141 bp, Homo sapiens
  misc_feature 3, 4, 5, 8, 11, 13, 14, 15, 18, 22, 24, 26, 27, 28, 29, 31,32, 33, 34, 35, 36, 38, 40, 41, 42, 44, 45, 47, 48, 49,50, 51, 53, 59, 63, 64, 66, 69, 72, 74, 76, 79, 81, 82,85, 86, 87, 89, 90, 91, 92, 93, 96, 97, 100, 103, 106, 107: n = A,T,C or G
  misc_feature 108, 110, 115, 116, 132, 136, 430, 515, 657, 675, 798, 814,816, 820, 822, 828, 831, 838, 844, 846, 862, 866, 875, 881,890, 903, 908, 909, 918, 936, 940, 948, 965, 967, 971, 977,980, 987, 997, 1001, 1002, 1005, 1006, 1010, 1011: n = A,T,C or G
  misc_feature 1012, 1023, 1025, 1027, 1031, 1035, 1036, 1038, 1042, 1057,1061, 1068, 1073, 1074, 1075, 1078, 1082, 1084, 1087, 1091,1095, 1102, 1104, 1108, 1118, 1123, 1126, 1127, 1130, 1131,1134, 1135, 1138, 1140, 1141: n = A,T,C or G
ctnnnatnatngnnnttntttntntnnnnannnnnnantnnntnngnnnnntnttcatntatnnanagntanantntantnnttnnnannnnnagnnagnttngtnnntncattnnaaacgcctttctattnggcnaattggagctccaccgcggtggcggcccgaggtacacgggaggctcgtgctaagctagcgccgtcgtcgtctcccttcagtcgccatcatgattatctaccgggacctcatcagccacgatgagatgttctccgacatctacaagatccgggaggtcgcggacgggttgtgcctggaggtggaggggaagatggtcagtaggacagaaggtaacattgatgactcgctcattggtggaaatgcctccgctgaaggccccgaggggccgaaggtacctgcccgggccggcccgcntctagaaactagtgggatccccccggggcctggcaagggaatttccgatattcaaagcttaatccgatacccgtccgacccttcnagggggggggggcccccggtacccaagcctttttgtttccccttttagttgaaggggttaattggcgccgctttggcgtaatcaattgggtccataagcttgtttcctgtggtgaaaattgtttatcccgctcaacaaattncaccacaaacattaccgnagccccgggggaagcattaaaaggtgtaaagccctggggggtgcccttaatggaagttggagcctaaactcaacatttaaatttggcgttttggcgcttcaacttgcccccgctttttccaanttccgggggaaaaccntngtcngntgcccnaancttgcantttaantngaaaattcgggcccanaccncctcccggngggganaaagggccnggatttttcggcntttannttgggggcncgcctttttttccggccntttncttctcgntttcaccttgaactttngntttngcgccntangggttcngtttctgagnttgnnagnngaannnggtttatcaancntntaantctnnanaagngcggggtttaatacncgtntttattnacaannnacnttcngngtntatngacngttgaantnagantatgaatatncgtanacnnatnnagnntgncnn

SEQ ID NO: 5310 - DNA, 663 bp, Homo sapiens
  misc_feature 12, 15, 16, 17, 19, 21, 23, 26, 28, 29, 30, 35, 36, 38, 44,46, 51, 53, 55, 59, 60, 64, 67, 68, 70, 73, 74, 75, 77,79, 81, 83, 85, 89, 92, 94, 95, 100, 102, 103, 104, 105,109, 111, 119, 124, 126, 128, 130, 199, 218, 287, 301, 335: n = A,T,C or G
  misc_feature 456, 468, 507, 542, 544, 569, 614, 623, 633, 655, 657, 663: n = A,T,C or G
ccccaacacggnacnnnanananggnannnatttnncnataaantnattantnanatanncatnaannantcnnnanantnantnaagnaanannaattnannnnattntngtcttctngttantngnanctccaccgcggtggcggccgaggtaccagccagtgctggaaggagctcaccctgggaggtctcgtcagnctctgtccttcatggctgncccttgtgtcccatgtggagagcccttcctccctttccacatggtaagcactgagcccaatttcttctnaccccacagatggnccctcagagcagagatgtctaatgaaaggttcangattcagatcactaactttccatcttccactttttccagtggtggccatgttcccccgtttgccttcacaaaaaccttggggaataatacaagccattatggactctgatttacagtttangaagatgagcanaaggtggggtgtggagttgcccagtgcatgttgcttagnttgtttgaaagaaaactagggatttgttcctcaangnctttggggcctcctgggcccattangacccagtggggcttctggtggtttccttgaattggggggtaatntgggggggnagggattttnttaaccaaaatggccaggggtntnccctgn

SEQ ID NO: 5311 - DNA, 479 bp, Homo sapiens
  misc_feature 392, 445, 478, 479: n = A,T,C or G
ggagctccaccgcggtggcggccgaggtacgcgggaaactatgttaaaaaagtaaccaaagagtcattcctggtatttgattatgacacttctgaagctagaagggacctcagaccacctgctccaatccctgctgcctaaggttttgggggctgagggctggaaacccaggggctgcatctcccaggctcttggcctcataatcgccttctgtgagactgagggcaattaagatatgaatgacatgaactcgcttctctccatatcaacataaaccagaagaggcatacatctgtgggatagtcaatacataacatcctatctttatatggccatatgagaagataacttcagtgtccctatgatggtaagttcttgaatgtgagggcaanatggctgtgatagccatgactccccgctttgcctggttggacagaaccccctnccccaaatgctcacagtcccccccttgagctgnn

SEQ ID NO: 5312 - DNA, 614 bp, Homo sapiens
  misc_feature 1, 3, 6, 7, 8, 11, 13, 14, 15, 17, 18, 22, 30, 36, 37, 38,40, 41, 42, 48, 49, 50, 51, 55, 56, 66, 74, 78, 82, 85,86, 87, 96, 100, 101, 105, 404, 438, 546, 555, 600: n = A,T,C or G
ncnacnnnttnannngnnaagntaaaaaantaaatnnnannntaacannnntaannaaaaaatccnaaccaagntggntgtngannnaaaccattntatnnggcnaattgggctccaccgcggtggcggccgaggtaccggttgcttgtggaacaaaactcctcaatttttaaaactttttttaaaaaataaacatacaatcataggtattcatttactttaaaaattctaaagatgaagaaaattattgtttatatatttaagtccttgtataaattacaaaactcaagtttatgttacagagtcccttccccataggaagcataaagcacttttgtggtaccgccgggagtcagaaaggagactctgcctccctcctcctcactgaggtgcctcatcctacncgggtgtccctttgccaccctgcctggggacatncgctgggaacctgcacccatgccagggatcaatggggaccaggcgaagaggggcacccctcccttcctcccccatgtggataaaatgggtcccagggctgattcaaangaacctctngactgcaagaactgcccgctctcagtgggacagggccatcttgtntatcctgagacctg

SEQ ID NO: 5313 - DNA, 494 bp, Homo sapiens
gaattggagctccaccgcggtggcggccgcccgggcaggtacctctaagggcccaagtcagcagaactgtttcccaactgccggtgggctggccttgcagggaaggctgtcaaaagatggccaagtgcaggcacaagccttacctccctgagagcctgctcccaccttcctctctggccttcagcttttcttaagtgaagctacccttgacctttgttgtaattaaaaccaagagtggttctagaatgggttctcaggatgtcctgtgaaggctttgacttttggccctttacagttctagttttgcagaaatgaaaatgctctggtgactacagcaggtcaattattggagccaagagtagtattgtaaagttggagggtcttagaaggtcaggaaagaaatgagtggtccatggaagtgtcccttaaatgataacagccaaaagcacagccacctatggaatattcccttgtttttctggactggtagaaag

SEQ ID NO: 5314 - DNA, 501 bp, Homo sapiens
  misc_feature 2: n = A,T,C or G
tngggcgaattggagctccccgcggtggcggccgaggtacgtttggtgcagtgccacacaggaggccaccaacagagcccagagtagtaactaggttgcttcactcttaacctctcaagtgatgacaccaaggtgagaacttctttcactaaaaggcttaatcttttaaataactgaaccagaaagtcgtttctaacaagaatacagataaacattacaaagaacaaagaaaagatatgttcaaaatctgtcaggttccaacaagggttactttttccctgaagagagaagatgaaccattgcctagaagtaatgtgtagctgactgtcccgtggttctatgtctgagtaacacagtctcatctctcatgtgtatgtgtgcatatatacatgtatatgactatagtggtatcagcaatcatgtatattttcaagcttaaatatgatgaaattgttaaaggactatagtcctaattaaaactaatacagaatatacttaatc

SEQ ID NO: 5315 - DNA, 822 bp, Homo sapiens
  misc_feature 73, 275, 279, 358, 380, 417, 453, 477, 515, 569, 577, 604,605, 629, 648, 664, 666, 691, 702, 707, 714, 724, 729, 730,738, 740, 741, 749, 753, 755, 756, 766, 768, 770, 774, 776,777, 781, 782, 796, 800, 806, 810, 817, 819, 821: n = A,T,C or G
gaattggagctccacccgcggtggcggccgcccgggcaggtacaagggcacacaggtgtctggtgtgggcatngactatgcccgggccagcaaacaggtctgcaatgacatcgatgaatgcaacgatggcaacaatggtggctgtgacccaaactccatctgcaccaacactgtgggctctttcaagtgtggtccctgccgcctgggtttcctgggctgggaatgggaacgtgtgtgggactgacacagacatcgatggctacccagaccaagcnctgncctgcatggacaacaacaaacactgcaaacaggacaactgccttttgacacccaactctgggcaggaagatgctgatantgatggtgtgggggaccagtgngatgatgatgctgatggggatgggatcaagaatgttnaggacaactgccggctgttccccaacaaagaccagnagaactcagatacagattcatttngtgatgccctgtgacaattgccccaacgttcccaacantgaccattaaggacacagatggcaatgggggaaagaagatgccttttgacaacnaccgtggnatgggggatgtcattccccccaatggnntttgggacaatttgcccttaaaantcccccaacccacttacanacaatacagggtatgnangaccgggggtggggagattcttttnttacaacttgnccttnaattgangcaaatcctnccccnntacagatncnntacagcgnaccntnnttggggggangncntttnanntctnnttaaaaaccgcggntttngggggngggnccccaangnant

SEQ ID NO: 5316 - DNA, 843 bp, Homo sapiens
  misc_feature 678, 710, 761, 769, 787, 788, 798, 823, 833: n = A,T,C or G
gactactatagggcgaattggagctccaccgcggtggcggccgaggtacgcggggggtggggcctttgtctctggcggcagccggagcttctggtgtagtcttcactgctctgtgtcttctgctcctagaggcccagcttctgtggcctcgttacctgcaggtattgggagatccacagctaagacgccaggacccactggaagcctagaaatgttgcaggaattgtgccttggatccatccatccagtcagctgaaaccagcagcccaggacaagtgggccagccaacaggacctagaccatgcaacccagctgatcctacgatggaaccaaggtgccagtgagatgacaacagccctgctctggtcactccggaagctgaccagtccacgcacggctgaagcttgaggagacaacagccctgctctagtcaccccagaagctgactagtctatgcacggccgctctagaactagtggatcccccgggctgcaggaattcgatatcaagcttatcgataccgtcgacctcgagggggggcccggtcccagcttttgttccctttagtgagggttaattgcgcgcttggcgtaatcatggtcatagcttgtttcctgtgtgaaattgttatcccgctcacaattcccacacaacatacgaagccgggagcataaaagnggtaaaaagccttgggggtgccctaaatggangtggaagcctaacttcacaattaatttgcgtttgcgcttcactggcccgcntttccagntccggggaaaccctgtcnntggccagctngcatttaatgaatccgggcccaccnccccggggangaggcggttt

SEQ ID NO: 5317 - DNA, 882 bp, Homo sapiens
  misc_feature 14, 15, 21, 23, 211, 339, 341, 483, 542, 613, 617, 618, 640,653, 661, 662, 666, 669, 676, 679, 687, 688, 691, 696, 699,700, 715, 720, 721, 731, 750, 757, 765, 772, 791, 794, 796,800, 803, 809, 815, 818, 823, 830, 831, 842, 857: n = A,T,C or G
  misc_feature 880, 882: n = A,T,C or G
actactattgggtnnatggcnanttggagctccaccgcggtggcggccgaggtacatttggagctttatttccactggcaatgcagaaacacccagcaaaaatgtgagaggagttggtggggcttcctaagaggacaagaagtggaacctggcaggagatccatgggagctcctgggactagagttctgggaagttgaaagaaattctcanaaagagatatgtaatttccagactgggagaggagccctccctgcaattttttttgtggggaggagaagggcatggctcacgtgttgtcctgagctttgttggcccccaactgcaggcagagaaccagnancagggtggcagggctggccctgaacaggagctggagcaagccgcatgctggagaaaacagaaggcaatgtgtcccagagaagtggaccccgcgtacctgcccgggcggccgctctagaactagtggatcccccgggctgcangaattcgatatcaagcttatcgataccgtcggacctcgaagggggggcccggtacccancttttgttcccttttagtgaggggttaattgcgccccttggccgtaatcaatggggtcattagcttttttncttnntgaaaattttttattcccttanaaattttccccanaaaaaatnntaanaancgggggngantaaaaaanntgnaaaanccnnggggtgcctaatgangtggnncttaacttcncattaaatttccgttggcnccttcancttgcccnctttttnaaattccggggaaaacctnttngngccnaancttgcntttaantgnaattnggccaanncccccggggangagggcggttttggngttttttggggccccctttttcncn

SEQ ID NO: 5318 - DNA, 831 bp, Homo sapiens
  misc_feature 582, 596, 612, 630, 665, 681, 692, 701, 713, 726, 730, 731,771, 773, 775, 782, 786, 787, 792, 793, 810, 811, 813, 814,818, 827, 828, 829: n = A,T,C or G
actcactatagggcgaattggagctccaccgcggtggcggccgcccgggcaggtactgccaggatataaacctaatccaaccatagaggttagaccctatgattgaggcttgggagagttaaataacattgggtttttgaagctctaaacttcaaaatctctgacccatgttaagaaagcaaatttcttgaatgtccttgattagctagcaatatgtggattaatcacttaggaagaattcgttaacggtgacctggccatttgttttttgaaagtgatctttgctgtgtggatgcagcactgttatggtgttccagttgccattctaacccaaattaggtctttacctcagtcagtaagctagctggccatgtcaggattggtgaagttcaaaaattagtcttcataatgttaaaagccacaattcatcatgaacataagacagctattgatacctacctatgtatcaagttacacatctgcaattttttttttttgatggagtcttgctctggtgcccaagctggagtgcaatggtgcaatctttgcttcctgcaaactctggcttccagatcaagccanttttctggcttcancttccaagtagctggnactccaggcgcatgttancccccccgggtaaattttttggatttttagggggnaccggggtttcaccgngttagcccccnaagggtttnagtcttcctggnccttgggaacccncccnnccggggccttttaaaagggctggggacttccggggggggngncncctgggncccnnccccnncaatttttttaaaggcnnanntttngggaaaggnnnag

SEQ ID NO: 5319 - DNA, 826 bp, Homo sapiens
  misc_feature 5, 524, 593, 635, 650, 685, 687, 690, 691, 694, 707, 715,721, 728, 729, 742, 744, 748, 749, 757, 759, 791, 799, 803,804, 805, 807, 808, 813: n = A,T,C or G
gactnctatagggcgaattggagctccaccgcggtggcggccgcccgggcaggtactgacaggatataaacctaatccaaccatagaagttagaccctatgattgaggcttgggagagttaaataacattgggttttgaagctctaaacttcaaaatctctgacccatgttaagaaagcaaatttcttgaatgtccttgattagctagcaatatgtggattaatcacttaggaagaattcgttaacagtgacctggccatttgttttttgaaagtgatctttgctgtgtggatgcagcactgttatggtgtcccagttgccattctaacccaaattaggtctttacctcagtcagttagctagctggccatgtcaggattggtgaagttcaaaaattagtcttcataatgttaaaagccacaattcatcatgaacataagacagctattgatacctacctatgtatcaagttacacatctgcaattttttttttttttgatgggagtcttgctctgttgcccanactggagtgccaatggtgcaatctctgctccccgcaaactctgcctccagattcaagcaattcttctgnctcacctccaagtagctgggactacaggcgcatgtcaccccnccggctaatttttgnatttttaagggagaccggggttccccggtttaccncnaannggnctcaaatcttccnaaccttgngatccnccccccnngggccctttaaanangggnngggccccnangggggggggccccctgtgcccaacccctgcantttttttnaagnnnannttttngggaggggggagg

SEQ ID NO: 5320 - DNA, 870 bp, Homo sapiens
  misc_feature 10, 17, 21, 543, 586, 617, 621, 661, 669, 697, 702, 743,750, 763, 770, 775, 778, 779, 788, 789, 790, 820, 847, 856,859, 863: n = A,T,C or G
gtcctatcgnctactantcantatagggcgaattggagctccaccgcggtggccggccgcccgggcaggtacactgggtgatgagggcatcaggtaatgcccactaaggcctcagtgcagtgcccatcaggagggatgggagctgcagaccaacgttactgacttgacgcagacacaaagcaaaagtggaggacggtggaggaagaagtagcccaagggaggcgcggccagaccactgcctgagactcgtacctcggccgctctagaactagtggatcccccgggctgcaggaattcgatatcaagcttatcgataccgtcgacctcgagggggggcccggtacccagcttttgttccctttagtgagggttaattgcgcgcttggcgtaatcatggtcatagctgtttcctgtgtgaaattgttatccgctcacaattccacacaacatacgagccgggagcataaagtgtaaagcctggggtgcctaatgagtgagctaactcacattaattgcgttgcgctcactgcccgctttccagcnggaaacctgtcgtgccagctgcattaatgaatcggccaacgcnccgggagagcggtttgcgtatttgggcgctntttncgctttcttgcttacttgacttgctgggcttggtcgttcnggcttgcngcgagccggtattaacttcacttcaaangcggnaataccggttattccccaaaaattaaggggattaaccccanggaaaanaaacattttgagnccaaaangggcnccnnaaaaaggcnnngaaacccttaaaaaaagggccccgggtggnttgggggtttttccataaaggtttccnccccccttnaanaaanaaaaaat

SEQ ID NO: 5321 - DNA, 863 bp, Homo sapiens
  misc_feature 13, 15, 18, 25, 28, 31, 444, 542, 653, 666, 669, 687, 692,707, 747, 748, 764, 783, 786, 787, 790, 799, 802, 808, 816,818, 820, 822, 823, 849, 856, 858: n = A,T,C or G
gttagatccgcgntntcngacttanttnttngctgattggagctccaccgcggtggcggccgaggtacattccacaaaatgaggatgaactggagctgaaagtgggagatattattgatattaatgaagaggtaaggaaaaaatgtgttacaagtaaaacagtaatggtaattgatgctatggattttagaaaaattaattgtaagaatattagtcttttgtgagaactgttgtcactttttaaaaaaaatggtatagagtttctttactcatccttgttgtatttatatatgtatttgtatttcctgcctttaggaataaaaatgcccccttaaagctaaaaattaatgaaatctaagtagttaagaacgtaaacaagccttttctttgattctgaatttaccataggcaaaaagcagtgaaatagaaggaattttgccttanaaggaatacaaagcaaaatctttttaaacgctttgccttgtttgaattatcacattcaaatattaataaaaatactttcctatattttgatatcttanaatggggattttaaaatatttttaaaaaatagatcatgggccgggaggcaggactagactgcaacttccactgggatagaccagaaccaccatgtggaggctcacattgtngaactttttgctncanaacgactgcagggaattntgttnggaaaagcccgagangaacccacagacccctcttgaaggaagcaaacctgcttcnnttaggaccctgggganaaacccccaaaatgctcantcnncanccaaggatnccncccaanggaaagtntnananncaaaaattgcctaacccccccccgcncctaatngntcctt

SEQ ID NO: 5322 - DNA, 898 bp, Homo sapiens
  misc_feature 6, 12, 16, 17, 18, 20, 21, 22, 26, 32, 38, 576, 596, 603,610, 612, 622, 637, 639, 640, 703, 708, 735, 740, 744, 754,757, 758, 760, 761, 762, 763, 765, 770, 773, 774, 775, 777,779, 783, 786, 788, 789, 798, 799, 801, 802, 803, 806: n = A,T,C or G
  misc_feature 808, 809, 810, 811, 816, 821, 827, 828, 830, 833, 838, 839,848, 849, 852, 854, 860, 862, 863, 873, 878, 881, 882, 884,885, 887, 889, 893, 894, 896, 897: n = A,T,C or G
gttagntcaganccgnnntnnngacntacttnttggcngattggagctccaccgcggtggcggccgaggtaccagtagcaatgagcacgaaggggacattggtggccttctcatttaaaagagaaaagtaattctccaggctcaccttgccccaaatgccaactgcaagaaggataacgccagtgatccagaaaataaaagtgtagattagcagaacgctcttgaaacaagtaatgactggtttagtctgcagtctccgagacggggacgccatgactagcccgagaccctgcaccaccgcccccgcgtacgcgggaagttttatgtcttgtgtcttttttctcccttaaaatatctgttttctctttctttgcctctgtaaatgtattctaatggacagtaatatttgattattttattactcaaatcaggttctaccttagtgtcaccagttatggaatatctcattttgtggtttttgtagtgaaaaaagaggcaaaaaagacacacacacatgcacacacacacatataccacaacttcttgtacctgcccgggcggccgctctagaactangtggatcccccggcctgcangaaatcnaatatcnancttatcgatnccggtcgaaccttcnanngggggggcccggtacccccacctttttgtttcccctttagttgaggggttaaaattgccgccnctttngggcggtaaaatcaatgggtcaataancttgntttnttgggaaaanatnntnnnnangatcnatnnnantngatntcngnntttcttctnnannntgnannnnatttntaatnttcacnntntgnttcgnnaattttttnnatnanttttgntnnaattatactncattnatnntnntngnaganngnng

SEQ ID NO: 5323 - DNA, 898 bp, Homo sapiens
  misc_feature 4, 13, 14, 16, 18, 20, 22, 25, 26, 32, 631, 637, 643, 693,705, 732, 749, 757, 759, 773, 782, 795, 807, 809, 815, 830,838, 840, 860, 868, 872, 882, 891, 897, 898: n = A,T,C or G
agtntgatccgcnntntngncntanntgttgnctgattggagctccacccgcggtggcggccgcccgggcaggtacgcgggctggcctctaatggagtcactatgacaagagcagcccctgcctctggggggctcacagctcactggaagacactagaatcctgttctagagcctgggtgaggaagtcttgggattcccctgggaaatggaaaactgtgcagcaggaccctatgttgcttccctctgacctgcagcagagacgtgaggggtgatttcaatcagaaatctctcagttcactaccctgaacgtcatggccaaatgaaatttcagaagagatttttatcacagtcctcagatatggagatctgcttttttcgtcccagctttcttatacattcagtcttcaggtgtgaggattcggttcattcctaagcatatgatgtggtgatgtaggtctttgctcacagaaagatccatttagggcagataatttccagtggagcctgaccacgttgcagccactgctgattctcctgccatgcgtcaccccccaaatgacatgtgtcctgcctttgttgccagtgcctggtagccataaggcctggcttgatcttggggcaaaaacaccngaggtnatggancaagggggcagaggcctgcaaagttccccgaaggcttcaaaacatttggnccctttttttcntttttgggcccaccaaaccaccctgtngtggtgggcaatgtttnaggtttcnanttgggaaggcaatntactttctngggctttcataantttatgggctgnancttggnggggacattaccccnaaccttcnanggaaaggtgaaaagggattngaccccantaanccttgaaaanaccattttntttttnn

SEQ ID NO: 5324 - DNA, 893 bp, Homo sapiens
  misc_feature 3, 11, 12, 16, 17, 20, 22, 26, 29, 33, 479, 486, 508, 536,590, 596, 604, 615, 616, 623, 624, 626, 627, 628, 629, 630,631, 632, 635, 636, 638, 642, 643, 644, 650, 651, 652, 653,654, 659, 661, 662, 663, 664, 665, 676, 679, 680, 682: n = A,T,C or G
  misc_feature 683, 689, 702, 704, 705, 707, 711, 715, 717, 718, 720, 726,727, 728, 736, 747, 752, 753, 754, 762, 764, 769, 773, 777,781, 788, 794, 801, 803, 808, 811, 821, 822, 826, 829, 830,834, 835, 847, 850, 852, 859, 860, 861, 863, 868, 871: n = A,T,C or G
  misc_feature 874, 875, 878, 879, 882, 885, 886, 889, 891, 893: n = A,T,C or G
gtngacccganncgcnntcntngacntantttntggctaattggagctccaccgcggtggcggccgaggtacattgtgatggctgttactaaactaatcgtgtatttatggaactagcaaaattaggttagtcacacaggcaggaaaggtgtctggaaggacaggagcaacctgtaatgcgaatattggttttcttggtatactcaggctctgtggtcatattgagaacaacggatggagaaaggtacgcggggaccacttctctgggacacattgccttctgttttctccagcatgcgcttgctccagctcctgttcagggccagccctgccaccctgctcctggttctctgcctgcagttgggggccaacaaagctcaggacaacactcggaagatcataataaagaattttgacattcccaagtcagtacctgcccgggcggccgctctagaactagtggatcccccgggctgcangaattcnatatcaagcttatcgataccgncgacctcgagggggggcccggttcccancttttgttccctttaagtgaggggttaattgcgccgcttggcgtaatcatgggncataanctggtttnctgggaaaaannataaaannannnnnnnatnntntggnnntattcnnnnnaaatntnnnnntatttattaanatnncnnaaattntttgtaaatattntnngncttncgtnannanaatttnnngaaaatanttattaataanttagnnntataattntnaaaanattntggnaatntatctgngaatantgagtananaattntgnaaataaattnnttanatnnatgnngaaataaattcnggntnattttgnnntnaaaantcnggnnaanntanggnntanantn

SEQ ID NO: 5325 - DNA, 857 bp, Homo sapiens
  misc_feature 4, 12, 15, 17, 18, 22, 28, 29, 30, 69, 477, 488, 500, 515,520, 528, 531, 545, 578, 580, 588, 637, 648, 663, 671, 699,701, 713, 736, 750, 752, 766, 773, 774, 775, 776, 777, 778,779, 780, 781, 783, 784, 786, 787, 788, 789, 790, 791: n = A,T,C or G
  misc_feature 792, 793, 794, 795, 796, 797, 798, 799, 800, 801, 802, 803,804, 807, 808, 809, 810, 811, 812, 813, 814, 815, 816, 817,818, 819, 820, 821, 822, 823, 824, 825, 826, 827, 828, 829,830, 831, 832, 833, 834, 835, 836, 837, 838, 839, 840: n = A,T,C or G
  misc_feature 841, 842, 843, 844, 845, 846, 847, 848, 849, 850, 851, 852,853, 854, 855, 856, 857: n = A,T,C or G
agtngacgcgcnttntnngacntacttnnnggctaattggagctccccgcggtggcggccgaggtacangctgcatgtgcctttggggggctaagtaaggactggcctatctgagcacaccttccagggacatttatatgccctgtccaccgtcaccagtgataacatcaagggcctgaacagaggaccatcccagctgctggcacctgtatatgttattcatgaacctagagactgacccacttagaactgtgagggccctcacgtgacatccaagggcctgacgatagatgtgcctcgccctcagctaccacctccagacactgttggagtctaggcattggctggccatacctgcagctgctgacacacacacacacacacacacacacacctttcaggggctcaataatggacctaccttgcctgccactggcacctgtgggcacttcccaggggcccagggactggctcgtncaccctgcctncaccactattgncccccacatgcatanctcangaccccanggnatagcccactgatnctgctgacaccatgcataccacctggaaacccnangactggcntgcccaacctgccattcaccacatgtggtgcccatgaaccaacctgctntaaaactagtngatcccccggctgcnagaattcnattcaagcttatcgatccgtccaccctngnggggggccccgncccactttttgttccctttaagngaggggtaattgcncncctggcgtaatatnggcatannnnnnnnntnngnnnnnnnnnnnnnnnnnnnaannnnnnnnnnnnnnnnnnnnnnnnnnnnnnnnnnnnnnnnnnnnnnnnnnn

SEQ ID NO: 5326 - DNA, 858 bp, Homo sapiens
  misc_feature 2, 3, 4, 8, 10, 21, 23, 26, 28, 39, 44, 74, 77, 81, 82, 83,84, 85, 86, 87, 90, 91, 93, 94, 95, 97, 106, 109, 112, 113,116, 117, 121, 122, 125, 127, 129, 131, 132, 134, 135, 146,151, 159, 165, 168, 169, 174, 175, 178, 180, 183, 190: n = A,T,C or G
  misc_feature 197, 200, 204, 205, 206, 209, 210, 215, 217, 380, 463, 495,518, 529, 531, 532, 533, 534, 535, 536, 537, 538, 539, 540,541, 542, 543, 544, 545, 546, 547, 548, 549, 550, 551, 552,553, 554, 555, 556, 557, 558, 559, 560, 561, 562, 564: n = A,T,C or G
  misc_feature 565, 566, 567, 568, 569, 570, 571, 572, 573, 574, 575, 576,577, 578, 579, 580, 581, 582, 583, 584, 585, 586, 587, 589,590, 591, 592, 593, 594, 595, 596, 597, 599, 606, 607, 608,609, 610, 611, 612, 614, 615, 616, 617, 618, 619, 620: n = A,T,C or G
  misc_feature 621, 622, 623, 624, 625, 626, 627, 628, 629, 630, 631, 632,633, 634, 635, 636, 637, 638, 639, 640, 641, 642, 643, 644,645, 646, 647, 648, 649, 650, 651, 652, 653, 654, 655, 656,657, 658, 659, 660, 661, 662, 663, 664, 665, 666, 667: n = A,T,C or G
  misc_feature 668, 669, 670, 671, 672, 673, 674, 675, 676, 677, 678, 679,680, 681, 682, 683, 684, 685, 686, 687, 688, 689, 690, 691,692, 693, 694, 695, 696, 697, 698, 699, 700, 701, 702, 703,704, 705, 706, 707, 708, 709, 710, 711, 712, 713, 714: n = A,T,C or G
  misc_feature 715, 716, 717, 718, 719, 720, 721, 722, 723, 724, 725, 726,727, 728, 729, 730, 731, 732, 733, 734, 735, 736, 737, 738,739, 740, 741, 742, 743, 744, 745, 746, 747, 748, 749, 750,751, 752, 753, 754, 755, 756, 757, 758-836, 838-858: n = A,T,C or G
gnnnagtnantactatacgcntnatncnacttactatanggccnaattggagctccaccgcggtggcggccgcnctngaannnnnnnatnnannngnctgaacganttnganntcnngctnntgnanancnnanncctctatgggnggccncggcaccnaacttnttnncgatnnacngnggntaaatcnccctctngtngaannnatnnatatncntgataattgtgcaggcctatttatcacactcctcctggctgccttcagcacaatggtagcgctgctcacagaactcctggatccggctgcacgcttccagcatcatcacctcggggactgtgatgaccactcggatgaaattcgggtacctcggccgctctanaactagtggatcccccgggctgcaggaattcgatatcaagcttatcgataccgtcgacctcgagggggggcccggtacccaanttttgttccctttaatgagggttaattgcgcncttggcgtaatcatggtcatagntggttctgganannnnnnnnnnnnnnnnnnnnnnnnnnnnnnnnannnnnnnnnnnnnnnnnnnnnnnnannnnnnnnnanaaaaaannnnnnnannnnnnnnnnnnnnnnnnnnnnnnnnnnnnnnnnnnnnnnnnnnnnnnnnnnnnnnnnnnnnnnnnnnnnnnnnnnnnnnnnnnnnnnnnnnnnnnnnnnnnnnnnnnnnnnnnnnnnnnnnnnnnnnnnnnnnnnnnnnnnnnnnnnnnnnnnnnnnnnnnnnnnnnnnnnnnnnnnnnnnnnnnnnnnnnnnnnnnnnnnnnnnnnnnnnnnnnnnnnnnntnnnnnnnnnnnnnnnnnnnnn

SEQ ID NO: 5327 - DNA, 847 bp, Homo sapiens
  misc_feature 3, 4, 5, 6, 7, 12, 18, 22, 33, 38, 80, 117, 126, 147, 165,201, 208, 215, 241, 291, 293, 301, 392, 424, 425, 426, 430,433, 434, 435, 436, 438, 439, 440, 441, 442, 444, 453, 455,462, 463, 464, 468, 472, 483, 491, 493, 503, 508, 523: n = A,T,C or G
  misc_feature 529, 545, 548, 557, 563, 574, 582, 584, 585, 586, 590, 595,596, 597, 598, 599, 600, 601, 602, 603, 604, 605, 606, 607,608, 609, 610, 611, 612, 613, 614, 615, 616, 617, 618, 619,620, 621, 622, 623, 624, 625, 626, 627, 628, 629, 630: n = A,T,C or G
  misc_feature 631, 632, 633, 634, 635, 636, 637, 638, 639, 640, 641, 642,643, 644, 645, 646, 647, 648, 649, 650, 651, 652, 653, 654,655, 656, 657, 658, 659, 660, 661, 662, 663, 664, 665, 666,667, 668, 669, 670, 671, 672, 673, 674, 675, 676, 677: n = A,T,C or G
  misc_feature 678, 679, 680, 681, 682, 683, 684, 685, 686, 687, 688, 689,690, 691, 692, 693, 694, 695, 696, 697, 698, 699, 700, 701,702, 703, 704, 705, 706, 707, 708, 709, 710, 711, 712, 713,714, 715, 716, 717, 718, 719, 720, 721, 722, 723, 724: n = A,T,C or G
  misc_feature 725, 726, 727, 728, 729, 730, 731, 732, 733, 734, 735, 736,737, 738, 739, 740, 741, 742, 743, 744, 745, 746, 747, 748,749, 750, 751, 752, 753, 754, 755, 756, 757, 758, 759, 760,761, 762, 763, 764, 765, 766, 767, 768, 769, 770, 771: n = A,T,C or G
  misc_feature 772, 773, 774, 775, 776, 777, 778, 779, 780, 781, 782, 783,784, 785, 786, 787, 788, 789, 790, 791, 792, 793, 794, 795,796, 797, 798, 799, 800, 801, 802, 803, 804, 805, 806, 807,808, 809, 810, 811, 812, 813, 814, 815, 816, 817, 818-847: n = A,T,C or G
agnnnnncgacncgcgtnatangacttactatngggcnaattggagctccaccgcggtggcggccgcccgggcaggtacncgggggggtgcagggcagtcagactggaaccatgganctcagcgtnctcctcttccttgcgctcctnacaggcctcttgctactnctggttcatcgtcaccctaactcccatggcaccctnccaccanggccccnccctctgccccttttggggaaccttntgcaaatggacagaagaggcctactcaaatcctttctgagggagtggatntnattgccgncaatcaataatacctttgaccaagggactccaatcaattcatcatgctttgcctaatgccttttgtttgtaatactgttgcgggacaatcnaagactggagagagcaaaaaaaaaaaaaaaannntttnccnnnngnnnnntnaaaaaaaangnaaccccnnngccngggnaatttaaattnaagttttntnaacccccccnccctngggggggggcggggncccaantttttttccctttaangangggaaattncccccntggccaaaaanaggaaaanannntttnccggnnnnnnnnnnnnnnnnnnnnnnnnnnnnnnnnnnnnnnnnnnnnnnnnnnnnnnnnnnnnnnnnnnnnnnnnnnnnnnnnnnnnnnnnnnnnnnnnnnnnnnnnnnnnnnnnnnnnnnnnnnnnnnnnnnnnnnnnnnnnnnnnnnnnnnnnnnnnnnnnnnnnnnnnnnnnnnnnnnnnnnnnnnnnnnnnnnnnnnnnnnnnnnnnnnnnnnnnnnnnnnnnnnnnnnnnnnnnnnnnnnnnnnnnnnnnn

SEQ ID NO: 5328 - DNA, 829 bp, Homo sapiens
  misc_feature 3, 4, 5, 22, 23, 24, 33, 34, 35, 40, 545, 588, 653, 664,666, 670, 673, 678, 686, 712, 722, 733, 751, 752, 756, 757,758, 759, 760, 761, 762, 763, 764, 765, 767, 768, 769, 770,771, 772, 773, 774, 775, 776, 777, 778, 779, 780, 781: n = A,T,C or G
  misc_feature 782, 783, 784, 785, 788, 789, 790, 791, 792, 793, 794, 795,796, 797, 798, 799, 800, 801, 802, 803, 804, 805, 806, 807,808, 809, 810, 811, 812, 813, 814, 815, 816, 817, 818, 819,820, 821, 822, 823, 824, 825, 826, 827, 828, 829: n = A,T,C or G
agnnnaccccgacgcgcattcnnngacttactnnntggcnaattggagctccccgcggtggcggccgaggtacctgtgcaagctgatggctcacagcaggtggggcacacactcggtggccttgtcagtctggtctgtaagataaaaggtaatgtttacgttcccaaataattcataataaacagggtatattttaacatcttttttgaatgtctcttttccaacaaaagacattttctcatctattgtttaaattaaaattccacaggctctgctttgacctgaagtattttatctatcctcagtctcaggacactgttgatggaattaaggtataatgtgttaaagtctgtgtggctttctcttgtttactttgggggaaaggatgccaggaacatgtatagtgtctcaatgctaatactctatgatggattaactcaaagcatcgggagatgactcatattatcttaacatgctttcttttattgaaagtggaaggccggtggtggtaaaaagtgattctcagaaatgggccacgtcttcanaatgttcttctgacctttttatttttgggccaaatgtgctcanttttggtctcaatctatcttgagtctggtacctcggccctctaaactatggatcccccggccgcnggaatcatttnancttnttntaccnccacctcnagggggggcccgtcccacctttgttncctttatganggttaattgcnccctggcgtaacatgggnntacnnnnnnnnnngnnnnnnnnnnnnnnnnnnnagnnnnnnnnnnnnnnnnnnnnnnnnnnnnnnnnnnnnnnnnnn

SEQ ID NO: 5329 - DNA, 868 bp, Homo sapiens
  misc_feature 4, 6, 10, 22, 24, 27, 28, 39, 40, 162, 334, 344, 421, 432,464, 502, 504, 517, 526, 529, 545, 594, 600, 610, 628, 629,648, 659, 673, 677, 691, 705, 707, 713, 718, 725, 733, 742,767, 775, 783, 784, 792, 801, 805, 816, 824, 834, 839: n = A,T,C or G
  misc_feature 850, 855: n = A,T,C or G
agtngnccgngttgaacgcgcntnctnngacttactttnnggctgattggagctccaccgcggtggcggccgcccgggcaggtacgctgtatggtgtgtaaatgatatctcaatagagttgttatttttttaaggattccatgggtatttctgctgattcanaaccactgccccacactacctaaactgtggaacagaaactcctgaagagtggcagagagtcacactcctctttgaaccgtgagagacacaaataccattgggaataaagagtgggtagattacaagacaactctcaaatctaaactgaagtcaacagatggggtttgatganaatgattcanaaaccagggaactatttgcagtaaagtgaatcaatacttaacagttccttgcagtccacaaattaaattgtcaagcntgggagaaaanacaccaaggcttaagaaccccaaccttatgcnaggagtggcccacccaaacttaaaagcccaaaaatacncnccccttccttggngattaaccnccnaaagggggcaccattnttttttattccaggaccctttttcttgaaacccttccaaaggaaaatcnttcttnccgtcccccngtttaatgaaaaaacccnnttaaaaatctttttggttnaaccgaccaanctctttttgggttnaggnccccagggactggnaaaaaaccctccangnttccanttttnaaaaaanaacctttncattaaacnttgggaaaaaaagggaaacctgggncccctttngggcaaannttttttanggaaggatntttnaaccccctttncccttttntggcctttanacccnaaaagggtccntttcnccctaaaaaagcc

SEQ ID NO: 5330 - DNA, 843 bp, Homo sapiens
  misc_feature 584, 640, 659, 700, 707, 713, 720, 721, 722, 728, 746, 756,767, 769, 777, 780, 788, 791, 792, 793, 828, 832, 835, 837,838: n = A,T,C or G
actactatagggcgaattggagctccaccgcggtggcggccgcccgggcaggtaccactgatacctgctgcttgctcttttctggcatcagggtgactccaaatcttctagcagcacattcccaggaagcaggctatcactatctatagtgccagagcttttagagctaacaatcagtccccgcactttgagctttttgaccattgtgaatggctcagtaactcctgctcgtgctccctgggaaggcatgtattaatggctttctcttctccatccacaggctttgtggacatgtgtgtgcagcatatcccttctccaaaggtgggcgccaagcccaagattgagcacacctacaccggtggtgtggactccgacctcggcgaggctatgagtgactgtgaccctgatgtaagggcatgtggctccccggttctctggtctttttttccccttcctgtgtggggatactgatttctggtcacaggagtaatgcccactttcccacccttgcctcccatccccatgagcacagtcaggcctgaatgcaaaacctgatgttgccaccgcttagtgctattaccttngggaacattactcacaatttcctgagcctcaaaggcctttgggtctattaacacgnagccttaattaaaaatgtngagccgggttgtttttgaagattttaaaataaagatttaanggaaagntgtttncgggttnnngttcanccatgtttgcctggccanatactaaaanattcaaacaanantgggtagnctnatctttgncannncctgggctttttaaaaaaaattttttccccagccnattntgntnnaaggg

SEQ ID NO: 5331 - DNA, 869 bp, Homo sapiens
  misc_feature 374, 419, 420, 431, 500, 539, 589, 615, 625, 637, 675, 676,682, 693, 755, 756, 766, 771, 785, 789, 790, 796, 797, 809,811, 812, 814, 817, 821, 838, 855, 863, 866, 869: n = A,T,C or G
attggagctccccgcggtggcggccgcccgggcaggtacatacttttgacaggcactgagtggcactgtgccctgccactgttgcaccagcaatattccacccggttgcttctgagcacagggcgcagccatgactgatgttgctggtatatcatctgcgttttttcatctctgcagatcactatgagaaaagacaggccagcctcatcagagtatgactcaaaatgaaatgcctcactacccttgcacctactgagaaaactccctcacttgctttctatagactccattgcatactcccttattgaagagacacaactggaaagacaacaagataatgaatactggccaaacaccggtgactgatgctggtnatcccagcactttgggtgggcccaggtggggtgaatcacctggannctcaggaggtncgagaccagcctggccaacatggtgaaaccccatctctaccaaaaatacaaaaatgagccaggcatggnggcaggtgcctgtaattcccactacttcaggaggctgangcaaggagtttgctttgaacccaaggaaagtgggggttgcagtgaacccnaaattgtacccttcggcccgcttctnagaactaggngggatccccccnggcctgcaagggaatttcgatatcaaagccttattcgnntcccgncgaccctcgangggggggggccccggggccccaagctttttggttcccctttaatggaaggggttaatttgcnnccccttggcngtaancattggggcaatancctnnttcctnnggtgaaaattgntnntnccnttcncaattccccaccaacantaccaagcccgggagcnataaagtngtnaan

SEQ ID NO: 5332 - DNA, 819 bp, Homo sapiens
  misc_feature 28, 394, 422, 501, 544, 587, 601, 606, 609, 617, 632, 636,639, 652, 656, 664, 665, 678, 687, 688, 704, 706, 708, 722,724, 743, 749, 765, 767, 792, 808: n = A,T,C or G
tccccgcggtggcggccgaggtacccanagacactctacactgtgagtgtcccctgatattccctcccactcggcctgatcagtggtatctgacctccaactactcgctgcaacaacccgttctctagctgagtgggcctggactttgaacagaattaacagcctggaagtggagttctcaatctcaacagccccttacctcatgcaaatttcttttgagctgaaaagaacaaacagaatgccaccttttaaaacaaccttcttcgaaacatggggggaaagtcaggttttatataaatcagagagatagaaataaggcccataataaaaaacttgaaatagatttgggaagtttccgaaacttccaaaaactagtggtccaaagtggggcaanattttttgtgtgcattgaagaggccctncctgtttccttgggccatgctggtgtcttgccccgtccaggaacccggggctccctgtgctgagcagcccccacacctnagcccaaaagcctcacccccttgcctggacacaccccattttnttttggcacagcttttcccagacttaccaagaatgtcttgaantgactgaatggganttaantgntcggccangactggctaagtaanctanctngggacttggtgcnaaantgtaaatnnaagggcctcttgnttcaaaaannaggaagaatttttagnananccccccagcaggancnttttaaacaaacccccggntggctnggggggggggggcccncncctgaaatcctaacacctttggganggccaagggcatggcngggttcctttt

SEQ ID NO: 5333 - DNA, 906 bp, Homo sapiens
  misc_feature 414, 480, 495, 505, 546, 549, 550, 562, 591, 610, 612, 616,646, 651, 653, 683, 689, 712, 719, 728, 731, 733, 740, 746,749, 751, 753, 758, 759, 769, 770, 772, 786, 788, 792, 823,840, 842, 848, 849, 857, 860, 868, 875, 877, 878, 891: n = A,T,C or G
ggagctccaccgcggtggcggccgaggtacaagtgagaaagactagagagaaagattttagtctgtttagcagaagccattttatctgcgtgcacatggatcaatatttctgatcccctataccccaggaagggcaaaatcccaaagaaatgtgttagcaaaattggctgatgctatcatattgctatggacattgatcttgtgttgcaattttttaataagtaaaaaattatgatttttacttgatcttaagagatcatgaacctataagttatgatgaaatcttgcttggaagggacacattgggagaaagacctattgagggatggtgaactcacatatggtatctcttgctgctgcgacaggcctcatcactccacttgccctgagctgattgggagaacagggacacanttttctcgcttgccacccgttaggctgtgcaccggtcccagtttgaaggaaaggagataagcgaantcccgttgaccgtcnaccaaacttngccttcccgtgacccatgtcatttggatggccccagcccanaanntcatttggaccnccttggccaggctcccttttaccccatangtcctttgggaggggccgntngganttccgtccggaagtttcctggggggataanccaangnaattcccttccttttgggaaaatggccagncctttnatttgggccctcaatgggaaaangctttcnaaacccttnttngnaaccaangggtancantntntttgnngaaacttttnngnggccttcggaaaananactngtttgcagggggcttggaaattttcctttcnagggcatttgacctttngncccagnnctttttcnaantttggggnttttaanannttccatccttccncccccccccccccct

SEQ ID NO: 5334 - DNA, 869 bp, Homo sapiens
  misc_feature 357, 538, 548, 584, 586, 588, 596, 606, 609, 611, 613, 616,617, 622, 629, 632, 637, 650, 657, 658, 672, 673, 676, 677,684, 700, 703, 705, 709, 713, 715, 719, 723, 728, 742, 746,751, 755, 761, 762, 774, 778, 789, 792, 795, 804, 810: n = A,T,C or G
  misc_feature 811, 813, 817, 819, 821, 823, 826, 828, 837, 840, 841, 844,845, 848, 849, 858, 862, 863: n = A,T,C or G
tccccgcggtggcggccgcccgggcaggtaccgcgggatgttttacctaggtaaattatcctgctcataacttgtaaactttatctgttttctgtctccatttcttaatcattaaggtcaatatggattcttactctcttcttcaaattgtaatataattgacaggtttaataaatataggtcaggttcaggttcagatttgagtgtgtgtgtgtatgcgtggtggcgggcacctgtagtcccagctactcgggaggctgagccaggagaatggcgtgaacctgggaggcggagcttgcagtgagcggagattgggccagtgcactccagcctgggcaacagcgaagactccatctnaaaaaaaaaggaaatgtgtatcaagaacatgattatccaggggtattttctaattcagatcatcaaactgattatatagaagagttggctttaaaatgtttgcaaatgtcttttttttttttaatactgggaagaaaaaaaatatttctggttggggtctcaataccaggtgctttaggangttctttcanaggagctttatttaaaaaaaggatgaaaaccccggntngnaaaaaaanaatataaaanatntntnaannggttncccttcnggnccgcnttttaaaaaactnagggggnntcccccccggggcnngcnngggaaanttcggttttcaaagcnttntncganaccngncccncccnccaanggggggggggcccnggtnccccncacntttttnntttcccttttantggnggggttaaatnggnccncctcggggnttaaannantggncnananccngntttcctggnggnnaannagnnttccccccncccnnaattcc

SEQ ID NO: 5335 - DNA, 914 bp, Homo sapiens
  misc_feature 2, 3, 8, 35, 604, 605, 609, 612, 614, 636, 681, 699, 710,711, 712, 716, 723, 729, 741, 744, 747, 775, 778, 791, 797,802, 806, 812, 816, 825, 832, 845, 851, 852, 853, 855, 856,858, 869, 871, 877, 879, 891, 896, 903, 908, 911: n = A,T,C or G
annttaanccttttaaactcctataggtttgaatnggagctccaccgcggtggcggccgcccgggcaggtacaagggcactcaggtgtctggtgtggacattgactatgcccgggccagcaaacaggtctgcaatgacatcgatgaatgcaacgatggcaacaatggtggctgtgacccaaactccatctgcaccaacactgtgggctctttcaagtgtggtccctgccgcctgggtttcctgggctgggaatgggaacgtgtgtgggactgacacagacatcgatggctacccagaccaagcactgccctgcatggacaacaacaaacactgcaaacaggacaactgccttttgacacccaactctgggcaggaagatgctgataatgatggtgtgggggaccagtgtgatgatgatgctgatggggatgggatcaagaatgttgaggacaactgccggctgttccccaacaaagaccagcagaactcagatacagattcatttggtgatgcctgtgacaattggccccaacgttttcccaacaattgaccagaaaggacacaagattggcaaatgggggaaaggagattccttgttacaacnnaccnttngnattggggattgtcatccccaantgggatttggaacaaattgccccctaaaaggtcccccaaccccantttcaagaacaagaacanggggatttaannnaccnggggttngggaanattgcttttgcnaanaanctttcccttggaaattgaagaaaattcnttncccaataccattntccaanaacangtgnaccctngggngggggggantttcttntgttccttaattnaaaaannngnngnattggggtttngngcattnangggccccccaanggggnaccttgnccccnagnata

SEQ ID NO: 5336 - DNA, 800 bp, Homo sapiens
  misc_feature 409, 481, 491, 541, 662, 694, 698, 710, 713, 719, 721, 727,728, 732, 752, 755, 767, 771, 777, 782, 793: n = A,T,C or G
gaattggagctccccgcggtggcggccgcccgggcaggtacgcgggggacaactcggtggtggccactgcgcagaccagacttcgctcgtacgcgggctttataattaatataatgtttctgattagtgttatgataggcctcattttattaaagtcttttatattcttggatgaaattttaataactttcttcataaatgtcttgcacatttcataataggcttattcctaggtgttttatagatttttagttttggttgtgagtcttttaacttacataaaaatatggagaattagcatattcacatatctattttgtgatgtttatcatacggaagttttaaaatatagtaaattcagtctttccatttttttttgtttatttaagaaccattccctagctagggncatgaatacattcttatgaattattaatcccatatggatagctagtttccctagcacctttaaaaaatagtnttattatttncctcctgatgtataaggccacctttaccaatttacatataatgtacctcngccgctctagaactagtggatcccccgggctgcaggaattcgatatcaagcttatcgataccgccgaccttcgaggggggggccccggtacccagcttttggttcccttttaagtgagggntaaattggcgcccttggcgttaatcaggggcnatanctggtttcctgnggnaaaatngntatccnnctcncaaatttccccaacaaaatnacnaacccggggggncttnaaagtntaaangccgggggggncctaaat

SEQ ID NO: 5337 - DNA, 834 bp, Homo sapiens
  misc_feature 53, 495, 509, 597, 620, 631, 633, 665, 667, 685, 699, 701,703, 706, 708, 709, 714, 717, 723, 724, 727, 730, 731, 735,741, 745, 747, 749, 750, 752, 759, 774, 775, 777, 789, 792,796, 803, 805, 813, 817, 818, 819, 823, 824, 828: n = A,T,C or G
tttatagggcgaattggagctccaccgcggtggcggccgtgcatagactagtnatgcttctggggtgactagagcagggctgttgtctcctcaagcttcagccgtgcgtggactggtcagcttccggagtgaccagagcagggctgttgtcatctcactggcaccttggttccatcgtaggatcagctgggttgcatggtctaggtcctgttggctggcccacttgtcctgggctgctggtttcagctgactggatggatccaaggcacaattcctgcaacatttctaggcttccagtgggtcctggcgtcttagctgtggatctcccaatacctgcaggtaacgaggccacagaagctgggcctctaggagcagaagacacagagcagtgaagactacaccagaagctccggctgccgccagagacaaaggccccaccccccgcgtacctcggccgctctagaactagtggatcccccgggctgcaggaattcnatatcaagcttatngataccgtcgacctcgagggggggcccggtacccaactttttgttcccttttagtgagggttaattgcgcgcttggcgtaatcatggncataactgttttctgtgtgaaantgttattccgntnccaattccccacaaaacattactaacccgggngncataaaaagtgtttaaancccttggggggggncntnaangnngtgtnagncttaannccnccnnttanattgtngttngngnntnaacttgncccgcttttttcaanntngggaaaaaactnttngggnccagctntnatttaatnaaannngccnncccnccgggg

SEQ ID NO: 5338 - DNA, 893 bp, Homo sapiens
  misc_feature 2, 3, 6, 7, 8, 11, 623, 658, 685, 704, 744, 770, 796, 808,820, 828, 833, 837, 842: n = A,T,C or G
gnnagnnnttngacgcgcgtaatacgactcactatagggcgaattggagctccaccgcggtggcggccgcccgggcaggtacagatgtccagtagacctactggatatgcaggcctgcagctcgggggagagctgggttaagaaccgtcaaggcagtaatcatctgcatttagatggcgagtgaagccatgacaggggctgaaatggcccagcaagaataaatcaaaccatgagaaacacatacatttaagaataaggagatgtggtcaggcgcggtggctcacacctgtaatcccagcactttgggaggccgaggcgggtggatcacttgaggtcagtagtttgagaccagcctgggcaacctagtgaaatcccgtctctgctaaaaatacagaacttagctgggtgtggtggtgcgtgcctatagtcccagctgcttgggaggctgaggcacaagaatcgcttgaacccgggaggtggaagctgcagtgagccgagatcacaccaccgcactccagcctgggcaacagagaaacaccctgtctcaaaaaaaataataataaggagatgtcatgggctcgggggagggggaaatggggagcgctgttgtttgaatggtatantttcaagttttgggactgagaacaaattctgggangatgaatggtggtgatggctgcacaancaatgtgagggcacttttntgccacttgaagtaacagatcctttcaaaaataagcccgntccgcgtaccttgggcccgttctaanaactagttggatcccccgggcttgcnaggaatttcgantttcaaacttantccgattnccggncganccttnaggggggggggccccgggttcccccaacttttgtttccctttaattgaagg

SEQ ID NO: 5339 - DNA, 823 bp, Homo sapiens
  misc_feature 585, 598, 643, 666, 668, 676, 679, 694, 696, 701, 704, 705,706, 722, 726, 728, 736, 747, 752, 766, 773, 777, 778, 779,782, 786, 790, 794, 795, 798, 807, 813, 817, 818, 822, 823: n = A,T,C or G
cgaattggagctccaccgcggtggcggccgaggtacgcgggaggctcggtgggcgcgggcggcgagatatgccacacttctgcctgctgttggcaaccctcctggactaggctgctcttgttaatcacatggatgttgtgagtattatattcacaagtggatgtagagaagatatttttatttaactataaatgcttaccacatgagctactcatgcttcgcaaaaatatattaaacatttgtgatctggagtttcattaatctcagggattatgctgcttgttcattggttaaataatgtggtttcagtatcttcccctaatcatattgactttttatgaaagaacttttgacacaaagctgtgtctcagaatgttttgatgtaaaggtagctgctgatcttaatttgcaattgtggattcatttcatcttgtatgcttttatgttataggttccttaaggttgccagcatgaaagtgcttcagatggctttgagtcctaatcttgtggttctgttcactgaagataagccagcaattttttggattattttattttcctatgggatgccaataggtctaaaanaacccctcttaanttgggaccctgccccgggccggccgcttctaaaactaagtggatncccccgggctgcaaggaatttcngntatccaanccntattccattccccgncnacccnccnnnggggggggcccccggnaccnanctttttgnttcccctttangggangggttaaattgcgnccccttnggcnnnaancatngggncatnnccnggtttcccngggggnaaanntgtnn

SEQ ID NO: 5340 - DNA, 1113 bp, Homo sapiens
  misc_feature 8, 10, 13, 16, 17, 19, 20, 21, 23, 26, 27, 31, 32, 33, 34,36, 37, 38, 40, 46, 49, 53, 54, 56, 57, 59, 62, 65, 66,67, 76, 77, 78, 79, 80, 81, 82, 87, 91, 92, 95, 96, 101,103, 105, 107, 108, 112, 113, 114, 115, 123, 336, 450, 463: n = A,T,C or G
  misc_feature 464, 482, 600, 615, 672, 673, 685, 697, 698, 700, 703, 704,707, 711, 750, 763, 771, 797, 813, 825, 835, 846, 848, 857,859, 860, 862, 880, 892, 900, 914, 915, 922, 943, 944, 946,949, 951, 956, 960, 964, 975, 976, 978, 980, 986, 1001: n = A,T,C or G
  misc_feature 1002, 1023, 1026, 1027, 1028, 1029, 1033, 1037, 1038, 1049,1050, 1056, 1061, 1062, 1065, 1069, 1071, 1083, 1089, 1091,1095, 1096, 1103, 1111, 1112, 1113: n = A,T,C or G
cccccccncnttnttnntnnntntanntctnnnncnnntntattcncanatanntnnantcnttnnnattctattnnnnnnnttctntagnnggnntgtgntncntnnaatnnnnactcactntagggcgaattggagctccaccgcggtggcggccgaggtacgcggggaggctcctggggtggagtccaaatcactcattgtttgtgaaagctgagctcacagcaaaacaagccaccatgaagctgtcggtgtgtctcctgctggtcacgctggccctctgctgctaccaggccaatgccgagttctgcccagctcttgtttctgagctgttanacttcttcttcattagtgaacctctgttcaagttaaagtcttgccaaattttgatgcccctccggaagctgttgcaagccaagttaggagtggaagagatgcaccgggatcaanatgttcccttcannaaaccgaagcctcatttncggaaagttccctggttgaaaaatatttgaaagaaaatgtaggtggtgttgacaatgttaaaaaacttttccatcctgggttttccactggtctttttcaatggacaccccttgaatncttttcacttgccanaaatggtaaaaggggttttcaaaccgttctttggcttttaaataaaaatcaactttnncttcttggcccnaaaaaaaataanntntcnntgngacncaacaaaaaaaaggttccccttgcccccggggccgggcncggcttttttaanaaacttangtgggggattcccccccggggcttgncaaggggaaattttcntttatttccaangcttttattnggattacccgntnggacccttntnnangggggggggccccccggntaaccccaaacnttttttgnttccccttttaatnngaagggnttaaatttgcccccccctttnngncgntnaattnaaangggncaattaagccnngntntccctnggggtgaaaaaattnnttttttcccggccccccgaanttnnnnaacnaagnnttaaccccccnngggggnggccnnaanaagngnggaaaccccccnggggtntncttnntgggggntggggccnnn

SEQ ID NO: 5341 - DNA, 1110 bp, Homo sapiens
  misc_feature 7, 9, 10, 11, 12, 14, 15, 16, 17, 18, 20, 22, 23, 25, 28,29, 30, 31, 32, 33, 35, 36, 38, 39, 42, 45, 46, 47, 48,51, 52, 54, 55, 60, 63, 65, 67, 69, 70, 71, 73, 74, 75,77, 78, 79, 82, 83, 85, 87, 88, 89, 90, 91, 93, 94, 100,101: n = A,T,C or G
  misc_feature 105, 106, 107, 111, 112, 113, 114, 116, 119, 125, 353, 389,423, 439, 455, 472, 473, 510, 518, 616, 654, 716, 724, 732,735, 754, 757, 777, 778, 796, 798, 802, 803, 824, 831, 833,837, 875, 889, 897, 915, 934, 936, 964, 975, 990, 996: n = A,T,C or G
  misc_feature 998, 1004, 1007, 1008, 1009, 1015, 1017, 1025, 1035, 1043,1047, 1049, 1059, 1065, 1068, 1069, 1071, 1077, 1078, 1080,1081, 1109: n = A,T,C or G
ccctccncnnnntnnnnntntnngntannnnnnanncnnttntannnnctnntnngcaantcntntntnnngnnntnnntgnntntnnnnntnnttaggnnggtnnnttgnnnntntcnatttantatagggcgaattggagctccaccgcggtggcggccgcccgggcaggtacgcggggcgagcattcctttaccccagcttctgggggctgcaccactccaatctctgctccctggtcacattgcctcctcttctgtgtgtcaagtctccctctgactcactcttaaaagaacatttgtcaggccaggcacagtggctcacgcctgtggtcccagcagtttgggaggccnaggagggcgaaataacttgaggtcaggagtttgagnaccagcctggccaacatcctgaaaccccatcttntactaaaaattacacncacacactacaccacnaccacacaactacacgnnagttaaacctggccgtgggttggcaaggcaccacttnattcccanacaccttggggaggcctggagggcatggagaaatttgctttgagccgggggaggcaagaagggttgcagttgaccagtaggattgtgcccactggcanttctgggcctgggggcaaaccagaagcggagaccccgnttttcaaaaaaaaaaaaaaaaaaaaaatttctttaattttcaattttccttaatgggctaanttcaaagnaaagcccnatnggggtggggaattgttttnganttttaacttccacccttttnntcttggatgtttaaaaangnccannttgggattgttcggatggggnttaaaancnaatnggttaaggaattgggtttttggagtttttggggggaanctttgggaaaaacncctttggnaaaaaattccttttaatntttatggcccccctttttncntaaataaaccggattgggggaaaattgnctttcctggtntaccttttgggcccnggtttntnaaaaanctnnntgggantncccccccnggggcttggnaggggaantttngnatattcaaancctttnttnnantacccnncnnccaccctttcgagggggggggggccccng

SEQ ID NO: 5342 - DNA, 890 bp, Homo sapiens
  misc_feature 3, 4, 13, 16, 17, 33, 350, 351, 352, 353, 354, 355, 356,357, 358, 359, 360, 361, 362, 363, 364, 365, 366, 367, 368,369, 370, 371, 372, 373, 374, 375, 376, 377, 378, 379, 380,381, 382, 383, 384, 385, 386, 387, 388, 389, 390, 391: n = A,T,C or G
  misc_feature 392, 393, 394, 395, 396, 397, 398, 399, 400, 401, 402, 403,404, 405, 406, 407, 408, 409, 410, 411, 412, 413, 414, 415,416, 417, 418, 419, 421, 422, 425, 427, 429, 430, 431, 432,433, 434, 435, 436, 437, 439, 440, 441, 443, 444, 448: n = A,T,C or G
  misc_feature 449, 450, 451, 455, 456, 457, 458, 459, 460, 461, 462, 463,464, 465, 466, 467, 468, 469, 470, 471, 472, 473, 474, 475,476, 477, 478, 479, 480, 481, 482, 483, 484, 486, 487, 488,489, 490, 491, 492, 493, 494, 495, 497, 498, 499, 500: n = A,T,C or G
  misc_feature 501, 502, 503, 504, 505, 506, 507, 508, 509, 510, 511, 512,513, 514, 515, 516, 517, 518, 519, 520, 521, 522, 523, 524,525, 526, 527, 528, 529, 530, 531, 532, 533, 534, 535, 536,537, 538, 539, 540, 541, 542, 543, 544, 545, 546, 547: n = A,T,C or G
  misc_feature 548, 549, 550, 551, 552, 553, 554, 555, 556, 557, 558, 559,560, 561, 562, 563, 564, 565, 566, 567, 568, 569, 570, 571,572, 573, 574, 575, 576, 577, 578, 579, 580, 581, 582, 583,584, 585, 586, 587, 588, 589, 590, 591, 592, 593, 594: n = A,T,C or G
  misc_feature 595, 596, 597, 598, 599, 600, 601, 602, 603, 604, 605, 606,607, 608, 609, 610, 611, 612, 613, 614, 615, 616, 617, 618,619, 620, 621, 622, 623, 624, 625, 626, 627, 628, 629, 630,631, 632, 633, 634, 635, 636, 637, 638, 639, 640, 641-890: n = A,T,C or G
agnngaccgcgtnctnngacttactatatggcnaattggagctccaccgcggtggcggccggcgggaggctgacgagagccgggaggcgttagcgaaggaagagaaaaaccgaagacgaagccactacagcgtcgcagcgcggcgcggcgtctgctttataggagagggcgcaggcccccgcgtacctcggccgctctagaactagtggatcccccgggctgcaggaattcgatatcaagcttatcgataccgtcgacctcgagggggggcccggtacccagcttttgttccctttagtgagggttaattgcgcgcttggcgtaatcatggtcatagctgtttcctggannnnnnnnnnnnnnnnnnnnnnnnnnnnnnnnnnnnnnnnnnnnnnnnnnnnnnnnnnnnnnnnnnnnnncnnttnantnnnnnnnnntnnncnnaatnnnnattnnnnnnnnnnnnnnnnnnnnnnnnnnnnnntnnnnnnnnnnannnnnnnnnnnnnnnnnnnnnnnnnnnnnnnnnnnnnnnnnnnnnnnnnnnnnnnnnnnnnnnnnnnnnnnnnnnnnnnnnnnnnnnnnnnnnnnnnnnnnnnnnnnnnnnnnnnnnnnnnnnnnnnnnnnnnnnnnnnnnnnnnnnnnnnnnnnnnnnnnnnnnnnnnnnnnnnnnnnnnnnnnnnnnnnnnnnnnnnnnnnnnnnnnnnnnnnnnnnnnnnnnnnnnnnnnnnnnnnnnnnnnnnnnnnnnnnnnnnnnnnnnnnnnnnnnnnnnnnnnnnnnnnnnnnnnnnnnnnnnnnnnnnnnnnnnnnnnnnnnnnnnnnnnnnnnnnnnnnnnnnnnnnnnnnnnnnnnnnnnnnnnnnnnnnnnnnnnnnnnnnnnnnnnnnnnn

SEQ ID NO: 5343 - DNA, 1170 bp, Homo sapiens
  misc_feature 13, 14, 21, 23, 24, 25, 27, 28, 29, 33, 36, 40, 41, 42, 43,45, 48, 49, 54, 59, 60, 67, 69, 71, 72, 74, 83, 87, 88,95, 97, 99, 101, 102, 104, 105, 107, 110, 112, 115, 117,119, 124, 126, 130, 151, 466, 472, 494, 524, 539, 553, 577: n = A,T,C or G
  misc_feature 580, 589, 592, 610, 648, 666, 667, 683, 690, 699, 715, 723,727, 728, 735, 749, 761, 766, 774, 780, 792, 835, 878, 882,884, 896, 903, 943, 954, 961, 1000, 1003, 1007, 1011, 1019,1021, 1025, 1030, 1033, 1044, 1058, 1060, 1064, 1075: n = A,T,C or G
  misc_feature 1076, 1082, 1083, 1085, 1092, 1108, 1111, 1112, 1113, 1122,1130, 1131, 1136, 1146, 1147, 1162, 1163, 1167, 1168, 1169,1170: n = A,T,C or G
cccccccccctcnntttcatntnnntnnntatnaanatcnnnntnttnnttatncgatnncttaatncntnntnctacacacnctcnnctttcancngngnngnnanggngngtntntntcatnantttnggcgaattggagctccaccgnggtggcggcccgaggtacaaagggtgccgtttcttacaattttagtgtcattagtgttggatttttagaggttagatgtgacatattgttgtctccccccacccatcccgagttggtgcttctgctttcatgtgacagtaataattctgtactttaggagacccaggcgggcagattgcctgaggtcaggagtttgagaccagcctggctaacatggtgaaaccctgtctctactaaaaatacaaaaattaagccggggcatggtggctcacgcctgtagtccccaactgctttgggggaggttgagggccaagnagaatnggcttggaaccccaagggaggntgggagggtttgcaagtttgaagcccgaantatccgctgccccanttgccacttccaanccattggggcccgaccaggaagcnaanggaacttcncanttctttccaaaaaatttnaaaggaaaaggaaaaaggaaaacccaaaaaggaaaaanggaaaaaagcctttattnntttggaaacttttctnttaaaanaaaaaaagnaaaaaaaaaaaaaggnaaaaggcncttnnaatggcnaccaccaaaaattntaaaaatttttnggccnaaggttcngattcnaaatttaaaaanggggataatttttattttggccattcaaccaaaaaaataaaanttctttttaacttcccccccccaaaaaaaattttaaattaaanaaangntttcaaaaatangcaaacnttttttccctaaaagggggttttaaaaaatggttaattcnccccaaaaatnccattgngggttccccccaacccttttttttcccaatttattaaanttntatntggnggtaaaangngganggggnttnccttggaaaantgaggggcaattananaaanaagtttttagnntttttnnanccctccncttggaaaaagaaacntcnnnttctttttntttataanntcctnaaagggaaannggtcttgggggggcnnacannnn

SEQ ID NO: 5344 - DNA, 869 bp, Homo sapiens
  misc_feature 485, 530, 531, 560, 594, 613, 620, 627, 657, 690, 724, 725,738, 745, 755, 760, 766, 774, 776, 780, 782, 785, 790, 797,803, 806, 809, 820, 822, 824, 825, 844, 847, 849, 859: n = A,T,C or G
gaattggagctccaccgcggtggcggccgcccgggcaggtaccttttactcatttataaagaaatggaaaattccttactgaatgagtgaatgaataaatgcatgcaatggtggttgtcttacactttatataacacgtcctctggatttactaataaaaaatgctgtaggcctcttccagcggctttccctcatcctggtctgcattgcaggggctgtggctgcagccaacactgaagactgcacggcacctgaggagaccaacatcttgtctttcagagacgagggtgatgtcatgagtcacttcttggtctttcccctctctctgcgcatgtggtgtcagccgtggtgcctgccaacccgaagactggacttgctacatacgtcagcagtggaagagagccgagttaccccgagttaccaatggcgaatccctatgggtccacagcaacttcagtccttgcctcctcagaagaaagaattcnactgaggggcgttaaggcagaaaaagagagcaagtttcagagccnngagtggaagtttagtttaaaaaggctttngaacagggaaaagaaaagcaaaaatttgctttgnaaagaagaccccaaaccangcgcctngaaggtnccatgaagaagaaaaaggagagccccacgnaagacaggtaaaaaaaaaaagggggcttttaancccttgatcctggggactttcataggcttggccnnttttcccaagganttctttnccctttacanggggnggggtnttccccantncccnanggntttgnccttacnggtttnggnaangggaaccattncncnntgggggttttagggagggnccncntaggcccccnttaaggcttt

SEQ ID NO: 5345 - DNA, 912 bp, Homo sapiens
  misc_feature 285, 382, 396, 400, 457, 463, 515, 523, 537, 553, 566, 568,576, 587, 589, 590, 600, 603, 604, 605, 609, 618, 637, 643,647, 649, 657, 661, 665, 666, 671, 674, 675, 676, 685, 687,690, 699, 701, 705, 714, 717, 719, 723, 725, 732, 733: n = A,T,C or G
  misc_feature 737, 738, 743, 745, 750, 751, 754, 756, 761, 769, 770, 773,776, 782, 783, 789, 791, 795, 806, 807, 808, 809, 810, 812,820, 822, 835, 836, 839, 840, 852, 858, 862, 864, 865, 868,870, 874, 875, 878, 885, 887, 891, 902, 905: n = A,T,C or G
gcgaattggagctccaccgcggtggcggccgaggtacgcggggagagaaaaagagagtaagggaggagggagggatagagaagggagtgagttagcaaaatgccacactgttagttgcaaactggcacaaaggtgaatgcggttcatgaggctcgcttgattaagaagagctgaaacaggagcaaagagcaaaaggcaacctgcagcgaaagcaaggactcagggaaccggcagacacaagcagcctctgcaggtgtgcgagcaggattgcttctgcaacaaaancctccacccagccacttcttgggaaaagaatggccacttcttggggcacagtcttttttcatgctgggtggtatcctgtgttttgcagcagctgtcncccacaggaaccanccanacttggtttgagggtatcttcctgtcttccatgtgccccatcaatgtcggcttttanaactantggatcccccgggtctgcatgaattctgatatcaagtcttattcgataccgncgaccttngaggggggggcccnggtacccaactttttntttccccttttantngagggggnttaatttgacncnnctttgggctntannntatnggggcatanccttgtctctcttgtgggngaaaanttgnanaatttccntttnccanntttcnacnnncaaccattncntangccccggcnangccnttaaatgtngtnanacgntnttggggnnttcnnaaatntntttgnngcntnacctnaccaattnnatnttncctttnnggcttncntggncccagcttttnnnnntncgtgacanancttttcctgcccnntcnntagattgaattnaaaatngttntnnccncnccanntanggggatntntttntttatttatcnctnttttccc

SEQ ID NO: 5346 - DNA, 887 bp, Homo sapiens
  misc_feature 238, 449, 492, 504, 538, 541, 551, 566, 574, 576, 577, 585,626, 627, 632, 646, 648, 650, 651, 658, 676, 678, 693, 696,713, 720, 726, 733, 741, 753, 757, 764, 765, 766, 769, 780,791, 792, 793, 796, 798, 807, 812, 813, 816, 824, 825: n = A,T,C or G
  misc_feature 828, 830, 831, 838, 843, 844, 850, 856, 864, 868, 870, 872,880, 885, 887: n = A,T,C or G
ggagctccaccgcggtggcggccgaggtactttgccaagcagtaaaggatccaggagatagcactggatgtggtgtcatgtcctgcaaacatgaacgttttcacttcagcctggagatctgcttcagagaaatctttggtgttttcgcttttggcactcaaaagtatgtccagaaaatcccagcgccttttctgagtagtatcttgttttagcttatccttaagagactccttccggncctggattactttctctgtgaactggtgaagttcttggttaaatttaagaaaagatttggccttgagagctgaatttgaaaaccaggtcgttgtgatgtagaaaattgttcatgcgctggttggagattttgctaaggttgaacactgctttcaggtatgagtccagggtacctcggccgctctagtaactagtggatcccccgggctgcnaggaattctgatatcaagcttatcgaataccgttctaccttcngagggggggggnccccggttccccaagccttttgttccccctttangtngaggggtttnattttgcgccgcttntggcggtnanntcattggncataagcctgacttcctgtggtggaaaattggttaatcccnntccancaaattcccacacnancnntacgaangccggggagccataaaangngtaaaagcccttggnggngccctaaatggagtgangcttacncccccnttaattngcggtggngccttactggcnccgntttttcnnntcngggataacctntttcgtgcccnnntgnanttaaagganattgnnccncccccccnnggngnnggccggntttgnnttattngggggncctttttnccgntntnctattcgnaaatngn

SEQ ID NO: 5347 - DNA, 884 bp, Homo sapiens
  misc_feature 441, 529, 556, 614, 615, 626, 638, 653, 658, 688, 689, 726,756, 762, 763, 764, 773, 777, 779, 783, 785, 790, 801, 806,810, 813, 816, 826, 839, 851, 853, 857, 858, 867, 880: n = A,T,C or G
ggcgaattggagctccaccgcggtggcggccgaggtacacgcctgcagaaccatgagccaaataaacctcttttctttataaattacccagcctcaggtgtcttctttatagcagtgcaaaaacaaatgaacacagtcccattcagtatttcaaaaagaatcatttaccagccattgtctgctctgtgggcccaagagactttgtcccaggtcactgcgtgttctccaagtccattcatttccccgtaaaaatgttactatccctcaaattgccacatttccctcatctccaattgccttatgaaaaagggtgtataaacatttccattgggttgctgggcattcattctcctgcaattcccccgtgctatgcatgttagaataaattttgtatgcttttttttcttattaatctgtcttttgttgatattcacaaacctncagaaagtaaagggggaagctttcccttggtccctacagatgaggtgctgtgaacaggataaccgaaaccactctgctcttctggaanccagattcgagggaaccccagaccttnatatgccagccaaaaggggagaaattcttatcagtcacctcttgggtcacctctttgnngaaaatctggnttaagtaggggnggtaaaaaaataacnggtcntcatttttccctttttcccaaaattttaannaattaaatgggggaggaaaaaaggcaccttggtttgnacttagccatttggagtattagcaggcctnctgggnnnttttttttntttntngaantntttcnttaatttattnttaantccnttnctnttttcccagnaaaaagacctttnggtttttttccntncggnnttgggcttncccggggttgggntccg

SEQ ID NO: 5348 - DNA, 872 bp, Homo sapiens
  misc_feature 1, 3, 5, 10, 12, 18, 667, 730, 733, 738, 748, 749, 764, 775,786, 802, 806, 808, 813, 821, 832, 834, 836, 865, 872: n = A,T,C or G
ntngngaccncnaatacnactactatagggcgaattggagctccaccgcggtggcggccgaggtacattttgtcacggagtccacagagctgagcttttgagcagactctgagaagtatcattgcttgtgttgaaagaatacaacaggatttaagtttctctttagaaattgcactgaagaaaggccgggcgcggtggctccccctgtaatcccagcgctttgggaggccgaggcggggggatcacgaggtcaagagatcgagaccatcctggccaacatggtgaaaccccgtctctaataaaaatacaaaaattagccgggcatggtgacgtgcacctgtagtcccagctactagataggctgaggcaggagaattgcttgaatccgggaggcggaggttgcagtgagccgagatcgtgccactgaactccaacctgccaatagagcgagactccgtctcaaaaaaaaaaaaaaaaggaaagaaatagcattgaagaaaataccgcacatcagaggaaagcttattttctgcatggtgtcttttcaaagatagaatatttgaagcatgttttctagccattgtgtggatgaaggtgaactggctgaggcatcgctcaagctggggggtggtgtgtaaaaagcacgtggagccacaagaagcccttntatagtcaagctaaaggctttccttttttgcgcccaacttttttggtgaaagggtgaattttnttnttaanacccattttnngctttaatcataaantgtttaataanaggaaagcagnttttccttgctgcaanattncntgaanaagagttngcttgaaaaanantnttcttttttgggacttcaagggggaaagnttgaagn

SEQ ID NO: 5349 - DNA, 869 bp, Homo sapiens
  misc_feature 1, 3, 11, 590, 624, 649, 700, 782, 801, 807, 814, 848, 860,869: n = A,T,C or G
ngnggacgccntaatacgactcactatagggcgaattggagctccaccgcggtggcggccgtgcatagactacgtcagcttctggggtgactagagcagggctgttgtctccacaagcttcagccgtgcgtggactggtcagcttccggagtgaccagagcagggctgttgtcatctcactggcaccttggttccatcgtaggatcagctgggttgcatggtctaggtcctgttggctggtccacttgtcctgggctgctggtttcagctgactggatggatggatccaaggcacaattcctgcaacatttctaggcttccagtgggtcctggcgtcttagctgtggatctcccaatacctgcaggtaacgaggccacagaagctgggcctctaggagcagaagacacagagcagtgaagactacaccagaagctccggctgccgccagagacaaaggccccgcccccccgcgtacctcggccgctctagaactagtggatcccccgggctgcaggaattcgatatcaagcttatcgataccgtcgacctcgagggggggcccggtacccagcttttgttccctttaatngagggttaaattgcgcccttggcgtaatcatggncataactgtttcctgtgtgaaattnttattccgttacaattgcacacaaacataccgagcccgggaacataaaatntaaaagccttggggtgcctaatgaagtggagcctaactcacattaaatttgcggttggggcttcactggcccctttttcaantccgggaaaaccttgtcgnggccancttgcanttaaattgaaattcggccaacccccccggggaanaaggccggtttnccttatttn

SEQ ID NO: 5350 - DNA, 1266 bp, Homo sapiens
  misc_feature 1, 3, 5, 7, 8, 9, 11, 12, 13, 15, 16, 18, 20, 21, 23, 24,28, 29, 31, 33, 34, 35, 37, 38, 40, 45, 46, 47, 48, 53,54, 58, 60, 61, 69, 71, 72, 74, 80, 81, 82, 83, 84, 85,86, 87, 89, 90, 93, 94, 97, 98, 101, 106, 107, 110, 112,113: n = A,T,C or G
  misc_feature 118, 204, 209, 211, 227, 228, 232, 250, 251, 252, 392, 454,457, 494, 522, 587, 593, 619, 620, 672, 695, 704, 717, 738,757, 776, 783, 790, 796, 816, 826, 834, 835, 867, 881, 903,904, 911, 915, 924, 948, 958, 971, 976, 981, 991, 1001: n = A,T,C or G
  misc_feature 1002, 1006, 1010, 1019, 1027, 1028, 1030, 1052, 1060, 1062,1090, 1095, 1096, 1098, 1100, 1104, 1113, 1116, 1122, 1127,1131, 1140, 1148, 1155, 1157, 1158, 1159, 1163, 1168, 1169,1172, 1175, 1177, 1180, 1183, 1186, 1206, 1220, 1223: n = A,T,C or G
  misc_feature 1227, 1228, 1233, 1234, 1245, 1246, 1249, 1251, 1256, 1264,1265: n = A,T,C or G
ngntntnnntnnncnntntnntnnattnntncnnntnnancggtnnnntttcnnatgntnntattcttntnntntttatnnnnnnnntnnttnnagnnagngagannatnannctgcntaatacgactcactatagggcgaattggagctccacccgcggtggcggccgcccgggcaggtacaattacccaccactggatttgnctcananaggacccccagagggnnaaanccatcttccctatttatnnnccagcccttgagggcttcattgtagatcaaagtcaaggcccccaggaaggtgacatactcctggaagttcacctcctggtccttgttccggtccaagtcttccatcagccttgcaatttcaagcatcctgcaagcttcgnagccaatggtgaagctccttctgggatcaagctccctttcaagcttccttctttgcttcaanggnttgttgccttggtccaaccccttccccttgcccgggnagttaccaattggggaacccttgaaaanaaggggggccttggccttgttttttccccgaaaattggttttttcccaatttttccaaccaaagnggccgncccaaccccttggccttttgcccccnngggggggtttggggtcccttttgaaaaaaaagaaccacccccccaaaaaatnggttttcaattgcccctttcaanaaaaaaagnggccagcccatgnaaattggcccttttttttaanggaaaaatttctttttttnaaaaggtaaaatttttggnaaaggtntaatttnttaacnaaactttttgggtttaaaanaaaaaaaaancccaggcnnggggccttccttctttccttttttccttcccnttcaatttttcatntggggaaggggtgggtttaaanngaaatcnaatnggccttggnccccggtggattgttaaccctttngggcccggcnttctaaagaaccntagtnggganttcccccccngggcttggcnngggnaaantttccaatnattccaanncnttttttcgattccccgttccanccctccananggggggggcccccggttatccccaaacnttttnntncncccnttttacggngangggggnttaanttcnggccccccnttggggcnaaaattnannnggcnattannttnttncnctnggnggnaaaaaataggtttttccgcnttaaaaaattcccnccncaannaatcnnaaccccggggnnacntntaaantttaaaannc

SEQ ID NO: 5351 - DNA, 890 bp, Homo sapiens
  misc_feature 1, 699, 713, 716, 731, 737, 740, 755, 791, 793, 799, 810,833, 836, 838, 839, 840, 848, 864, 879, 888, 889: n = A,T,C or G
ngtggccgcgtatcgactcctatagggcgaattggagctccacccgcggtgggcggccgcccgggcaggtactatcttttcaacttctccatatatctataactattctaaagtaaaagtttattaatttctaaaacgaaggttactccctaaagaatacaattaagatacgtagcttgtaatcaggtgaagaaggaaaaagtcgattaaaaaaatacttagttcaagagggcaggaaaccgggcgtagtggcatgcacttgtagtcccagctgctcacggggctaagatggaaggatcacttgagaccaggagttcaaggccagcctgggcaaaatagtgagaccctgtctctaaaattaaaactttttttttaaagacaggagataagaaaaagttgtctatggggggagaggttgataagcattatatacaacacacacaaaagaaagtggcaaaaacaaagtttgcattttaaggatgcggtatctcctgtcctgttcccctaatttaatacttggctggcactctccaattcccttctcactcaacacttctttcactcgtatcccaggccccttatcagtgatctgcaattcaatcaaccaattaacaaatattaactgagcccctggtgtaagaccctcaataaatgctacaggacccccattcctggaaaaagcaagaagggtgcccccgnggtctttttcgggngcncctcccaagcccaantgccanggnttggttgcactcaanccggcgccttaaattcacattttttccaaatttttntncccccnaaagggggctngcaaccccggcttggggggaagnaanannncccggggngctttttaataaaacncccatttggccaaangcccccccnnt

SEQ ID NO: 5352 - DNA, 418 bp, Homo sapiens
  misc_feature 165, 214, 219, 284: n = A,T,C or G
taatacgactcactatagggcgaattggagctccaccgcggtggcggccgaggtaccgtgaatctttaagttttagggtgtggggttttccccttaccaaatgcaatattacccatagagtagaataacctgagttaaatagcctctttgaaaaacattcataanaggccaagtgggttatatgaatggctactctgtcttgattctcagtacnatgcncattcacgtccatgccattgatggccagcactgcatgacccactcggatgccgtcccgctggccnaaagcaaccaacacacgctcatcgtgtagcttgagcagcagatccagcggataactgaaagttttctcagcctcagcccgtggcgcgtagctgtccaactggtaaatcaagccgccagctttgttcaccacata

SEQ ID NO: 5353 - DNA, 541 bp, Homo sapiens
  misc_feature 3, 4, 6, 9, 11, 12, 13, 17, 19, 21, 22, 24, 26, 28, 29, 30,32, 33, 34, 38, 41, 46, 51, 53, 58, 64, 70, 72, 73, 74,80, 81, 82, 83, 87, 88, 89, 91, 92, 93, 95, 99, 100, 103,105, 106, 109, 111, 115, 129, 133, 518: n = A,T,C or G
ccnnangtntnnngatntntnntnantnnnannnccantantaatnttctnantacancaggantcgaanannnatttannnnattnnntnnnanatcnngtngnnctntncttntacgactcactatngggngaattggagctccaccgcggtggcggccggcgggaggctgacgagagccgggaggcgttagcgaaggaagagaaaaaccgaagacgaagccactacagcgtcgcagccgcggcgcggcgtctgctttataggagagggcgcaggcccccgcgtacctcggccgctctagaactagtggatcccccgggctgcaggaattcgatatcaagcttatcgataccgtcgacctccgagggggggcccggtacccaagcttttgttccctttagtgaggggttaattgcgccgcttgggcgtaattcattggtcattaagctgttttcctgtgttgaaaattgtttatcccgctcaacaattcccacacaacaataccgagcccggggangcataaaagtggtaaaagcctgg

SEQ ID NO: 5354 - DNA, 863 bp, Homo sapiens
  misc_feature 576, 651, 723, 733, 737, 756, 762, 766, 781, 782, 791, 796,799, 810, 822, 826, 827, 831, 835, 846, 860, 863: n = A,T,C or G
cgaattggagctccaccgcggtggcggccgcccgggcaggtacatacttttgacaggcactgagtggcactgtgccctgccactgttgcaccagcaatattccacccggttgcttctgagcacagggcgcagccatgactgatgttgctggtatatcatctgcgttttttcatctctgcagatcactatgagaaaagacaggccagcctcatcagagtatgactcaaaatgaaatgcctcactacccttgcacctactgagaaaactccctcacttgctttctatagactccattgcatactcccttattgaagagacacaactggaagacaacaagataatgaatactggccaaacacggtgactgatgctggtaatcccagcactttggatggccgaggtgggtgaatcacctgagctcaggagttcgagaccagcctggccaacatggtgaaaccccatctctaccaaaaatacaaaaatgagccaggcatggtggcaggtgcctgtaatcccagctactcaggaggctgaggcaggagtattgctttgaacccaggaaagtgggggttgcangtgagcccgagatttgtcctcggcccgctctagaacctagtgggatccccccggggcttgcagggaattcgaatnttcaaagctttatcgataccgtccgaccctcgaagggggggggcccgggtaccccagcttttttggttcccntttagtggangggnttaatttgcgccgcttggncgtaantcantgggtcataagcctnnttttcctgnggggnaanttgttattccngttcacaatttncccnncaanaatnacgagccgggnggcattaaaggggnaan

SEQ ID NO: 5355 - DNA, 916 bp, Homo sapiens
  misc_feature 3, 566, 571, 575, 576, 578, 580, 581, 623, 630, 633, 642,656, 662, 698, 707, 718, 725, 727, 735, 736, 762, 773, 779,788, 789, 797, 801, 814, 824, 828, 836, 841, 843, 846, 850,856, 873, 880, 899, 900, 906, 915, 916: n = A,T,C or G
agngcgccgtaatacgactacgactcactatagggcgaattggagctccaccgcggtggcggccgcccgggcaggtacgcggggagatatactgagtgagccctgagaagcagtctcagatcctgacggtgcagcagcccgcagcctcagccagggagtcccagccgctttcaatggaggagaagcccggccaagtatctcttttctacagccttattaaactaactacaaacatttattttccaatttagttttactttcagtgcatatcaaagttgttgtacctcggccgctctagaactagtggatcccccgggctgcaggaattcgatatcaagcttatcgataccgtcgacctcgagggggggcccggtacccagcttttgttccctttagtgagggttaattgcgcgcttggcgtaatcatggtcatagctgtttcctgtgtgaaattgttatccgctcacaattccacacaacatacgagccgggagcataaagtgtaaagcctggggtgcctaatgagtgagctaactcacattaattgcgttgcgctcactgcccgntttcnagtnngngnnaaccatgcttgccatctagaattaaatggaattgggccaacncgccggnganaaggcgggntttgcgtattgggncgcctntttccgcttttccttgctcaacttgacttcgctttnggcttcggntccgtttccgnttgcggngnagccggtnnttaagcttaactcaaaaagggcgggnaattacggggnattccncaaaaaatnnagggggantaancgcaaggaaaaanaacattgttngaancaaaaaangcccnancanaaanggcccnggaaccccgtaaaaaanggcccgnttgcttgcggtttttttcnnaaggcnccccccccnn

SEQ ID NO: 5356 - DNA, 933 bp, Homo sapiens
  misc_feature 111, 258, 261, 263, 328, 338, 351, 354, 382, 437, 461, 467,470, 477, 511, 519, 525, 534, 574, 575, 576, 591, 601, 602,610, 620, 622, 624, 633, 639, 641, 648, 654, 658, 661, 663,667, 671, 677, 683, 688, 702, 704, 706, 708, 720, 724: n = A,T,C or G
  misc_feature 725, 728, 729, 732, 740, 745, 746, 751, 758, 760, 774, 780,786, 788, 789, 791, 793, 804, 805, 814, 817, 823, 824, 836,837, 839, 840, 842, 848, 853, 854, 855, 858, 859, 864, 868,871, 876, 879, 882, 889, 890, 894, 897, 899, 901, 906: n = A,T,C or G
  misc_feature 909, 910, 911, 916, 917, 918, 933: n = A,T,C or G
ggcgaattggagctccccgcggtggcggccgcccgggcaggtacgcggggaagatgtagctgtgtagtctccttccatagctgctctaagggggctggcaacatggctcancaggcttgccccagagccatggcaaagaatggacttgtaatttgcatcctggtgatcaccttactcctggaccagaccaccagccacacatttcagattaaaagccaggaagcacagcaaaccgtcgagtgagagacaaggatgganatntngaagactcaaattgaaaagctctggacagaagtcaatgccttgaaggaaattcaaagccctgcanacagttctgncttcgaggcactnaantttacaagaaatgctaccttgctttcanaaggtttgaagcatttccatgaggccaatggaagactgcattttccaaagggaangaatcctggttatcccccaggganactccnacnaaaaatnaaccgccctccaaagaactattggtaaaaaaggnaccctggnccaggntgtcaaatngactttttttggcttggggcattaaattaaccattggtcnnnccggaaaaggcaagnttttgtttgnnccttccanccgaaaattngntnttctttccntttccntnaaacttngggganccgnggncncaancctnaccggntgggcnaggcngagaaaaaactttngngncntggttttttccnaatnnagnnttnaaggggcnaaagnnggagngtgattnangggcccttttcccncctaanaaaagnanntncntttttcctggnntttcccccnccncccctnnagggggtttctnnannanggtgcncccannncgnngaaantaanacntaaanttntanggagggnnttgnttntncntaagntannntaaannngtacatatttttgtn

SEQ ID NO: 5357 - DNA, 872 bp, Homo sapiens
  misc_feature 4, 5, 6, 8, 544, 654, 664, 697, 700, 702, 736, 758, 773,776, 777, 779, 784, 789, 791, 805, 814, 818, 822, 824, 825,828, 840, 854, 872: n = A,T,C or G
aggnnncnctaatacgactactatagggcgaattggagctccaccgcggtggcggccgcccgggcaggtacgagtggaggacagggacagagccctctgtggtggaacgaccccacctcgaggagcttcctgagcaggtggcagaagatgcggtaagatgggccttgtgatgagctgtaggagtggagtgggagctgcttgtcccctccccacccccaacagcccaacccaagacccagagagaagaagggaggatttctgtgagagtgactgtaggtagaagggcccaggaggccctactcctttatttttctgagtataggtgagtgagtgccacagaggctttgcaaggtggttcgctttgaactcggaacctccatcatgtgagctctctgaagatgggctttctttggggtagcttagaggccactgcatttgaacagtgtgctctctacagaagcagctgaggcctgtgggaaggcagccccaccctccttttttaaattaatttatttttgagactgggccttgctctgttgcgcangctggagtgcagtggcatgatccttgctgactgcaacctctgcctctcagcctcaagcgatcctcccaagtcaacctccaagatagctgggattacaggttttgcaccanccactcctancttatttttttatttaacattttttttggggancangnatttttccattttgccccagcttgttttaaaaanttccttggggcttaaaaaaaantcactttttttttcnccnncnaaaantgttngnacaaaaaaggcgtngagcccttngggntttncnnttnttttttaaaaanaattttttttgggnccccccaatgggaagggn

SEQ ID NO: 5358 - DNA, 1008 bp, Homo sapiens
  misc_feature 2, 3, 11, 23, 35, 42, 43, 76, 77, 79, 83, 88, 95, 101, 109,112, 114, 119, 122, 126, 138, 150, 151, 152, 154, 158, 163,171, 172, 173, 175, 179, 190, 203, 227, 234, 245, 247, 254,267, 283, 303, 328, 332, 337, 338, 361, 364, 402, 410: n = A,T,C or G
  misc_feature 411, 415, 422, 426, 432, 435, 442, 452, 456, 459, 464, 465,468, 475, 477, 521, 525, 526, 529, 536, 549, 555, 557, 560,563, 570, 575, 576, 579, 590, 592, 593, 594, 595, 597, 598,602, 609, 619, 637, 643, 647, 648, 652, 657, 658, 659: n = A,T,C or G
  misc_feature 662, 663, 664, 665, 681, 685, 690, 692, 698, 699, 702, 703,704, 710, 717, 718, 732, 733, 738, 741, 757, 758, 762, 763,766, 768, 772, 773, 782, 784, 785, 788, 789, 792, 797, 807,808, 811, 814, 815, 816, 817, 818, 819, 820, 821, 823: n = A,T,C or G
  misc_feature 829, 833, 836, 839, 847, 849, 851, 856, 857, 860, 864, 874,875, 877, 887, 888, 892, 909, 912, 913, 914, 915, 939, 968,970, 971, 978, 979, 992, 998, 999: n = A,T,C or G
gnnaaggttanaccttggaaaancccgccatccgnggaaaanncccccccaccgcgggggctgccgagggacgatnngnccgngttgnaaaagcnaccggncaaagaanagngnagggngcnaaanggggggggcccntaggaggccgcnnncnccgngacanggaaggcnnngngagngatggacccanacatgaaacagangaagcagcaaaggcaacctcccgncaaaacnggaccgggcangncaacgcnggggggagaagcnctgggccgggaaaaangaaaggcagaaaggacaggngggccgggaagcccacagacatggncaanaaaannaaaaaaccccaaccgagccaatnggnggacaacaaagaagggagaaaccaaaaccaaacaaaancatggatnncccnggccaangggngacccnacnggggatngggaaaaccngccnaanaggannccnggaaggnancccaggcaaaagaaaaaaaagcccccgggactcgggcaaaaaanaaannggnaaaaggncccgaaagcaaanggggcntnccnaanccaaagnagggnngangaaaaaaaggncnnnntnnaaanaaaaccncagggacccnggggggccccccaaaaanaaaagnaganngggnggggnnnaannnnaaaaaaaggggggggngggnaaaancnaaaacnnaannnaacccnaagaaannaaggggggggcagnncccanacnaaaaaagaaaaaaaannacgnnaanangcgnngaaccccgngnnaannaanaaaanaagaaaagannagnggnnnnnnnnanaggggnaaanagnggnaaaaaaancncncaaannggngggnaaaaaaaaanngnggggaaaaanngacnaaaaaaaaaaaaagggnaannnnaaaaaaaaaaaaaaaaaaaaaaanagagggacaaaaaaaaaaaaaaaaaaaananngaggggnngggggggggaagnaaaaannaaaagaaaa

SEQ ID NO: 5359 - DNA, 1330 bp, Homo sapiens
  misc_feature 1, 7, 9, 10, 13, 23, 24, 25, 27, 31, 33, 34, 35, 37, 46,49, 50, 60, 65, 66, 67, 68, 69, 79, 81, 83, 84, 85, 87,88, 90, 91, 93, 94, 95, 100, 104, 106, 108, 110, 111, 115,123, 128, 202, 226, 235, 257, 259, 273, 314, 331, 351, 396: n = A,T,C or G
  misc_feature 398, 399, 400, 413, 420, 427, 428, 429, 442, 456, 462, 463,466, 470, 478, 485, 487, 508, 509, 510, 516, 528, 534, 546,549, 550, 551, 552, 560, 579, 588, 590, 606, 614, 629, 631,652, 654, 668, 673, 674, 681, 693, 694, 696, 699, 700: n = A,T,C or G
  misc_feature 711, 722, 728, 743, 747, 755, 756, 762, 768, 773, 780, 782,788, 789, 790, 793, 804, 817, 821, 822, 823, 825, 826, 840,847, 852, 861, 862, 863, 864, 865, 868, 880, 881, 882, 893,896, 899, 907, 908, 910, 912, 914, 916, 920, 926, 930: n = A,T,C or G
  misc_feature 937, 941, 944, 954, 955, 969, 970, 978, 982, 983, 986, 988,989, 990, 995, 996, 997, 998, 1002, 1005, 1016, 1018, 1022,1024, 1025, 1032, 1033, 1042, 1043, 1051, 1054, 1055, 1069,1070, 1073, 1074, 1076, 1078, 1080, 1086, 1087, 1095: n = A,T,C or G
  misc_feature 1098, 1100, 1104, 1105, 1111, 1115, 1116, 1118, 1119, 1131,1137, 1140, 1153, 1161, 1171, 1173, 1176, 1179, 1193, 1200,1201, 1206, 1207, 1211, 1214, 1218, 1224, 1225, 1226, 1229,1234, 1248, 1250, 1251, 1252, 1256, 1259, 1265, 1266: n = A,T,C or G
  misc_feature 1269, 1272, 1274, 1302, 1307, 1310, 1314, 1315, 1320, 1323,1328, 1329: n = A,T,C or G
nttgttntnnttnctaattcgannnantttncnnntnttaatgatnttnnttactttgtngcatnnnnnttatctttanantnnntnntnncnnnttagnaggngncngnnttancgcctcantatanggcgaattggagctccaccgcggtggcggccgcccgggcaggtgcatatatatgtatgcatgtaaatgagctcntattagctgtgttcattaaaggtnttctccatnctgtgatctgcttttagatttngnaacacatttcatgngtgcacattccatttgtattatttaatatgacaacatttantactattattattatcntcatcaattcaatcacatantactatatccctggataatgaccatgatcctttttaataattcanannnaaacttctttttnccctttnaatcaannnggggttaatatanacccctaattctanaaatannctngtanaggtcttncaattcnangctaccccctcaaagtcctgnnncccctnagctttccaacnttttancccaagtaattnctnnnnttactttnttaaagccccaagtattcnaaattccantncaatggttttaaaatngatccatncacccccaacaattntncaaaattatatttggatgggnangttcttgtccggcnttttnntttaacncttgtaccaccnnanttnngttataacaanggggacccttncttganttcttcggggattgnaaanctttcttnnccccanggtggnaaaangtttccntnaaaatnnnaanggccattttantaatttcaaatangtgnnntnnctttattcccaaancattttnggganggtcccccnnnnnganatcctactttannnggtttatattntgngtngagttganntntntntntttnggagantttntccattnaacnccnacattgtaannttattaggatagcnntaattttngggnngcngnnnaaaannnncccntanagtcccttttntnatananngggatcnnaatgaactnntcccgacntcnnggtaaggatcttgnnagnntngntntagaanncccaatangtnanaatnntttttntaanntnnggacactatttnatttgngtntatttttctttancattgggnatattacctntntcnctntgtccacatatttnatttcanntaaannaganagngatntaggannnacntctangatattatatgttntnnntatntanggactnnttnagntncccatattaagattggtattgattgccncacantanaaanncaagnaantacanng

SEQ ID NO: 5360 - DNA, 932 bp, Homo sapiens
  misc_feature 4, 383, 470, 497, 585, 595, 598, 602, 604, 610, 616, 628,636, 637, 639, 641, 658, 660, 663, 671, 674, 675, 677, 683,694, 695, 700, 701, 705, 708, 709, 712, 714, 718, 719, 732,742, 744, 745, 747, 748, 759, 760, 763, 764, 765, 766: n = A,T,C or G
  misc_feature 768, 781, 783, 788, 790, 792, 794, 810, 816, 817, 824, 825,827, 830, 835, 840, 858, 860, 861, 868, 869, 872, 873, 875,880, 883, 889, 893, 898, 901, 908, 911, 912, 914, 916, 922,923, 924, 925, 928, 929: n = A,T,C or G
tcantatagggcgaattggagctccccgcggtggcggccgcacaaacttttagccccacgacgactgcctgtttcctaattatatttaagcaggtgaggtcggcctttatgttaaggaaaatcacacgggctgagagtcgctggcagcacagcttgaaatgcttctcagatattaaagcccgcttgcttttccaggtgggatacactcgctttccttttgacagtaatgcatgtttccccattagacaaacctgttttactacattcatcaagaaacccaatgatgctgcctcttctgctttgcaaattatcttttcacacgccgtgactccccttcttaggcagatggtttaccaagtgctacttatttggtttgcgttttngactattttttgaggatgacgtcattaatctattgctggaatctgggagagctgctgttttaaagacttactggagctgccacgttnttgagcagataaatgtggagagccctncgaggaggaacggaaagaaattttatttgcgtgagccggttatgggatttccggggggggaggagtttgggccaatgcctccttggantggggaaccntgnaaangnagaaantcgttntaagggggtggntatctttnntnangggggttagacaatttngnttntaaaaaanggnncngggggntttcccctgcnnttaannaaanggnnctntnttcnncacttttttcttnttcgatgggngnngnnggggcctttgnnctnnnnanataaagttgtggntnccccncngntnttaaaaagaattatgnattgtnncggctannangangtatntattnaatgggggggggggggcncnngtttaannatnntntgaanctntttggngggnggttnatntttcttnatnnantntattgnnnnttnnttc

SEQ ID NO: 5361 - DNA, 888 bp, Homo sapiens
  misc_feature 4, 5, 6, 8, 632, 646, 674, 682, 685, 694, 705, 725, 742,743, 744, 748, 754, 766, 771, 798, 799, 811, 813, 818, 819,824, 829, 830, 835, 836, 837, 840, 848, 849, 854, 859, 862,866, 867, 873, 879, 888: n = A,T,C or G
aggnnncncgaatacgactcactatagggcgaattggagctccccgcggtggcggccgcccgggcaggtgcatatatatgtatgcatgtaaatgagctcttattagctgtgttcattaaaggttttctccatcctgtgatctgcttttagattttggaacacatttcattgtgcacattccatttgtattattaatatgacaacatttattactattattattatcatcatcaattcaatcacatctactatatccctgataatgaccatgatccttttaataatcacaaaactctcttcccttcatcacggggtaaataacctatcacaatgctgtaagtctccatcagcaccccaggctgcccctgctcacttaccagatctgctactttagccagatcaatcatcatgttaatgtcacacccacattcaataatggtgagtctgcgctttttacctgacacgatcgtcacagggcctctgatctcggtgaacttctgccaggtgaagttccgaatgaggcattatatcaaagtgctctttccaactttggaggccccgtcaccactaccgctattggtggcgggctctagtggaagttccatcaaccactgggaatatgaagcttttgngtcttcaaatccanagtcccggtgaaaaggatcgagacattncacaccancanactggaacnggcaaaaagcntttggctttttctttttttnggggcatttttttcggnnncccnaaaccngggaaaaacccnccaantggccccctttttttttttttttggannttttgggggccncncgggnntttcnttttnnggggnnntangggggccnnaaacnccaanaantggnntttttncccaantaaaaaagn

SEQ ID NO: 5362 - DNA, 931 bp, Homo sapiens
  misc_feature 4, 5, 400, 464, 488, 495, 501, 502, 505, 507, 517, 535, 538,548, 555, 559, 563, 565, 566, 574, 577, 578, 580, 592, 593,595, 607, 618, 633, 636, 659, 660, 664, 665, 673, 686, 697,701, 713, 714, 715, 716, 717, 718, 720, 721, 722: n = A,T,C or G
  misc_feature 723, 725, 726, 727, 731, 737, 739, 741, 742, 749, 759, 761,764, 768, 774, 785, 789, 790, 791, 801, 802, 803, 806, 808,809, 810, 822, 840, 856, 857, 860, 872, 879, 881, 889, 893,895, 899, 901, 902, 903, 930: n = A,T,C or G
aagnncctatcgactcactatagggcgaattggagctccaccgcggtggcggccgcccgggcaggtacgcggggaagatgtagctgtgtagtctccttccatagctgctctaagggggctggcaacatggctcagcaggcttgccccagagccatggcaaagaatggacttgtaatttgcatcctggtgatcaccttactcctggaccagaccaccagccacacatccagattaaaagccaggaagcacagcaaacgtcgagtgagagacaaggatggagatctgaagactcaaattgaaaagctctggacagaagtcaatgccttgaaggaaattcaagccctgcagacagtctgtctccgaggcactaaagttcacaagaaatgctaccttgcttcanaaggtttgaagcatttccatgaggccaattgaaaactgcatttccaaaggaggaatcctggttntccccaggaaactccgacaaaatnaaccccntccaannatntngtaaaagganccccccccaggtaaaaanaantttggggggngggccanaaangggntnnggccccanaanngnaaattttttttnnanaaaaaggaaatnttttttttttnttttttccaaaaagnggngcccccccccccaccctaataanngggnnaaaaaaanaaaaaaaattttnttttttttttncccnaaaaaatttttnnnnnnannnntnnntttntataancncnntccaaanaaaaaaaaananccncccncccctnttaaaaaaaantagnnnccccccggcnnnggngnnntttttttttaantttttttacccccccccnccggggggggggcccnnccncccctttttttnccttttnangggggganaaancncccncnnngaaaaaaaaaaaaaaaaaaattttttnt

SEQ ID NO: 5363 - DNA, 883 bp, Homo sapiens
  misc_feature 46, 77, 160, 353, 365, 447, 570, 599, 602, 609, 644, 651,661, 684, 691, 734, 740, 745, 758, 773, 783, 787, 790, 791,792, 800, 806, 807, 814, 821, 831, 833, 837, 855, 859, 870,880: n = A,T,C or G
tcactatagggcgaattggagctccccgcggtggcggccgcccggncaggtacgcgggaagcgtggtttctgcccgngaaggcctacagtctcataaggcttccacagttcaaagaagtcccttatgtattgtggattaggagaaatacatacatgacanaaaatgctaactccaataacattttctcattctttcatccaaaaaacaatcctctatgatgttgaaggagttgtaatagaaacaaaagtatatttaagaataactagaccaattccaggtaatatatgtatctatttcactctgaaagtcacatgactccgcactcaagtgtggaccatgcacagtaacttcnttttaaaagctncagcatatgttaaagaaaaaaaatcttgacacttgttaaagaacaggaaagcagactttatataggaccattgcagtaggtntagaaaccacagcaatggggttttgcaatgaaggttgagctcaactcctaatacaagaagaaaaaagtggggatttatagctaaggatctatcccttgactcccttgagggtgagggaatcanaggatgagaaattactaacagaaaatttnttngggtcanctggggcacaagtgggctgatgcctgtggtcccangcacttntgggaggcanaagggaggagttggcttaccttnaaagtcngggagccttcaagacccagcctggcccaaacatgggtgggagncccctntcttnttacttgaaaaantaccggaagggttangccctggccntggnggnnnaaaaaaanccttgnnattcccnccttttntttttggaananttgngggcccgaaaaatttttnttanaccccaagatngtgggagggntgg

SEQ ID NO: 5364 - DNA, 928 bp, Homo sapiens
  misc_feature 361, 414, 418, 420, 487, 503, 520, 521, 543, 557, 559, 565,568, 573, 589, 590, 592, 597, 599, 614, 615, 623, 626, 633,640, 644, 646, 651, 652, 657, 658, 665, 678, 681, 683, 685,687, 698, 705, 718, 720, 721, 722, 726, 729, 731, 740: n = A,T,C or G
  misc_feature 745, 755, 764, 776, 777, 783, 786, 788, 807, 812, 813, 817,830, 833, 834, 838, 842, 859, 865, 871, 875, 878, 879, 883,884, 888, 890, 892, 905, 911, 912, 913, 914, 925, 928: n = A,T,C or G
ggcgaattggagctccaccgcggtggcggccgaggtacaataaactgctgtcagtgctgctggaggaaggaagagtaactctgacatcactggccttcaacaggcgtggcgctgagcttctgggcctcagaagccctgacttctagaggctgggtgccagcggggcagggaggtgatctcatcatggatggccacagatcatccacctggaaatgttctcgcaaatgaaactggaatgcatgatgtcctggattcagcgggtcacagctgactgccatcaggaggtgtgacggagaaggttccatttctgtgaccctgtggtgatacaggtcgggacccaggcgaagtagctcaagccatntgaattggcacctttctgcttttctcgctgaatgacgggtgccttgcagttgncttnanatgtttgtgaatgttgctgtgtttcctccagggctggcttgtgaaaatttaaaacgaatggaccggnatattgttaagctcgntgggtaagcgccctgannctgggccccttccattgttcangtgttgcttgattntntgcttnatnaatgnaaaacttgggctttanncnaaggntngggttgattattccnnttaagtangcnaaatttngcaaaanatangnatganncccannaaccttnaaaacaccggccnttnangncnttttttaaganggcttgntgcccctttcccntnnngaangancnacttctttnttttntggccttatnaaaaaggtnccaaccccccgnntttccntgntnccgggcggttccggttctnagaanntagntgggaatcccccnggnnctgncgtnggaaaattctgttattnaaagcntatatngaanccnntcgnncccntnanggggggggccccngtaccnnnntttttattttnccn

SEQ ID NO: 5365 - DNA, 924 bp, Homo sapiens
  misc_feature 2, 3, 13, 629, 640, 643, 673, 674, 677, 687, 712, 720, 722,737, 741, 773, 789, 798, 809, 815, 835, 848, 851, 870, 873,874, 885, 886, 893, 902, 913, 916, 923: n = A,T,C or G
gnngacggccgcncgtaatacgactactatagggcgaattggagctccaccgcggtggcggccgaggtaccaaatgtgcttttcctgaggacaggggaagagttcactattcagccatacctttgcatattttacaaaattcacttctaccaaggatgcctctccacaaaatgaggagtagcacaaagaacacctaagaaaccaggcctgacccagggcctctgatgctggggcaggttccccgcgtgctaatatcccaggggaccctgttgcagttctctgaataccggctgtgagctttccaacttcagttgagtcccagcatcctcctcacaccacttatcctccctgcctgtccctggcgcgtttagacaactggaatctttgctgacattttaaatgggctggctacttctccagcgtggaggcacctagcacaaggtgtgatagatcagtatttgttgatgaagtaacaaaagttatttctggcaaattggacttttccccttgaaaacgttttggcttttacattttttaatgatggggtcaaagaaaacagcccccaaagaagaaaggggcgggaaatagggggggtagggaccccttgcctgccccgcgtaccttgcccnggccgggccgnttntagaaactaagtgggatccccccggggctnncanggaattcganatcaaagctttattggatacccgtncgaccctncnagggggggggccccngttncccaaactttttggttccccttttaagtggangggtttaattggcgcncctttggcngttaaatccantggtcnataagcttggttttccttgnggtgaaaaattgntantcccgcttcaaaaaatttnccnncaaacattcgnncccgggngggcattanaaggggtaaangcntgggggng

SEQ ID NO: 5366 - DNA, 965 bp, Homo sapiens
  misc_feature 271, 451, 480, 488, 491, 503, 513, 520, 522, 536, 537, 540,543, 548, 567, 571, 590, 600, 605, 606, 609, 613, 617, 619,624, 631, 634, 639, 645, 652, 656, 669, 670, 675, 679, 689,696, 702, 703, 704, 706, 707, 713, 720, 722, 730, 735: n = A,T,C or G
  misc_feature 741, 744, 753, 754, 755, 756, 760, 764, 765, 766, 769, 776,779, 780, 782, 783, 784, 793, 794, 800, 801, 812, 816, 818,820, 821, 822, 832, 837, 841, 847, 858, 859, 863, 870, 871,872, 877, 880, 897, 904, 905, 907, 921, 922, 923, 925: n = A,T,C or G
  misc_feature 926, 927, 928, 929, 931, 932, 934, 935, 936, 939, 941, 943,950, 956, 959, 960, 964: n = A,T,C or G
gtaatacgactcactatagggcgaattggagctccaccgcggtggcggccgaggtaccctggactcatacctgaaagcagtgttcaaccttagcaaaatctccaaccagcgcatgaacaattttctacatcacaacgacctggttttcaaattcagctctcaaggccaaatcttttctaaatttaaccaagaacttcatcagttcacagagaaagtaatccaggaccggaaggagtctcttaaggataagctaaaacaagatactactcanaaaaggcgctgggattttctggacatacttttgagtgccaaaagcgaaaacaccaaagatttctctgaagcagatctccaggctgaagtgaaaacgttcatgtttgcaggacattgacaccacatccagggctatctcctggatccctttactgcttggcaaagtcctcggccggtctanaactagtggatccccccgggcttcaaggnaattcganttnaaagcttattcnatccccgtcnacccttngngggggggggccccnnttnccnaaacnttttttgttcccctttaangggnggggtttaaaattgccccncttggggcgnaaaannatngggncaanangcttntttcccntgngggtngaaaantttgttnattncgttttcaacaannttccncaanaaaaattaanaaaaccngggggnnnannaaaagngtaaaancngggggggnggccncaaaanggnggggggccnnnncccnattnnnttnggggggnggnncnnnctggccccnnttttcnntggggggaaancctngntnnncccccttttnttttntaanatttcnccccccccccnngggnggggggnnnttttnttnttttgggcccttttttnccttttnntnaaaaaaaaaaaatnnntnnnnntnnannnttngngnggggggnggggangannaaant

SEQ ID NO: 5367 - DNA, 900 bp, Homo sapiens
  misc_feature 291, 343, 346, 360, 375, 378, 379, 385, 435, 452, 454, 465,466, 476, 492, 498, 525, 527, 528, 537, 546, 552, 562, 566,573, 580, 591, 611, 614, 618, 635, 659, 664, 673, 679, 682,685, 686, 721, 732, 744, 747, 753, 763, 764, 767, 770: n = A,T,C or G
  misc_feature 773, 778, 794, 797, 799, 804, 806, 808, 815, 821, 828, 829,833, 835, 836, 844, 845, 852, 854, 858, 865, 871, 872, 874,876, 877, 878, 889, 891: n = A,T,C or G
ggcgaattggagctccaccgcggtggcggccgaggtactgctgcagagaaaaagcatccatgtcaaaaagtaaaaattctcattctaccttgcttccgttcccagaccttgtcttaccttcctgaactttttatattcctggattatcttgtcttccaggaccttgtattctggagttcctcgccgaactcttttaatctctgctcccagctctatgaacctttggcttgcagtcccaacacgggcatgcaggatgcggtattcagcataatctgtctcaaagtcctgctnataggcatgttgctgttctgcactgtggatggccctgtatttgcaaggaggnagnctggtatatcttcnaggacttgggggatncannatcttnttgaactgaggaaactgtgttctaatctgggggtccatgtcctcatcttnctttgctcccaaacttntncccttctttgnnaaatcctgantttgggtcaaggcccnttggtnggggggcttgggccaccttaaaaggcnannaggtacttngaaccctcntttttnttttccaggnttcntacaagngggcttnccagggccccnttgaaaccttttttttttgntcncaanaccgtttttccgggccntgggcaaaaagggaaaagggtagntgccntggaaacanggtttnttnttnntttttggaaacatgggggtcttgggcttttttaancttttccccantttgtggcccantgnagggcnccccttttgnnggnaanccntgggngagaggacctggtccntcntntttgnantnggcccangggggntcttgtnnctgnannccctcccnnttggggncntttnggggggngggganncntnnntctttcttttnanaaaaaatcc

SEQ ID NO: 5368 - DNA, 822 bp, Homo sapiens
  misc_feature 8, 10, 15, 25, 26, 27, 28, 32, 257, 333, 616, 667, 694, 701,707, 709, 719, 748, 761, 776, 779, 791, 796, 800, 803, 813: n = A,T,C or G
cgcgcgtnanacgantcaatttacnnnnaatnggagctccaccgcggtggcggccgaggtacctttttttttttttttttttttaaactccctttccttgttatctgaacttccaaacatcagctttgatgtctattgttgggacttcaagaggactcttagcacatcggcaggtgttggttttagtgagcaggcgagagtcccacattcttccaaggagagagatgggtcccaccacattcctacccctagagcanaagttcccgcgctgtgcctcttctctggctgcttgctgaggacgtctcccagtggggtacctgcccgggcggccgntctagaactagtggatcccccgggctgcaggaattcgatatcaagcttatcgataccgtcgacctcgagggggggcccggtacccagcttttgttccctttagtgagggttaattgcgcgcttggcgtaatcatggtcatagctgtttcctgtgtgaaattgttatccgctcacaattccacacaacatacgagccgggagcataaagtgtaaagcctggggtgcctaatgagtgagctaactcacattaattgcgttgcgctcactgcccgcttttcagtcngggaaacctgtcgtgccaactgcatttatgaatcgcccaaccccccgggangaggccggtttgcgtatttgggcgccntttcgcntttctngnttaatgactncgttgcccttgggccttcgggttgggggnaacgggtttaagnttaattcaaaagggnggnaaaaccgggttnttccnaaanaantcagggggtnaacccccgg

SEQ ID NO: 5369 - DNA, 911 bp, Homo sapiens
  misc_feature 3, 530, 651, 662, 666, 677, 678, 685, 703, 705, 710, 716,730, 738, 746, 766, 770, 778, 780, 795, 799, 808, 813, 817,820, 827, 833, 879, 883, 902, 909: n = A,T,C or G
agngccgcgtaatacgactcactatagggcgaattggagctccaccgcggtggcggccgaggtacaggcacatgagccatttgtcctgaaaaatccatctggggatccctgtgggcttagaagactctgtctgcccaatgaaagtcatggttttgcccataattcagtgagttttcaaaatcttgtgtcttgaaaattttcaaccatcttcataaatagaaactaggataaagaaccctcatagttcattacagggaagcagatgatgtgagcaagttcagtttcagttaacagccaagaggtctaagtgacaaactctttctccctcaaaccttagtttcctactgagctcatatccatgctttgatttcagagtttatctggtgctagaagaaaacctaaaagcagtgtgtcagtaacaattgtttagagcaggtgaattaagctcgattctgcctgacaggtcttcttttctgggtgacacaagtgagtcactcagggaccagacagaaggtgataaaaacaatcantccctggaatgagattttcttctggcaaggtagacccttaagaatttgagatctcttaaagggatgcataaagtttctgtaagtggaaaggtgacaccctggaaccaccccaaaatgattnttgaccagcgnaatnttctttttgannaaatggntgtggaaaaaaaaacccntnatttnttttanaacaaccacaaccnaaaattancccttttntaagaacaagctttgggganggantggagggngngtctttaaccccaanttanttttccaancattntttnggnaaagccntgcttnccttcaatctttttgggggaaaaaccaaaaccaatttttttaaccnaccncctttgttttttggggcanttggcangg

SEQ ID NO: 5370 - DNA, 598 bp, Homo sapiens
  misc_feature 15, 30, 71, 77, 101, 212, 219, 283, 297, 301, 303, 306, 307,309, 311, 312, 313, 314, 315, 317, 321, 323, 325, 326, 330,331, 332, 333, 335, 337, 338, 339, 340, 341, 342, 343, 345,346, 347, 348, 349, 351, 352, 353, 354, 355, 356: n = A,T,C or G
  misc_feature 357, 359, 360, 361, 363, 364, 365, 366, 367, 368, 369, 370,372, 373, 374, 375, 376, 377, 378, 379, 380, 381, 382, 383,384, 385, 386, 387, 388, 389, 390, 391, 393, 394, 395, 396,397, 398, 399, 400, 401, 402, 403, 404, 405, 406, 407: n = A,T,C or G
  misc_feature 408, 409, 410, 411, 412, 413, 414, 415, 416, 417, 418, 419,420, 421, 422, 423, 424, 425, 426, 427, 428, 429, 430, 431,432, 433, 434, 435, 436, 437, 438, 439, 440, 441, 442, 443,444, 445, 446, 447, 448, 449, 450, 451, 452, 453, 454: n = A,T,C or G
  misc_feature 455, 456, 457, 458, 459, 460, 461, 462, 463, 464, 465, 466,467, 468, 469, 470, 471, 472, 473, 474, 475, 476, 477, 478,479, 480, 481, 482, 483, 484, 485, 487, 488, 489, 490, 491,492, 493, 494, 495, 496, 497, 498, 499, 500, 501, 502: n = A,T,C or G
  misc_feature 503, 504, 505, 506, 507, 508, 509, 510, 511, 512, 513, 514,515, 516, 517, 518, 519, 520, 521, 522, 523, 524, 525, 526,527, 528, 529, 530, 531, 532, 533, 534, 535, 537, 538, 539,540, 541, 542, 543, 544, 545, 546, 547, 548, 549, 550: n = A,T,C or G
  misc_feature 551, 552, 553, 554, 555, 556, 557, 558, 559, 560, 561, 562,563, 564, 565, 566, 567, 568, 569, 570, 571, 572, 573, 574,575, 576, 577, 578, 579, 580, 581, 582, 583, 584, 585, 586,587, 588, 589, 590, 591, 592, 593, 594, 595, 596, 597-598: n = A,T,C or G
cgcgtaatcgcctcnctataggcgaatggnctccccgcggtggcggccgcccgggcaggtcgagtggaggnaggganagaccctctgtggtggacgccccncctcgaggagcttcctgagcaggtggcagaagatgcggtaagatgggccttgtgatgagctgtaggagtggagtgggagctgcttgtcccctccccacccccacagcccancccaagncccagagagaagaagggaggatttctgtgagagtgactgtaggtagaagggcccaggagccctnctcctttatttttntgantntanntnannnnntnccanananncttnnnngntnnnnnnntnnnnntnnnnnnntnnntnnnnnnnncnnnnnnnnnnnnnnnnnnnntnnnnnnnnnnnnnnnnnnnnnnnnnnnnnnnnnnnnnnnnnnnnnnnnnnnnnnnnnnnnnnnnnnnnnnnnnnnnnnnnnnnnnnnnnnnnntnnnnnnnnnnnnnnnnnnnnnnnnnnnnnnnnnnnnnnnnnnnnnnnnntnnnnnnnnnnnnnnnnnnnnnnnnnnnnnnnnnnnnnnnnnnnnnnnnnnnnnnnnnnnnnn

SEQ ID NO: 5371 - DNA, 613 bp, Homo sapiens
  misc_feature 1, 13, 17, 27, 28, 33, 48, 52, 53, 58, 62, 63, 69, 90, 180,533, 542, 543, 544, 546, 548, 554, 555, 558, 559, 565, 567,568, 570, 575, 576, 578, 579, 585, 587, 589, 590, 592, 601,603, 604, 610, 612: n = A,T,C or G
ncgtatcgactcntatnggcgattggnnctccncgcggtggcggccgngggnngctgngagnnccgggngcgttagcgaagagagaaaancgaagcgaaccactacagcgtcgcagcgcggcgcggcgtctgctttataggagagggcgcaggcccccgcgtacctcggccgctctaganctagtggatcccccgggctgcaggaattcgatatcaagcttatcgataccgtcgacctcgagggggggcccggtacccagcttttgttccctttagtgagggttaattgcgcgcttggcgtaatcatggtcatagctgtttcctgtgtgaaattgttatccgctcacaattccacacaacatacgagccgggagcataaagtgtaaagcctggggtgcctaatgagtgagctaactcacattaattgcgttgcgctcactgcccgctttccagtcgggaaacctgtcgtgccactgcattaatgaatcggccaacgcgcggggagaggcggttttgcgtattgggcgctcttncgctttctnnntnantgactnnttnnctcggncnntnggttnngnnagcggntnanntnattaaaggngnnatacgntnt

SEQ ID NO: 5372 - DNA, 615 bp, Homo sapiens
  misc_feature 163, 264, 331, 352, 400, 405, 421, 422, 436, 439, 443, 444,447, 448, 451, 456, 459, 461, 462, 464, 465, 466, 467, 468,469, 470, 472, 474, 475, 477, 481, 485, 493, 496, 498, 500,501, 503, 505, 508, 511, 514, 515, 516, 518, 520, 522: n = A,T,C or G
  misc_feature 526, 528, 529, 531, 533, 534, 536, 538, 542, 544, 547, 548,549, 552, 554, 557, 558, 562, 563, 566, 567, 568, 570, 578,579, 580, 583, 585, 589, 593, 594, 595, 596, 597, 602, 604,605, 606, 608, 610, 611, 612, 614: n = A,T,C or G
gtaaacgacctcactatagggccgaattggacctccccgcggtggcggccgcccgggcaggtcaagggcacacaggtgtctggtgtgggcattgacctatgcccgggccagcaaacaggtctgcaatgacatcgatgaatgcaaccgatggcaacaatggtgncctgtgacccaaactccatctgcacccaacactgtgggctctttcaagtgtggtccctgccgcctgggtttcctgggctgggaatgggaacgtgtgtgggnctgacacagacatcgatggctacccagaccaagcactgccctgcatggacaacaacaaacactgcanacaggaccaactgccttttgncacccaactctgggcaggaagatcctgataatgatggtgtggggaccngtgtnatgatgatgcttatgnngatggtatcaagangtnaggnnacnntantatancanannannnnnnncnanntnattncttntttttgtntgntngnnantncanatntannnanantncaangnnanannantnaaananatnnnaantnatnnttannaannnanttgagtannnttntntttntttnnnnnaaatntnnntntnnnang

SEQ ID NO: 5373 - DNA, 950 bp, Homo sapiens
  misc_feature 1, 6, 12, 63, 120, 195, 291, 322, 357, 371, 377, 382, 423,426, 433, 434, 454, 471, 477, 483, 485, 496, 509, 525, 530,536, 540, 553, 555, 559, 568, 581, 591, 598, 605, 607, 608,615, 622, 624, 626, 629, 633, 634, 651, 656, 660, 668: n = A,T,C or G
  misc_feature 669, 678, 680, 685, 701, 702, 712, 722, 724, 729, 731, 741,760, 772, 786, 787, 788, 790, 794, 802, 820, 825, 827, 829,833, 837, 844, 848, 851, 855, 857, 858, 866, 868, 873, 878,879, 895, 898, 899, 900, 902, 906, 907, 909, 912, 913: n = A,T,C or G
  misc_feature 914, 916, 918, 923, 925, 927, 929, 931, 936, 941, 944, 948,949: n = A,T,C or G
nggggncgacanacgactactatagggcgaattggagctccaccgcggtggcggccggagctnacccagtgggccacgggctccggactccagaactttccaagtgggggaaacttggcngcgggatgaaaagtgagccagctccagccggtggaggatggtttgaaaaaggcaccatttctgcttcctctactnaagaaccaaaggctttagattattttcctgcaagcaaattaagagccagtaatcgccaatgtgtcctgccctatggtaaccccggtctgtctgaangctgcatgtttttctgctaaatgtgaatttntgttccatcattcaacagacatgtgtttggggatntttattgtacctcngcccgntttanaactagttggatccccccggctcccaggaatttgattattnaancttaatnnatacccgtccacccttcgangggggggggccccggtncccaancttttngntccccttttanatgaaggggtttnaatttgcgcccctttnggccnttaaantaantgggtcaaatagncntggntttccttgnggtgaaaaaattntttttttccncttaacnaaatttncnncacaaanatttctnantnctngggnngccttttaaaaattttnaaaancccntttggggnnggcccttanantaagntggaaaccttaacctnnaaaatttaantttgccattntnccctncnatttgccccnctattttcaaatttggganaaaaactttttnttgccccaaccttnnntntaanttaaaatntgggcccaaaacccctcnggggnanangggncgtnttttctntttnttngggngnncttttttncnttttnttttnnttataattggattttnttnnntntttnntnttnnngnantttgngngnanancgggnatttnatntctnnt

SEQ ID NO: 5374 - DNA, 1120 bp, Homo sapiens
  misc_feature 3, 5, 315, 340, 341, 367, 533, 546, 599, 608, 658, 705, 724,734, 763, 765, 775, 800, 830, 834, 871, 895, 900, 914, 938,943, 946, 963, 966, 977, 993, 999, 1000, 1001, 1002, 1003,1021, 1033, 1056, 1059, 1060, 1086, 1099: n = A,T,C or G
ggncnctaatacgactcactatagggccgaattggagctccaccgcggtggcggccgcagcgagtggcgagtagtgggaaacgttgcttctgaggggaagcccaagaatgaccagtttcttaacgaagttcaagctgaaccaagccacccgaggaatggcatctccttccgtgaaagttcaagccccaacacctcccagtttcctggcttgtctccttcctgggacaacgttccgtgcgttcttttacgatgttgcccggccaacttccattgccggcttcaagttaccttcggccgcttctagaactaagtggnatcccccggggcctgcagggaattnnatatcaaagcttatcgatacccgtcnacctcgaggggggggccccggtacccaactttttgttccctttaagtggaggggtttaattgccgccgctttgggccgtaaattcaatggtcattaagcctgttttccctgtgttgaaaaattggttaattcccgctcacaaattttcacaccaaacattactaancccggggagccantaaaagtggtaaaaagccctggggggtggccctaaatgaaggtggaagccttnaacctcacnatttaaatttgcgtttgcgccttcaactgggcccggctttttttcaaatncgggggaaaaaccttgttttttggcccaaccttgcatttaaattggnaaattcggggcccaaaccnccccccgggnggaaaaaaggccggtttttgccgtaattntngggcggcttnttttccggctttttctttggctttnaaattgaacttcggctttggggccttcggntccntttccggctttgccgggcaaaagccgggtttttaaancttcaacttcaaaaaggggggggntaaanaaccgggttttttnccacaaaaaattaaaggggggaanaaccnccncgggaaaaaaaaaaatnttntagccaaaaanggcccacccaaaaaangggccnnnnnaaccctttaaaaaagggncccccgttttcnttggccgttttttttcaataagngtnnccccccccccttggcgaggcttttanaaaaaaaattggnccccctcaaaattaaaaaggg

SEQ ID NO: 5375 - DNA, 927 bp, Homo sapiens
  misc_feature 3, 4, 5, 7, 345, 462, 471, 490, 520, 534, 536, 551, 569,572, 594, 598, 603, 604, 609, 615, 636, 642, 678, 693, 704,711, 717, 728, 734, 737, 742, 761, 782, 788, 792, 793, 807,814, 821, 859, 869, 874, 879, 884, 888, 889, 891, 892: n = A,T,C or G
  misc_feature 895, 902, 903, 904, 907, 909, 913, 915: n = A,T,C or G
ggnnngncgccgtaatacgactcactatagggcgaattggagctccaccgcggtggcggccgcccgggcaggtacgcggggacagataaagactcaagtctggggacctcctggtcactcaggcagcagccccttctttcttgccccagtctccagttctccagtgttcacaggtgagcctaccaacagccactgctcatgatggaggccatcaagaaaaagatgcagatgctgaagttagacaaggagaatgctctggatcgggcagagcaagctgaagctgagcagaagcaggcagaagaaagaagtaaacagctggaggatgagctggcagccatgcagaanaaactgaaagggacagaaggatgagcctggaccagtattttgaagcttttgaaaggatgctcaagaaaaacttggaactggcagaaaaaaaaggctgcttgattcctgaagcttgangggggcctnctttgaacccgtaaggatnccaacttgtttgaaaaaaaaacttggaccngtgcttcaaggaancnccttggccactttgnccttgcaaaaaacttggnaanaaaactttaaaaaaacttcttnattnaaaanntgaanaaaaangtttttaaagggttttttggnaaaaanccggggccctttaaaaaggattggaaaaaaaaaagnttggggaacctcccncggaaaaattncaacttncaaaanaaacctttaanccccanttngccanaaaaaaaggcccgaatttngaaagttttttaaaaaagggngggccncccnnaaaggtttgggggnttctttngaaaggngaaacttttggaacccccccaaaaaggaaacaagcctnggccttggcnaaaanttccnttttncccnnannatngggttgnnnccnantttnanttgttgggccct

SEQ ID NO: 5376 - DNA, 1229 bp, Homo sapiens
  misc_feature 2, 8, 9, 10, 11, 12, 14, 15, 16, 17, 18, 21, 22, 23, 24,25, 26, 27, 29, 31, 32, 34, 35, 36, 40, 43, 44, 45, 48,49, 50, 52, 54, 55, 56, 57, 60, 61, 62, 63, 64, 66, 70,71, 72, 74, 75, 76, 77, 79, 80, 81, 82, 83, 84, 85, 86,87, 88: n = A,T,C or G
  misc_feature 89, 90, 91, 93, 94, 95, 96, 97, 98, 99, 102, 110, 127, 305,313, 317, 336, 410, 424, 481, 483, 496, 527, 533, 537, 581,601, 627, 638, 652, 667, 685, 717, 718, 724, 730, 746, 759,777, 795, 813, 825, 832, 835, 843, 844, 853, 854, 858: n = A,T,C or G
  misc_feature 875, 876, 886, 888, 890, 894, 895, 897, 900, 902, 907, 915,923, 930, 936, 939, 950, 951, 952, 954, 957, 961, 962, 972,976, 981, 986, 987, 995, 997, 998, 1001, 1008, 1024, 1025,1033, 1034, 1035, 1043, 1046, 1051, 1052, 1057, 1058: n = A,T,C or G
  misc_feature 1065, 1068, 1072, 1089, 1097, 1100, 1108, 1114, 1123, 1125,1129, 1139, 1151, 1159, 1162, 1164, 1165, 1174, 1175, 1179,1180, 1183, 1187, 1188, 1189, 1194, 1200, 1206, 1227, 1228: n = A,T,C or G
cnccctgnnnnngnnnnnatnnnnnnntnannannnattntgnnntgnnntngnnnnagnnnnntngatnnngnnnntnnnnnnnnnnnnncnnnnnnnagnaggtgagnccgcgcgcgcgtatacnactcactatagggcgaattggagctccaccgcggtggcggccgcccgggcaggtaccgcgggggaagaaggaagaacgttgcttgggcaaaaggagcatattctcaggagacggggcccctgcctgccacaccaagcattaggccaccaggaagacccccatctgcaagcaagcctanccttccangganaaaagaggccccttgcagntccttcatcatgaactggcccatgatcatctctgggcttaattgtgggtagtgcttaaaagtttgtttggaatngaccctttatttcntacttttattttctggcccccaaaagacctgggggaatttttattcaaggccaaagnangggttttttttcntttatcccaccttttcttggaaattcaattnttttgngggnaaatggaaaaaaggccaaggggggaacctttttttggcaaaaangggaaaaaaagggggaattncccccaattttgggcccaaattttgnttcaaacccanccgccccaaaaaanaaaaaaccttggaanggttttttctttttaaanggaaccattaaaacctgggattgcctttggannaaaaanttaatnttttaaatttgggccnttaaaattttaanccaattcggtgggaaaanaaaaaaaaaaaagggggngggcccttttggggattncaaacccaaccntctttgnggnttccaaanngggggtttnncccnaaatccccggaaattcnngaaatttttncnancttnngnccngnaccantttggggnccttaaanaaaaaanacaaanttnggaagggcctnnnantcnatgnngggaaaaaantaangcttnacccnncaaggganannttntgggaanaaaaaaaaatggcccnnaaagggannnacccaagnttnccctnntgggnnaaaaganaancttntatctttttgccacctntttttttnggnaaaaaccntaaacnaggggcggntnttgnggccaaaggnaaaaattttttnaaattaanccnannttcgggggnnaacnnacngaannnggggncctttnggcccnattttggggaaaacttagctnnt

SEQ ID NO: 5377 - DNA, 1342 bp, Homo sapiens
  misc_feature 2, 3, 4, 6, 7, 8, 9, 10, 11, 12, 14, 15, 16, 17, 18, 19,20, 21, 22, 23, 24, 25, 26, 27, 28, 29, 30, 31, 32, 33,36, 37, 38, 39, 40, 42, 43, 44, 45, 46, 47, 48, 49, 50,51, 52, 53, 54, 55, 56, 57, 58, 59, 60, 61, 62, 66, 67,68, 69: n = A,T,C or G
  misc_feature 70, 71, 73, 74, 75, 76, 77, 78, 79, 80, 81, 82, 83, 84, 85,86, 87, 88, 89, 90, 91, 92, 93, 94, 95, 96, 97, 98, 99,100, 101, 102, 103, 104, 105, 108, 116, 117, 124, 273, 370,429, 451, 452, 488, 522, 533, 537, 564, 613, 616, 637: n = A,T,C or G
  misc_feature 643, 651, 654, 658, 660, 675, 684, 691, 705, 731, 733, 738,746, 747, 748, 750, 756, 762, 772, 781, 802, 812, 813, 820,825, 828, 829, 872, 876, 887, 892, 894, 896, 898, 901, 906,907, 913, 917, 922, 929, 930, 955, 970, 977, 988, 991: n = A,T,C or G
  misc_feature 997, 1003, 1006, 1012, 1019, 1026, 1027, 1035, 1036, 1037,1038, 1049, 1051, 1054, 1067, 1076, 1080, 1082, 1091, 1095,1098, 1099, 1122, 1130, 1154, 1156, 1159, 1162, 1175, 1180,1191, 1200, 1206, 1213, 1231, 1242, 1245, 1248, 1279: n = A,T,C or G
  misc_feature 1284, 1291, 1297, 1299, 1304, 1309, 1311, 1317, 1324, 1328,1332, 1333, 1337, 1339, 1340, 1341: n = A,T,C or G
tnnntnnnnnnnannnnnnnnnnnnnnnnnnnnatnnnnntnnnnnnnnnnnnnnnnnnnnnatannnnnntnnnnnnnnnnnnnnnnnnnnnnnnnnnnnnnnnagngggtgggnngcgcgtnatacgactcactatagggcgaattggagctccacccgcggtggcggcccggcgggaggcttgacgaagagccgggaggcgttagccgaaggaagagaaaaaccgaagacgaagtcactacaagccccgcgtacctcgggcccgctctangaactagtggatcccccgggcttgcaggaattccgatatcaagcttatcgataccgtcgacctcgagggggggggccccggtacccccaactttttngttccccttttaagtggagggggttaaaatttggcgccgccttttgggccggttaaatnaattgggtcaattaagcctggnntttccctggtggtggaaaaattttggtttattcccngccttcaacaaaatttttccccacccaacaaaancaattaaccgnaagnccccgggggaaggccaattaaaaaagnttggttaaaaaaggccccttgggggggggtggcccttaaaatttggaanggnggaaagcccttaaacctttcnaccaantttaaaanttnggcngnttgggcggcctttcnaaccttggncccccgnctttttttcccaangttcccggggggaaaaaaacccttgntnccgtnggccccannncnttgcantttaanttggaaattnggggggccnaaacatccccccgggggaaanaaaaggcccnnttttttnccggntanntttgggggccgcctttttttttccggctttttcccttgggggntttnaacttggaacntttgncntngnggnccctnnggggancctnttctngggtttnngcggggcaaaaccccgggaaatttnaaaccttcaaccttncaaaaanggggggggggnaantaaccnggggtntantttccncacaaanaaattcnnaggggggnnnntaaaccccccnanggnaaaaaaaaaaaanaattttttngggngnccaaaaaangggnccnncccaaaaaaggggggccctcggnaaaacccnttaaaaaaaagggccccccttttncnttnggncccttttttttcnaaaangggtttcccgnccccccccntgggcngggggcnttttccaaaaaaaatttntcccccctttnaanttnaaaaagggggggggggaaaaaaccccccccnggggnctttttntaaaanantcccncgggngntttttnccccctngggnaaannctcncnnnt

SEQ ID NO: 5378 - DNA, 898 bp, Homo sapiens
  misc_feature 4, 5, 13, 28, 497, 530, 537, 551, 595, 650, 653, 664, 699,700, 706, 712, 726, 727, 735, 737, 754, 779, 783, 787, 803,805, 813, 818, 825, 831, 836, 837, 843, 845, 846, 848, 849,850, 864, 874, 878, 885, 894: n = A,T,C or G
aggnntccgccantcctactcactatanggcgaattggagctccacccgcggtggcggccgcccgggcaggtaccgtggtttcagccttgtgtggtcatcactggcttctggagctattggtgatgtccaagggaaagctttgagagtttatgtttactctttgagtcccaggagaagcctggcaccctctttgcaaattggcctttgctctttcaatgcctttcatccatctccactctctcaactgcctaaagtcacagcacagatactgcccagtgccttaagaggagacatgatctctaccagggactctcagcaaacacgggactgtgttcaagtccacaaaggaaaagcgtttttgaagctctcattgttcatgtaaaaatcatacacgtggcatgttgctccacattccttacacacaggggtaagaggggattgcttttgtgacccacgttcaaatatgtgactgtttttcttttctcttttactgctnaagcagccctggaaaggataaatggaatattanacttaanatttggttttccangaggctcaattctgaacacaccagaatgtcagaagcttggaaangggacctataaagaacatcttaatctggatcctcttgtaaccctcgggccccttntanaaaactaagtnggattccccccggggcctgcaaggaaattccgatnnttcaangcttantcgataacccgtcnnaccctttnanggggggggcccccggtnccccaacctttttgtttcccttttnagtnaagngggttaattggcgccncnttggcggnaaatnattgggncattanccttnntttccngnngnnnaaattggtatttcngtttaacaanttcncccaaanatttacgancccg

SEQ ID NO: 5379 - DNA, 821 bp, Homo sapiens
  misc_feature 653, 666, 714, 725, 727, 746, 747, 754, 759, 776, 788, 789,793, 795, 797, 799, 802, 803, 804, 812, 814, 815, 816, 817,819, 820: n = A,T,C or G
gaattggagctccccgcggtggcggccgcccgggcaggtacgcgggatatgatactctcttccaggactgaatccgctagtctggccaaaaaaaaagcactcagccacatcctactccccaataaatgtctctggggtcttcattttctcttccggctgatcctcagttcatccagttccttctccattaagtgggattcagcagtggactctgaaagctgaaagtgaagcagcggctgttagcaagcagcacatttctaggaaatgtttcgggttagcaaggccggccctacacacggaggaaaggccccctgccacttctctgatgctgctggcttcctcgatgggaaaccctctgtaactgggtagaatgcaacccctgatgacccaggaccacaagtacctcggccgctctagaactagtggatcccccgggctgcaggaattcgatatcaagcttatcgataccgtcgacctcgagggggggcccggtacccagcttttgttccctttagtgagggttaattgcgcgcttggcgtaatcatggtcatagctgtttcctgtgtgaaattgttatcccgtcacaatttccacacaacatacgagccggggagcataaaagtgtaaagcctgggggggcctaatgagtganctaactcacattnattggcgttgcgctcactggccgcttttcaaatcgggaaacctgtggnggccagcttgnanttaatggaatttggccaanncccccgngggangagggcggttttgcgtntttggggggctnnttcngntncntgnnnactggaantnnnngnnc

SEQ ID NO: 5380 - DNA, 902 bp, Homo sapiens
  misc_feature 535, 589, 605, 619, 631, 655, 669, 673, 678, 683, 686, 696,697, 714, 715, 721, 726, 730, 750, 753, 757, 763, 765, 784,788, 792, 794, 809, 826, 827, 834, 836, 838, 849, 851, 857,871, 874, 878, 879, 901, 902: n = A,T,C or G
gtaatacgactcactatagggcgaattggagctccaccgcggtggcggccgaggtactatctttaagatgtaagtctggcattgtggaaagatggttccagtttctatgacctaccttggggaagaggaattcaagtttctgtggcttgccttcagggagaatgaggctgagacaggagggcaggataacatcagagaaaaactttgcttctgaggccttcactttgggttttctgagccccaacatctgctagtgttgtaaagagaacaattagggaccaagtgaggggaggaaagcatccatctctgcattctgatgctgggagactatttccttgaaatgcaattgattttgcctctgctaagaggctctgctggctacccatgtacctgcccggggcggccgcccgggcaggtacgcgggggaagcttgcttctgcctggcatctgtgagcagctgccatgctccggccaggatcccttccttctcctcattggctgatggatcccaaggggctcctctccttgaccttangtgctgttttctctccctggctttttgggggccaaggctacgggaaccagggtngggccgcattgaatgnaaactgcccaaaangatttttccccngcagtttgggaaagcaaaagtgcntggcttgccccctngacnttatngaaanggnttaaataagnngccttggaaccaaaaanncttccncattngtcngtcccaaatgggcaaaatcnctngganaaacangngttcgaaaaaacaaaaaanaatnggcntntttgaatccattccnaaagcagggcccctccnngttattntnanggaaaatcgcntncaaagntttttttttggggnaantttnncccctggggattcggggaaaann

SEQ ID NO: 5381 - DNA, 393 bp, Homo sapiens
gcgtaatacgactcactatagggccgaattggagctccaccgcggtggcggccgggggtaggatgggaagccgtggggcaagggaggttgcaggaagcccatccttcccctcctgcggcaggtacctcggccgctctagaactagtggatcccccgggctgcaggaattcgatatcaagcttatcgataccgtcgacctcgagggggggcccggtacccagcttttgttccctttagtgagggttaattgcgcgcttggcgtaatcatggtcatagctgtttcctgtgtgaaattgttatccgctcacaattccacacaacatacgagccgggagcataaagtgtaaagcctggggtgcctaatgagtgagctaactcacattaattgcgttg

SEQ ID NO: 5382 - DNA, 1199 bp, Homo sapiens
  misc_feature 2, 5, 7, 9, 10, 11, 12, 13, 14, 16, 17, 22, 23, 24, 25, 26,27, 28, 29, 30, 31, 32, 33, 35, 36, 37, 38, 39, 40, 41,43, 45, 46, 48, 49, 50, 51, 52, 53, 55, 56, 58, 59, 61,62, 63, 64, 65, 66, 69, 75, 79, 81, 82, 83, 84, 86, 88,89: n = A,T,C or G
  misc_feature 90, 91, 93, 94, 95, 96, 97, 98, 99, 100, 103, 104, 110, 111,112, 116, 126, 134, 145, 221, 472, 498, 516, 517, 522, 540,552, 567, 569, 570, 573, 576, 585, 589, 590, 601, 602, 609,613, 614, 620, 622, 648, 652, 662, 684, 688, 709: n = A,T,C or G
  misc_feature 715, 719, 720, 730, 747, 761, 778, 779, 796, 799, 806, 814,817, 821, 823, 824, 838, 855, 869, 871, 878, 882, 887, 899,902, 921, 933, 935, 943, 948, 959, 961, 978, 980, 985, 998,1002, 1003, 1004, 1012, 1014, 1017, 1018, 1021, 1022: n = A,T,C or G
  misc_feature 1026, 1035, 1036, 1037, 1044, 1050, 1056, 1064, 1072, 1080,1083, 1087, 1101, 1108, 1109, 1112, 1115, 1124, 1127, 1131,1132, 1138, 1143, 1148, 1155, 1164, 1165, 1168, 1173, 1174,1176, 1180, 1184, 1185, 1190, 1191, 1195: n = A,T,C or G
cnaanancnnnnnntnntttannnnnnnnnnnntnnnnnnngntnngnnnnnntnncnngnnnnnntgntctgtntttntnnnntntnnnnannnnnnnnagnnaggggnnngatncgcgtcattngtaatacnactcactatanggcgaattggagctccaccgcggtggcggcccgcccgggcaggtactcatcacgttgaagggtcatcatatgtgtncccatttttttctctgcaggaaagtgagcttctggaaggctgtatctgagtcctgttcctccaatattcaatgaatgctgtctgaatggatcaatcaaatggagctatggcctcttctgattatgacagctgatcactaatatgatgtgacctccccatttcatgtacctcggccgctctaagaactagtggatcccccgggcctgcagggaattccgatatcaagcttatccgatacccgtcgaccttcngagggggggggcccggttacccagcnttttggttcccttttagnngaagnggtttaaattgcgccgcnttggcagtaaantcaatggggtgcatnannccnggnttttccctngtgnnggaaaatttgnnttaatcnccgnntccaananattttccaccaccaaaacattaccgnaagncccggggaangcccattaaaaaggtgggttanaagncccttggggggggggcccttnaaatgnaagnnggaggccttnaaccttcaaccattttnatttggcggtttgncgggccttcaaccttgnncccggcctttttcccangtnccggggnaaaacacntgntccngnngccccagccttgcnatttaaattgaaaatcnggggcccaaaaccncncccgggngaangaagngccgggattttngcngttttttgggggcgccttntttcccgccttntncctcgggnttcanttggaaccttngnatagaggctccaggagncnattcntgagactggcgcncgannncgggattncnaannttnnctcnccaaggggnnngggacgntaaccngggggntttccccnagaaattnaatggggnggntttncccgccgagtaaanaaaaaannttnttnatccaaaanagncccnnaacccnagggnccggnggacccncgaaaaaannggnagggnngngtgnggcnnttgtnncccncccc

SEQ ID NO: 5383 - DNA, 850 bp, Homo sapiens
  misc_feature 72, 563, 569, 587, 598, 601, 611, 618, 625, 629, 635, 637,638, 639, 645, 646, 651, 658, 659, 672, 685, 686, 691, 711,716, 717, 725, 737, 740, 745, 753, 775, 777, 779, 781, 786,787, 788, 793, 794, 798, 805, 807, 809, 810, 815, 816: n = A,T,C or G
  misc_feature 817, 820, 821, 828, 831, 835, 838, 841, 846, 848: n = A,T,C or G
gaattggagctccaccgcggtggcggccgcccgggcaggtacaatagaagtcagtttggagccatagaagtnggcttagttgagttggagatgcccatcttgaatttctgagagggcaagatatacttatttccattttatgcagtctgcatctacctaaaacctctgactgatgtgggaatggcgaaacactatcaggcttgaatgtgtgtgaaaaacaccaaattggcccagatccctaacagagcaatcctcgaggggatggtggctattgctggagaggcattagctattcacagggtacctcggccgctctagaactagtggatcccccgggctgcaggaattcgatatcaagcttatcgataccgtcgacctcgagggggggcccggtacccagcttttgttccctttaagtgagggttaattgcgcgcttggcgtaatcatggtcatagctgtttcctgtgtgaaattgttattcccgctcacaaattccacacaacataccgagccgggagcataaaagtgtaaagcctggggtgcctaatgagtgagctaactncattantgcgttgcgctcaattgnccgcttttcantcnggggaaaaanctgtctntgcccancctncatttnannnaattcnncccancgccccnntttagaagccggnaaaaccctatttnngcccnctctttcctttattcaattnctcannaaaccccngtggagaaaggngtnttttnggtatttnggcgacccttttccccttttcnancncntaaannnacttnnttanggctttngncnntttannnttnntgggganaanggtnttnaancttantnaa

SEQ ID NO: 5384 - DNA, 868 bp, Homo sapiens
  misc_feature 501, 516, 581, 600, 607, 637, 642, 660, 708, 710, 726, 728,731, 736, 742, 753, 754, 769, 775, 776, 778, 782, 788, 794,800, 807, 817, 823, 825, 826, 827, 828, 829, 837, 841, 842,846, 851, 853, 857, 861, 862, 863, 864, 868: n = A,T,C or G
gaattggagctccaccgcggtggcggccgaggtacaaatcaacagatatgttttagagaagtgttaaattttttaaacgcaagtgtaatttaaatagaatgaaatacaacaatccgaagtgcatagacgatgaggtaagatttttttcatcaactttattgaagtgtaatttacatataataaaatgcaaccatatgtctacattcatgcaaataccaccttgtaagaaatgcctttcctgactaccttatctaaattagtcctgcccagagttcagagaccagcctgaccaacatggagaaaccccgtctctaccaaataatacaaaaattagtcgggcatggtggagcatgcctgcaatcccagttactcaggaggctgagtcaagagaatcgcttgaacccgggaggcggaggctgcagtgagccaagatcgtgccattgcactccagcctgggcaacaagagcaaaactccatctcaaaaaaaaaaaaagaaaaaangaaaaaagtaaagtnccctgcccggggcggccgcttctaagaacctagtgggatccccccggggctgcagggaatttgantattcaaggctttatcgantacccgntcgacctccgaggggggggggccccggtanccagntttttgttcccttttaantgaggggtttaaattggcgccgctttgggcggtaattcatgggggcanangcttggtttcccttgngntgnaaatntggttntctcggttcannaatttccacaacacnatttcnnancccngggggngcttanaagtgntaaaagncctggggggnggcctnannnnngggagccnaacnnccanttaantngggnttgnnnntcan

SEQ ID NO: 5385 - DNA, 931 bp, Homo sapiens
  misc_feature 354, 422, 539, 546, 565, 573, 580, 602, 623, 634, 651, 658,666, 671, 676, 679, 680, 688, 694, 695, 706, 733, 735, 739,751, 752, 766, 767, 771, 775, 777, 783, 789, 808, 818, 819,844, 853, 856, 858, 859, 862, 867, 872, 874, 875, 876: n = A,T,C or G
  misc_feature 881, 885, 886, 887, 888, 892, 906, 908, 915, 919, 922, 924,925, 930, 931: n = A,T,C or G
gcgcgtaatacgactcactatagggcgaattggagctccaccgcggtggcggccgcccgggcaggtacacaggggcataatcaacccatttcctgcttcaaaaggaatcagagcttttccacttcagtgtattcacatagctgaagggcatacaaaagctgtgctctgtgtggattctactgatgatctcctcttcactggatcaaaagatcgtacgcggggcagcattcactctccctgtcttttccccttccctcagcagaaacgtgtttatcagcaagtcgtgagtcaaactgctgccttttaaaaaacccacaaaatgctgattcagttcaaaattaatgcaaatgtttnaaaactgggtttctgatatttgtaaatgtgttttctttattagataagagtgtattaccattaaaggncattagtataaatattgctttcaaaaagaaaatgggtagacaaaaactataatccagcattcttttattgcatttgggaaaagacctgggccaaaagtcctttttgggatggggttnggggagnatggtggccttggaaaagntacccttnggccccnctttttagaaacttaggtgggnatcccccccgggggcttgcanggaaatttccnaatattaaaaacctttnattcggntacccctncccanccttntanngggggggngccccnnggatcccccanacttttttgttccccctttttaagggngngggntttaaatatggnncccccttttgggcnnaaanacanangggganaaatanctgtgtttcccgtgggggngaaaaaatgnntttttccgtttttaaaaattttccncacacaaanaananngancccgnggggncnnntaaanagtnnnnaacncccgtggggggggncnttaaagngggngancnnacacnn

SEQ ID NO: 5386 - DNA, 893 bp, Homo sapiens
  misc_feature 3, 4, 5, 6, 7, 9, 11, 12, 517, 559, 561, 644, 674, 693, 702,721, 744, 751, 755, 759, 768, 769, 771, 777, 778, 779, 792,797, 804, 810, 823, 830, 832, 835, 836, 843, 853, 855, 866,869, 871, 876, 877, 891, 892, 893: n = A,T,C or G
gtnnnnncncnnggagcgcgcgtaatacgactcactatagggcgaattggagctccaccgcggtggcggcccgcccgggcaggtacgttgatgtaagcaaggaattctgtatattgaagaaattaagtgtcttgcccagggtcacatggctggaaagtgacagagccaggattcaaactgtggtctcctgattctgagaccagtgttctcttgactgccttgtacctcggccgctctagaactagtggatcccccgggctgcaggaattcgatatcaagcttatcgataccgtcgacctcgagggggggcccggtacccagcttttgttccctttagtgagggttaattgcgcgcttggcgtaatcatggtcatagctgtttcctgtgtgaaattgttatccgctcacaattccacacaacatacgagccgggagcataaagtgtaaagcctggggtgcctaatgagtgagctaactcacattaattgcgttgcgctcactgcccgctttccagtcnggaaaacctgtcgtgccagctgcattaatgaatcggccaacncnccgggagaggcggtttgcgtattgggcgcctttccctttcttgcttcactgactcgctggcgctcggtccgttccggcttgcnggcgaaccgggtttcagcttacttcaaaanggccggtaaatacgggttnttccacaanaaatcaggggggattaacnccaggaaaaaaaacatttttganccaaaanggcnaccnaaaaggccnngnaacccnnnaaaaaagggcccntttgnttggcgntttttncaaaagggttccnccccccntnggnngggtttnaaaaaaattncnccttaaattanaangnggggnnaaaccccccaggannn

SEQ ID NO: 5387 - DNA, 908 bp, Homo sapiens
  misc_feature 3, 518, 538, 566, 613, 622, 624, 688, 712, 715, 725, 726,735, 741, 774, 792, 805, 818, 819, 828, 830, 846, 851, 852,853, 860, 865, 866, 870, 871, 872, 877, 878, 897, 899, 902,905: n = A,T,C or G
gtnggcgcgcgtaatacgactcactatagggcgaattggagctccaccgcggtggcggccgaggtacacctcacaaatgatagtggctgagagccaaatgatgagcttctctgtgttatgtctacctagctgtgattatatcaggcacaggattgtgcgcgtgtgctctaatcccactgtgtcatgcaggatttttacctcggcctatgcctgcctggcagcaacacagccatgttccttacactccgccccctaggccaagggggtcctcttaatgggaactcgtgcacataggggagcaccctggacccagaggccacagcaacaataaagagagcaacaacctactactaatattcctgctatgctacctatgattataagagcccagtgtaggccagagcccagagacacccaccatctctgcaggcggtcatcagtaaggtattcaattgccttaatctcccatgacatgacaccccctgcaaaagctgccactatgttctggtggttgtcanggatgaatgtacctgccccnggcgggccgttctaaaactagtgggatncccccgggctggcaggaattcgatatcaagctttattcgatacccgncgaccctcnanggggggggcccggtacccaactttttggtccccttttagtgaaggggttaaattgccccccttnggcgttaaatcaatgggcataagntgntttcctgggnngaaaaattnttattncgtttacaaattccccaaaaaaaaaaaaaaaancccgggggaccttaaaantggtaaaaacctngggggggccttannggggggggncnaaacctcccaatttantttgnnnttgggcntaaanngccnnnttttnnaaatgggggaaaaactttntnggnccnatg

SEQ ID NO: 5388 - DNA, 869 bp, Homo sapiens
  misc_feature 2, 3, 22, 27, 28, 30, 36, 540, 552, 582, 631, 679, 697, 704,712, 713, 717, 718, 730, 731, 734, 737, 751, 764, 772, 797,805, 820, 835, 838, 851, 852, 859, 869: n = A,T,C or G
gnngacgcgcgtaatacgactnactannantcaatntggggcgaattggagctccaccgcggtggcggccgaggtaccgagtggcatttactggtgaaataacgatttcccactttctctacatcatcactccccatcccaaatccattgtctatcacttgaacttggaaggtttccatattcaccctgacagccacacattttgcttcagcatcaatactgttgagggcaagttcctcaacacattggcccaaggagcttatggccaaaccagaacgcaatttggcttgtacctgcccgggcggccgctctagaactagtggatcccccgggctgcaggaattcgatatcaagcttatcgataccgtcgacctcgagggggggcccggtacccagcttttgttccctttagtgagggttaattgcgcgcttggcgtaatcatggtcatagctgtttcctgtggtgaaattgttatccgctcacaattccacacaacatacgaacccgggagcataaagtgtaaaagcctggggtgcctnatgagtgagctnactcacattaattgcgttgcgctcactggnccgctttcaatcgggaaaactgtcgtgccaacttcattaatgaattggnccacccccggggaaaagcggtttgctattgggcgcttttccttcttgnttaattaactccttggcncgggccnttcggttnngggnnaaccggtttaannttnctnaaaaggggggaaanccggttttccccnaaaaaaangggggggaaaacccccggaaaaaanattttggnaaaaaaagggccccnaaaaagggccggaanccntaaaaaagggccnntttttgnggtttttttn

SEQ ID NO: 5389 - DNA, 928 bp, Homo sapiens
  misc_feature 326, 341, 342, 354, 389, 443, 453, 469, 478, 495, 497, 524,533, 534, 547, 552, 558, 565, 567, 577, 583, 594, 597, 601,604, 616, 628, 633, 640, 643, 644, 647, 661, 678, 682, 685,689, 692, 700, 702, 706, 709, 712, 716, 724, 730, 733: n = A,T,C or G
  misc_feature 740, 750, 751, 752, 756, 763, 767, 781, 786, 787, 790, 794,798, 803, 808, 815, 831, 832, 835, 841, 843, 845, 846, 857,864, 875, 879, 884, 885, 886, 887, 888, 890, 893, 900, 907,909, 910, 911, 915, 917, 919, 923: n = A,T,C or G
ggagctccaccgcggtggcggccgcccgggcaggtacccagattggaatcttccggaaaaatggaggaaaggcaacagaatcatgtctttcagagcagcatgatcagcatgtttataaagctgtttttaccacctcatacccaagcttacagcaggaaaggttctttaaacttgtgttggttaatgaggtgtcccaacaagtggaaagcttaagagtgagccacctgccaaggcggaaagaacaggctggggaacggggtgataagcccaaagacattggtggctcaaaggcccctgtcccatgctttggaccagtcttcacagangttgaaaaggccaannataagagaactnttcccacacccttctgtgttggagataaatttttncgtaccctcggccggtcttaaactagtgggatcccccgggcctgcaaggaattngatttcaaancttattcgattaccgncgaaccttngaagggggggccccggntncccccagctttttggttccccttttangtgaagggnntaaatttgccccnccttnggccgnaaacccntnggaccataanctggtnttccctggtgnggnaaanttnttttttttcccnttcacaaatttnccacnccaaccnttnnganggccgggggaggantaaaaaggtgttaaaancccnggngggngcnccaaatgnantggngcnttncccncccctttntatttnccnttgggcnctccctgggnnngggnttcccanttcnggaaaaaccttgtnttccnnccnttgnattnatttnaaaancgccccnctcccccggggggaanngcngttttncngnnttttgtggggnctttatncggtttttttntccnatttnnnnncntgnaattccngcctgtngnnntttnananaacntatcc

SEQ ID NO: 5390 - DNA, 1201 bp, Homo sapiens
  misc_feature 1, 3, 4, 5, 7, 8, 9, 10, 17, 18, 19, 22, 24, 25, 26, 27,28, 29, 31, 32, 33, 34, 35, 39, 40, 41, 42, 47, 49, 52,54, 56, 57, 61, 64, 65, 68, 70, 74, 78, 80, 81, 82, 83,84, 87, 92, 93, 96, 97, 98, 99, 100, 104, 107, 130, 131,134: n = A,T,C or G
  misc_feature 152, 159, 182, 184, 201, 208, 211, 231, 234, 253, 254, 276,280, 303, 325, 345, 356, 368, 374, 422, 427, 449, 464, 474,483, 486, 487, 496, 537, 545, 548, 561, 567, 583, 591, 593,594, 597, 632, 669, 673, 687, 692, 703, 708, 721, 726: n = A,T,C or G
  misc_feature 735, 742, 758, 759, 764, 769, 772, 796, 809, 811, 814, 817,818, 823, 842, 843, 845, 854, 867, 874, 875, 882, 883, 892,897, 903, 911, 927, 928, 932, 935, 945, 949, 956, 963, 967,968, 969, 985, 986, 989, 998, 999, 1004, 1010, 1012: n = A,T,C or G
  misc_feature 1015, 1020, 1024, 1040, 1042, 1047, 1049, 1051, 1058, 1071,1072, 1075, 1077, 1087, 1107, 1113, 1118, 1127, 1128, 1131,1137, 1154, 1156, 1157, 1162, 1164, 1168, 1180, 1190, 1191,1197, 1200: n = A,T,C or G
nannngnnnnacgacgnnngangnnnnnncnnnnnctcnnnncacgncngangngnngcgngannggngngagngacnannnnnaangaagnngannnnnaagnagnttgaagcttggaaacccctcacnnttnggcaaacgcagcgccacnccaccgnggtggcggccgcaaggccccggnangctgcggaacccacganacgggcngcngcagctcggctggcactaancanggcggataaatggaggagnncctcggccgctctagaactagnggancccccgggctgcaggaattcganatcaagcttatcgataccgtcnacctcgagggggggcccggnacccagctttngttccctttagngagggntaattgcgcgcttggccgtaatcatggtcataagctgggttcctgtgngaaantgttatccggtcaccaattccncacaacatacggaancccggggagncataaaagntgnnaaaagcccngggggggtgcccttaatggagggggaagcctaacctcaacnatttaaanagngccggataggcgncctcanctggccccggcttttncccaaatncnnggnaaaaaccctgggtccggtggcccaaacctggcaanttaaattggaaatccggggccccaaacgccgcccggngggnaggaagggccgggnctttngccgggtattnggggngccggcctctttnccgcntttcccttnggctccnactggaacttccgccnnggcgnctccnggnaccgttccgggcctggcggggcgnaaggccgggtatncnagnccnncaacnccaaaaagggccgggggannanaccgggggnaattccccccaanaaatcannggggggnntgaaaccgncccangggaanagaaaacnaatggtgtggagcccnnaaanggncccagccaanaaangggcccngggaaancccnnnaaaaaagggccccccnnttncctggggcnncgttntttccnanaanggcgncccncccccccctggacgangnccttnancnaaaaaantgggccgcctcannagnanaagggggggngaaaaacccccccccggggnccaatnaaaanaataacccnnggngggggncccccccgggggaagancnncatcngnggcngggcccgcccgnggttgcgggnncccttncanc

SEQ ID NO: 5391 - DNA, 1159 bp, Homo sapiens
  misc_feature 2, 3, 5, 6, 7, 9, 10, 11, 14, 18, 19, 20, 21, 22, 23, 24,29, 31, 36, 42, 43, 45, 48, 51, 54, 55, 56, 57, 58, 59,60, 65, 69, 71, 72, 77, 78, 79, 81, 82, 83, 84, 86, 93,94, 97, 98, 100, 101, 102, 106, 107, 116, 120, 587, 615,631: n = A,T,C or G
  misc_feature 659, 665, 682, 695, 743, 752, 754, 770, 771, 779, 783, 785,812, 818, 820, 835, 840, 843, 847, 848, 881, 883, 885, 903,909, 915, 925, 940, 942, 964, 969, 971, 973, 979, 998, 1014,1015, 1045, 1049, 1053, 1064, 1065, 1068, 1071, 1079: n = A,T,C or G
  misc_feature 1097, 1101, 1103, 1112, 1113, 1114, 1117, 1128, 1138: n = A,T,C or G
tnngnnnannnttntttnnnnnnnatttntnttagnttaatnngntcntanatnnnnnnntaatntttntnnttttnnngnnnnanggtgggnntgnntnnnttcnntcactttanggcnaattggagctccaccgcggtggcggccgaggtaccgtggtttcagccttgtgtggtcatcactggtttctggagctattggtgatgtccaagggaaagctttgagagtttatgtttactctttgagtcccaggagaagcctggcaccctctttgcaaattggcctttgctctttcaatgcctttcatccatctccactctctcaactgcctaaagtcacagcacagatactgcccagtgccttaagaggaggacatgatctctaccagggactctcagcaaacacgggactgtgtttcaagtccaccaaagggaaaaagccgtttttttgaagcctctcatttgttcatgtaaaaaaatcatacaccgtggcattgttgctcccacatttcctttacacaccagggggttaggaagggggaattgcttttttgtgacccaacggtttcaaaatattgtggacttggntttccttttttctctttttttacctgcntaaagccaagcccctngggaaaaagggaataaaaatggaaattntttagnacctaaaagaatttttngttttttcccaanggaaggggcttcaaattccttgaaaccaccaaccaagaaatggtccangaagccttngngaaaggggaccttatnnggaagaantcantnttgggtcttggaccccttttttgttancccttngnccccgggggcggggnccggnttnttannaaacttaggtggggaattcccccccggggcctngnangggaaatttccgaattanttaaancctttntccgaaatancccggcccaaccctntnaagggggggggcccccgggtanccccnancntttttngtttccccttttaagtggngggggtttaaattggnnccgcttttgggggggtaaatcaattgggcncatnaacngggtttccttnnggnggnaaaattgntttttcccccttcccaantttncncaaaaaaannnacnaaccccggganccttataaanggggtaaaaggccctgggggg

SEQ ID NO: 5392 - DNA, 863 bp, Homo sapiens
  misc_feature 25, 154, 333, 365, 367, 386, 413, 425, 507, 517, 552, 569,602, 615, 632, 634, 640, 649, 654, 667, 669, 690, 694, 701,702, 704, 706, 731, 737, 740, 747, 748, 754, 755, 760, 762,766, 769, 774, 789, 793, 794, 797, 802, 803, 806, 824: n = A,T,C or G
  misc_feature 832, 833, 834, 840, 841, 845, 846, 853, 859, 862: n = A,T,C or G
gggcgaattggagctccaccgcggnggcggccgaggtactttttttttttttttttttttttaactcatacgtttttatttgagatctgccttgcttatttcacaaagagttgcaacccgaatgctgaagattttccttcatggcgagtctcanaatacaacctcagctcatttgccaaatcttgccagcctgataaacatttttcttttgggggctggcatctcgtttcctccttcttctcttggtcacatataatgttggtcatgcctgagcttatagcagcagcagccagaggaagatgaggtaattaggcagatcacagcggaacaggntgcattctcattcctttcagccttctctcctntntccccaacctgcacagttntccccgcgtacctgcccgggcggccgntctagaactagnggatcccccgggctgcaggaattcgatatcaagcttatcgataccgtcgacctcgagggggggcccggtacccagcttttgntccctttagngagggttaattgcgcgcttgggcggtaaacatggncataggctgtttcctgnggggaaattgttatcccgctcacaaattccacncaaacataccgangccgggagcataaaagngnaaaagncctgggggngcccnaatgggggggggncntaactcacaatttaatttggngttnggggctnnancntggcccgctttttccaagggggggnaaaccnggngggggcnngctgtnntttantngaantcngcccnccccccggggggggngggnnggntttgnnttnttggggccctttttcccnttttcttnnnttaaannaatnnaggggcngggggnggnt

SEQ ID NO: 5393 - DNA, 823 bp, Homo sapiens
  misc_feature 384, 489, 514, 553, 562, 563, 570, 575, 624, 641, 650, 656,662, 669, 680, 688, 711, 716, 732, 737, 744, 748, 756, 769,788, 794, 800, 801, 802, 804, 814: n = A,T,C or G
gaattggagctccaccgcggtggcggccgaggtacgcgggtcagcgatcagccagcaaatatttttctttgagcttgtgaaagctctgtgttcttttgccttcaatctgctgtcttcaaaacaaacaaacaaaaaaagcttcttgcgcctttccctcccctgttttcttcctttttctttttgcttgtatgcacaaggtaggacttacttcgtaagaaacaaaatgccagtattttcttaagccatgatgtgaaaccaatgaccctgtgaccacatggcacagaacactaaatttttggtcccatggctgaaacttgagggtgactaaaagtaatgcctgtgaaacatgatatctatctgggatggccatttgatctctaaaangaattttgtcctgcccgggcggccgctctagaactagtggatcccccgggctgcaggaattcgatatcaagcttatcgataccgtcgacctcgagggggggcccngtacccaactttttgttccctttantgaggggttaattggcgcgccttgggcggaaatcatggnacatagctnntttcctngtggngaaaaattgttattcccgctttacaatttccccaccaacaataccgaanccggggaggcataaaangggtaaaangccccngggggntggcctnaatggaggtgnggctaacntcacaatttaatttggcgtttgnggctnactgggccccgttttntcaantccgggnaaancctgtcgnggcccagctgaantaaaatgaaattgggccancccccngggggnnnangcggttttgncatattggg

SEQ ID NO: 5394 - DNA, 1327 bp, Homo sapiens
  misc_feature 1, 4, 5, 6, 7, 8, 10, 12, 19, 20, 21, 26, 27, 34, 36, 42,46, 49, 59, 64, 68, 72, 84, 85, 86, 87, 89, 96, 97, 98,103, 110, 112, 114, 116, 118, 126, 133, 155, 195, 197, 200,202, 203, 215, 224, 225, 305, 385, 425, 427, 430, 468, 494: n = A,T,C or G
  misc_feature 499, 507, 536, 543, 548, 565, 577, 581, 596, 603, 612, 616,639, 647, 656, 657, 679, 681, 686, 688, 702, 703, 704, 708,709, 719, 725, 728, 737, 746, 758, 761, 764, 774, 775, 778,781, 789, 794, 801, 805, 820, 829, 834, 839, 842, 862: n = A,T,C or G
  misc_feature 876, 887, 895, 898, 899, 910, 927, 928, 929, 935, 939, 943,947, 955, 961, 971, 980, 981, 984, 985, 1001, 1006, 1011,1013, 1024, 1027, 1028, 1030, 1031, 1033, 1043, 1047, 1051,1055, 1062, 1064, 1067, 1071, 1074, 1076, 1087, 1088: n = A,T,C or G
  misc_feature 1091, 1092, 1095, 1097, 1106, 1112, 1115, 1121, 1126, 1130,1132, 1138, 1146, 1148, 1159, 1162, 1164, 1167, 1168, 1169,1170, 1172, 1176, 1180, 1181, 1183, 1185, 1186, 1188, 1192,1195, 1196, 1198, 1201, 1202, 1210, 1211, 1216, 1218: n = A,T,C or G
  misc_feature 1221, 1226, 1228, 1231, 1234, 1237, 1252, 1258, 1260, 1261,1265, 1267, 1269, 1270, 1271, 1272, 1273, 1282, 1283, 1290,1295, 1296, 1299, 1308, 1311, 1313, 1320, 1321, 1324, 1327: n = A,T,C or G
nccnnnnnanantttgttnnntaaannttttttnantaaagnctcngcnaaataatatngaatnaatntatnatatttttattnnnntnatagggnnntgaanaattttntntncnantcactatngggcganttggagctccaccgcggtggcnggccgcccgggcaggtacgcggggagagagagtgtcttcntnctntnngacatctaaganaaaaaaaannactgaccaagactcagccgtgggaaatatgagtgagcttgtaagagcaagatcccaatcctcagaaagaggaaatgaccnagagtcttcccagccggttgggatctgtgattgtccagggagcccactgagggaaaaaacgttcaagaaagaagggaacncacccaacctggataaatcagggggtatttgcaccttagntnggngggaagaattggaaaaaattcaaagccatttgcccttncttttttttcaaaggggcccttggancaatngggaaaanccttttttttcaaaccaaggggaaacctngggcttncttgncttttaaaggaataaangaagtggaattngaangcccctcggggaagnaatgggnttcccttgnaatnggtccaagggggtagggggttantttatttngccccccanntttttttggaatccttcaaccntnaaaangntggccttgggaaannncaannggttggaatngccccnaancccaattangggtttttnaaaggcccaaanaancanaaattgagannaanctntgtaaaancccanagggaanccgnttttttcttttaaanttcttgggnaaatntttgnacntggattaaattatttttttntttaaattaaaaantttttataaantttttttnttnncaaaaatagtntaataaatatgcctcgnnncatttntttnacanatangtttcccnttcggnccccgttttntaaaaaaannaannggggaatctccccccnggggntttgngngggggaaattntgnntnntntaaaactctnttantgcnattnccccgcngnaancttncangnggggggggggnnccnnggnanccccaatcntttttngtnttcccnttttnaagntnaggggntataaatntntcccccctggnccntnatnnnntngganatannangnngntttnccnngnggnnaaaatttnnttatncnccnttccnanttnccnccnccacattaaattaancccggngnntttnanannnnngaaaaatcnnggggggnggccnntantgggggggnccntntctcccnnttnttn

SEQ ID NO: 5395 - DNA, 928 bp, Homo sapiens
  misc_feature 413, 430, 468, 500, 519, 521, 537, 546, 552, 554, 559, 571,581, 586, 589, 592, 608, 615, 640, 644, 652, 653, 664, 676,679, 685, 690, 695, 699, 706, 707, 721, 722, 725, 728, 730,740, 742, 754, 761, 765, 769, 775, 777, 794, 807, 813: n = A,T,C or G
  misc_feature 817, 819, 831, 833, 837, 840, 845, 851, 852, 858, 860, 861,864, 865, 867, 868, 877, 878, 879, 880, 881, 884, 886, 897,899, 900, 905, 912, 913, 918, 919, 920, 924, 927, 928: n = A,T,C or G
gaattggagctccaccgcggtggcggccgcccgggcaggtacttggagttacgaaagatgctggtgatgaagatttgaaaaaagcttatagaaagcttgctttgaagtttcatccagacaaaaaccatgcacctggagcaacagatgcttttaaaaagattggaaatgcttatgctgttttaagtaatccagaaaagcgaaaacagtatgacctcacgggcaatgaagaacaagcatgtaaccaccaaaacaatggcagatttaatttccatagaggttgtgaagctgatataactccagaagacctgtttaatatattttttgggggtggatttccttcaggtagtgtacctcggccgctctagaactagtggatcccccggggctgcaggaattccgatatcaagcttatngattacccgtcgacctngaggggggggcccggtacccagctttttgttccctttnagtgagggggttaaatttgcgccgcttgggcngttaattaatggggtaatnangcttgttttccttggnggtgaaaanttggtntnttcgnctcacaaatttncacaacaaancattnccngancccgggggagccattnaaagggngttaaaagccctggggggtgccttnaatngagtgganncttaaccttcncattttaatttngcngtttgngcttncttgnccgntttttcnnagtccgggaaaaannctnttngntcccacttgntnttaaaaagaatntgtcccncccncccngggganangccgggttttcgttttngggccccttttcncctttnctcngnttaattgaattngnttanacntcggnaccttnnaggttntnnggnngnnggggttttnnnnntcntnaaaggcggtgnannccgtntttcccnnataannngggngann

SEQ ID NO: 5396 - DNA, 1211 bp, Homo sapiens
  misc_feature 1, 3, 4, 5, 6, 10, 17, 18, 20, 21, 22, 24, 25, 26, 27, 29,30, 31, 32, 34, 35, 41, 42, 43, 45, 49, 52, 53, 58, 62,65, 70, 71, 75, 76, 77, 78, 83, 86, 90, 95, 96, 98, 103,193, 219, 334, 368, 460, 476, 529, 545, 573, 576, 594, 595: n = A,T,C or G
  misc_feature 596, 634, 669, 682, 686, 691, 698, 700, 703, 704, 709, 711,716, 719, 725, 728, 735, 741, 774, 784, 787, 788, 801, 803,808, 812, 820, 828, 830, 837, 842, 852, 857, 867, 869, 881,885, 888, 889, 901, 910, 920, 932, 935, 939, 940, 945: n = A,T,C or G
  misc_feature 946, 949, 952, 969, 976, 982, 983, 990, 995, 1003, 1009,1015, 1018, 1022, 1025, 1030, 1037, 1061, 1067, 1071, 1084,1085, 1093, 1097, 1109, 1116, 1117, 1123, 1128, 1138, 1150,1157, 1158, 1164, 1172, 1176, 1179, 1181, 1185, 1188: n = A,T,C or G
  misc_feature 1193, 1198, 1201, 1209, 1210, 1211: n = A,T,C or G
ncnnnncgtncataaannannntnnnnannnntnnggttannntntctnggnngaaanaatngtngaatnntttnnnnaaatnagncagngtganncntgganccatacgatcactatagggcgaattggagctccaccgcggtggcggccgcccgggcaggtactttatgtgtgacaaggcaatagcagctnctccctcaagattaaaaacaattaanaaaatacatagcatctgaagaatgtattttgggtaaacgagtagctattatttattaaagtgttcggcgttcctgtgttcccttgactttgaacactctttcctagtgtattatngcgtcagggtgcagcatcgcgaagtttccagaanatggcgtcgtgataacacagacttttcaaggacccaagggtaaaggattgccattcatggggccttttttgctttctttcttttctctcgcntcccttttcccccgcnttctctctcctgtcttctccatcttctgtgctcttttttttaaataaaaaagncttttattgccattantaattttaaccattacccattaaccagnttngccccttttttaaaaagnnngttaaccccttcgggcccggcttcttaagaaaacttanggtggggaattcccccccccggggggcctgggcangggaaaattttcngaantaatncaaaagncnttnnattcngnataanccngttcgnaancccttcnggaagngggggggggggcaccccgggttaaccccaaaantttttattgngtnnccccttttaaagntnggagngggntttaaaantttgccgncncctttgngggcnggtaaaaatncaatnggggccaatnangccttggtgtcntccntgnnggtggaaaaaantttggttanttcccgcttncaaccaaatttnccnccannaaaannatntcntgaaaccccgggggaanccattanaaaatnntaaaaanccctngggggggngccctnaatggngtngganctntaacntcaccanttaaattggggggttgcgcctccnacttgncccnctttttccaattnngggaaaancctngttcgtgccccnccttgcnntttaantgaanttcggcccanccccccgggggnagaaggnnggtttncggatttngggnggncntttnccnctttnccaantanaatataannn

SEQ ID NO: 5397 - DNA, 939 bp, Homo sapiens
  misc_feature 371, 385, 395, 476, 518, 523, 534, 544, 603, 609, 614, 617,619, 655, 656, 664, 669, 672, 677, 687, 691, 697, 699, 706,707, 720, 721, 732, 747, 749, 754, 760, 763, 771, 772, 775,776, 777, 780, 783, 787, 788, 799, 812, 817, 827, 829: n = A,T,C or G
  misc_feature 833, 840, 843, 844, 845, 850, 853, 858, 865, 866, 867, 869,872, 875, 880, 882, 886, 887, 892, 895, 896, 908, 928, 929,933, 936, 938: n = A,T,C or G
gaattggagctccaccgcggtggcggccgaggtacacctcacaaatgatatgtggctgagagccaaatgatgagcttctctgtgttatgtctacctagctgtgattatatcaggcacaggattgcgcgcgtgtgctctaatcccactgtgtcatgcaggatttttacctcggcctatgcctgcctggcagcaacacagccatgttccttacactccgccccctaggccaagggggtcctcttaatgggaactcgtgcacataggggagcaccctggacccataggccacagcaacaataaagagagcaacaacctactactaatattcctgctatgctacctatgattataaagagcccagtgtaggccangagcccagagacanccaccatttntgcaggcggtcatcagtaaaggtattcaattgcctttaatctcccatgacatgacaccccctgcaaaagcttgccactatnttcctggtggtttggcaagggatgaatgtaccttgccccggngcggnccgcatcttanaacctaagtnggattccccccggggcctggcaagggaatttttgaatttccaaagctttatcggattanccgtcntaccnttngnaggggggggggggcccgggtaccccaaacttttttnnttcccttntaggnganggggntaaattggcncccntttggncngtaaaannaaaggggcaatanncttggttttcnttgtgggaaaaattngntaaanccgttnacnaaatttcnnaannnaanatnccanncctggggagcnattaaaaagggtnaaaancccctggggngngccntaatganggnnnccaanctncacantaatttnnngnttnggnttcantngccnngtttntcnntctggaaaaacnttgttggcccaattgggatnnaatnaancng

SEQ ID NO: 5398 - DNA, 438 bp, Homo sapiens
gaatttggagctccccgcggtggcggccgcccgggcaggtacgcgggggagtcagtctcagtcaggacacagcatggacatgagggtccccgctcagctcctggggctcctgctactctggctccgagtctcaggtggcagatgtgacatccagatgacccagtctccatcctccctgtctgcatctgtaggagacagagtcaccatcacttgccgggcaagtcagagcattgccaggtatttgtattggtttcaacaaaaaccaggaaaagcccctaagctcctgatctatgctacatccagtttgcaaagtggggtcccatctaggttcagtggcagtggatctgggacagatttcactctcaccatcagcagtctgcaacctgaagatcttgcaacttacttctgccaacagagtaacagttccccttggacgtt

SEQ ID NO: 5399 - DNA, 918 bp, Homo sapiens
  misc_feature 428, 444, 507, 583, 636, 638, 665, 668, 729, 730, 736, 741,743, 745, 761, 770, 780, 788, 789, 804, 818, 823, 824, 825,836, 844, 846, 859, 861, 865, 876, 877, 881, 888, 894, 899,903, 907, 913, 914, 915: n = A,T,C or G
gtaatacgactcactatagggcgaattggagctccaccgcggtggcggccgaggtacggcttcggaggctaggccgccgctccagctttgcgcgtttcgatcccaaaggccctttttagggccgaccacttgctcatctgaggagttggacacttgactgcgtaaagtgcaacagtaacgatgttggaagacttatgattttactgtgtatgtatttgggagaagaaattctgtcagctcccaaaggataaaccagcagttgctttattggtcttcagatgtggctgcaaacacttgagactgaactaagcttaaaacacggtacctgcccgggcggccgctctagaactagtggatcccccgggctgcaggaattcgatatcaagcttatcgataccgtcgacctcgagggggggcccggtacccancttttgttccctttantgagggttaattgcgcgcttggccgtaatcatggtcatagctgtttcctgtgtgaaatttgtntattccgctcacaatttccacacaacaataccgaagccggggagcataaaagtgtaaaagcctgggggtggccctnatgaagtggagcctaactcacatttaattggcgtttggcgcttcacttgcccncnttttccaattccggggaaaaccttgtncgnggccagccttgcatttaaatgaattcgggccaacccccccgggggagaaggcggttttgcnntattgnggcgncntnttcccctttccttgcntcaattganttcagcttgngcttcggnncgttcgggttgcggncgaggcgggtttanacttnnnctcaaaagggnggggaatncncggttttccccananattnacgggggagtnncccncggaaanaaacanttttngccnaaanggcccnnnaag

SEQ ID NO: 5400 - DNA, 856 bp, Homo sapiens
  misc_feature 252, 439, 465, 536, 566, 583, 587, 597, 640, 663, 664, 678,702, 718, 749, 750, 763, 765, 769, 775, 776, 778, 781, 783,784, 786, 804, 809, 811, 814, 822, 824, 835, 838: n = A,T,C or G
ggccgcccgggcaggtacgcggggggtagacagaggaaggagcctgtcctcagacaggcccaaaagtgagtgtgtgtgggagtttgtgctaatgttcagtaggtggaagctcagggatttccactgtattcttaaggtgaagtcagagatttgagagaggatacccacttgaaccatacagctgccattttgggttgcaacaacgaggccagtgtagaaggagaataaagaaactggtgcatttggagtcanacaaaaagttcattcatggctctttcagtctggaagattctgaaactttggtaacatagtaattcctaaataagaataaggcaagtggattttaataaagggcaataccagtgatttcaaagaaagagaaatactgcaaggtgctgcatcatgaaaagcagtcccatgaagaaaaagattctgtcanagcatccttatcaaaaaccagtcgtnattgccatttccttgtaaaacaaaaggccctgactaaagcccacttaaaacagatgggatttcaaccaagnctcgcttaactctccctgtcatgaagtccntggggggggaaaagggntaantttttttttnaaaaatccattccctggttttttttttcccttttatatttcanttctcccatttggggattttttnncccccagtcctttnaaaccaaaaacttcaaaattcctngggttttggtttcccncccaaaaaaaaaaaaaaaaaaaaaaaaaaannttccctttgggcngntttnaaaaanngnggnanntnatgggggggtgggggganttttntntanaaatttantntttcccccccnccnggggggggggggccggtt

SEQ ID NO: 5401 - DNA, 924 bp, Homo sapiens
  misc_feature 5, 6, 7, 8, 10, 11, 406, 412, 737, 758, 759, 765, 774, 783,787, 790, 801, 814, 828, 848, 880, 889, 891, 904, 905, 908,918, 920, 922: n = A,T,C or G
agggnnnncnngcgtaatactactcactatagggcgaattggagctccaccgcggtggcggccgaggtactttgagaaggcaggactcaaatgatgccctggagatgtcacagattcctggcagagccatggtcccaggcttcccaaaagtgtttgttggcaattattcccctaggctgagcctgctcatgtacgcggggtgctgagccacgaattcgtcctgcagaatcacgcggacatcgtctcctgtgtggcgatggtcttcctgctggggctcatgtttgagataacggcaaaagcttctatcatttttgttactcttcaagtacctgcccgggcggccgctctagaactagtggatcccccgggctgcaggaattcgatatcaagcttatcgataccgtcnacctcnagggggggcccggtacccagcttttgttccctttagtgagggttaattgcgcccttggccgtaatcatggtcatagctgtttcctgtgtgaaattgttatcccctcacaatttccacacaacataccagcccgggagcataaaagtgtaaaagcctgggggtgcctaatgagtgaagctaactcacattaattgccgttgcgctcactggcccgcttttcaagtccgggaaacctgtcgtgcccagcctgcatttaaatgaaatcgggccaacccccccggggaagaagccgttttgccttatttgggccgctctttcccctttncttggttcaattgaacttcgnnttgccnctccggtcntttccggcntgcnggngaagccggtanttaaccttcaacntccaaaagggcggntaattaccggttatttccanaaaaattaagggggatttacccccaggaaaanaacattggnancccaaaaagggcnnccnaaaaaggccncngnat

SEQ ID NO: 5402 - DNA, 841 bp, Homo sapiens
  misc_feature 640, 670, 703, 726, 729, 732, 773, 780, 790, 807, 811, 816,832, 838: n = A,T,C or G
cactactatggggcgaattggagctccaccgcggtggcggccgcccgggcaggtactgtttcctcagcagaggagaaaaactcaacctagttatgagaccaaccacacaacacaatgaagagctgcactaactagttcagaatgttagttaagatgatgctggtgtgaatccgcgtacgcgggagtcggacgggcgcggaggcgcttctggaaggaacgccgcgatggctgcgcagggagagccccaggtccagttcaaacttgtattggttggtgatggtggtacctcggccgctctagaactagtggatcccccgggctgcaggaattcgatatcaagcttatcgataccgtcgacctcgagggggggcccggtacccagcttttgttccctttagtgagggttaattgcgcgcttggcgtaatcatggtcatagctgtttcctgtgtgaaattgttatccgctcacaatttccacacaacatacgagcccgggagcataaagtgtaaaagcctggggtgcctaatgagtgagctaactcacattaatttgcgttgcgctcactggccgcttttcagtccgggaaacctgtcgtgccagctgcattaatgaatcggccaaccccccgggaaaagccgnttgcctattgggccctcttccctttcttgnttactgactcgttgcctcggtcgttcgcttcgngagccgtattaactcactcaaangcngtnataccgttttcacaaaaatcagggggtaaccccaggaaaanaacattntgagccaaanggccaccaaaaggccangaanccttnaaaaagggcccctttntttgcnttt

SEQ ID NO: 5403 - DNA, 919 bp, Homo sapiens
  misc_feature 12, 17, 48, 50, 374, 466, 503, 598, 613, 646, 666, 682, 685,705, 712, 716, 737, 753, 765, 771, 774, 783, 804, 807, 810,811, 814, 831, 834, 840, 842, 846, 849, 858, 870, 874, 888,892, 895, 897: n = A,T,C or G
ggggggtgattntttcntttaataccacttactattttggcgaattgnanctccaccgcggtggcggcccgcccgggcaggtaccaattttttatatgtagagcattcctgtgaatgtttgcaatttttccctttcctttccactgccctgctaatgtgcacatgtattagacacaaatacccagtaaatgggaattacccatttacatgcatacacactgaggtgtgcttgagtactcatcacagaatgggagagagggctctcaatagatcattccctttgtttctcccctgggcttcttgaacttctcgaagttcttcaggatgatgtcatataacacagcataagcattgcggatctccatgaccatcanccggatgtcccggtacctcggccgctctagaactagtggatcccccgggctgcaggaattcgatatcaagcttatcgatacccgtcgacctngagggggggcccggtacccagcttttgttccctttantgagggttaaattgcgcgcttggcgtaatcatggtcatagctgttttctgtgtgaaaattgttatcccgctcacaatttcacacaacataccaanccgggagcataaaantgttaaagccctgggggtgccctaatgagtgancttaactcacattaattggngttgcgctcaattggnccncttttcaatgggggaaaaantttccgngccnaccttccatttaatgaaatcnggccaacccccccggnaagaaggcggtntttgcnttnttggggcgncttttttcccctttccttggnttnaannganttcctgggccccggccnttntggctntngggnaanccggttttntatttcactcanaaangcggggaattaacnggtnttncnccaaaattcaggggggaaaact

SEQ ID NO: 5404 - DNA, 889 bp, Homo sapiens
  misc_feature 461, 637, 643, 699, 700, 703, 707, 722, 730, 752, 768, 771,775, 781, 784, 792, 803, 806, 815, 819, 839, 846, 849, 853,857, 862, 865, 877, 880, 882, 883: n = A,T,C or G
taatacgactcactatagggcgaattggagctccaccgcggtggcggccgcccgggcaggtacgaatggtgcctctttagcttttcgaatgagttttgatccctgatcttcctcatatgaaggaagggaaacacctgtgtctgttgacatagtgattgcttgaagaatctccctagagcgagaaaacctctcacaccccaaccccccgcgtacgcgggtctgctcatggtgcttcttagcatcatcttcatgaatggaaatcggtccagtgaggctgtcatctgggaggtgctgcgcaagttggggctgcgccctgggatacatcattcactctttggggacgtgaagaagctcatcactgatgagtttgtgaagcagaagtacctcggccgctctagaactagtggatcccccgggctgcaggaattcgatatcaagcttatcgataccgtccgacctcnagggggggcccggtcccagcttttgttccctttagtgaggggttaattgcgccgcttggcggtaatcatggtcataagctgtttccctgtggtgaaaatttgttatcccgctcacaattccacacaaacatacgacccgggagcattaaagtggtaaaagccttggggtgcctaantgaagngagctaactcacattaatttgcgttttgccgctcacttgccccgctttttccaagnnccngggnaaaccctgtccgtgncccagctncaattaaatgaaatcgggcgcnaaccccccggggggangangccngttttngcngttatttngggcgcttttnccnctttctttngttnacttgacctcgttgggcttncggtcgnttngggntgtntgggnganaccggttttaanttnannttaaag

SEQ ID NO: 5405 - DNA, 874 bp, Homo sapiens
  misc_feature 2, 3, 8, 9, 10, 768, 769, 812, 815, 823, 835, 836, 839, 853,865, 867, 872, 873: n = A,T,C or G
gnnatagnnnaccgcgtaatacgactcactatagggcgaattggagctccaccgcggtggcggccgggggtaggatgggaagccgtggggcaagggaggttgcaggaagcccatccttcccctcctgcggcaggtatggtgaccctcctccagttttccagctctaatttaaaacgctgccacacagcgagcgacgctgccagctgcttcgcctacactccccgcgtacctgcccgggcggccgctctagaactagtggatcccccgggctgcaggaattcgatatcaagcttatcgataccgtcgacctcgagggggggcccggtacccagcttttgttccctttagtgagggttaattgcgcgcttggcgtaatcatggtcatagctgtttcctgtgtgaaattgttatccgctcacaattccacacaacatacgagccgggagcataaagtgtaaagcctggggtgcctaatgagtgagctaactcacattaattgcgttgcgctcacttgcccgctttccagtcgggaaacctgtcgtgccagctgcattaatgaatcggccaacgcgcggggagaggcggtttgcgtattgggcgctcttccgctttctcgctcactgactcgctgcgctcggtccgttcggcttgcggcgaagcggtattaagctcactcaaaggcggtaatacgggtatccacaagaatcaagggggaataaacgccaaggaaagaacattgtgaacaaaaaaggccagcaaaaagggccnnggaaccgtaaaaaaggcccccggttgcttggcgttttttccanaangcttccgnccccccttgacnngcnttaacaaaaatttngacgcttaaaantnaaaanng

SEQ ID NO: 5406 - DNA, 945 bp, Homo sapiens
  misc_feature 3, 4, 6, 15, 23, 75, 565, 630, 650, 670, 686, 703, 713, 715,732, 733, 745, 753, 759, 798, 805, 808, 812, 827, 828, 839,841, 856, 876, 904, 905, 911, 925, 928, 936, 945: n = A,T,C or G
atnncntgaatacgncatacganttactatagggcgaattggagctccccgcggtggcggccgcccgggcaggtnctaaagaaccaaaaactcccagaggcaagagcagctatcagaggaagtagccaccaccggttcctcttgacaaaagatgcattttggggttgtccagtcacttgtcggctggaggttgatggtgactggtttccaagctctgatttcagaatgctgtcattttgcatcctggtccttattcttgcagtttgtggggcccattcctggggagttttttgatatcctgagcttagcactgaacgttgcttatcatgagctgtgaagttttgactttgtgatgactgccaaaatgattctatatattgactagatgatctggtggttttatctccagattcatcagaatccctggatctggccttaacagtaagtgacactgctgtgagagctgtcttgatcatcttcttcagtttctccttcttcagaagaaattggaccttctgttggacactggtggctttcatatcttggggtatcttagaaggggtcnacgtaacctgattacaaagaatctttcaactcactgggagcctcttgtattgctcctggacaagnttttctttttgaagaatcgnttttgggctttaaaatcaanttttggggaaagaatnccttcaatccctctttnaaaaaggaantngaagaggtccccggcannccccttttcctnggttcgtnaaccangaaaaacaggcttgtaagccgggaaggcttgctcttgantgcctgnctngctngaaaggccgggttanntcctttcgcgntntttaattttcctttngggtttacttcccgggggtnacctttggggcggtttttaaaaactaanngggatnccccggggcttccnggnaatttganattcaaaan

SEQ ID NO: 5407 - DNA, 489 bp, Homo sapiens
  misc_feature 2, 224, 351, 489: n = A,T,C or G
cnctactatagggccgaattggagctccccgcggtggcggccgcccgggcaggtacgcggggaggtgaggtgaagtgagggaggccgcccgggccaggcgagccgaaccaatgctggacctggaggtagtgcccgaacgctctctgaggaacgagcaatgggaattcacgctgggaatgcctctggctcaggcagtagccattcttcagaagcactgtcgcatnatcaaaaacgtccaggttctctacagtgaacagtctcctctaagccatgacctcattcttaacctgactcaggacgggatcaaactaatgtttgatgctttcaatcagagacttaaggtgatcgaantatttgattttgactaaaagtaaagttaaaatattgtggcgtgcattttaattctcaggccatagctcctaccattgaacagattgaccaagtcttttggccgcaacccatcctggagtgtacctcggcccgctctan

SEQ ID NO: 5408 - DNA, 892 bp, Homo sapiens
  misc_feature 622, 631, 702, 709, 722, 760, 788, 804, 807, 827, 834, 838,842, 853, 860, 863, 864, 868, 878: n = A,T,C or G
cgtaatacgactcactatagggcgaattggagctccaccgcggtggcggcccgcccgggcaggtacactttggcatcagatactggctgccctttcataaaatgtttgcctgattcatagatgtccacttcaaccatcttccccatgaacgcagggttctttggcactaaaacctgctcatagaattgattgtgtgcaacataaaacttggaatcaaaagattcttctgttactaacacttgttgtctttcaccaatcttgtgatcatatggactgtaagaatgaaacacccgagaaagatcttttgtcctttgctttttcacttgtgccggaacttgttccatttttgcagcaggagttcctggtcttgggtaaaattggttaataaacaggcttgggaatttgtacctcggccgctctagaactagtggatcccccgggctgcaggaattcgatatcaagcttatcgataccgtcgacctcgagggggggcccggtacccagcttttgttccctttagtgagggttaattgcgcgcttggcgtaatcatggtcataagctgtttcctgtgtgaaattgttatcccgctcacaatttcacacaacataccgagcccgggancataaagtngtaaaacctggggtgcctaatgaggtgagctaactcacattaattgcgttgcgctcactggcccgcttttncaagtcngggaaaaccctgnccgtgccagctgcatttaatgaatcgggcccaaccccnccgggggagaaggccggtttttgcgttnttggggccgctttttncgnctttctttggcttaattgantccgttngcgncttngggtcggttcnggcttgnggnngagncggttttaancttaactcaaaagg

SEQ ID NO: 5409 - DNA, 930 bp, Homo sapiens
  misc_feature 416, 509, 615, 627, 654, 665, 690, 700, 731, 743, 749, 756,781, 786, 794, 807, 808, 829, 835, 841, 848, 852, 853, 861,869, 872, 884, 890, 909, 912, 927, 928, 930: n = A,T,C or G
ttggagcgctcgtaatacgactcactatagggcgaattggagctccaccgcggtggcggccgcccgggcatgatacgcgggtcaccacaaaagtctgcagcttcagtcctgaagccagcgagaccacgagccaccaggaagaacaaacaaactccagacacgccaccttaagagctgtgacactcaccacgagggtccgcggcttcattcttgaagtcagtgagaccgagaacccaccaattccggacacactgggattacaggtgtgagccactgcgcccagccaagcatgccattctttagaagatgttctctcctggcacatctcagtttctacaaaggcccccagcccttcctggagacccctggggcgaagttctctcacccttcttcacatgcccataacaactcacctncctctctcttagagcccccgtcctgcccttccttgaattctggtcatgctcatgtttgccatagctccccaaggaagacagcctttgagtcangtctgacattgtctgtcctttaaagaaggcacttaacacatattttgtcaactgaattaataaaaattttcccacagggcctttgggaagaaatttttgtaccctnggcccgctctanaacttagtggatccccccggctggaanggaatttcgantattcaaagcttattgatacccgtngacctcggangggggggccccgggtaccccaagctttttgntttcccttttangtggangggtttnatttgccgccgccttgggccgtaantcatngggcatangctgttttcctgnngtggaaaattgtttattcccnctcaanaatttnccaaaanaacnnttacgagnccggggangcnttaaaaggggtnaaaggnccttgggggggccttaatngangtggagctttacttnncn

SEQ ID NO: 5410 - DNA, 478 bp, Homo sapiens
  misc_feature 1, 3, 19, 392, 396, 414, 423, 424, 430, 434, 475: n = A,T,C or G
nantactatagggcgaatnggagctccccgcggtggcggccgcccgggcaggtacacctcacaaatgatagtggctgagagccaaatgatgagcttctctgtgttatgtctacctagctgtgattatatcaggcacaggattgcgcgcgtgtgctctaatcccactgtgtcatgcaggatttttacctcggcctatgcctgcctggcagcaacacagccatgttccttacactccgccccctaggccaagggggtcctcttaatgggaactcgtgcacataggggagcaccctggacccataggccacagcaacaataaagagagcaacaacctactactaatattcctgctatgctacctatgattataagagcccagtgtaggccagagnccanagacacccaccatctctncaggcggtnntcagtnaggnattcaattgccttaatctttccatgacatgacaccccctgnaaa

SEQ ID NO: 5411 - DNA, 501 bp, Homo sapiens
  misc_feature 2, 3, 4, 5, 6, 7: n = A,T,C or G
gnnnnnncgcgtaatacgactcactatagggcgaattggagctccaccgcggtggcggccgaggtacttattcttcagggttactgagtcggcacctatgacagctaagagagctttcttaaagactgcctcagtgtcttcttggcttttggcaccttcactccactctgcccaggaaatccacaatggcagacaaacctggggtttcaggtgcacaaaggcttcttcaaaaagcatggctatgtcagggctctttgactcgatcagcacctgcagcttcagctgccacattgtcccagagtctctaaacaattcagttccagctactgccacttccagagcttccctcaggaagttataacacagcaacgaaacactcaactgcttgtattggcattctgacagaagcttcagttcatgtgccttcctgaatacagtcatggttctttccaacctcttccctctaaggaacccactatttgacttcttagtaaatctttt

SEQ ID NO: 5412 - DNA, 482 bp, Homo sapiens
  misc_feature 48, 49, 438: n = A,T,C or G
gggcgaattggagctccccgcggtggcggccgcccgggcaggtacttnnttttttttttttttttttttggtaatacctttatatagtcatctaaactttccaaagcacttttacctattattctcagaacagtccaggaagtaggcaaaacagacattatcaccattttatgaggtattggatgctaaatgacttgctcagcgtctcataactggtaagtagcaggatcaggtctgaaatccatttcacctggccttagatccatctttgagggtctctttatctgataggcttctcgtcttggataggcaaaggaaggatgaactggagcagaggatgtcggccctgcaggagagcaggcgggagctgatggtccagctggaagagctgatgaagttgctgaaggtaagagcccgtggcccacgctcagttcttgncattcttctcccaccacagcctcagctgctgcctccagtaaatt

SEQ ID NO: 5413 - DNA, 845 bp, Homo sapiens
  misc_feature 358, 360, 408, 510, 546, 564, 567, 609, 678, 680, 692, 712,729, 731, 736, 741, 742, 754, 759, 772, 785, 787, 793, 805,810, 815, 834, 841: n = A,T,C or G
ggagctccaccgcggtggcggcccgaggtacttttttttttttttttttttttttaactcatacgtttttatttgagatctgccttgcttatttcacaaagagttgcaacccgaatgctgaagattttccttcatggcgagtctcagaatacaacctcagctcatttgccaaatcttgccagcctgataaacatttttcttttgggggctggcatctcgtttcctccttcttctcttgttcacatataatgttggtcatgcctgagcttatagcagcagtagccagaggaagatgaggtaattaggcagatcacagcggaacaggttgcattctcattcctttcagccttctctcctntntccccaacctgcacagttctccccgcgtacctgcccgggcggccgctntagaactagtggatcccccgggctgcaggaattcgatatcaagcttatcgataccgtcgacctcgagggggggcccggtacccagcttttgttccctttagngagggttaaattgcgcccttggcgtaaatcatgggncaataagctgtttcctgnggngaaaattggtatcccgctcacaaaattccacacaacataccnagccggggaggcataaaagtgtaaaagcctgggggtgccctaaatgaggggagccttaacttcacattnanttggcgtttggngcttcactgccccgcttttncaattcggggaaaaccntntcgtngcccnnacttggcatttnaatgnaatccggcccaanccccccgggggananggccgntttgggttattnggggngcttntttccctttctcggttaanttgactncggg

SEQ ID NO: 5414 - DNA, 1289 bp, Homo sapiens
  misc_feature 2, 6, 12, 17, 20, 22, 23, 24, 27, 36, 42, 44, 46, 50, 56,57, 59, 62, 65, 66, 68, 69, 71, 75, 80, 84, 86, 90, 94,99, 101, 104, 105, 107, 108, 109, 111, 113, 115, 117, 121,127, 129, 130, 131, 133, 137, 144, 146, 150, 154, 156, 157: n = A,T,C or G
  misc_feature 160, 223, 289, 325, 345, 356, 410, 411, 429, 438, 441, 444,499, 502, 508, 545, 567, 626, 633, 647, 648, 685, 699, 720,748, 751, 790, 791, 797, 800, 803, 823, 829, 831, 838, 852,854, 862, 878, 881, 891, 916, 922, 936, 952, 959, 966: n = A,T,C or G
  misc_feature 970, 979, 986, 999, 1020, 1032, 1036, 1037, 1045, 1054, 1058,1065, 1072, 1083, 1100, 1101, 1102, 1106, 1107, 1109, 1118,1136, 1137, 1138, 1147, 1158, 1160, 1162, 1166, 1168, 1172,1173, 1178, 1181, 1184, 1188, 1192, 1193, 1195, 1198: n = A,T,C or G
  misc_feature 1207, 1213, 1220, 1224, 1226, 1234, 1237, 1240, 1242, 1243,1245, 1246, 1255, 1260, 1264, 1278, 1279, 1282, 1283, 1285: n = A,T,C or G
cncccncacccnttctnctnannnctnctactccgntacgcntnanacanttcacnntnttnttnntnnanacanttatncaantntaantttnttatntngcnngnnnangngnanattnattaancnnnanttangtcaacntnctanctcncnncgnggcggcggcccgaagtacttgctggtctcaaatttccacacggagatatcaatggtgataccncgttcaccgctcagctttcagtttatccaagacccaggcatacttgaaggagccctttcccatctnagcagcctccttctcaaatttttcaatggttctttntgtcgatgccacccgcattnataggatcacnattggcccagtagttggtggacattgccccgaatcctacgctgtctcaatgacnnacaaatgtttgataatgnagcactttntcnctnttcccatattttgggcttttataagggggttagtattttccaccgaccacccctngtnggttcntgggcggccaaaacccccgttttggcggaaaaaaacnccccgccgttacccttgccccngggggccgggcccgtcttccttaagtaaaccttaagttggggaattcccccccgggggncctggcnaggggaaaatttcnntattatttcaaaagcctttattccggaattaccccgntccgaacccttccntagagggggggggggcccccngggtaaccccccaaacccttttttggtnttnccccttttaaggtggaagggggttttaaaattttggccnnccgccnttnggncggttaaaattcattggggncccatnanggcttgnttttcccttggggntnggaaaaanttttggtttaaattcnccnccttctaccnaaattttccccaccaccaaaccaantaaccngaaggcccccgggngaagccaattaaaaangttgggnaaaaagncccntgggggggntggcccntaaattggaggtngaggccttaaaactttccacnatttaaaatttngcgnnttgggcgnccttcaacntggncccccgnctttttnccaagtccggnggaaaaacccttggtcnnngggnncnagcctgtgnccaattaaaattggaaannngggcccaancccccccgggngnanaaangnccgnnttttnccngtnattngggnncnccncttttcccngctttncctcggntttnancatgtacnttngantnngnnccctccggngtacngttncggcttggcggcgnnaanncnggcg

SEQ ID NO: 5415 - DNA, 1125 bp, Homo sapiens
  misc_feature 4, 5, 6, 7, 8, 13, 14, 16, 18, 20, 21, 25, 26, 28, 29, 30,35, 38, 39, 40, 47, 48, 50, 57, 59, 63, 66, 69, 82, 85,87, 92, 97, 98, 99, 102, 103, 106, 107, 108, 109, 110, 111,114, 116, 118, 119, 121, 123, 126, 215, 437, 461, 489, 559: n = A,T,C or G
  misc_feature 583, 614, 621, 689, 707, 709, 715, 725, 737, 745, 752, 768,781, 795, 801, 806, 825, 835, 838, 845, 857, 858, 865, 867,869, 871, 874, 883, 897, 898, 903, 916, 919, 921, 933, 936,941, 947, 952, 957, 969, 972, 978, 986, 991, 1008: n = A,T,C or G
  misc_feature 1041, 1042, 1043, 1051, 1069, 1071, 1080, 1082, 1085, 1086,1089, 1095, 1107, 1109, 1112, 1114, 1115, 1116, 1119: n = A,T,C or G
cacnnnnnacacnntntncnnattnntnnncaatntannntttacannantaactcnanttcncantantatatctataacnttnancttcnatttnnnagnnggnnnnnngcngnanntnanttntatagggcgaattggagctccaccgcggtggcggccgaggtacgcggggtggatgaaatgacgctggagctccacaggcagggtccctncatagctgtggaaagtgaagaaggcattgaagatgactattttttggagaggcctgatgcccgaatttcagtttggcacttacagcgaatctgagaggaaaaccgaggagtacctgcccgggcggccgctctagaactagtggatcccccgggctgcaggaattcgatatcaagcttatcgataccgtcggaccctcgaggggggggccccggtaccccaancttttgtttcccttttagttgagnggtttaattgcgccgccttggcgttaantcatggttcattaggctgttttcctgtggtgaaaaattggttatcccgctcaccaaatttcccacaccanacaataccgagcccggggtagcantaaagttggtaaaagcctggggggtgccctnaatgagnggaggctaactcacatttaatttgcgtttgcactcacttgcccggctttttccaagtccggggaaaancctggttctgtgcccaancntgccantttaaattgnaaatcgggcccnaaccgccnccggggngaaagaaagggccggnttttggccttaanttggggccgccttntttttnccgcnttatcccttcggcttcacnttggaaactnccncttgggngcctcccgggtnngtttccngntntngcnggtccaagnccgggtaattcaanncttcnactttccaaaaanggngngggtaaaaatancgnggttntttccnccaanaaatnaaggggggggantanccgcangggaaaanaaacnattgtggaaccaaaaanggccccatcaaaaaaagggcccaggaaaacccnnnaaaaaaangggccccgttttggcttngnccttttttncnatnnagnccttcnacccccctttgnangangnnnttnacaaaa

SEQ ID NO: 5416 - DNA, 1184 bp, Homo sapiens
  misc_feature 5, 6, 7, 9, 15, 16, 18, 23, 24, 26, 28, 32, 33, 34, 35, 38,39, 40, 41, 42, 43, 44, 46, 53, 58, 60, 62, 65, 66, 67,75, 76, 78, 79, 80, 82, 85, 87, 89, 91, 93, 94, 96, 100,102, 103, 104, 105, 109, 110, 112, 114, 115, 116, 128, 130: n = A,T,C or G
  misc_feature 399, 523, 533, 571, 600, 617, 629, 714, 716, 738, 748, 772,788, 806, 827, 838, 859, 860, 875, 918, 919, 926, 935, 942,950, 963, 973, 976, 979, 988, 998, 1005, 1006, 1023, 1024,1033, 1038, 1042, 1053, 1057, 1062, 1076, 1084, 1085: n = A,T,C or G
  misc_feature 1105, 1106, 1114, 1123, 1124, 1125, 1126, 1129, 1130, 1132,1143, 1146, 1168, 1171, 1172, 1178: n = A,T,C or G
acccnnncnccctanntncaacnntntnttannnntcnnnnnnnanatctttnctacntntnttnnnacataaannannntnacncntnananncntctntnnnnaganngntnnnctctctattcanantcactatagggcgaattggagctccacacgcggtggcggccgcccgggcaggtacgcgggtggtgcaggctcctgcagatgctccagaatgaaagccttctcagacctgcgcactccatctccctcccttttcttctctctgtggtggagaaccacagctgcagagtaggcagctgcctccaggatgagttacttgaaatttgccttgagtgtgttacctcctttccaagctcctcgtgataatgcagacttcctggagtacctcggcncgctctagaactaagtgggatcccccgggcctgcagggaattcgataatcaagcttatccgatacccgtcgacctccgagggggggggccccggttaccccagctttttggttccctttaagtngaaggggttnaattgcgccgcttggcgtaaatcaatggtcattaggcntgtttcctgtgtggaaattggtttattcncggcttcacaaatttcncacaacaaccantaccgaagcccgggggaggcaataaaaaggtggtaaaaaaggcccctgggggggtggcccctaaattggaggttggaggccttanancttccaacaatttaaaattttngccgggtttngcggccttcaacttggggccccgncttttttcccaagatnccggggaaaaaacccctngtccggtggccccaagccttnggcatttaaanttgaaaattcgggcccaaacnnccgcccggggggaangaagggccgggttttttggccgttaatttggggggccgcctcnntttcccnccttttccnttcggcnttccaacnttggaacttccgnttggcggccntcnggncccggtttnccgggctttngcgggcnnaaggccgggggtatttnnaacccttcnacttncaanaggggcggggnaaantcccngggttattcccccnagaaaatnnagggggggaattaacccccnngggaaaanaaaaaattnnnntgnncnaaaaagggccnacnaaaaaaggggcccgggaaaccnctnnaaaaanggcccc

SEQ ID NO: 5417 - DNA, 1131 bp, Homo sapiens
  misc_feature 6, 8, 11, 12, 15, 19, 24, 26, 27, 28, 31, 33, 36, 40, 43,46, 55, 58, 68, 71, 74, 76, 79, 80, 81, 82, 83, 84, 85,86, 93, 94, 95, 97, 99, 103, 104, 107, 108, 109, 110, 111,113, 115, 120, 124, 133, 412, 540, 615, 618, 659, 707, 734: n = A,T,C or G
  misc_feature 742, 756, 759, 768, 781, 794, 803, 830, 833, 846, 880, 902,905, 910, 915, 918, 930, 938, 950, 959, 962, 965, 980, 982,996, 1001, 1011, 1012, 1015, 1021, 1023, 1029, 1033, 1035,1046, 1047, 1049, 1052, 1057, 1071, 1087, 1090, 1093: n = A,T,C or G
  misc_feature 1112, 1115, 1124, 1126, 1130: n = A,T,C or G
cccccncnctnnatntttntactntnnntcntntantatntcnctntatattaanatntatacttatntanttnanttnnnnnnnncagaagnnngngntaannctnnnnncnantgctntcgngcgaattgnagctccaccgcggtggcggccgcggtctcggtcactcgaataacccgacatggcgtcaatggttgcggttggcggggaacgaagtatatagaaaagcgtgcgacaagtcgctggaaatggcctcgatgacggcgaagccttgcgggggcggcagcggaggaaggacaccgatgacaccagccgaagctgcactactagagaccggtagaaatgaatgaggtcccgcgtacctcggccgctctagaactaagtggatcccccgggcttgcagggaattcngatatcaaggcttatcgatacccgtcggaccttcgaggggggggggccccggtaaccccagcttttgtttcccctttagtgaggggttaaatttggccgccgctttggccgtaattcatggggtcatnaggctggtttccctgtggtgaaaatttgttattcccgctcacaaatttccacaaccaaccataccgaagccgggnagncataaaaagtgtaaaaggccctggggggtggcccttaaatngaagtggagcctaacctccaacatttaaatttggccggttggcggctncaacttggccccggcttttttcccaantccggggnaaaaacccttgttncgntgccccaanccttgcccatttnaaatggaaattcnggcccaaancgcctccgggggggaagaaggccgggnttntggccgttaattngggggccgccttcttttcccgcttttccctccgnctcaacttgaactttcgcttgncgncttcngggtncgnttttccggcttngcggggcngaagccgggtanttaagcttnaanccnccaaaaagggcgggngnaattaacggggttnattcnacaaaaaatnnaangggggnanaaaacnccangnaaaaagaaacnntnttnaaccnaaaaaggggcccangcaaaaaaggggccanggnaanccgtttaaaaaagggcccncgntttgtcttngncatnt

SEQ ID NO: 5418 - DNA, 1111 bp, Homo sapiens
  misc_feature 2, 4, 5, 6, 9, 10, 13, 19, 26, 28, 29, 32, 36, 38, 39, 40,42, 43, 45, 47, 49, 50, 52, 53, 54, 55, 56, 59, 63, 67,69, 72, 74, 80, 83, 84, 85, 86, 87, 88, 89, 90, 91, 92,93, 94, 95, 97, 101, 102, 104, 108, 109, 456, 560, 567,570: n = A,T,C or G
  misc_feature 736, 758, 802, 819, 825, 833, 836, 850, 872, 882, 906, 912,929, 942, 948, 955, 956, 964, 978, 979, 984, 997, 1009,1014, 1015, 1041, 1052, 1072, 1075, 1079, 1089, 1095, 1101,1102, 1103, 1105: n = A,T,C or G
ancnnnggnntantttggnaaatttntnnaantttntnnnanntncngnnannnnntantaantttntnttngntatttntannnnnnnnnnnnngnaatnngngatnnctcatttagggcgaattggagctccaccgcggtggcggccgcccgggcaggtacgcggggggccgggccgagaggtggttacattcgttgaaggacaccagctgcggaatttgcggctttggcagattgaaatcatggcaggtccagaaagtgatgcgcaataccagttcactggtattaaaaaatatttcaactcttatactctcacaggtagaatgaactgtgtacctcggccgctctagaactagtggatcccccgggctgcaggaattcgatatcaagcttatcgatacccgtcgacctcgagggggggcccggtacccagcttttgttccctttagtggagnggttaatttgcgccgccttggccgtaatcatggtcattaggctgtttcctggtgtggaaaattggtttattcccgctcacaaattccaccacaaacatacgaancccgggnagncataaaagtgtaaaaggcctggggggtgccctaatggaagtggagcttaacctcacattaatttgccgtttgcgctcactgccccggcttttccaagtccggggaaaacctgttcgtgcccaagcttgcatttaattgaaaatcgggcccaaaaccgccgccgggnggaaggaagggccgggtttttngccgttatttggggggccgccttttttcccgcttttccttcggntttcacttggaacttcngcttgncgccttcnggntccgttttcgggcnttgcccgggccgaagccgggtnattcaaagcnttcaacttcaaaaaagggcggggntaaatnaccggggttatttccancaaggaaatcaangggggnaataaanngcaaaggnaaaaagaaaacatnnttgangccaaaaaagggnccacccaaaaanggccnntgaaaacccggtaaaaaaaagggccngcgtttgcttngccgtttttttccaataaangcntccngccccccctngacgangctttnnnanaaaatt

SEQ ID NO: 5419 - DNA, 1318 bp, Homo sapiens
  misc_feature 1, 4, 5, 9, 10, 16, 21, 24, 27, 28, 39, 42, 44, 47, 52, 53,56, 57, 58, 65, 68, 70, 71, 73, 76, 81, 82, 84, 89, 90,92, 97, 98, 101, 103, 109, 110, 113, 114, 119, 125, 130,133, 134, 148, 153, 167, 213, 218, 237, 244, 248, 281, 331: n = A,T,C or G
  misc_feature 338, 360, 373, 397, 413, 422, 427, 428, 435, 443, 463, 465,472, 476, 486, 488, 499, 562, 564, 565, 577, 581, 590, 599,618, 628, 657, 660, 663, 670, 672, 674, 694, 701, 716, 726,728, 733, 753, 754, 758, 760, 763, 764, 776, 789, 793: n = A,T,C or G
  misc_feature 801, 806, 808, 816, 820, 821, 824, 825, 833, 860, 862, 875,882, 887, 895, 896, 926, 929, 930, 935, 945, 953, 962, 964,968, 969, 989, 990, 991, 1003, 1005, 1010, 1014, 1024, 1030,1033, 1035, 1036, 1040, 1043, 1048, 1059, 1060, 1066: n = A,T,C or G
  misc_feature 1073, 1076, 1080, 1081, 1088, 1089, 1093, 1094, 1097, 1100,1101, 1124, 1131, 1156, 1159, 1160, 1161, 1169, 1171, 1173,1184, 1195, 1198, 1201, 1203, 1204, 1212, 1214, 1217, 1220,1222, 1237, 1239, 1243, 1247, 1254, 1258, 1264, 1265: n = A,T,C or G
  misc_feature 1267, 1268, 1274, 1275, 1278, 1280, 1285, 1286, 1287, 1289,1291, 1297, 1298, 1314, 1316: n = A,T,C or G
naanntatnntgattnttcgngcnttnntttctttattntcnantanccgannttnnntctcacnttntnnanatnttttnntnctctnntntcttnnttngnaggaannttnnaattntcttantatanggnnatttgatatctccnccgcngtggccggcacgangtaccgctgggggtggtgtctttgctagatggtcacattgagctgnatggntgaatccaggggtgccttnaggattnagcnccatggcggaagacatggtagaccaaaatcaanaactacaatgaccgccccttttgacagccgctttccccaaccaggaaccncgacttngaaactgcgggcataactaccntggacttttcacncgctgtcagtaagggcaatggacncgcttaaagggagggngaattatcntctgnngtgccgnaatgggtncccttgcccccgggggccgngnacgcatntaantaacctagtngngattccccccnggggccttgcgaagggaaaatttctgatttattccaaagacttttatttcggataaccccgtncnngaaccccttccnaagnggggggggnggcccccgnggtttaccccccaaggtcnttttttgggntttcccccttttttaagctggaagggggnatntanaattttngncnggcccgccttttggggtccngttaaantttcatttggggttncaaattaagncntaggntctttcccctttggttgggnnggananaanntggttataattnccccctttcaacnaaanttttcccnccacnanacaaattncccnnagnncccggggntaggccattaataaggttggtcaaaangncccttgggggggnggccctnaaatnggaaggtnnagccttaaacttcaacaatttaaatttgcnggnngggcnggcttccaanttggcccnggctttttntncaanntttggggggaaaaacccttnnnttcggtgggtcnanccttngctnttttaaatgnaaattntgngnnccanaanctccncccgggggtanngaaggngtcggtnttnggcnntattttnngggnngcnttnnttttcccttttttcttggtatanaactggnacttgggttgggccctccggggtcnttnnngggtttgngngntcaaggccggnttattcaatantcnctntnnaagggccngntgnttncncggttatttccccananaaantctnagggggnatantaacgnnanngaaaannaancnctggnnnancnaaaaannggccaatccctataangncg

SEQ ID NO: 5420 - DNA, 1093 bp, Homo sapiens
  misc_feature 1, 3, 5, 6, 11, 13, 18, 20, 22, 24, 25, 26, 27, 28, 30, 32,35, 36, 39, 41, 42, 43, 44, 45, 46, 47, 49, 53, 54, 58,62, 64, 68, 69, 70, 71, 73, 74, 76, 77, 78, 79, 80, 81,82, 83, 87, 91, 93, 98, 101, 102, 112, 457, 539, 637, 643: n = A,T,C or G
  misc_feature 670, 675, 724, 728, 739, 751, 757, 796, 800, 822, 843, 872,878, 889, 893, 905, 907, 911, 916, 920, 931, 944, 960, 979,983, 991, 996, 1003, 1004, 1005, 1007, 1011, 1025, 1044,1062, 1068, 1069, 1074, 1091: n = A,T,C or G
ncnannggtgntnttcgngnantnnnnngntnatnngantnnnnnnnantgtnnattntttnantttnnnntnntnnnnnnnnctanggantngagtngcnnatattgggcnaattggactccaccgcggtggcggccgcccgggcaggtacgcgggagtgggagcgcggggactggctgggaagcggtcggtcgagtgtggcctgtgtggactcgcatcttgcccgaagctgggcggaggagagctcaagctaagggtgatcagcccatgacctaaacctccagacaaaataaaacagggaaaatttgctagaatcaagaatgatggatccatgttcagttggagtccagcttcgtacctcggccgctctagaactagttggatcccccgggcttgcaggaattcgatatcaagccttatcgataccgtccgaccttcgagggggggggcccggtncccagctttttgttccctttagtgagggttaaattgcgccgctttggcgtaattcaatgggtcattagctggtttcctgtgnggaaattggtttattccgctcacaaattcccacacaacattaccgagcccggggagccattaaaagtggtaaaagcctggggtgccttaaatggaggngagctnacctcacattaaatttggcgtttggcngctcnacttgccccggcttttccagtttcggggaaaaccctgttcgtgcccagncttncatttaaattngaaattcggggnccaacngcccccggggggaaagaagggccgggttttttccgttanattngggggcccgccttcttttcccncttttcctttcggctttaaanttggactttcgctttgcgcctttcgggtnccgttnccggcttggcngggngaagccgggttntncaanccttnactncaaaaaggggngggtaaataaccngggttattccccacanaaaattcaaggggggattnaccncccagggnaaaanaaaccannngnggangcaaaaaagggccnagccaaaaagggccccggngaaccccgtataaaaaangggccnngcttnggttgggcggttttttnct

SEQ ID NO: 5421 - DNA, 368 bp, Homo sapiens
  misc_feature 3, 12, 13, 368: n = A,T,C or G
tcnccgcggtgnnggcccgaggtcggagcaatcgaggaggcataaccacacttggggtggctatagggctggaaaacgctgaagatgactgctttcactgaggtcaaggattgtaatattgccagctttgtaaagtcattaaagcagaagtttcttcagtgatcttctctctaagaaacatcatcacctccatgtgccttacagaggccccccgcgtacctgcccgggcggccgctctagaactagtggatcccccgggctgcaggaattcgatatcaagcttatcgataccgtcgacctcgagggggggcccggtacccagcttttgttccctttagtgagggttaatttgcgcgcttggccgtaan

SEQ ID NO: 5422 - DNA, 1110 bp, Homo sapiens
  misc_feature 2, 4, 5, 6, 7, 8, 10, 11, 12, 13, 16, 17, 18, 19, 20, 21,22, 23, 24, 25, 27, 28, 29, 30, 31, 32, 34, 36, 38, 39,40, 43, 44, 45, 46, 47, 48, 49, 50, 52, 53, 54, 55, 56,58, 59, 60, 61, 62, 63, 65, 66, 67, 73, 77, 78, 79, 80,81, 82: n = A,T,C or G
  misc_feature 83, 84, 85, 86, 87, 88, 89, 91, 92, 95, 96, 97, 103, 104,107, 111, 112, 129, 223, 590, 625, 666, 731, 745, 758, 805,842, 866, 903, 909, 929, 932, 950, 959, 979, 988, 993, 1006,1018, 1019, 1022, 1028, 1034, 1042, 1050, 1060, 1065: n = A,T,C or G
  misc_feature 1079, 1084, 1092, 1102, 1103: n = A,T,C or G
gnannnnntnnnnaannnnnnnnnntnnnnnntntntnnntannnnnnnnannnnntnnnnnntnnntttttnatannnnnnnnnnnnnannagnnnaattgnntantttnnatataggcgaattgganctccaccgcggtggcggccgcccgggcaggtacaaagtcagaactgcctggatggctacatatacaccggaaaactggtaagtttcaaacattncctctacaatcttctctctgtttttggttgggttcataggaggttctgtgagtaagattttacaatttctggtatctatattaagtttctctggtccaaatgtgtagtcccacaggtgtttcatgtcatcccaatttcgtacctcggcccgctctagaactaagtggatcccccgggctgcagggaattcgatatcaagcttatcgatacccgtcgacctcgaggggggggcccggtacccaagccttttggttccctttagtgaggggttaattggcgcgcttggccgtaatcatgggtcataagctggttttcctgtgtggaaaattgttattcccgctcacaaatttccacacaaacaatacgnagcccggggaagcattaaaagtgtaaaaagccctnggggtgccctaaatggaagtggagcctaacctcaccatttnatttgcggtttgcgcctcaacttgccccgcttttccaagttccggggaaaaaccctggtccgtgnccagccttgcattnaaattggaattcngggcccaacccccccccgggggaagaaggccgggttttggccgttantttgggggccgctttttttccgctttttcctttgggnttcaacttggacttcgctttgccngccttccgggttccctttccgggctttgccggggccnaagccnggttattcaaagccttcaanctncaaaaagggccgggtaantaccggttntttcccacaagaaattcaanggggggatnaaccnccaaggaaaaaanaacaatggtggnngcnaaaaanggcccnccccaaanagggcccnaggaaacccnttaanaaaaagggcccccntttgncttgggcngttttttccnnaaaggcc

SEQ ID NO: 5423 - DNA, 1202 bp, Homo sapiens
  misc_feature 1, 2, 6, 7, 8, 10, 12, 13, 15, 20, 22, 23, 24, 25, 26, 27,29, 30, 31, 33, 34, 35, 40, 41, 44, 45, 46, 47, 50, 52,55, 56, 58, 59, 60, 61, 63, 64, 65, 67, 69, 72, 73, 75,76, 81, 83, 84, 88, 89, 91, 92, 93, 94, 95, 96, 97, 98,99: n = A,T,C or G
  misc_feature 100, 101, 102, 103, 105, 106, 107, 113, 114, 115, 116, 119,120, 124, 130, 136, 141, 145, 236, 423, 431, 593, 707, 711,722, 734, 748, 751, 816, 822, 846, 853, 881, 887, 890, 901,903, 922, 961, 973, 981, 991, 1000, 1001, 1007, 1018: n = A,T,C or G
  misc_feature 1022, 1031, 1042, 1045, 1053, 1063, 1076, 1078, 1081, 1089,1090, 1092, 1130, 1133, 1135, 1136, 1148, 1163, 1169, 1173,1201: n = A,T,C or G
nnaacnnntngnnanatttncnnnnnnannntnnnggaanntcnnnnaantnttnngnnnntnnntnanttnnannatttngnnattnntnnnnnnnnnnnnnannngcaatnnnnaannttcntatacnactgantatanggcngaattggagctccacccgcggtggcggccgcccgggcaggtaccgcctggtccccgcgtggagtctttactcaaaacagctcccgcctcangccgagatgaggagcccttcagaatagctgctgtctctgggaggacccgggcgtccttggcagcccagctgtgacactgtggcacccagctcgacgttcttgcaaggtctacacactgacccccttcctagccaataacccgagagaagcggggcctcgccttggacgggaagctcaagcacgaagnacaccganacttggcctctagccaccctgtttgaggggaaggggccaaacccgtggaggatcctgggggatcatttgttttccctacaaaagttgaaaagttgaaagcttgggtgggtggtctcgggggccggcccttccataacttttctggtttgagaaaaatcggcnctttaaattctttaatttggattggattgacctttttcaacattgaatcccttcaagaatattcttgcccttcttaagaattcccccaggaatggaagcccaccccagttttgnccangccaaggttcnaaaacccgtccnattccttaatcctnggnaattaattcaaaggaattaaaaattttattgaaaaaaggggattttattattaccccaaccttgntccttnaaattggacccaaaaggaaggaanggaaaanggggtcttttcaagaaataaaaaccctncaaacntgnttcaaaccccnangaaaaaatgggtttaaaanttttttcccttattagacgccttgggaaaaggccccccnacttttttggangttttggntcccccgccntttttttgnnaacccnaaaaccccaantggntattttccnttaaaaatggnggntttggaantggaatggtncttcaatggcccntnccnttaaaaannantttttaaaaaccggaaagcttgtgacccttcggggccngcntnntaaaaaacctangggggattccccccngggccngganggaaaatttcgtattttccaaaaccttnt

SEQ ID NO: 5424 - DNA, 1022 bp, Homo sapiens
  misc_feature 3, 4, 7, 13, 46, 60, 72, 86, 135, 160, 161, 241, 316, 430,478, 528, 566, 573, 610, 639, 650, 673, 683, 687, 696, 701,711, 738, 750, 758, 761, 774, 778, 794, 804, 813, 836, 840,849, 850, 856, 857, 862, 864, 878, 883, 893, 900, 906: n = A,T,C or G
  misc_feature 908, 914, 925, 929, 936, 942, 947, 950, 955, 957, 965, 979,987, 995, 1004, 1015, 1018: n = A,T,C or G
tannttnggcganttggactccaccgtggtggcggccgcccgggcnggtacccaaaacanagatctagccantcaagtctctgtgngcctggagagactgggcagtttgacccttaagcctgaagattcaactgncctgctctttgaagctgacacaatnnactctgcgccagaccatcaccacatttgggtctctcaaaaccattcaaattcctagagcacttgatgggctcatgctagntcagcaaaatattgggcccttcctggagaagagaggctgtatctccatgccagagcagtaagtcagcattccggnattgtagctggtccctttcaagcgaaatggctcctttggaaagcaaaaccctggcccagtgggtttatcaaagcctccctttacataccccaaggcaacccgaccccccaaggnacctgggctttacccccaaaaaggcaagaccttgggaaggaaccaggncaggaccttttctttcccaggaggccctgccaattttccttcaaataaantggtgcggggggggaaaaccctaaaaagggggcctttnaagaaanaaactgggcttccctccaaggaagtggaaaaaaaaanccaaggtttattcaaaaaaaggtggtganccaggccccantttcccacctaacctaaggtgtnctttttcctnccanttggaaaantgggnaaaaaggggntggggaggaatccaaaggaagcctttncttgaatccaangaatggangantgggacccaattnaagnattgggccttagttgnacctcccccnagggaaatncccaattaagccttgcggggaangccntggaagaanngggcanntcgtngnaaaacccagtggangaaangttttaagcntctttanttccangnccctanaaatgtggaangganttgggcntttggnccaanganttgancntcctggtnaccctgggggcccntttcttangaaactanggggggatncccccggggcntgnaggg

SEQ ID NO: 5425 - DNA, 1040 bp, Homo sapiens
  misc_feature 1, 4, 10, 12, 13, 233, 256, 282, 323, 327, 353, 356, 366,377, 382, 399, 423, 462, 463, 466, 472, 480, 502, 511, 532,539, 547, 557, 562, 581, 593, 597, 616, 617, 633, 637, 639,648, 663, 675, 677, 683, 695, 700, 710, 713, 715, 716: n = A,T,C or G
  misc_feature 719, 722, 731, 734, 741, 752, 756, 777, 781, 790, 791, 794,795, 812, 814, 829, 841, 844, 848, 857, 858, 865, 867, 873,895, 906, 912, 919, 922, 924, 928, 932, 944, 960, 963, 968,971, 984, 988, 989, 991, 995, 997, 1002, 1005, 1007: n = A,T,C or G
  misc_feature 1010, 1014, 1021, 1023, 1026, 1033, 1038, 1039: n = A,T,C or G
ntantctacngnntatagggcgaattggagctccaccgcggtggcggccgaggtacctagttcttaggaagggggagggcgatggtggtggtgagtgtaaaatgcgattgagttccttcgatggctgaccctttggttgtggaagatgtcagggcttctctttgcacatgtcctcagaggcgtcgggagaaggctggaaggggcaggatcctttcagggacctgcacagcctnctgatggaaatccaggctctttngcttgcaactagaaaggagccattgnaaccagcagcgactctgcagagccaggcttcaaggaacaantttngcaagggggggccagagaaggcacanggnaaggagcccncaactctggcntgttncaaacccgtgttcattnccttgaggttgccccttttcaagngctggacaaaaacaccgattgggtggaacaaaaataatnnccnattggnaaaaaggntggattaaattccaatttttgnattcttgtntatagaatatcccttcccaangccaggngggaccancccaaaaaanttcangttttttcaggaggaactncccttccaaatntttntggggaaaatgaaaaacanngaacttcccctttttncctngngaaacaagnggggcaagttttccnggctaaccttancnaccttnccgttggtggtnggttncccgcccctnggntnnaanttngggccaacncanccttgtnggggccaaagnaaangaatttgggcccgcccatggntccntggggcccnnggnnttggaaggacctatttnangggccccttttttcnaaaacaataatnaantccnatgggaacnngaaggcntnccttgnttttaaaaatggaaaaattttnaaaacccaaanaagggnttccccnacntntctncaangttaaaaaaacntgggaaaacaaaaaanggntcccncanccccagccccccntttnngnccananttttnttnanacnaaangggaaancncgngccctanctttnnt

SEQ ID NO: 5426 - DNA, 850 bp, Homo sapiens
  misc_feature 435, 442, 463, 498, 534, 653, 654, 657, 694, 699, 713, 718,733, 739, 748, 750, 760, 766, 769, 771, 773, 780, 781, 788,790, 812, 823, 833, 836: n = A,T,C or G
aacgactactatagggcgaattggagctccaccgcggtggcggccgaggtacgcgggggctgaataaagccgtgtctcatctacctgctgtctcccaagtgttcttccagctccctgcccctcatcaacccactctcctcagacctcagctggggcttgaacctgataattggtgtagtcatcaggatgagatttagaagtggtggtgcccctcttgtgacagcatttggcagtgtgcagttgggccatcaataaatccaaggtccaagggccggaattgtctgccaaattcttgggagttatttgctcagccacaggttggcatgctccaacaacattgtggactgggctcacacctatgctgaggtggccaatgtctccaactgttaagatctgcaccacccttcccagcagcaagctgtggatggcttgccntggcatntgcatccaggcttttgtgaanaactggacatggctagaaacttgggggtccccacngacaatggggcgggatgcaacatggttgagcttttngatggggggtgtcacaaaaacccaatggcaagcctgccccccctggcctggacttcaataagcatcccatgaatgaaatggggggcttggcttaaatgggggaggaaaaaacaatgggnnggncccccattggcaaagttacccttgccccggggcgggnccggnttttagaaacttangtggnattcccccccgggcntgccangaaattccnanttttcaaagnctttanttngntnccccgtnngccctcngngggggggggccccggtaccccnaacttttgttnccttttatgngangggtaaattggccc

SEQ ID NO: 5427 - DNA, 382 bp, Homo sapiens
  misc_feature 11: n = A,T,C or G
tacttagggcnaattggagctccaccgcggtggcggccgcccgggcaggtacgcggggttgtggtggttttcttttggcacatttgttaagttttcaaatgggcctaactctgccacatatataatatcggagatggcaaaggcttgtgacggagatatctctcttaagcctttcctgcatcagagaatggcccccactgcttcacacaagaaccacctctcccgcagttcccaaggacttgtcatttcatgttcttattttagacctgttttgtaaataaagctgtttcccaaggaaagagatcaaaaaaaaaaaaaaaaaaaaaaaaaggtccctcggccgctctagaactagtggatcccccgggctgcaggaattcga

SEQ ID NO: 5428 - DNA, 1104 bp, Homo sapiens
  misc_feature 2, 3, 4, 5, 6, 7, 9, 10, 11, 13, 14, 15, 16, 17, 18, 19,20, 21, 23, 24, 25, 26, 27, 28, 29, 30, 31, 33, 34, 35,36, 37, 38, 39, 40, 41, 42, 43, 44, 46, 47, 48, 49, 50,51, 52, 55, 56, 57, 58, 59, 60, 61, 63, 65, 66, 68, 69,70, 71: n = A,T,C or G
  misc_feature 73, 75, 76, 78, 79, 80, 81, 82, 83, 85, 87, 88, 89, 90, 91,92, 93, 94, 95, 96, 97, 98, 99, 100, 101, 102, 103, 105,109, 112, 113, 114, 115, 116, 119, 121, 129, 130, 131, 135,142, 407, 416, 441, 484, 488, 519, 532, 617, 684, 768: n = A,T,C or G
  misc_feature 769, 788, 793, 803, 811, 881, 895, 903, 928, 936, 956, 960,972, 986, 1004, 1010, 1025, 1030, 1032, 1043, 1048, 1052,1063, 1069, 1072, 1089, 1094, 1098: n = A,T,C or G
tnnnnnntnnnannnnnnnnntnnnnnnnnntnnnnnnnnnnnntnnnnnnnttnnnnnnntntnnannnntnannannnnnnantnnnnnnnnnnnnnnnnngnaagnggnnnnntgnangactactnnnatgngaattgnagctccaccgcggtggcggccgaggtacccagctactctataaatttgagagaccacagtatgctgaaattcttgcagatcatcccgatgcacccatgtcccaggtgtatggagcgccacatctcctgagattatttgtacgcgggggggcattcctgaagctgacagcattcgggccgagatgtctcgctccgtggccttagctgtgctcgcgctactctctctttctggcctggaggctatccagcgtacctgcccgggcggnccgctctanaactagtggatcccccgggctgcangaaattcggatatcaaagccttatcgatacccgtccgaccctngagngggggggccccggttacccagctttttgttncctttagtggagnggttaaattgcgccgcttggcgtaatcatggtcataagcttgtttcctgtggtggaaaattgtttaattccgggtcaacaaattnccacaacaaacataccgaagcccggggaggcataaaagttgtaaaagcctggggggtgccttaaatngagtggaagctaaccttcacaatttaaattggcggtttgcgctcacctggcccgcttttccaagttcggggaaaccctgttcgnngcccagctgcattaaatgnaattngggccaaacnccccgggnggaagaaggcgggttttggggtaatttggggcggcttcttttccccttttccttggcttcaacttgaaanttcggcttggcgcntccgggtncgttttcgggctttccggccgaagnccggtatncaagccttcaactcaaaaanggcngggtaaattacngggttatttcccanaagaaattaaggggggantaaacnccagggaaaagaaanatttngnagccaaaaaanggccncgcnaaaaaggcccnggaaanccngtaaaaaaaagggcccnttttncttnggcgtt

SEQ ID NO: 5429 - DNA, 1267 bp, Homo sapiens
  misc_feature 6, 7, 8, 11, 12, 15, 20, 23, 24, 29, 30, 33, 35, 43, 44,45, 51, 53, 59, 63, 64, 65, 67, 68, 69, 70, 71, 73, 77,78, 81, 82, 87, 90, 91, 92, 93, 94, 95, 100, 106, 110, 112,115, 118, 119, 120, 127, 134, 277, 427, 446, 502, 503, 505: n = A,T,C or G
  misc_feature 516, 521, 526, 534, 536, 539, 552, 582, 605, 614, 632, 647,656, 678, 683, 724, 779, 790, 801, 826, 840, 843, 860, 865,875, 880, 894, 896, 903, 917, 920, 927, 930, 931, 935, 938,941, 950, 951, 952, 957, 964, 969, 973, 976, 977, 982: n = A,T,C or G
  misc_feature 987, 1000, 1001, 1015, 1018, 1020, 1021, 1043, 1056, 1061,1074, 1080, 1092, 1097, 1100, 1112, 1118, 1120, 1121, 1127,1131, 1135, 1151, 1152, 1154, 1155, 1159, 1164, 1166, 1168,1174, 1177, 1182, 1187, 1189, 1196, 1202, 1204, 1205: n = A,T,C or G
  misc_feature 1223, 1226, 1228, 1229, 1232, 1234, 1242, 1249, 1259, 1260,1262: n = A,T,C or G
aacttnnnttnnttncattnctnnctttnnttncnatctcttnnntggaantnttctanttannnannnnntnctannttnnatttnttnnnnnnaagtngggggncttngngangannnctcactntagggcnaattggactccaccgcggtggcggccgcccgggcagtttcccccaccactgtgatctatgaggataaccagagaccctctggggtccctgatcggttctctggctccttcgacatctccttcaactctgcctccctcaccatntctggactgaagactgaggacgaggctgactactactgtcagtcttatgatagcaagccgatgtggtgttcggcggagggaccaagctggaccgtcctagggtcaagccccaaggcttgccccctccggtcactcttgttcccgcccttnccttcttgagggagccttnaaaagccaaacaaaggccacgcctgggtggtgtccttcaattaaaggtgacctttnntnacccccggggnaggcncggtngaccaagntnggncccttgggaaagnggcaagaattaggcaaacccccccgttcanaggggccgggggaaggttggganggaacccancccaaccacccccttttncaaaaaccaaaaggncaaaccaancaaaaggttaccctttcgggcncggcntcttaagaaaaccttaagttggggaattccccccccggggncctggccaagggaaattttccgaattattcaaaaggccttttaattccggattanccccggtcttnaaccccttctngaagggggggggggggggccccctnggttacccccccanccnttttttggttttccccnttttnaggtgggaanggggnttaaattttgccgncngcctttngggccgttaaaatncanttggggntcnntaangcnttntttttcccnnntggtngaaaaanttggnttanttnnccgcnttcanccaaatttttccnncacaaaacaatttncgnanncccggggggaggccattaaaanttggttaaaaagnccctngggggggggcccntaaaanggaggtggagcnttaanctnaaaatttaaatntggcgntnngcggcnttcncttngcccggtttttccaanntnngggnaaaancntntttgtntgncccancttgntnttttaanttaaantnnggcccaacccccccgggnggnannagngnccggtttntggggtnttttggggcnncntcttt

SEQ ID NO: 5430 - DNA, 849 bp, Homo sapiens
  misc_feature 4, 6, 135, 596, 613, 713, 731, 732, 733, 740, 743, 748, 755,756, 762, 771, 779, 789, 811, 813, 823, 826, 833, 844, 846: n = A,T,C or G
aggngncgcgcgtaatacgactcactatagggcgaattggagctccaccgcggtggcggccgcccgggcaggtacgttctgttccttgaacagcattctcctctaggagtgtctgtgattccacaagcaacccanacatcagcacatactgaggaaagatcttgcctccagattgtagtaaacacctggatattgcagctttttccattatttcctgctgaatgagcccagatggctcaatgacatccaatataattatgctccataacttgtctgattttggcctttgtaacatagcagattcatcctccacatgtctcagccaaaactcaagtgtttctttaggaaagtgattggcttcagatatgaggtccagagcaatacgatgctggtctttctccacagaactgtatggtttaacctgcccaagtgtgccagcaataacaggcagaacagagaagccttcggacacatctaacacgtagaaaggttcaaggatgttctgtacctcggccgctctagaactagtggatcccccgggctgcaggaattcgatatcaagcttatcgataccgtcgacctcgagggggggcccngtacccagcttttgttncctttagtgagggttaattgcgcgcttggcgtaatcatggtcattagctgtttcctgtgtgaaaatgttattcgctcacaatttcccacaaacaatacgnagccggggagccctaaannngtaaagnctnggggngccctanngagggngcctaactncccattanatggggttgngctcactggccccttttttaanangggaaacctnttngggcccnccttgctttananaat

SEQ ID NO: 5431 - DNA, 878 bp, Homo sapiens
  misc_feature 2, 68, 74, 76, 78, 79, 100, 103, 104, 118, 121, 125, 133,135, 136, 138, 139, 140, 145, 203, 210, 216, 217, 218, 222,224, 226, 227, 231, 239, 241, 243, 244, 245, 247, 251, 260,261, 269, 282, 283, 291, 293, 341, 585, 586, 618, 654: n = A,T,C or G
  misc_feature 655, 660, 674, 678, 681, 719, 720, 722, 729, 743, 751, 762,767, 770, 779, 786, 790, 796, 808, 811, 827, 848, 853, 855,857, 858, 861, 878: n = A,T,C or G
gngggcgccgtaatacgactcactatagggcgaattggagctccacccgcggtggcggccgaggtacnttcatncntnncaaccaccataacatattggnggnngtgcagggggggtnaanaaanaaaaatantnnannnatggngtaccttactgatgaccgcctgcacagatggtgggtactattgggctctgtcctacantgtgctnttatannnatangnannatancaggaatntnannngnaggncgatgctcnntttattgntgctgtggcctanngatccagngngctcccctatgtgcacgagttcccattaagaggacccccttggcctanggggcggagtgtaaggaacatggctgtgttgctgccaggcaggcataggccgaggtaaaaatcctgcatgacacaagtgggattaagagcacacgcgcacaatcctgtgcctgatataatcacagctaggtagacataacacaagagaagctcatcatttggctctcagccactatcatttgtgaggtgtacctgcccgggcggccgctctagaactagtggatcccccggctgcagggaattnnatatcaagcttatcgattccgtcgacctcgangggggggcccggtacccaaacttttgttccctttanntgaanggttaaatttgccncccnttnggccgtaattcatgggtcataagcttgtttccctgggnngnaaattgnttaattccccttcnccaatttnccacacaacantaccnaancccgggaancataaangtgntaaaanccctggggggtnccntaaatgaagtggagcntaactccacatttaatttgcngtttncncnncancttcccccttttccaan

SEQ ID NO: 5432 - DNA, 864 bp, Homo sapiens
  misc_feature 2, 3, 4, 5, 8, 669, 710, 771, 777, 778, 814, 816, 830, 839,854, 855: n = A,T,C or G
gnnnnccncgtaatacgactcactatagggcgaattggagctccaccgcggtggcggccgcccgggcaggtactggtcggataagaagttcaacaaggctctgccgtccacattctggttttgcttggtttatcttgagaaaagcatgaaatcttggtttctgtttttcacatttaataattgtttccttgctcatttcaaagaagtttacaaagggagggtaggtttttaccaaatcttttgaatatttcagaaaaatgtcaccaatgcttttgctctcatcccaattaactataaggtcttcaagatcatcctttatcttagtgtgtacctcggccgctctagaactagtggatcccccgggctgcaggaattcgatatcaagcttatcgataccgtcgacctcgagggggggcccggtacccagcttttgttccctttagtgagggttaattgcgcgcttggcgtaaatcatggtcatagctgtttcctgtgtgaaattgttatccgctcacaattccacacaacatacgagccgggagcataaagtgtaaagcctggggtgcctaatgagtgagctaactcacattaattgcgttgcgctcactgcccgcttttcagtcgggaaacctgtcgtgccaactgcattaatgaatcggccaacccccnggggagaaggcggtttgcgtattggggcgctctttcgcttncttcgctttaacttgacttcgctgcgcttcggtccgttccggcttgcgggcgaagcgggantcagcnncactcaaaaggccgggaaataacggggttattcccnanaaatcaaggggggntaaccccanggaaaaaaaaccttnntgacccaat

SEQ ID NO: 5433 - DNA, 842 bp, Homo sapiens
  misc_feature 112, 294, 564, 687, 693, 697, 700, 701, 707, 720, 731, 736,742, 761, 775, 780, 790, 805, 817, 822, 823, 824, 833, 834,842: n = A,T,C or G
gtaatacgactcactatagggcgaattggagctccaccgcggtggcggccgcccgggcaggtacccgcgtggctaggggagccctaggaagcgagtatagctctcgtggccnaatggaatgaagcgaagccttcatgtcagcattgggcttgcaggtgctgagcccccgatggtggcccctcttcccggctttctctcaggggcatgggtggggtggagatattcaactacttccaacggaaaccaacacttgaaaggttatgaaggcccctaaacctcctgctcttccatggngatggctgacagctaaagccacactgccactaccctaagcccaagcttgatcacctggaaatggggactgagagaggacgagaacagcacaagcctttgagctctcatggggtggcgtaaatttatggtcaatatgcctccagatcagaggtcctgctgttagagagttttctttttttgctttagtggtacctcggccgctctagaactaagtgggatcccccgggctgcaggaattcgatatcaagcttatcgataccgtcgacctcnagggggggcccggtacccagcttttgttccctttagtgagggttaattgcgccgcttggcgtaatcatggtcatagctgtttcctgtggtgaaaattggtattccgctcacaaattcccacancaacantacnaannccgggnaacaataaagtgntaaaagccctnggggnggcctnattgagatgagcctaactnacattttaatttgnggtcncgctttactngccggtttaccagtncggggaaacctnttttnnnaaaattgcnntttaaagn

SEQ ID NO: 5434 - DNA, 1308 bp, Homo sapiens
  misc_feature 3, 7, 9, 10, 13, 15, 17, 21, 22, 23, 24, 25, 28, 29, 30,31, 32, 33, 34, 35, 38, 39, 40, 42, 45, 47, 49, 50, 52,55, 56, 57, 58, 62, 63, 66, 67, 68, 69, 74, 75, 78, 82,83, 84, 85, 87, 88, 89, 90, 91, 92, 94, 96, 98, 99, 100,101: n = A,T,C or G
  misc_feature 103, 104, 105, 106, 107, 108, 109, 110, 111, 114, 115, 116,118, 123, 127, 128, 130, 132, 133, 134, 139, 145, 147, 180,184, 218, 220, 222, 224, 230, 242, 245, 249, 250, 252, 261,265, 309, 329, 337, 340, 351, 353, 367, 369, 371, 392: n = A,T,C or G
  misc_feature 414, 448, 471, 489, 509, 549, 551, 555, 569, 572, 580, 595,624, 634, 636, 638, 645, 696, 721, 738, 779, 804, 839, 851,859, 916, 933, 972, 1013, 1048, 1058, 1085, 1096, 1126,1179, 1189, 1190, 1208, 1218, 1220, 1232, 1240, 1241, 1244: n = A,T,C or G
  misc_feature 1245, 1251, 1266, 1268, 1271, 1275, 1279, 1280, 1286, 1295,1303: n = A,T,C or G
ccntgcncnnctntntncgtnnnnngtnnnnnnnngtnnntnacncncnnanacnnnncttnngtnnnnacgtnntcntctnnnnannnnnntncncnnnncnnnnnnnnngtnnngngggantganngngnnnctgcncctcananggctgaattggagctccacccgcggtggcggcncgangtacaggctgggccaaatgtcagaatcaaggcancngngngggganaggcagggctgnaanagcnntntcatttgcnccantttcctcaagaggcaaatcttctaaaaaatcatcttgcagcccngcagccatctagcctcagtngcatgagnagnggatcggatgnanatatccttcatggngngngtccaagttcccaaatctggnaaagccattaatttccaaccantccaaaaaaattatttgggcaaaaataagggganaatggccctagccattttttatnggggaccatttcaattgnaccctcggtggggaaaaagntaattaatttttaaaaaaaaaagttggtaaaggttccctngnaatnttaaaataattttnganaaattttnggacccaaatttttnaaaattaccaaattttaaaaggaaaaagnaaaaccccanananaaaaagncaaattgggcctttaaaataaaaggtttaatcctttccggggaaaccattnaccaaaattaaattttcaaggattncattttggcaaggtttntaaaaaagggtggtgggattataaaaatttttggaaatttnaaattccaaaggccaaattttgganttcccccatttcctttcaattttcccccttggcanaaattaccaccntcttggtnaagccaccattattaccaccggtaacccttgccccccgggggccggggcccgcttcnttaggaaaccttaggtngggaatcccccccggggcctggccaagggaaatttccgnatattcaaaggctttattcggaatacccgtccggacccctncggaggggggggggggcccccgggtaccccccagncttttttggnttccccttttaagtgggagggggtttnaatttggcccnccgcctttgggccgttaatcattgggccanttagccttgttttcccttggggttggaaaaattgggttaatccccgccttcancaaatttccnnccccaaaccattaccgangccccggggngncctttaaaagtngttaaaannccnngggggnggcccctaaatggangnggnggcntaanncccccntttttattnggcgttgnccccc

SEQ ID NO: 5435 - DNA, 483 bp, Homo sapiens
  misc_feature 7, 32, 36, 39: n = A,T,C or G
ggttgancactacttagggcgaattgggcccnttanatncatgctcgagcggccgccagtgtgatggatatctgcagaattcggcttagcgtggtcgcggccgaggtacatgagcaggctcagcctaggggaataattgccaacaaacacttttgggaagcctgggaccatggctctgccaggaatctgtgacatctccagggcatcatttgagtcctgccttctcaaagtacctgcccgggcggccgctcgaaattccagcacactggcggccgttactagtggatccgagctcggtaccaagcttggcgtaatcatggtcttagctgtttcctgtgtgaaattgttatccgctcacaattccacacaacatacgagccggaagcataaaagtgtaaagcctgggggtgcctaaatgagtgagctaactcacattatttgcgttgcgcttactgcccgttttccaagtcgggaaaccctggt

SEQ ID NO: 5436 - DNA, 1240 bp, Homo sapiens
  misc_feature 5, 7, 12, 19, 20, 21, 23, 28, 30, 36, 38, 41, 44, 46, 47,48, 51, 52, 53, 54, 55, 68, 69, 73, 75, 79, 80, 87, 88,89, 90, 91, 92, 93, 94, 95, 96, 97, 98, 102, 103, 104, 109,110, 111, 113, 114, 120, 122, 123, 125, 127, 131, 136, 137: n = A,T,C or G
  misc_feature 202, 204, 209, 222, 232, 234, 241, 245, 284, 334, 398, 414,451, 491, 510, 522, 538, 540, 547, 552, 576, 587, 612, 615,635, 637, 681, 683, 689, 694, 703, 719, 721, 769, 801, 803,805, 812, 816, 820, 842, 859, 875, 882, 895, 897, 907: n = A,T,C or G
  misc_feature 911, 914, 919, 921, 925, 928, 931, 939, 940, 970, 971, 972,975, 991, 1000, 1010, 1016, 1017, 1018, 1031, 1036, 1047,1050, 1051, 1062, 1071, 1072, 1073, 1075, 1080, 1085, 1089,1094, 1096, 1104, 1117, 1118, 1119, 1120, 1133, 1138: n = A,T,C or G
  misc_feature 1143, 1144, 1153, 1167, 1168, 1169, 1174, 1176, 1181, 1186,1187, 1189, 1196, 1197, 1199, 1201, 1204, 1205, 1209, 1217,1219, 1220, 1223, 1226, 1227, 1229, 1233, 1234: n = A,T,C or G
ccccngntctcnctgtctnnngnttttntnttttcngnccnccncnnntannnnnatacgaatctttnnttcntntgtnntcacccnnnnnnnnnnnnagtnnnggggnnnanntttgtngnntnantatngggcnnattggagctccaccgcggtggcggccgtccgggcaggtacgcggggaagacgacgtaccagccangnggggngggggctttgganaaaaaaaaantnttttttntttngccgaacttctgtgagtccatgaagctggattgtccctngacctcttttgaggaaggagagggttgcttctaactggtcctgggagatnccactgtgatgtatcccgggatgaagacacaatcctggttactttcatagccccgtttttcttncccagcccttgacttntcaaaaagccactgccacagaggaggaggccagcaanaaccccactttcaggcttctttagggactctgcacctttnccccaggaagggaaaaganatttaaaaaaanttgaaattttgtttcnangggaaangccangttggaccctttccaaaggggacngttggggcctngttgggcccttttccaccggggaanggnaatggaaaattttgggggcntngccttggggccccccttgccccccaggaagggaaaagccttggntncccctntgggncccggcctncttaaggaaaccttangngtggggattccccccccggggggccttccaagggaaatttccgtaatnattcaaaaggcctttattccggattaccccgntncntaacccntctngaangggggggggggccccccggttncccccaacccttttttngggttcccctctttanatgggangggggtttaaatntngcgcccgccntttnggncgttnanttcnatnggnggccatgnnaccttgggtcttcccctggtgggggaaaannnggntgaattcccgcttccnccaaatttnccccacacancaattnnntaagccccggganggcanttaaagggggnaannccctggggggngcccctaannngnggtgnggccntatnactcncncttttttnttgggggtggggnnnncccctggcccccnttttntcaanngtggggganaaaccctttcgggnnnccccncntggantttanntnaaaatanncngncanncccncccggganannggngtnntntttnnttttta

SEQ ID NO: 5437 - DNA, 1065 bp, Homo sapiens
  misc_feature 2, 5, 7, 9, 10, 12, 14, 15, 16, 18, 20, 22, 23, 25, 27, 28,29, 32, 33, 34, 36, 37, 39, 40, 41, 42, 44, 45, 46, 47,48, 49, 50, 51, 52, 53, 54, 55, 56, 57, 58, 59, 60, 61,63, 65, 66, 68, 70, 71, 72, 74, 80, 82, 84, 86, 88, 89,90: n = A,T,C or G
  misc_feature 91, 92, 93, 94, 95, 96, 98, 99, 100, 101, 103, 104, 105,106, 110, 113, 115, 120, 122, 124, 136, 137, 204, 207, 224,229, 236, 237, 238, 534, 641, 645, 699, 706, 775, 785, 852,876, 891, 906, 931, 969, 972, 974, 977, 980, 991, 992: n = A,T,C or G
  misc_feature 993, 1003, 1006, 1019, 1033, 1037, 1039, 1053, 1057, 1059: n = A,T,C or G
cnctncncnngntnnntntnanntnannngtnnntnncnnnnannnnnnnnnnnnnnnnnnananntntnnntngttgananantnannnnnnnnncnnnngnnnngggnggnanttttncnantcctatagggcnnattggagctccaccgcggtggcggccgcccgggcaggtacgcagggggcctctgtaaggcacatggnggngagggggtttcttaaanagaanatcactnnngaaacttctgctttaatgactttacaaagctggcaatattacaatccttgacctcagtgaaagcagtcatcttcagcgttttccagccctatagccaccccaagtgtggttatgcctcctcgattgctccgtacctcggccgctctagaactagtggatcccccgggctgcaggaattcgatatcaaagcttatcggatacccgtcgacctcgagggggggggccccggttacccaagctttttgttccctttagtggaggggttaattgcgccgcttggcgtaaatcattgggtncatagctgttttcctggtgtggaaaattgtttatcccgctcacaattccacaccaacattaccgagcccggggagcattaaagtggtaaagccctgggggtgccctnaatngagtgagcctaactcacattaattgccgttgcgcctcactgcccgctttccagntccgggnaaaaccctggtcgtgcccagcctgcattaatgaaatcgggccaacgcgccgggggaggaggcgggtttngccgtatttngggccgctctttccgccttttccttcgcttcacttgacttcggcttgcgccttcgggtcccgtttcngctttcccggccaaagccggttanttcaaaccttcaacntccaaagggccgggntaaataacggggttattcccaccanaaaatcaggggggaattaacccccagggaaaagaacantgntnaanccnaaaaagggccnnnccaaaaaggnccngtggaaccccgtnaaaaaaggcccccntttncnttggcgtttttttncctnanggctcc

SEQ ID NO: 5438 - DNA, 632 bp, Homo sapiens
  misc_feature 38, 83, 625: n = A,T,C or G
tatagggcgaattggagctccaccgcggtggcggccgngtaccaggcaaagttgctgccaacactctgactggccctgcaggnagagggtggcactttcccctggagacacagacagggtggctggagactgcgtcatcactatttctccagtggtatctgggagccagagtagcaggaggaagagaagctgcgctggggcttccatggttccgtctgggtcctaactgagcagttcctccccgcgtacctgcccgggcggccgctctagaactagtggatcccccgggctgcaggaattcgatatcaagcttatcgataccgtcgacctcgagggggggcccggtacccagcttttgttccctttagtgagggttaattgcgcgcttggcgtaatcatggtcatagctgtttcctgtgtgaaattgttatccgctcacaattccacacaacatacgagccgggagcataaagtgtaaagcctggggtgcctaatgagtgagctaactcacattaattgcgttgcgctcactgcccgctttccagtcgggaaacctgtcgtgccagctgcattaatgaatcggccaacgcgcggggagaggcggtttgcgtattgggcgctcttncgcttct

SEQ ID NO: 5439 - DNA, 1054 bp, Homo sapiens
  misc_feature 2, 3, 6, 8, 10, 11, 14, 16, 18, 20, 23, 25, 26, 27, 29, 31,32, 33, 34, 36, 38, 39, 40, 41, 44, 48, 49, 52, 53, 56,58, 59, 60, 61, 65, 68, 69, 70, 71, 72, 73, 74, 76, 77,78, 80, 81, 83, 84, 85, 86, 87, 88, 89, 91, 92, 93, 94,95: n = A,T,C or G
  misc_feature 96, 99, 100, 101, 105, 108, 114, 132, 198, 201, 208, 213,363, 496, 574, 617, 688, 800, 806, 834, 837, 850, 868, 874,900, 908, 931, 934, 955, 962, 970, 994, 1008, 1009, 1010,1016, 1017, 1019, 1030, 1051: n = A,T,C or G
cnnacncncnntanantncngtntnnntnannnnangnnnntantccnnatnncantnnnnatantannnnnnntnnntnntnnnnnnntnnnnnnagnnnaggnaantaagtnaagactcactatagggcnaattggactccaccgcggtggcggccgaggtactgtgcgctggaacctccttgggctcagctgctngcngggaggngaatnctaaatataaactatgccctatgcttgcctctaactcttgggggacctctaccatacatctgtcatcatgataaactgtgtcatcactcccgcgtacctgcccgggcggccgctctagaactagtggatcccccgggctgcaggaattcngatatcaagcttatcgataccgtcgacctcgagggggggcccggtacccagcttttgttccctttaagtgagggttaattgcgccgcttggcgtaatcattggtcataagcctgtttcctgtggtgaaaattntttatcccgctcacaattcccacaccaacataccgaagcccggggagcaataaaagtgtaaaagccctgggggtgccntaatgaagtggagctaactcacattaattgcgttgcgctcacntggccccgctttccagtccggggaaaccctgttcgttgcccagcttgcattaatggaaatcgggccaaccnccgcgggggaagaaggccggttttgcggtatttgggggcgcttcttcccgcttttcctcgctcactgactccgctgcgctcgggtcgtttccggctgccggcgaagcgggtnttcaancttcaactcaaaaggccgggtaaatacnggnttaatcccaccangaaaatcaagggggaatnaacccncaagggaaaaagaaccattgtggaancaaaaaangggcccagcaaaaaaaggcccanggnaacccgtaaaaaaagggcccnccggttngcttggcngtttttttccattaaggcttcccncccccccttggccnnngcattnnanaaaaaattccnacccctcaaagtcaaaagggnggg

SEQ ID NO: 5440 - DNA, 1307 bp, Homo sapiens
  misc_feature 5, 8, 10, 11, 20, 22, 23, 24, 26, 33, 35, 38, 39, 48, 49,50, 53, 54, 57, 62, 64, 65, 66, 67, 70, 75, 79, 80, 81,83, 87, 89, 91, 93, 95, 96, 97, 98, 99, 100, 101, 106, 108,112, 115, 119, 123, 126, 130, 141, 145, 147, 178, 180, 190: n = A,T,C or G
  misc_feature 203, 204, 207, 212, 213, 215, 217, 219, 225, 239, 245, 287,320, 324, 342, 356, 366, 371, 372, 373, 374, 385, 395, 412,425, 439, 449, 450, 457, 467, 480, 481, 488, 496, 512, 531,538, 582, 603, 621, 633, 639, 643, 645, 646, 649, 650: n = A,T,C or G
  misc_feature 656, 657, 662, 663, 670, 671, 673, 674, 684, 688, 702, 712,738, 774, 787, 788, 790, 806, 808, 814, 818, 851, 855, 872,875, 876, 886, 902, 906, 907, 909, 917, 919, 922, 927, 934,952, 963, 972, 985, 991, 992, 994, 1005, 1013, 1014: n = A,T,C or G
  misc_feature 1041, 1042, 1046, 1049, 1051, 1052, 1054, 1057, 1071, 1072,1079, 1084, 1089, 1112, 1118, 1126, 1127, 1135, 1137, 1138,1147, 1162, 1165, 1166, 1174, 1179, 1186, 1190, 1191, 1193,1194, 1197, 1214, 1217, 1228, 1232, 1233, 1235, 1236: n = A,T,C or G
  misc_feature 1240, 1247, 1252, 1259, 1261, 1271, 1272, 1277, 1281, 1282,1283, 1284, 1289, 1296, 1299, 1301, 1303, 1306: n = A,T,C or G
ctccnccncnntcatttttntnnntngtttttntnctnnctccccgcnnnganngcnatgcnannnnttntgtgntgcnnngngtgntngngntnnnnnnnaagtnangggngtnagantctncantgantataaggcganttgnanctccaccgcggtggcggccgacgtacccggnanggctcatgcngcgcaagtaggtnnggnggggnngnanantccccnaacaaaaaaataantttttntcctttcatgatcaccgccctcataatcattttccttatcangcttcctagttcctgaatgcccttttcctaacnctcncaacaaaactaactaatnctaacatactcaanacgctcaggnaaatnnnnaacccgtcttnaactatgctnggccgggcaattcatcncttagtcctttanttgggcccctcccnattccccttnncgcattncttttaccantaaccaggacgannggtccanaccgattnccccttccccctttancccattccaaaaattccanattttgngccccaccccaaattgggttatccccttggccccccgggggccngggcacggccttcctttaggnaaaccttaaggtggggantcccccccccgnggggcntggnanncgnnaaattnncgaanntatttcnnannaccctttttnccgnttaaccccggtccnggaccccctncccatggggggggggggcccccccgngtttaccccccaagccttttttttgggtttcccccntttttaaggtcgnnangggggttttaattttngncgccgncctntgggccgttaaatttcccttggggtccaattangccnttggttttccccttgtngtnngaaaaaattngttttattccccgtcnttcnncnaattttcncnccnccaanccatttncggaaatcccgggggggnggcctttaaanatttggttnaaaaaacccctgngggggnngncccttaaattngaggtggnngccttaaccttccccagtttaaatttnnccgnttntnncnccntcaacttgcccccnntttttcnccagntcacnggaaaaacccctggtctcgtggncccaanccttggcnntttaaatngnnattcgcggnccaaccacccccccngcnnttaaaaantcccngcttttncccnntnnttnggggggcctttttcccnccntttctctaggnatannanngaanttatctnggggnctccggncnatttttgggnntttcngagnnnntcccnttttttnttntnanctnc

SEQ ID NO: 5441 - DNA, 1088 bp, Homo sapiens
  misc_feature 5, 6, 12, 14, 15, 16, 17, 18, 19, 20, 23, 24, 25, 27, 29,30, 32, 34, 35, 36, 37, 39, 40, 41, 43, 44, 45, 46, 47,48, 49, 50, 52, 53, 54, 56, 57, 58, 59, 62, 65, 67, 69,70, 74, 76, 77, 79, 80, 81, 82, 83, 84, 86, 87, 88, 89,90, 91: n = A,T,C or G
  misc_feature 92, 93, 94, 95, 96, 97, 98, 99, 100, 101, 102, 103, 106,107, 108, 113, 116, 118, 120, 121, 122, 124, 217, 219, 226,231, 233, 235, 469, 476, 540, 619, 698, 738, 750, 760, 795,816, 820, 863, 887, 906, 931, 984, 1029, 1036, 1037, 1044: n = A,T,C or G
  misc_feature 1058, 1062, 1071, 1074, 1080: n = A,T,C or G
ccgcnngctctnannnnnnngtnnnangnntngnnnntnnnannnnnnnnannngnnnntcnccntnanngtgntnntnnnnnncnnnnnnnnnnnnnnnnnnagnnnggganggnanannnangactcactatagggcgaattggagctccaccgcggtggcggcccgaggtacgcgggggccgacggactgtgtccggcgatgggcacgggcatntnttcgttnatagntnantgtttgcattctgattgggaacactgggatcattttcatcatgccgacagtggtggtaatggatgtatccctttccatgacccgacctgtgtctattgaggggtccgaggaataccagcgtaagcacctagcagcccatggtttaacgatgctgtttgagcacatggccacaaattacaagcttgaatttacaagcacttgtggttttttcatcactttgggggagtttgatgngtccccnttcacggagagattataattacccctacagggaaggcacttaagtaaatatggggatgaattantgaccaaaaaccctgcttgggaggtcctgcaattagtttggtgtttgcaaatattcggtttcaagcaaggaatgggggngggtgccaaattcccttgcccaaggttgtccctggttgacagacggctgtccttggcatttgggtaggagggggtcacntgccgaccatttcccctagcccactcaaaaaatcaaacgnaaagtggaggangcaacagggnttccacttaccctttttccttttccccatcttaangttattataatccattggtgncatnggccgaaattttgggagggaagcttcccagaagccacccgganttcccttggggaaatggccctttngaaaccgttcttcattagnattttaaaaccaaatgggtggaaangggccaagaatttttttaacttaattggatgggcccccccttggggcctttgnaaggaaatggttaccctggccccgggggcggggccgcttcttaanaaactanngtgggantccccccggggctngccnggaaatttnganttttancccttttc

SEQ ID NO: 5442 - DNA, 1067 bp, Homo sapiens
  misc_feature 1, 2, 4, 5, 6, 8, 12, 13, 14, 15, 17, 18, 19, 20, 22, 23,24, 25, 27, 28, 29, 30, 31, 32, 33, 34, 35, 36, 37, 38,39, 40, 41, 43, 44, 45, 46, 47, 48, 49, 50, 51, 52, 53,54, 55, 56, 57, 58, 59, 60, 61, 62, 64, 65, 66, 67, 70,71, 72: n = A,T,C or G
  misc_feature 73, 74, 75, 77, 78, 79, 80, 81, 82, 83, 84, 85, 86, 87, 88,89, 90, 91, 92, 93, 94, 95, 96, 97, 99, 101, 104, 106, 107,108, 109, 110, 112, 113, 114, 117, 204, 609, 710, 749, 764,823, 857, 881, 904, 923, 939, 961, 962, 975, 983, 987: n = A,T,C or G
  misc_feature 990, 993, 999, 1005, 1021, 1030, 1033, 1049, 1056, 1057,1058, 1061, 1066, 1067: n = A,T,C or G
nngnnncngatnnnntnnnntnnnntnnnnnnnnnnnnnnngnnnnnnnnnnnnnnnnnnnnannnnttnnnnnntnnnnnnnnnnnnnnnnnnnnnantnggntnnnnntnnnagnactcactatagggcgaattggagctccaccgcggtggcggccgcccgggcaggtacgatgtttagcagtatcctcccttctccaatngtgacaatcaaaaatgactctaaacattaccattattacctaattgagaaatgctgctgtaagcaaagctgccctttgccctggagggaggcagtatctttctgttaagaatattcacgatacaaacattcttggatagtcaaaacaaaaggcagtcagtgtttttgcacaaaagatgtgcagaagtgtgttacccatggagaattgtcaccgaagagaatcctgacacccattagtctctttggataaaagttacctatcacccaggcaatgttattatattgacattatgccctcctgtagggtaccctcggccccgcttcttaggaacttagtggggatccccccggggcttgcagggaatttccgatatcaagccttattcgaatacccggtcgacctcgnagggggggggccccgggtaccccaagctttttggttccctttaagtggaggggttaaattggcgccgccttgggccgttaatcaatgggtccatagctggnttcctgtgtgaaaatttggttaatcccgctcacaatttncacacaacattaccnagcccgggagccattaaaagttggtaaaagccctggggggtgcccttaatggaggtgangctaacttcacattaaattgcgttttggcgcttnactgcccccgcttttccaagttcngggaaaacctggtcgttgcccangcctggcaattttaatggnaattccgggcccaacncccccgggggaagaaggccggnntttgccgttattnggggccgncttnttnccngctttncttggntttaacttgacttcgntttgggctnggntcctttcgggctttgngggcgannnggnattcnn

SEQ ID NO: 5443 - DNA, 1196 bp, Homo sapiens
  misc_feature 5, 11, 15, 23, 28, 31, 37, 38, 40, 49, 51, 54, 55, 71, 78,80, 86, 88, 90, 96, 98, 104, 107, 109, 110, 111, 112, 113,115, 116, 117, 121, 123, 131, 133, 138, 150, 157, 163, 197,202, 205, 221, 282, 382, 399, 404, 531, 535, 549, 598: n = A,T,C or G
  misc_feature 626, 627, 650, 698, 720, 721, 722, 733, 738, 751, 754, 755,771, 800, 804, 810, 822, 824, 832, 857, 870, 878, 882, 896,899, 911, 912, 918, 926, 934, 965, 969, 973, 989, 991, 995,1004, 1005, 1010, 1012, 1020, 1035, 1041, 1042, 1050: n = A,T,C or G
  misc_feature 1059, 1064, 1066, 1067, 1068, 1069, 1077, 1081, 1083, 1089,1093, 1101, 1102, 1110, 1115, 1120, 1123, 1127, 1134, 1135,1148, 1156, 1165, 1169, 1173, 1180, 1187, 1196: n = A,T,C or G
cctcncctcgnaatntatctctnttttntanttcctnntncaatatttntnggnnttttttttttcatttnttttttntnaatttncncncttagnangtgagntgntnnnnntnnntacntntgctattntnatctnccctccggtggntgccgangtaacntaacaggcttttctgctatcctccatgcagtgtnatagncanggaaaagggcaacagnattggatcattccttagacactaatcagctggggaaagagttcattggcaaaagtgtcctnccaagaatggtttacaccaagcagagaggacatgtcactgaatggggaaagggaacccccgtatccacagtcactgtaagcatccagttaggcagggaangatggcttttggggcantggcntggatgtaaaagccagatttggaggatacccagctccgggaaacgaggcccatcttttctaccaagggtttctttccctttcacttgaggaccaaatggaaatttccaggggtggattcatttcttnttgnaggggggccttganaaaggttgcctttcccttcggatttttcaaccttacccaacaatttagnctttgggccttcctcttggttctttcannaagggggtattccttctttaaanaaaccttaagggggggccttttggggtaattattaattggttggggtncaaaaaaacccgaaaatttaannntttccaatttnaaatnggggcttttcccnaanncttttgggccttggantggaaaccgtttcccccactttgaaccangaanaaaaangggggagggccntnggttaaanggaaacctgggggttccctttcctnggggttagaaacnctttcttngggnaagcttcccttccnagngcctttggacannggctcnttgggggnaaaagggncattttttgaaagaaaaacaattgaacttgngggncccnaagttttgttcccagnanttgnccccaaccnngggantntttccaanatttttaatttttgnaaaaanntcaaaaanccccccccnaaaantnnnnttgggggngaantntttttngggngggggggnnacaaaatnggggnccctnctncccntcttttnntaaggggccaccntttttttnagaggcttntggnaaanctaacanagaaacncccgccccn

SEQ ID NO: 5444 - DNA, 1212 bp, Homo sapiens
  misc_feature 4, 6, 7, 9, 11, 12, 13, 14, 17, 19, 20, 21, 22, 23, 26, 28,29, 32, 39, 40, 41, 44, 45, 46, 49, 59, 60, 64, 67, 72,79, 81, 88, 91, 92, 96, 97, 98, 99, 101, 102, 103, 106,112, 118, 120, 125, 130, 132, 138, 141, 142, 143, 168, 215: n = A,T,C or G
  misc_feature 217, 218, 219, 406, 473, 499, 511, 544, 584, 605, 641, 651,652, 664, 705, 722, 783, 790, 804, 822, 855, 856, 870, 887,890, 893, 928, 952, 953, 959, 963, 994, 1002, 1014, 1023,1025, 1037, 1039, 1040, 1043, 1044, 1045, 1046, 1052: n = A,T,C or G
  misc_feature 1056, 1071, 1088, 1091, 1092, 1094, 1095, 1096, 1100, 1101,1111, 1113, 1137, 1139, 1141, 1146, 1147, 1161, 1169, 1170,1178, 1180, 1187, 1193, 1194, 1204, 1207: n = A,T,C or G
aaancnntnannnntgntnnnnntantnnaanatatttnnntgnnnagnatgacacttnnattnganatatntatacananttattanaannatannnntnnnagnaagagnggggangntggancgtantnactatnggnnnaaattggagctccaccgcggtggcngccgcccgggcaggtacgctgggctcctacttggataactgtggtgnannntagagctaatacatgccgacgggcgctgacccccttcgcgggggggatgcgtgcatttatcaagatcaaaaccaacccggtcagcccctctccggccccggccgctctagaactagtggatcccccgggctgcaggaattcgatatcaagcttatcgataccgtcgacctcgagggggggccccggntacccaagcttttgttccctttaagtgaggggttaattgcgccgcttgggcgttaatcatggtcatnagctgttttcctgtgtggaaaaattngttaatccggcntcacaaattccacaaccaaaacaattaccgaanccccggggtagccattaaaaagttggtaaaaaaggccctnggggggttggccccttaaatngaagggtggaaggccttaaaccttcaaccaattttnaaatttggcnnattttggccggnctttcaaccttggccccccggcttttttcccaagttcccgnggggaaaaaccccttgnttccgttggccccaggccttggccattttaaaattggaaaattccgggccccaaaccgccnccggggnggaagaagggccgngtttttggccgttaattnggggccggcttctttttccgcttttccttcgcnntcaacttgacttcngcttgcggcttcgggtncgnttnccgggccttgccgggccgaagccggggtatccaanctttaacttcaaaaagggcggggnnaattancggnttaattcccacaaaaaaatcaaggggggaantaaaccgncaagggaaaaanaaacaattntnaatccaaaaaangnnccnnnnaaaaangggncccagggaaacccgnataaaaaaaggcccccnttnncnnnggcnncttttttccntnaagggtttccccccccccctttgngngnaggcnnttaataaaaaaaanttcccccnntcaaatananaaagggngggggnnaaaaaccccnccngggac

SEQ ID NO: 5445 - DNA, 1031 bp, Homo sapiens
  misc_feature 1, 4, 10, 27, 29, 35, 53, 65, 107, 119, 122, 149, 155, 165,166, 191, 226, 315, 326, 335, 337, 344, 395, 421, 431, 447,450, 463, 470, 484, 491, 496, 511, 547, 549, 557, 572, 598,601, 626, 628, 631, 643, 654, 657, 659, 663, 666, 674: n = A,T,C or G
  misc_feature 685, 686, 689, 693, 696, 700, 708, 709, 712, 715, 718, 749,753, 757, 764, 765, 776, 789, 801, 804, 806, 808, 826, 833,835, 846, 847, 850, 851, 852, 868, 871, 876, 877, 881, 882,894, 895, 912, 914, 934, 938, 941, 944, 945, 947, 948: n = A,T,C or G
  misc_feature 953, 964, 967, 971, 980, 981, 982, 985, 990, 999, 1006, 1010,1013, 1017, 1021, 1025, 1026: n = A,T,C or G
natntacggngaattggagctccaccncngtggcngccggcaccttggccgcnttcagagtgccnatgagctcccccagactctgcttccgcccgttcatcttccantttcccccaacnaanaacttcctggagggcgccatggcgctngagccnaggctctganngtcagtgtctgccccgcgtacctcngccgctctagaactagtggatcccccgggctgcangaattcgatatcaagcttatcgataccgttcgacctcgagggggggcccggtacccagcttttgttccctttagtgagggttaattgcncgcttggcgtnaatcatggncntagctgnttcctgtgtgaaaattgttatccgcttcacaatttcacacaaacatacgtngcccggggagccataaaagtggttanaagccctggngggtggcccttaatgnagntgaagcctaaacntcaaccntttaaatttggcgntttggcnccttnaccttggcacccggntttttcccaagttccggggggaaaaacccctgttcngntgcccaancttggccatttatantggaaaatccgggccccaaccacccnccnggggggaagaagggccggtttttgncnttnttttggggcggncttttttccgnttntncttnggnttcaactngacttcgcttnngcnttcnggntctnttttcagnnttnccngcnaagccggttttcaaacttcaacttcaaaaanggcnggtnaaatccnnggttttttccnccaaggaaatcangggggatttaancgncngngaaaaagaaaccattggngaatccnanaaaaggcccannttnnntaaggcccagggaatnccnggaannaaannggcccccggttnntctggggcttttttttncntttggggatttcccggcccncccnggnagnngnnattanaaaaaaattgngcngccnaaatataannnggnggggnaaaaccccngctgggngctnttnaagnaatncccnnggccc

SEQ ID NO: 5446 - DNA, 1097 bp, Homo sapiens
  misc_feature 1, 2, 3, 4, 5, 16, 18, 20, 24, 26, 27, 28, 29, 30, 31, 32,35, 36, 38, 40, 41, 42, 45, 47, 48, 55, 58, 59, 60, 63,70, 72, 77, 78, 84, 85, 94, 96, 97, 98, 99, 100, 101, 102,103, 104, 106, 108, 112, 113, 116, 119, 120, 143, 148, 179: n = A,T,C or G
  misc_feature 188, 213, 365, 437, 456, 488, 511, 621, 662, 685, 694, 720,729, 735, 745, 749, 761, 776, 867, 868, 872, 886, 890, 896,926, 927, 930, 934, 937, 938, 957, 982, 990, 991, 993, 994,996, 1002, 1005, 1007, 1010, 1033, 1039, 1044, 1051: n = A,T,C or G
  misc_feature 1058, 1069, 1077, 1078, 1092: n = A,T,C or G
nnnnnactccctcttnantnaatntnnnnnnnaanntnannnttnanntttattnttnnnttnattatantnaaatnnaattannaaatgtatntnnnnnnnnntnangggnngcngannaatactcctatagggcgaattgnagctncaccgcggtggcggccggcgggaggctgacnagagccggnaggcgttagcgaaggaagagaaaanccgaagacgaagccactacagcgtcgcagcgcggcgcggcgtctgctttataggagagggcgcaggcccccgcgtacctcggccgctctagaactagtggatcccccgggctgcaggaattcgatatcaagcttatcgataccgtcgacctngagggggggcccggtacccagcttttgttccctttagtgagggttaatttgcgccgcttggccgtaatcatnggtcatagctgtttcctgngtggaaaaattgtttatcccgctcacaattcncacacaacataccgagcccgggnagccataaaagttgttaaagcctgggggtggccctaatgagttgaagcctaactcacatttaattgcgttgcgcctcacatgccccgctttccaattcggggaaaacctngtcgtggccagctgcattaaatgaattcggcccaaacgccnccggggggaagaaggccgggttntgcgtattnggggccgccttttttccggcttttcnttggcttcnacttgnacttcgcctngcgncttccgggtcgnatccgggcctggcangccaaaagccgggtattcaagcttcacttcaaaaggggccggttaattaccggggttattccaacaaggaaattcaagggggaataaaccnncaanggaaaaaaaaaacnattngtggangcaaaaaagggccaagccaaaaaagggccnnggnaaanccnnttaaaaaaagggcccccgnttttgtttggccctttttttacaanaaagggtnncnncncccccnctngncanaggccttaaaaaaaaaaatttgncccctnttaanataaaanagggggngaaaacccccnccccgggnntttttaaaaaaatnccccg

SEQ ID NO: 5447 - DNA, 869 bp, Homo sapiens
  misc_feature 484, 571, 619, 667, 678, 708, 730, 748, 763, 788, 803, 809,815, 816, 817, 832, 838, 860: n = A,T,C or G
gcgtaatacgactcactatagggcgaattggagctccaccgcggtggcggccgcccgggcaggtacgtgtaaaactaaaatgtcttttgtaaatcactgagtcttcctgtttatttctggttagagatctttgggggcttggatggaggaacaggaaaagaggagccaggcttttttggaaaattggcggcagcggtggcatacgggaaactgaaatctttatctaatctcatcctttgtatattcgtcttggatttgctgaagaaaattaaaaggtaaattttgctgtgagctcactgaactcaaattgaaagggaacatatgctgtttatttttgtgaaggacattaattgggtgtgactggcagggttgagacctgaagttcctcttttagataaggaaaatttcccttggtgagaaatctctagactagttatgatagattcctaacccccaaccttgaaaggtaacttaaggctccctnctctaagggaagggctgaagaaaaaattaaacaggcactgtgcctatgaagatttgcgaaaaaaaaaaaaacaagaacatctagganacttctcattcactgggtcaagccagagccatcaactttgtgacctantgagtggttagtggatataggcaaagggtagtaacttgggacccagangttaggggatnccgaaaagtttgaaaatgtaaagaccaaangccagagggttataaccttacnggctcttggggaaagtanggaaagccccaaaanttggggctccccaaaaataaaaatntttttaggaacctgngggttnttaaannnaccttcccaaaagtnaagtancttttttttttttttttttttntttttttgg

SEQ ID NO: 5448 - DNA, 884 bp, Homo sapiens
  misc_feature 587, 664, 682, 698, 703, 713, 725, 768, 775, 778, 785, 789,792, 794, 813, 819, 824, 837, 838, 841, 864, 867, 871, 874,877: n = A,T,C or G
gtaatacgactcactatagggcgaattggagctccaccgcggtggcggccgggggccattgagactgccatggaagacttgaaaggtcacgtagctgagacttctggagagaccattcaaggcttctggctcttgacaaagatagaccactggaacaatgagaaggagagaattctactggtcacagacaagactctcttgatctgcaaatacgacttcatcatgctgagttgtgtgcagctgcagtggattcctctgagcgctgtctatcgcatctgcctgggcaagttcaccttccctgggatgtccctggacaagagacaaggagaaggccttaggatctactgggggagtccggaggagcagtctcttctgtcccgctggaacccatggtccactgaagttccttatgctactttcactgagcatcctatgaaatacaccagtgagaaattccttgaaatttgcaagttgtctgggttcatgtctaagcttgttccagctatccagaatgcccacaagaattcaactggatctggaagaggaaagaaactgatggtgtttaactgaaccccattttgattganacctacacagggcttgatgtcatttcattggaaacccgcaacaaaacttgggcttattccctttgccccgtggggangtatttggtttttttganaagtcttttttgggtnccctncggcccgctnttagaaactaanttgggatccccccgggcttgcaaggaaatttttaatattaaancttattnganacccgtngaanctncnagggggggggcccccggtncccaanttttnggttccctttaannggngggggttaattggggcgcctcgnggnaaancantgntcttacc

SEQ ID NO: 5449 - DNA, 1193 bp, Homo sapiens
  misc_feature 1, 6, 14, 16, 21, 22, 25, 27, 28, 40, 52, 58, 62, 63, 65,67, 70, 72, 73, 78, 79, 80, 82, 83, 84, 86, 87, 92, 94,100, 101, 102, 104, 105, 108, 109, 111, 115, 131, 134, 171,196, 203, 205, 209, 217, 218, 219, 224, 228, 230, 235, 236: n = A,T,C or G
  misc_feature 237, 239, 274, 310, 356, 368, 411, 421, 436, 443, 445, 447,459, 471, 498, 500, 507, 518, 521, 524, 526, 532, 552, 567,579, 590, 607, 610, 625, 641, 643, 647, 655, 675, 686, 689,690, 691, 698, 716, 732, 753, 766, 775, 782, 801, 802: n = A,T,C or G
  misc_feature 804, 818, 819, 822, 831, 850, 879, 880, 881, 884, 889, 893,899, 909, 917, 920, 924, 929, 935, 938, 944, 950, 954, 957,958, 969, 970, 971, 973, 974, 991, 996, 1001, 1007, 1010,1011, 1018, 1019, 1026, 1029, 1036, 1037, 1040, 1051: n = A,T,C or G
  misc_feature 1054, 1074, 1094, 1096, 1101, 1103, 1117, 1118, 1121, 1122,1125, 1127, 1138, 1145, 1148, 1154, 1155, 1167, 1172, 1185,1189, 1193: n = A,T,C or G
nctaanctaatttnantattnnatntnntcttttaagagngttcatatttanattttntttnnantnganannatatnnngnnntnnttagnanagaggnnnannaannanagantttacgactcactatntgncgaattggactccaccgcggtggcggccgaggtactnattttttttttttttttttttttgnggggacnanaatncccgggtnnnaaagnaaantnttttnnncncctgctgccttccttggatgtggtagccgtttctnaggctccctctccggaattcgaaccctgattccccntcacccgtggtcaccatggtaggcacggcgactaccatcgcccgcntacctgcccggngcggccgctcttaaaactagtggaatcccccggtgctgcaggnaattcttatntcaaagcttattcgntaccgtncnancttcaagagganggggccccggtnccccaagcttttttgtttccctttaananggaaggngtttaattttncanccncnttgggncggtaaatacatttgggtcnataggcttggttttncccttggtgggngaaaaaatttnggtttattcccggtctncancaaattttcccaccnccaaacaattatctgnantccnggggttangccaattaaaaaagttggtnaaaaaaacccntgnnnggggggngcccctaaaattggaagntgaaagccttaaaacnttcaacaattttaaatttagncggttttggcggnccttaaccntggcccncggtttttttcccaaagtnngngggaaaaaaccctnnttnttgtgtccnagaccttgccattttaaantgaaaaaatcggggccccaaacccccccnnnggngaaanaaangggcgngttttttgcngttttttnagnggcngcttntttttncancttttnccttgncttnaanntgaaactttcnnntnnggggccttcggggtccnttttncgggntttctnggnnaaagccnngttttanaanttttcannttnaaaaagggcgnggnttatttccgggtttttcccncaaatattttagggggtatntnccccngnggaaaaaaaaaaanngtnnagncnaaaaagggccncccaaanaanggcccnngaaccccgtatnaaaanggccctctttttntttngccn

SEQ ID NO: 5450 - DNA, 1156 bp, Homo sapiens
  misc_feature 1, 2, 3, 4, 5, 7, 8, 10, 12, 13, 14, 15, 16, 17, 19, 21,25, 26, 27, 28, 29, 30, 32, 34, 35, 36, 37, 38, 40, 42,43, 44, 45, 47, 50, 51, 52, 53, 54, 55, 57, 58, 60, 61,64, 67, 68, 69, 70, 71, 74, 75, 76, 79, 81, 82, 83, 85,86, 87: n = A,T,C or G
  misc_feature 89, 90, 91, 92, 93, 94, 97, 98, 105, 107, 111, 114, 116,121, 123, 124, 125, 127, 128, 129, 136, 138, 142, 203, 204,205, 210, 211, 212, 213, 226, 327, 514, 532, 686, 699, 724,741, 766, 767, 771, 801, 827, 830, 837, 842, 859, 870: n = A,T,C or G
  misc_feature 878, 894, 897, 959, 966, 979, 1014, 1022, 1054, 1059, 1067,1075, 1083, 1086, 1091, 1092, 1093, 1101, 1105, 1116, 1123: n = A,T,C or G
nnnnntnncnannnnnntnanattnnnnnngntnnnnngngnnnnantannnnnnanntnngtnaannnnntannntantnnntnnntnnnnnnagnntagaggnangagnaananaatanannnannnttatatntntcgnattgcagctccaccgcggtggcggccgaggtaccaccagcgaggtctgggccactttaagnnnagcannnntgtccacccaaanaccgatgatggctcccaggaccagaacagaccctgccaccaccagcccgtagactgctgtcaaaaggaggctgtttccatagagctctaccagaaacacangacacccgcaaagtgccacatccgatctccccaagtagagagagaatgaccaaggtaagagaaggaatttttgcagaaggtcaggtagtcggcccaaggatccacaagcattcctcttctggcggttgtgatctcccgcccctgggtccattgacacttagggccgacccccgcttggctctttctngcggcttgcttatccgcntgcttgcttgctctcgcttgaaggtgcttggttaaaccaagggagttgccaaggggaacttgggagaatagccacctcttaaaaaaccaccaacaagccctttggggccaaaaaaaagactttcaaaccgaccgacttttttgggcccaagagnaaacaaaaaaggnaaaaaggggggccccaagggggganttttttctttttttttnccttcctttttccaaaaacccttanncttnaacaaccttgttaagccttggaaaagtttngggaaaaggggcaaaaaagccctttnttnggaaagnccggntttttgggggaagggcnttcaaaccaanggttccgntcccgaaaacccttanccngggaaccgccccccttgaaacccaaagctttttttttttccggcccgggccggtccccccgngtgtttncctttggcccccngggcccggggccgccttcttaaaaaaacctaagtnggggaatnccccccccggggccctggcaagggaaatttcngattnttccaaangcctttantcggattnccnggtcnnnacccttcnaaanggggggggggnccccggntaccccaaacctttttggtttccccttttaaag

SEQ ID NO: 5451 - DNA, 884 bp, Homo sapiens
  misc_feature 2, 3, 4, 529, 646, 647, 679, 691, 692, 694, 716, 727, 728,730, 734, 740, 743, 748, 749, 753, 761, 762, 763, 772, 776,786, 791, 792, 797, 802, 803, 804, 806, 808, 820, 821, 832,838, 841, 848, 858, 862, 869, 870, 871, 876, 878, 882: n = A,T,C or G
gnnngaccgcgtaatcgactcactatagggcgaattggagctccaccgcggtggcggccgaggtactatcctagacagctctgggagtgttacataacgtatggtaagtgtgctacatggcctttctgaagcccaaaccattttgcattatgaaaatacctggccccaggaatttcagataagggattgtggacttatattttaaatctgtaactcctatagacagtaatttcatagagccagcttcatggagttgtaaatattactgggctagggtcagtttcctcattttaggcttcctttaatccagtccagacaccaaattaaatgtctttgtgtagtccccttcaaagcctcttgcaatcccagtcatgcttcagggtagggatgatcccattaatccaaggacctgtccctagtgatagaaggaaatgggtgggagccacgggatctgggattgcagtgagaagtagacaagaaaacaaccataacaagtgcctcttctcaggtgttttcggattgcaaatangaaccactggccaccctcagcacccgatgtccccatcctgtcctgtggagggctggccaaacgctggctggttcctggctgggagggttgggctggatcctcattcatgaccggaannagacatttttgggcaatgagggtgataatatnggggaaagaagnntntgtaaatttagggggtatattnttttttttttnntngaancccccnggnggggnncaanggggaggnnnttttttctntttnttttcttccnttggnnaatcnaaaannncnantttttttttggnnaaaaatttggncttctnaancccacangggggtttgntttnttaaaannnccccntnaccnct

SEQ ID NO: 5452 - DNA, 622 bp, Homo sapiens
  misc_feature 6, 7, 8, 9, 14, 23, 29, 30, 36, 38, 363, 364, 365, 366, 367,368, 369, 370, 371, 372, 373, 374, 375, 376, 377, 378, 379,380, 381, 382, 383, 384, 385, 386, 387, 388, 389, 390, 391,392, 393, 394, 395, 396, 397, 398, 399, 400, 401: n = A,T,C or G
  misc_feature 402, 403, 404, 405, 406, 407, 408, 409, 410, 411, 412, 413,414, 415, 416, 417, 418, 419, 420, 421, 422, 423, 424, 425,426, 427, 428, 429, 430, 431, 432, 433, 434, 435, 436, 437,438, 439, 440, 441, 442, 443, 444, 445, 446, 447, 448: n = A,T,C or G
  misc_feature 449, 450, 451, 452, 453, 454, 455, 456, 457, 458, 459, 460,461, 462, 463, 464, 465, 466, 467, 468, 469, 470, 471, 472,473, 474, 475, 476, 477, 478, 479, 480, 481, 482, 483, 484,485, 486, 487, 488, 489, 490, 491, 492, 493, 494, 495: n = A,T,C or G
  misc_feature 496, 497, 498, 499, 500, 501, 502, 503, 504, 505, 506, 507,508, 509, 510, 511, 512, 513, 514, 515, 516, 517, 518, 519,520, 521, 522, 523, 524, 525, 526, 527, 528, 529, 530, 531,532, 533, 534, 535, 536, 537, 538, 539, 540, 541, 542: n = A,T,C or G
  misc_feature 543, 544, 545, 546, 547, 548, 549, 550, 551, 552, 553, 554,555, 556, 557, 558, 559, 560, 561, 562, 563, 564, 565, 566,567, 568, 569, 570, 571, 572, 573, 574, 575, 576, 577, 578,579, 580, 581, 582, 583, 584, 585, 586, 587, 588, 589: n = A,T,C or G
  misc_feature 590, 591, 592, 593, 594, 595, 596, 597, 598, 599, 600, 601,602, 603, 604, 605, 606, 607, 608, 609, 610, 611, 612, 613,614, 615, 616, 617, 618, 619, 620, 621, 622: n = A,T,C or G
gcgatnnnngtacntcactctgntggccnnattggnanctccaccgcggtggcggccgctgacacggcttcctgggcggtcccctccacctgttgcttcaggtcctgcaagcccttgcttgccatggcttcggggtatctgtggagtcgtcaagagcagctggagcgacgttggatcctgcccagagtccccgcgtacctcggccgctctagaactagtggatcccccgggctgcaggaattcgatatcaagcttatcgataccgtcgacctcgagggggggcccggtacccagcttttgttccctttagtgagggttaattgcgcgcttggcgtaatcatggtcatagttttttccctggannnnnnnnnnnnnnnnnnnnnnnnnnnnnnnnnnnnnnnnnnnnnnnnnnnnnnnnnnnnnnnnnnnnnnnnnnnnnnnnnnnnnnnnnnnnnnnnnnnnnnnnnnnnnnnnnnnnnnnnnnnnnnnnnnnnnnnnnnnnnnnnnnnnnnnnnnnnnnnnnnnnnnnnnnnnnnnnnnnnnnnnnnnnnnnnnnnnnnnnnnnnnnnnnnnnnnnnnnnnnnnnnnnnnnnnnnnnnnnnnnnnnnnnnnnnnnnnnnnn

SEQ ID NO: 5453 - DNA, 1451 bp, Homo sapiens
  misc_feature 2, 4, 8, 10, 13, 18, 19, 21, 24, 30, 31, 33, 36, 41, 43,46, 50, 51, 56, 59, 63, 64, 75, 84, 86, 89, 92, 94, 97,101, 102, 103, 107, 109, 112, 113, 116, 118, 121, 130, 133,134, 139, 141, 147, 148, 151, 167, 171, 188, 191, 233, 249: n = A,T,C or G
  misc_feature 254, 304, 305, 335, 393, 396, 489, 496, 593, 609, 667, 668,672, 687, 731, 733, 756, 758, 839, 875, 909, 940, 943, 954,958, 1050, 1055, 1056, 1062, 1084, 1091, 1101, 1135, 1136,1164, 1166, 1170, 1187, 1206, 1216, 1222, 1231, 1243: n = A,T,C or G
  misc_feature 1245, 1260, 1267, 1268, 1279, 1283, 1286, 1288, 1290, 1296,1298, 1319, 1320, 1327, 1333, 1335, 1346, 1349, 1353, 1356,1363, 1374, 1375, 1377, 1383, 1403, 1409, 1419, 1420, 1422,1425, 1428, 1432, 1442, 1443, 1449: n = A,T,C or G
cnantatnanaanaatgnnanttnttttannantanatctntnttntttnnttttnctntaanntattatacatnttatttatntntcnaantntcnttannncagnanaanntanantantcattttantannaattnantatcannttngaatttggaacctccnccgnggtggggcggcccgaantgngctggcctcatttaaagaatgaggctttctgctgcttcttcntagtgggcaggccgtnatgcnatggtcccggagccgaggccttcggccaatcttggggcggcggtgcccanncaaggagattaaaggatgccagttaccctngggcccgcttcttagaacctagtgggatcccccccggggcttgcaagggaattttcgnatntcaaaagccttttattcggattaccccgttcggaccctccgtagggggggggggccccccgggttaacccccaagccttttttggtttccccntttttangttggaagggggttttaaattttgccggccgccttttggggccggttaaaattccaattggggttccaattaagccttgttttttcccttggttgtnggaaaaaattttggtnttaattccccggccttccaaccaaaattttccccaaccaaccaaaaccaattaacccnnaagnccccggggggaaggnccatttaaaaaagggtggttaaaaaaaggccccttggggggggntnggcccccttaaaaattggaaggntnggaaggcctttaaaacccttccaaccaatttttaaaattttggccggttttggccggcccttccaaccttggcccccggcntttttcccaaagtttccggggggaaaaaacccttgnttccgattggccccaaagcccttggccaattttnaaatgggaaaattccggggcccaaaaccggnccncccgggggggnaagnaaggggccggggttttttggccgttatttttgggggggccggccttctttttccccggccttttccctttcggctttccaaccttggaaccnttcgnnttttgncggcctttcggggttccggttntcctggncctttgcccnggcccgaaaagccggggttatttccaaggccttnnaaccttcaaaaaaggggcggggttaaantnaccnggttttatttcccaacnagaaaattccagggggggnattaaaaccngccaangggaaaaangaaaccaattgntngaaacccaaaaaaanggcccannccataataaangggnccnangnaaaccngntcaaaaaaaaaggggcccccnntttttgntttggncngttttttttcncanaaangcntttccgnccccccccttnngnacaatnccttttaaacaaaaaaaatnttggancccctttcannanttncanaaangggggggggnnaaaacnct

SEQ ID NO: 5454 - DNA, 1130 bp, Homo sapiens
  misc_feature 4, 5, 6, 7, 14, 16, 21, 22, 23, 25, 27, 28, 30, 35, 38, 42,44, 47, 52, 53, 54, 55, 61, 62, 63, 68, 73, 76, 82, 88,96, 97, 102, 103, 113, 119, 126, 131, 134, 138, 145, 470,474, 482, 502, 557, 574, 585, 592, 611, 645, 696, 701, 703: n = A,T,C or G
  misc_feature 721, 738, 755, 782, 791, 797, 806, 817, 818, 819, 828, 829,859, 894, 903, 907, 909, 910, 933, 937, 940, 953, 957, 973,976, 1009, 1012, 1027, 1036, 1041, 1052, 1062, 1074, 1075,1084, 1086, 1087, 1089, 1092, 1095, 1097, 1103, 1120: n = A,T,C or G
  misc_feature 1125, 1129, 1130: n = A,T,C or G
cctnnnngaacttncnctatnnntntnntnatttnttnaatntnttngatcnnnntgaacnnnataantagtntcnttaaanttcttnttctcatnnagganncatttaaccngtactnttattantcctntanggcngaattgnagctccactcgcggtggcggccgcccgggcaggtacgcgggagcctagcaccgagcgaggcccgcggctgggaagggaaggaggcgggtggatcacgaggtcaagagatcgagaccatcctggccaacatggtgaaaccctgtctctactaaaaatgcaaaaattagctgggggtggtggcgcgcgcctgtagtcccagctactcgggaagctgaggcaggagaatcgcttgaacccgggaggcggtaggttgcagtgagcccgagatcgcaccacttgcacttcaagcctggccgacaggagcgagactccatctcaacaggantaanaaataaanggaaaataaaaagtaccttnggccgctcttaggaacctagttgggatccccccgggctgcaagggaattcggatnatcaaagctttattcgnatacccgtccnaacctcnaaggggggggggcccccgngtaccccagccttttttgttcccctttttaagtngaaggggtttaaatttggccgccccctttgggccgttaaaatcaaatgggntccantnagccttggtttttccctngtggtggaaaaatttgntttatttcccgccttcnaccaaaattttcccacaaccaaaccantaaccggangccccngggggaggncaattaaaagnnngttaaaaannccctgggggggtggccctaaaatggaggtngaagccttaacccttccaccaatttaaattttggnccgtttggnggcntnnacctgggccccgctttttccaantcanggngaaaacccttggntcgntggcccaagccttggnaanttaaaattggaaatccgggcccaaacccccccnggnggaaaaaaggccggntttttggcncttanttgggggcggncttttttccnctttccttcggnnttcacttgnanntnggnttngngccctngggtcggtttccggganttggngggnn

SEQ ID NO: 5455 - DNA, 1094 bp, Homo sapiens
  misc_feature 1, 6, 9, 10, 11, 18, 19, 20, 24, 26, 27, 28, 32, 34, 37,38, 41, 42, 43, 44, 49, 50, 52, 54, 63, 64, 66, 67, 71,73, 74, 76, 77, 78, 81, 82, 84, 86, 88, 90, 93, 94, 105,108, 110, 116, 117, 127, 134, 188, 194, 196, 197, 239, 246,272: n = A,T,C or G
  misc_feature 313, 367, 433, 435, 455, 458, 468, 477, 480, 493, 541, 605,621, 661, 675, 686, 689, 701, 711, 717, 740, 756, 757, 765,777, 785, 803, 843, 844, 856, 882, 899, 908, 912, 915, 921,926, 930, 931, 936, 955, 962, 963, 986, 1004, 1008: n = A,T,C or G
  misc_feature 1011, 1016, 1017, 1018, 1019, 1029, 1037, 1038, 1041, 1050,1056, 1060, 1063, 1072, 1079, 1085, 1088: n = A,T,C or G
ncctcnctnnnattatgnnntaantnnngatnantcnnaannnnatgtnnantntttgtaaanngnnaaantnntnnnttnntntnantngannggaatttgagnaantntattcnnctttatttcnaattggnctccaccgcggtggcggccgcccgggcaggtacttatttttttttttttttttnttgggncnnacgaaattatttattgctgtcaggaggcccaggaccctccanactgaanagtccatgggcccctgtgcatgtganagctacacagggaatcgctgtcaccttccaaggataagcanacagggccacacatgccatggccactcggtgcacagggaccaggctgtgcccanagacccaggcatccagcttgcattccaagttccttactggagagccccacctgcttggatggcaancnctaggcttgcttggggattnggngaactttgcntcatgaaanaanaatgttcctgggntgtcttgtagggggacaattgattcatcagggaaggggccctgtttgnaaaccgccacaaaatgggttcctttgttctcccaactaattgccagaaaaagggaggggtgganttttggacttgcttgntgggcagacaagaatgcctttcttgtggcccctccctttnaaaataacccccgnggttacccttnggnccgcttctttanaaaacttagngggganttcccccccgggggcctggcaanggaaaatttccgaatnnttcaaagnctttattcgaanaaccccgntccggaacccttctgaanggggggggggcccccgggttacccccaaacctttttttgnntcccccttttangtggaggggggttaattttgcgcccncctttggggcggtaaantcaatgggngcantangcttgnttttncctnngggtnaaaaatttgttttattccnctttaannaattcccccccaaccaaacattnccgaaaccccgggggagnccantanaaatnnnnttaaaagccntggggggnngcncttaaatgngagggngganccncaacctcancatttanatttgnggnttgccg

SEQ ID NO: 5456 - DNA, 1097 bp, Homo sapiens
  misc_feature 5, 6, 13, 16, 18, 20, 23, 28, 30, 35, 36, 38, 39, 43, 45,48, 50, 53, 54, 56, 59, 63, 66, 71, 73, 75, 76, 77, 81,82, 84, 93, 107, 109, 113, 124, 130, 426, 431, 459, 796,806, 814, 819, 828, 829, 847, 850, 887, 895, 925, 961, 985: n = A,T,C or G
  misc_feature 989, 998, 1008, 1037, 1044, 1051, 1065, 1079, 1096: n = A,T,C or G
cctgnntttttantgntntntcngtttntngtaanntnntatnantcncntanntnttngtanttncatantntnnntctnncngttgagganttgggagtgttagnanatcntatagggcganttgganctccaccgcggtggcggccgcccgggcaggtactttaggagacccaggcgggcagattgcctgaggtcaggagtttgagaccagcctggctaacatggtgaaaccctgtctctactaaaaatacaaaaattagccgggcatggtggctcacgcctgtagtcccaactgcttgggaggttgaggcaagagaatcgcttgaacccaggaggtggaggttgcagatgagccgagatcgcgccactgcactccagcatgggccgacagtagcaaggactccatctcaaaataaagaaagnaaagnaaacataaggaaaaggaaaagctttatnttggaaccttctcttaaaaaaaggaaaaaaaaaggaaagcctgatgcacacaaaatctaaaatttggcaaggtccgaatcaatttaaaagggatattttatttggcatccaccaaaaattaatttctttttacttcccccccaaaaaatcaaataaaaaagtttcaaaattagccaacctttttccctaaatggtgttttaaaaaatggttaaattccaccccaaaattaccattgttgttcccccaaacttttctttttcccagtttaattaaatttcttaattggggggtaaaaaggtgggagggttttacccctggaaaggttggaggggcaanttaaaagaangaagtttnggagncttttcaannaacccttgcccttggganaangagccgtggtttccttttctttaagaagtccttgaanggaaaatnggtttggggggggcaccaaaaatttcctcntcaaaatctttttttctttttttcccctccattccntggagccttcttattttttccttnggcntccaaactngctttttctngggtaaaaccttttggtttcacccttggntaccctntgggccncccccggggcccanggtacctttttgangggaaaaggaagggctng

SEQ ID NO: 5457 - DNA, 1034 bp, Homo sapiens
  misc_feature 1, 3, 4, 6, 8, 9, 10, 11, 12, 13, 15, 16, 17, 19, 20, 21,22, 23, 24, 25, 26, 27, 29, 30, 31, 32, 33, 35, 36, 37,38, 39, 40, 41, 42, 44, 45, 46, 47, 48, 49, 51, 54, 55,56, 58, 59, 62, 63, 64, 65, 67, 68, 69, 70, 71, 72, 74,75, 77: n = A,T,C or G
  misc_feature 80, 81, 82, 83, 84, 85, 86, 87, 88, 91, 94, 98, 99, 101,105, 106, 109, 110, 111, 112, 114, 115, 116, 118, 121, 122,124, 127, 465, 706, 773, 790, 815, 880, 927, 929, 945, 967,986, 1007, 1010, 1020: n = A,T,C or G
ncnncntnnnnnntnnntnnnnnnnnntnnnnntnnnnnnnngnnnnnnantgnnntnnttnnnntnnnnnntnntnccnnnnnnnnnagncgngganntntgtnntcnnnntnnnantcnntntanggcgaattggagctccccgcggtggcggccgaggtactttaggagacccaggcgggcagattgcctgaggtcaggagtttgagaccagcctggctaacatggtgaaaccctgtctctactaaaaatacaaaaattagccgggcatggtggctcacgcctgtagtcccaactgcttgggaggttgaggcaagagaatccgcttgaacccaggaggtggaggttgcagtgagccgagatcgcgccactgcactccagcatgggcgacagagcaggactccatctcaaaataaaggaaaggaaaggaaacaaagaaaagaaaagcttatattgaacttctntaaaaaaaggaaaaaaaaggaaagcctgattgcacaccaaatcttaaatttggcaaggtcgatcaatttaaaagggatatttatttgcatcaccaaaaaataattctttacttcccccccaaaaatcaataaaaagttcaaatagtaacctttttcctaatggtgttttaaaaatggtaatcacccaaaattaccatgtggtccccaactttctttccaggtttataatttcttatttggnggttaaaagtggagggtatacccctggaagttggaagggccaataaagaagagtttggagccttcangacccttgccctggganaagaagccgtgtttcttttcttaanaagtcctgaaggaaaattggtttgggggggccacaaaaatttcttcttcaaattcttttttttcntttttccccctcattccctgaggcctctttatttttttctttgggcncnaacctgctttttcttngggtaaaaactttttgttttcnacccttgggttaccctggncccggggccggggcccggttnttnaaaaacttangtggggattccccg

SEQ ID NO: 5458 - DNA, 1406 bp, Homo sapiens
  misc_feature 1, 2, 4, 6, 10, 13, 14, 16, 19, 22, 25, 29, 32, 34, 36, 39,40, 43, 49, 50, 53, 55, 60, 61, 62, 64, 66, 67, 72, 81,84, 86, 87, 88, 89, 93, 94, 97, 105, 108, 109, 110, 113,114, 115, 120, 122, 129, 130, 132, 133, 138, 209, 214, 218: n = A,T,C or G
  misc_feature 238, 247, 254, 263, 273, 320, 498, 516, 600, 606, 619, 633,643, 673, 773, 794, 800, 802, 868, 883, 894, 913, 931, 935,964, 967, 991, 999, 1013, 1068, 1089, 1099, 1122, 1130,1133, 1148, 1164, 1175, 1220, 1231, 1236, 1246, 1265, 1268: n = A,T,C or G
  misc_feature 1269, 1276, 1284, 1320, 1349, 1361, 1363, 1369, 1374, 1386,1388, 1389, 1400: n = A,T,C or G
nncncnacgnggnngntcntgngantttnagngncntcnntgnatccanngantngtcgnnnancnnggaanactgcgatnctntnnnnccannagnggtgggangtnnngannntttcnantccggcnnannggggncgaatagggagctccaccgcggtggcggcacgccccgggccaggtttccaggtgaacaaaaagttttaccnggaanagcnggggggaggacccaaggaanaaataaagnagccttnagggaatgnagggggatanaaggaaaaaaaggatttggaggaggaaattttggtggccccccccanaccccattttccctcaaggacctctaaaggaaaaaggaaccaccgcctcttctcccaagggcaagggtcttgaaaggctcaaactcttcttattgccttcaccttcagggtattaccttcacttttaccacaattaggaaatttataaacctggggaaaaggaaggttggggggacancaatggtaattttggggnggaatttaccattttttaaaaccaccatttaagggaaaaaaggtttggcttatttttggaaacctttttttttaattttggatntttttntgggggggggggnaggttaaaaaaggnaaattttaanttttttgggtgggaatgggccaaaaaattnaaaaattaattccccttttttaaaaatttgggaattccggaaccttttggccccaaaaaattttttaaggaaattttgggtgggtgggcccatttcaaangggccttttttcctttttttntttttntncctttttttttttttaaaggaaggaaaaggttttccaaaattaattaaaagggccttttttttccntttttttcctttttnggggttttccntttttccttttttcctttntaaattttctgggaaggnaatnggggaaggttcctttgggcttccttgggnccngccccccaatggccttgggggaangttgggcnaagatgggggccgnccggaattccttcggggctttcaccttgggcaaaaccccttcccaaccctttccntggggggtttcaaagggcggnaatttccttnttttggccctttaaaaacccttncccaaagnccnaggtttgggggaacnttaccaaggggcggtnggaggccccancccatggccccccggggcttaaattttttttgggaattttttttnaagggaaggangaccnggggggtttntccacccaatggtttaagnccnngggcctnggggtttntcaaaaaccttccttgggaccccttaaggggccaanttcttggccccccggcctggggggtcccncccttaaaaggnanccctcnggggnccgggcttcttnannaaaccttaagnggggaa

SEQ ID NO: 5459 - DNA, 777 bp, Homo sapiens
  misc_feature 570, 618, 647, 693, 710, 711, 724, 729, 744, 768, 771: n = A,T,C or G
ggcggccgaggtacagcctgcaactgtggcgcaggcgcagaacaggattgaatttcgctaaaaagacaaaggaagaaaaagtacggtctctgtcctcagggcattgcaacccattaggctgaatcacatgaactgcagattatgcaggtaaaatatggccacatatccacaccttcacagggctctgcctgacacacggaggacacaatcacaagagccaaagcagggagggggcagggaaaaagtggacacaaccccacccagtccagtggtgcggatcaataaatcgagacttacggccaatctgaaatagattctattcatgaaagtccttccagaaacaacattcaggatgacggcatcagtgttagccaagtcccgcgtacctgcccgggcggccgctctagaactagtggatcccccgggctgcaggaattcgatatcaagcttatcgataccgtcgacctcgagggggggcccggtacccagcttttgttcccttttagtgaggggttaatttgcgcgcttggcgtaatcatggtcatagcttgtttcctgtgttgaaattgntatccgcttcacaatttccacacaacatacgagccggggagcataaangtgttaaagcctggggtgcctaatgagtngagctaacttacattaattgcgttgcgctcactggccgctttccantcggggaaaccttgtcnngcccagcctgcanttaantgaatcggccaaacnccccggggaagaggccggtttgcntanttgggc

SEQ ID NO: 5460 - DNA, 802 bp, Homo sapiens
  misc_feature 550, 600, 654, 699, 710, 711, 717, 723, 735, 776, 783, 791,801: n = A,T,C or G
ggagctccaccgcggtggcggccgaggtacattttatcaagttacctatgaaccgatgtatttcgttcacttaataccattcactaaattcagttattgacctagtcaataactgcccaacttcacatttcacatacagtgaagaaactcttgtttcagcattcttttttgggttggttggtttgtttgttttgtttcttttttacacaaggcaatccaaactgcccaatctactccatccgagcctgtgtgcaaaccccttttcccacaccctgaatttcctttcttccttaacgtccaccaaatatgagtcaaaggatctttttacaaagctatggttcacagcagagccacattcctccagaactcgtgtagagttgcttgtctccaaagccccacctgggtttccaccatatgctttcggtcaacgacactcaccacagcatcctctctggcggttgtgatctcccgccctggtcatgacactaggcgaccccgctggctcttctgcggctgctatcgctgctgctgctctcgctgaggtgcttgnttacagggagtgcaaggaactggagatagcacctctaaaaacacaacagncttgggcaaaaaagactacaacgacgacttttggcaaagaaacaaaaagaaaanggggccccaggggattttcttttttcccttctttccaaactttanctaaacacttnnaacctngaaagnttgggaaaaggnaaaaagcccttattgggaaagccggttttggggagggcttnaacaggntcgtcccnaagccctaang

SEQ ID NO: 5461 - DNA, 1109 bp, Homo sapiens
  misc_feature 5, 6, 7, 8, 9, 10, 11, 12, 13, 15, 16, 17, 22, 23, 24, 27,30, 32, 34, 37, 38, 43, 44, 45, 46, 47, 48, 51, 52, 53,54, 56, 60, 63, 64, 65, 66, 67, 69, 71, 74, 77, 78, 79,80, 83, 84, 85, 86, 87, 90, 92, 94, 98, 99, 100, 108, 109,111: n = A,T,C or G
  misc_feature 489, 526, 543, 577, 682, 733, 757, 768, 816, 823, 833, 841,853, 870, 916, 922, 924, 937, 956, 965, 969, 971, 972, 976,980, 983, 989, 993, 996, 1008, 1015, 1020, 1022, 1031, 1039,1041, 1046, 1052, 1068, 1089, 1099, 1102, 1105, 1108: n = A,T,C or G
ccctnnnnnnnnntnnnaattnnnatnatnantnatnntttannnnnntannnnanacgntcnnnnntntnatnttnnnnttnnnnnagntngnaaannnactctganncnactcactatagggcgaattggagctccaccgcggtggcggccgcccgggcaggtacagatggaggggctggcccatgcagggcctcggggtgaggttcactaggactagctgcagggggacctggctacactctgtggcacaacagggcttcacaaaatggacactacaccgtgacgtgggctgaaaggtggagcagagactgggtgggagtgtcagttgcacgttgtggggtaagggggagagggagcaggacaagtgtattatgtacctcggccgctctagaactagtgggatcccccgggctgcaagggaattccgatatcaagcttatcgatacccggtccgacctcgaggggggggggcccggttacccagcnttttgttcccctttaagtggaggggtttaatttggcngccgccttggccgtaantcattgggtcaataagcctggttttcctgtgtgnaaattgtttatcccgctcaaccaattccaccacaaacaatacgagcccgggggaagccattaaaagttggtaaaaagccctggggggtgcccttaaatggaagtngaagcctaaccttcaacaatttaaattttgcgtttgccgccttcaacttgnccccgctttttccaagttcggggnaaaaacccttnttccggtggcccaaaccttgccaattttaaattgaaattcgggccccnaaccccnccgggggaanaaaggccnggtttttgccgntattttggggccgcctnttttcccgccttttccttcgggtttcaacttgaaccttcggcttgncgcctncngggttcgttttcngggctttgccgggccgaangccgggttntttnanncttncacnttnaaaaanggcnggntaaattaccggnttttttnccacnanaaaattcanggggggantnaaccnccaagnaaaaaaaaaaccattnttgaagccaaaaaggggcccncaaaaaaggnccnagnaant

SEQ ID NO: 5462 - DNA, 464 bp, Homo sapiens
cgaattggagctccaccgcggtggcggccgaggtacattccaaacactttttcatagaatggttgtaaacatgctccctatttctgcttgacatgttacatcacagtgctctaaaagctctgtcatgcgtattatactctcagcatcctggataatagagttcatctccagttcaaattctccaccaaccagctttatcttgtttcctgcaaaatcatggaggtttgggaagttcctttagacccattctcgtatggaggtttgttttcttcttttttctttccgcggaaacctgcctcctactccaccatcacatggaacccaccactgcttctccgaagctcgctctgaccacgccgctgctgctgctgcaggggcctcgcaggaagtgcccccgcgtacctgcccgggcggccgctctagaactagtggatcccccgggctgcaggaattcgatatcaagc

SEQ ID NO: 5463 - DNA, 839 bp, Homo sapiens
  misc_feature 553, 598, 602, 605, 606, 607, 608, 610, 612, 614, 615, 616,617, 618, 619, 620, 667, 669, 704, 713, 731, 739, 745, 748,757, 761, 762, 771, 774, 793, 794, 797, 806, 810, 818, 820: n = A,T,C or G
ggcgaattggagctccaccgcggtggcggccgcccgggcaggtacacgacaatttttgctccaccaaacacttcagatatggaagctgtggtaagtatagaagaagaatttgttttgggaagtggagtttaaactgtgggtgttgtttagcagtcagtagaaaaacttaatttctaaaaactaaaagttaaatttaggtttttaaaaaactgccaatttcttcattataaataatcctaacttaaagaatgaaagaatttttaaatagtattttttttaagaaacaatttagaaatgctgctactggcctggtgcagtggctcacacctgtaatcccagccctttgggaggccaagatgggagtatctcaagcccaggagttcgagaccagctcaggcgacatgacaagaccctgtctctacaaaaacaaacaaacaaacaaacaaaaaacaaaaaaaaccaccacaacaaaaatgagctgggtatagtgttggacgcctgtagtcccagctacccaggaggcatgggaggattgattgcttgagcccaggangggcgactgcctccagcctgggaaacagaatgagaccaactgggnaaanaannnnantnannnnnnnaagtccctcggcccgctcttagaactagtgggttccccccgggctgnangggatttcgattttcaagctttttcgatacccggncgacccttngagggggggggccccggncccccacnttttgnttncccttttantggnnggggttaanttnggccccttgggggggaaannaangggcaaaanctgngttcccgngngggaaaatgtgtttccccc

SEQ ID NO: 5464 - DNA, 1105 bp, Homo sapiens
  misc_feature 5, 6, 8, 13, 15, 16, 17, 18, 19, 20, 21, 22, 23, 24, 25,27, 28, 31, 32, 33, 34, 35, 37, 39, 41, 42, 48, 49, 50,54, 55, 56, 57, 61, 64, 65, 68, 69, 70, 71, 77, 78, 79,81, 82, 83, 84, 85, 86, 89, 101, 133, 424, 466, 481, 545,579: n = A,T,C or G
  misc_feature 590, 659, 707, 737, 772, 779, 798, 803, 814, 833, 864, 867,875, 880, 893, 895, 897, 898, 900, 905, 917, 926, 929, 934,956, 991, 1000, 1001, 1002, 1006, 1034, 1039, 1050, 1052,1058, 1063, 1077, 1083, 1103, 1104: n = A,T,C or G
caccnngnaatanannnnnnnnnnnannaannnnnangngnntattannnatgnnnnattnatnnaannnnttaatnnncnnnnnnagnaagtggttgatngccttgaaacccattcctattgggcgaattgnagctccaccgcggtggcggccgaggtacgcgggatctccccaatgcccacctggagtcctcccctcaattgtctcattcaccaactgtcttcttctctcgactaggtatggttccgaccggcgtttagccgagctctctgattaccgccgtttatcagagtcgcagctttcgttccgccgctcgccgacaaagtcctcgctggattaccgtcgcctgcccgatgcccattccgattacgcacgctattcgggctcctataatgattacctgcgggcggctcagatgcactntggctaccaggcgccgcatgtaggggccatccttgggaatgngggcaccacaagggnaggggaggggaagaaaaaagagggttgggtaaggggttacaggatccaggtttataaactactnttgggcccatacctttcctgggttggtggttttntcatgccctcntaccatgtgggggcctttcccccaggaagatggatccctgtttaagttgttcggcaagttaaccctaantttggttcctttccgcctcagccaggccaaaaattcttggcttaactngggcttcttaggaatcctggcggggttttncccccttcttacccccttggccttccccggtcttnccccaanaaaatggggggaaattttnccttntttaatggtantttttaatttatatttttnccctgggccttccccttttttaatttttttngtngccgcccnaatantttttaaagggtncntnntngggantgggggggaaanccaaacccntgncaaanttggagggttcggcccgggccncctttttttttttttttaaaaatggggaaaaggangggccccannnaaanggggtttaaaatttaaaccaattttccntattntggccaaaaantngggccnatccnttattcaagggggnccttgncccggggccgggccggtttnna

SEQ ID NO: 5465 - DNA, 467 bp, Homo sapiens
  misc_feature 45, 79, 120, 128, 156, 250, 283, 298, 467: n = A,T,C or G
tagggcgaattggagctccaccgcggtggcggccgaggtactttnttttttttttttttttttttttttttttaggggngagtgatagcttaattaaagattacaatctatcttcttcanaaggctanagaatggactggcaatcactaaattttntttcaggtaactgccaaacttaaatttgttcttccaaataaaataattacccccttctgtgccgctcaaaataccatgctggaaaaaagacagngttcatgatttgccctataattcaaccctcatnttttccgttttcaanaatcggggaaaggggaatttcatttactgattatcagcaggcctcctgagagataggccggggctgctgtaaggtgaaaagcaactctcactggcaccgcggacaaccttccggagaagccgaggccagaggcttttccattgccgggtggcaccaacacgtgggtggn

SEQ ID NO: 5466 - DNA, 574 bp, Homo sapiens
  misc_feature 3, 4, 5, 6, 7, 8, 10, 11, 13, 14, 16, 17, 20, 21, 22, 24,25, 26, 27, 29, 30, 31, 33, 34, 35, 37, 39, 41, 42, 43,44, 46, 47, 48, 49, 50, 55, 58, 61, 62, 63, 64, 67, 68,76, 80, 85, 92, 94, 98, 113, 178, 574: n = A,T,C or G
ctnnnnnnanntnntnncannntnnnntnnntnnncntncnnnngnnnnntctgntgnttnnnnttnnctagtagngatntgatnggcgccntntatnctcactatagggcgnattggagctccaccgcggtggcggcccgaggctaacaaggaaagcccctggagctcctgtaatangaatgtggttggaagatgcaaactgtggatgatcatcacctccattttcctaggtgtcattacagtgatcatcataggcttatgtcttgctgcagtaacttatgttgatgaagatgaaaatgaaatacttgaattatcatcaaacaaaacattcttcgtcatgctgaagattccagaggagtgtgttgctgaagaggaattgcctcacctgctcaccgaaaggaatgaagtgatggaggctggtctctgtctgaaagcagtgctctaccaagtcctggagatgaagggaattcactctgttttgcagaaaagattctgtgggattaatacagaagccaccagcaacaccagaggggtgggagactcctttctctcccgattcttacagtctggctn

SEQ ID NO: 5467 - DNA, 470 bp, Homo sapiens
  misc_feature 2, 8, 18, 220, 410: n = A,T,C or G
gnagcctnactactactntagggcgaattggagctccccgcggtggcggccgaggtacgcggggcagacactgaccttcagcgcctcggctccagcgccatggcgccctccaggaagttcttcgttgggggaaactggaagatgaacgggcggaagcagagtctgggggagctcatcggcactctgaacgcggccaaggtgccggccgctctagaactantggatcccccgggctgcaggaattcgatatcaagcttatcgataccgtcgacctcgagggggggcccggtacccagcttttgttccctttagtgagggttaattgcgcgcttggcgtaatcatggtcatagctgtttcctgtgtgaaattgttatccgctcacaatttccacacaacatacgaagccggnagcataaagttgtaaagcctggggtgcctaatgagtgaagctaactcacattaattgcgt

SEQ ID NO: 5468 - DNA, 789 bp, Homo sapiens
  misc_feature 65, 66, 540, 595, 597, 617, 622, 635, 643, 654, 666, 718,735, 764, 766, 773, 778, 787: n = A,T,C or G
ccgaggtaccattataggtttcaaaatttgcaaaaatagaaaaattattttacttctactcccannataattattttacatattatcttctagtctgttttataatatttattttaaattgaaatcataaaacttttttttgctcttagccaaagaatgtcggcaaactctaatggtcctcattcccactgcacagcatttcagtttgactttacatactcaggggaaaagaaggcagcttggttgagaaactgcaagatcccaagtgcctgttttttgtcttttgtttagtcttgtttttttgttttttgtttttttgaggaactaatgaataaagcacacaaaatctccgagcagtagctggcctttcaggggcacgctgcacagtagttctggagaggacagtatctccaagggtggatgagttccccattgctcagaggaatcagccaaggggcctgcagcggaagctcccaggctgagctggaacttgaaaccaggtctgtctgcctctgcccttcaagccaacaagggcataangcaatttgcctctataaatgtagcatccaacttatttcacattctgtgctcagtnanaacagtgacccatgctctanaactnagtggatcccccnggctgcanggaatttcgantttcaagccttnttcgataccgtcgaccttcgaaggggggggccccggtaccccaacttttttnttcccctttaagtggangggtaaattgcgccccttggcggtaatcntngggcaanagctnttttcctgngg

SEQ ID NO: 5469 - DNA, 871 bp, Homo sapiens
  misc_feature 439, 519, 555, 583, 593, 599, 628, 640, 657, 667, 672, 701,732, 755, 760, 769, 770, 773, 781, 790, 793, 801, 809, 815,823, 838, 844, 847, 850, 851, 855: n = A,T,C or G
tccaccgcggtggcggccgaggtacagttcacaatagggtttgtgctccaatgctaatctaatgccatcgttgatctgacaggaggctgagctcaggcggtaatgctttctcgctggctgctcacctcctgctgtgcggtcccattcctaacaggccatggaccagtgctgggggtttgggactcctgttctaaccaatgctccctctattaaaagggattttcacactagctgatggaaacaccaagtgttgcaagctctgtgtgagctacagagattattccttttgggaagttcttttgccctgctttgcataatttcctcaaatacatgtacctgcccgggcggccgctctagaactagtggatcccccgggctgcaggaattcgatatcaagcttatcgataccgtcgacctcgagggggggcccggtacccancttttggtccctttagtgagggttaattgcgcgcttggcggtaatcatgggcataactggtttcctgtggtgaaaattgntatccgctcacaaatttccacaacaacaatacgaancccggggagcataaaaagtggtaaaaancctggggggngccctnaaatgaaggtggaaccttaaacttcaacnatttaaattgcngttggcgcctaactggncccccttttnccagntcggggaaaaacctgttccgggcccaacntgcaattaaattgaaattccgcccaaacccnccggggggagaaggcgggtttgnggtantttggggcnnctnttttccgntttccttgnctnaattgaantcccttgngctttnggccgttncggtttgggggggancgggtnttnacnntccntcaaaaggcggggaaa

SEQ ID NO: 5470 - DNA, 1196 bp, Homo sapiens
  misc_feature 1, 4, 8, 9, 10, 11, 13, 14, 15, 16, 19, 23, 24, 27, 28, 33,37, 38, 40, 41, 44, 45, 46, 48, 49, 52, 54, 56, 58, 59,60, 61, 62, 66, 69, 72, 74, 76, 85, 86, 89, 90, 91, 92,94, 97, 108, 116, 126, 128, 129, 133, 135, 139, 151, 152,154: n = A,T,C or G
  misc_feature 155, 163, 174, 190, 194, 219, 293, 313, 403, 407, 433, 494,499, 508, 509, 515, 516, 517, 521, 551, 557, 569, 604, 667,671, 699, 708, 715, 724, 725, 766, 768, 769, 770, 785, 793,822, 846, 853, 857, 858, 860, 879, 887, 891, 892, 895: n = A,T,C or G
  misc_feature 902, 913, 919, 935, 946, 949, 965, 1002, 1010, 1013, 1022,1023, 1032, 1041, 1060, 1065, 1069, 1071, 1093, 1112, 1118,1120, 1137, 1140, 1150, 1175, 1184, 1185, 1187, 1190, 1192,1193, 1195, 1196: n = A,T,C or G
nctnctcnnnntnnnntantatnnttnntttcntttnntnntannntnnatntnanannnnntaantanatngntnatcatatannatnnnngnctncaggatctacnctaagacntgttttgatngnngctncnccgnggtggcggacgnngnncgcggggngtgctcatgcncgctgcaggggtcggnggtnagggcgagcgtctcacaagccgtangagggagatggcggtggagtcgcgcgttacccactgaggaaattaagaaggagccagagaaaccgatcgaccgngagaagacatgcccactgtntgctacgggtcttcaccaccaataacggccgctctagaactagttggatcccccgggctgcaggaattcgatatcaagcttatcggtacncgtncgacctcgaggggggggggcccggtncccaagccttttgtttcccttttagtgaaggggttaaatttggcgccgcctttgggccgtnaaatnaatgggttnnattagnnntgtnttcccttgttggttggaaaaattggtttantcccgnttcaaccaaatnttccaacaaccaaccattaccggaggccccggggnaggccaattaaaaaagttggttaaaaagcccctggggggggttggcccttaaattggaaggtnggangccttaaaccttcaccaatttaaatttnggcggtttngccggcntcaacttgnnccccggctttttcccaagttgcgggggaaaaacccttggtncnnntggcccaagccttgncattttanattgaaaattccggccccaaaaccacccncccgggggaagaaagggccgggtntttgccnttanntngggggccgccttctttttnccgctttncctnnggntttcaanttgaacttccngcttgntcgccttcgggtccantttcaggcttntcnggccaaagcccgggtnttcaagccttcaacttccaaaaaggggccgggttaantacccggnttntttccaccnnaaattcaangggggggantaaacccaagggaaaaagnaaacnatgntngaaacccaaaaaagggccccancaaaaaagggccccagganaacccntntaaaaaaagggcccccnctngcctgggccntttatttccattaagggtttcccgnccccccctnnantanannann

SEQ ID NO: 5471 - DNA, 1201 bp, Homo sapiens
  misc_feature 5, 7, 10, 15, 17, 21, 22, 24, 25, 26, 27, 30, 32, 34, 35,36, 41, 42, 45, 48, 49, 51, 53, 54, 57, 59, 60, 65, 68,69, 70, 72, 75, 76, 83, 84, 85, 86, 88, 91, 94, 96, 98,106, 109, 117, 124, 143, 172, 197, 350, 423, 435, 497, 504,505: n = A,T,C or G
  misc_feature 526, 527, 535, 539, 546, 547, 585, 618, 636, 696, 710, 729,737, 771, 777, 778, 813, 815, 818, 823, 829, 831, 844, 848,853, 868, 869, 871, 890, 894, 900, 902, 922, 952, 953, 972,980, 987, 989, 990, 1011, 1012, 1017, 1022, 1026, 1030: n = A,T,C or G
  misc_feature 1034, 1035, 1038, 1043, 1044, 1059, 1070, 1072, 1077, 1079,1086, 1089, 1098, 1102, 1107, 1108, 1114, 1118, 1119, 1125,1135, 1136, 1144, 1154, 1162, 1166, 1168, 1169, 1171, 1186,1198, 1201: n = A,T,C or G
ccccncnaanaaacnanaaannannnnaancnannngtaanntgnatnnanannaanannagagntannnanaannacaaaannnnangcnagnantnaaccttgnaancccaccanatttggngaattgcagctccaccgcngtggcggccgcccgggcaggtacacaatngtagttctttctggccaggcatggncctaaactttaataagtcagagacaagcataggctcaaaactacaaaggttatcctcatcctcccccaaacatgttcacagcaagaaagcctggagaactcttcacctgctcagaaagcttcttcacttcctctagaatggaggcaataggcncgactcctctcccttgccccgggtgaaaggaacaatgcagtaagctacacatgtcccgcgtacctgggccgcnctaagaactagntgggatcccccgggcctggcaaggaattcgattattcaaagccttatccgaataacccgtcngaacctnngagggggggggggccccgggnnaccccaancctnttttggnngccccttttaaaattggaaggggtttaaaatttgcccnccgccttttgggccggtaaaatcaattggggtncaataaagccttggtgtntccctggtggtggaaaaaatttgtattattccccgctttcaccaaaatttcccaccaacnaaccaattaccganagcccccggggaaggcaantaaaaagntggtaaaaaggccctgggggggtgcccctaaatngaaggnngaagcctaaaccttcaccattttaaaattggcggntngcngcctncacctngnccccgcttttttncaangtccnggggaaaacccttgnncngggggcccaagccttggcnattnaaaatngnaaataccgggcccaaaccgncccccgggggaagaaaggccggtttttgcnnttaatttggggccgccttnttttccgnctttccntnnggcttaactttgaaccttccnntggcncctcngggncccntttnnggnttgcnngccaaaacccgggtnttccaagcctntnaactncnaaaaggnccngggttaatncccngtttnntcccanccannaaattnaagggggganntaaccccnagggaaaaanaaccattngggnanncnaaaaggggcccagcnaaaaaggggccnagn

SEQ ID NO: 5472 - DNA, 1175 bp, Homo sapiens
  misc_feature 1, 3, 7, 10, 13, 16, 18, 19, 23, 24, 25, 26, 28, 35, 36,37, 38, 43, 44, 45, 46, 47, 49, 55, 56, 57, 62, 64, 67,69, 70, 75, 76, 77, 79, 80, 81, 84, 85, 92, 94, 96, 97,102, 103, 105, 106, 119, 135, 137, 193, 347, 396, 423, 436,455: n = A,T,C or G
  misc_feature 493, 510, 550, 558, 565, 566, 572, 589, 601, 644, 649, 653,670, 688, 700, 711, 748, 756, 761, 777, 778, 789, 795, 802,818, 838, 846, 892, 931, 956, 957, 963, 966, 976, 982, 991,999, 1049, 1058, 1062, 1069, 1076, 1079, 1081, 1083: n = A,T,C or G
  misc_feature 1085, 1087, 1089, 1107, 1112, 1119, 1133, 1152, 1153, 1154,1155, 1162, 1168, 1169: n = A,T,C or G
ncncctnaantanttntnnaatnnnntncctaaannnnaatannnnnanatatcnnnaggtnanacntnntaaannnannntcnntataggngnanngaaanncnnaaattaggcaganttggaactccaccgcngnggcggccgagatacctcacagaagctcttcagtctatcagtgaattaagagcttgnagataaactggaaaagataattaatgcagttgagaagcaacccttgtcatcaaacatgattgaacgatctgtggtggaagcagcagtccaggaatgtagtcagtctgttgatgaaactatagagcaccgttttcaatatcatagggagcatttngatattccacgctttgtgtcctgcccggggcggcccgctctagaactantggatcccccgggctgcagggaattcngatattcaaagcnttatccgattacccgtgcngaccctcgagggggggggccccgggtaccccaagcctnttttggtttcccttttnaggtggagggggttaaaattggccgccgcctttggggcgntaaaatcnatggggnncaatangcatgggtttccctggnggtggaaaaatnggtttattcccggcttcaacaaattgcccaccaacaaaccaantaccnaagncccgggggaagccaatnaaaaagtggttaaaaagnccttgggggggngggcccttaanatggaaggtggaagcctaaaccttcaaccaatttaantttggcgntttgnccgccttcaacttggnncccgccttttnccaggngcggggnaaaaaacccttggtcngtggccccagacttggcaantttaaatngaaaattcgggcccaaaccccccccgggggaaagaagggccgggtntttgccgttatttgggggccgccttctttccccggcttnccttggggttcaacttggaactttnncttgcngcntccggggtcngtttcngccttgctnggccgaanccgggaatcaagccttcaacttccaaaaggggcggggtaaattaccgggnttatttccnccangaatttnagggggnaananancncnanggaaaaaagaaccattgntgganccaaaangggcccacccaaanagggccccaggaaaccccnnnnaaaaaanggcccnngtttct

SEQ ID NO: 5473 - DNA, 1058 bp, Homo sapiens
  misc_feature 7, 9, 10, 12, 14, 16, 19, 22, 24, 25, 28, 29, 30, 31, 32,33, 34, 35, 36, 37, 38, 39, 43, 44, 46, 48, 50, 51, 52,55, 56, 57, 58, 61, 62, 64, 69, 70, 71, 73, 74, 77, 78,79, 80, 81, 82, 83, 85, 86, 88, 89, 90, 92, 94, 97, 99,100: n = A,T,C or G
  misc_feature 102, 103, 104, 105, 107, 110, 112, 122, 536, 654, 717, 726,727, 735, 757, 798, 817, 843, 844, 848, 866, 868, 870, 879,894, 907, 936, 952, 954, 961, 965, 975, 978, 981, 987, 990,1006, 1013, 1022, 1024, 1038, 1041, 1045: n = A,T,C or G
ccccccnannanananatnaananntannnnnnnnnnnnaatnnantnannnttnnnnaanntnatttnnntnnttnnnnnnntnntnnnananggnanngnnnnanatncncttactatanggcgaattggagctccaccgcggtggcggccgcccgggcaggtactatacaccaattctcaaagtttgatcagtgggactgagtcacagctgcccacagttgtaagcagatcaaaaatgcacctcaaataggctttcactcttctcctctttctctcttccaagcactccacttatgtacctcggccgctctagaactagtggatcccccgggctgcaggaattcgatatcaagcttatcgataccgtcgacctcgagggggggcccggtacccagcttttgttccctttagtgaggggttaattgccgccgcttgggcgtaattcatggtcattagctgtttcctgtgtgaaaattgttatcccgctcacaaattccacacaaacattacggagcccgggagccattaaaagnggtaaaagccctgggggtgccctaatggagtgagcctaaacttcacatttaattgccgttgccgctcactgcccgcttttcccagtccggggaaaacctgtgcgtgcccagctgcatntaatgaaattcggcccaaccgccccgggggaagaaggccggtttgcgtaattggggcgcctcnttccgcttnncttcgctnacctgactcggttgccgcttcnggtccgtttccggcctgccgggccgaagccgggtatcaagnctcaacttcaaaaaggccnggtaaatacccggtttattccaccannaaanccagggggggataaaccncnangggaaaaanaacattggttggaanccaaaaaaggccnagccaaaaagggcccaaggaaaacccgtnaaaaaaaggggccccngnttgcctnggcngttttttttncantanggcttnccncccccccctggacgangcatttncaaaaaaantncgaaccctttaaantcnaaanggggggcagaaat

SEQ ID NO: 5474 - DNA, 1205 bp, Homo sapiens
  misc_feature 1, 3, 4, 7, 8, 10, 11, 13, 14, 15, 18, 19, 20, 21, 23, 24,25, 26, 27, 28, 29, 30, 31, 33, 34, 35, 36, 37, 38, 40,41, 43, 44, 45, 46, 47, 48, 51, 56, 57, 58, 59, 60, 61,64, 67, 68, 69, 70, 71, 72, 73, 74, 75, 77, 80, 81, 82,83: n = A,T,C or G
  misc_feature 84, 85, 86, 87, 88, 89, 90, 91, 92, 93, 95, 97, 98, 103,104, 105, 109, 111, 112, 114, 115, 119, 125, 141, 207, 208,223, 227, 526, 566, 575, 623, 626, 637, 650, 668, 687, 688,704, 712, 722, 724, 729, 731, 742, 746, 747, 754, 767: n = A,T,C or G
  misc_feature 795, 807, 813, 819, 830, 852, 864, 866, 869, 871, 872, 875,877, 879, 901, 902, 903, 927, 929, 941, 945, 946, 954, 955,959, 963, 967, 968, 982, 997, 998, 1002, 1008, 1010, 1027,1028, 1031, 1032, 1035, 1056, 1063, 1067, 1074, 1075: n = A,T,C or G
  misc_feature 1077, 1082, 1083, 1086, 1094, 1095, 1096, 1103, 1104, 1118,1120, 1134, 1135, 1139, 1142, 1143, 1147, 1150, 1160, 1161,1165, 1172, 1173, 1178, 1180, 1185, 1190, 1191, 1197, 1204: n = A,T,C or G
ntnncanntnnannnttnnnnannnnnnnnntnnnnnnannannnnnnacnttttnnnnnnatnaannnnnnnnnanttnnnnnnnnnnnnnntnannagggnnncgcntnntnnatcnactcantatagggcagaattgnagctccaccgcggtggcggccgggcaaccgaggctgcaatagctccagaactggcctccacagtgnnttcctctacgggagncaantggttgtgtcacttgacccctcttgttgctaagaggcagcagggacccccattttcacttccgcttccggttgtcccccgcgtacctgcccgggcggccgctctagaactagttggatcccccgggctgcaggaattcgatatcaagccttatcggataccgttcgaacctcgagggggggggcccgggtacccaagccttttgttccctttagttgaggggttaaattgccgccgctttggcgttaatcatgggtcattagcttgtttcctgtgttgaaaattgttattcccgcttcnaccaaatttcccaccacaaacaattaaccgaagcccgggngaagccatnaaaagtggttaaaaagcccctggggggttgcccctaaattggaaggtngangcctaaacttncaccaatttaaantttggccggtttggccgncctttaaactttgcccccnncttttttccaaaggtnccgggggnaaaaaacccntngtttngngggccccaacnttgnntattttnaaatggaaaattnggggcccaaaccccccccgggggggganaaaaaggccccntttttnccctantttgggggggnccctttttttcccctttccctncgggttaaaaananaantnnctntnancccctggggggggtttctggtnnnggggggggaaaaggcgggtttttnancctttccccctnaaanngggggggnnaaanatcngggnntttttttccccaanaaaaaattggggggnntaancccccngnaaaaaaaaaaacttttnnggnncanaaaaaggcccccccccaaaangggcccngaanacccccnnanaaaanngcnccccccannntgggagnnttttttttaaaaangnatcccccccccccnngggnggnncgtnttnaaaaaaaaanntccncccctannaaaananagggnggggnnaaaacnccccccnc

SEQ ID NO: 5475 - DNA, 880 bp, Homo sapiens
  misc_feature 398, 404, 408, 416, 417, 432, 440, 446, 448, 455, 456, 460,464, 467, 478, 491, 497, 504, 505, 510, 512, 515, 516, 546,549, 550, 556, 559, 577, 578, 579, 580, 586, 606, 609, 619,637, 642, 646, 655, 657, 659, 660, 664, 669, 670, 677: n = A,T,C or G
  misc_feature 682, 684, 686, 695, 711, 715, 719, 721, 732, 733, 740, 743,749, 750, 757, 758, 759, 764, 766, 767, 768, 776, 780, 781,782, 784, 796, 802, 803, 815, 816, 817, 822, 823, 827, 832,833, 837, 838, 840, 841, 848, 852, 860, 861, 862, 866: n = A,T,C or G
  misc_feature 872, 873, 875, 879: n = A,T,C or G
tccccgcggtggcggccgaggtacgcgggggaagagcggaaatgtcaaacgtggaggtgagcagtctgtgggcggtggggcttcagggaaagcttgggccggaccctttgggtttagggctttgctgggcgggcctagtctccgctgcgagtaggcccagcgccgtcggttcaagaggtaggaccacaggccaggaatactcctttactgttaaaaaagccagggaaagaaaggatttcctcaatagatatttattttacacctgtcttataccaggcatgcacgggaaaaggtattatccaaaacaattccgtgaggcaaatagtggtagttccattttgtagatgtaaaaacggaggaagttaaatgatgggttcaagggcacacggttagtaggnggtaanaatnaatactgnntccagtttttttgcntacggccntggggngnttttccnntccncccncanccggggattgnatttccccgcttnaacaanagccccnnaaaantngcnngggggaaaaaaaaggttttccttttttttnccnncctttnatngccaaaggggtttttttnnnnaaaaantttaaaagggggtccccccnctnttcttccccntttaatagggggaaaatnccccngttnttttttttntntnnattngggcnnaaaaaanccggncngnggggggggngggttttttaaaaaanatgngggntnccccccgggcnngcggggnatntttttnntttaagnnnttttntnnncccccccncccnnngnggggggggcccncccccnncctttttttttnnnttttnnttanggggnnaaannannccccctntggnggaaaaannngganaaaaanntntttnc

SEQ ID NO: 5476 - DNA, 905 bp, Homo sapiens
  misc_feature 251, 303, 318, 458, 462, 492, 498, 510, 520, 551, 568, 581,586, 590, 602, 627, 632, 640, 641, 648, 652, 669, 684, 697,700, 728, 731, 735, 739, 741, 742, 753, 755, 760, 766, 778,780, 789, 791, 799, 802, 812, 813, 816, 826, 829, 832: n = A,T,C or G
  misc_feature 834, 838, 847, 848, 853, 859, 866, 867, 882, 889, 902: n = A,T,C or G
gcggtggcgggccgcccgggcaggtactccgtaactcacgtaaaacgctacacgcatggtaatatcgtagctggtctggcaccaggaatgatgacctctattggagactgtgacaaaagcaaaccccaacgggaaagagatgtcactggggatctgccctgtcttctgagtgtcccctcagggtggaaatgctgggtcacatggtagctctacgtcccactttcaggaactgccttcccatttccgcacancagctgcactgtttttgttcccctggcgatgtgtacctcggccgctctaganctagtggatcccccnggctgcaggaattcgatatcaagcttatcgataccgtcgacctcgagggggggcccggtacccagcttttgttccctttagtgagggttaattgcgcgcttggcgtaatcatgggtcattagctgtttcctgtgtgaaanttgnttattccggttcacaaatttcacacaaccnttaccnagcccggggagncattaaaggngtaaaaagcctgggggttgccctaatggagntgaagcctaacctcaanaatttaatttgcngtttncgcnttaacttgcccncttttttccagttccgggaaaaacnttgtngttgcccnngctggcntttnaattgaatcggggccanccccccccggggganaaggccgtttttncgntttttggggcccctttttcccggtttcnttnattnaaantnnattccctgggncncgggncgtttntggtttggtggnanaccggtttntnacctcccntcnaagggggggnngtnccggggtttnccncanantttngggggtttnnccccnggaaanaaacttnntggcccaaaaggccnccaaaangggccggaacccntat

SEQ ID NO: 5477 - DNA, 862 bp, Homo sapiens
  misc_feature 31, 91, 92, 147, 210, 211, 300, 361, 400, 411, 415, 418,433, 482, 492, 502, 505, 509, 548, 555, 570, 588, 605, 607,612, 613, 616, 619, 646, 656, 658, 667, 668, 669, 673, 680,682, 699, 715, 724, 726, 743, 745, 756, 758, 759, 770: n = A,T,C or G
  misc_feature 788, 797, 798, 800, 801, 812, 824, 828, 830, 831, 841, 844,845, 847, 857: n = A,T,C or G
ggagctccaccgcggtggcggccgggggtanggatgggaagccgtggggcaagggaggttgcaggaagcccatccttcccctcctgcggcnngtacctgcccgggcggccgcccgggcaggtacgcggggagaggaattcagagttnaaccttgagtgcctgcgtccgtgagaattcagcatggaatgtctctactatttcctgggattnntgctcctggctgcaagattgccacttgatgccgccaaacgatttcatgatgtgctgggcaatgaaagaccctctgcttacatgagggancacaatcaattaaatggctggtcttctgatgaaaatgactggaatgaaaaactctacccangtgtggaagcggggagacatgaggtggaaaaactcctgnaagggaggccntgtncangcggtcctgaccagngactcaccagccctcgtgggctcaaatattacatttgcggagaacccgntttccctaanatgccaaaangangatnccaatgggcaaacatttttctatgagtaagaactgcaanaaatgangctggttttatctgnctgatccattatggtttnacaacttggacaagcantngtcannagnacnagtgaccgggtaaaattgggacccggncaaaagcccntnataaaacgnnntttnccttggntnggggaaacctttttctnaacccaacccccggantggaaaaanantggaattttcatttttncngtttttgcccnannctttggggccngtttttttccaaaaaaanttgggaacnnanntttcaattganaagttttttggnaacnanncccaaatttntanncntttggggccnttaat

SEQ ID NO: 5478 - DNA, 870 bp, Homo sapiens
  misc_feature 364, 371, 407, 491, 499, 572, 580, 617, 621, 637, 675, 676,677, 686, 692, 704, 710, 713, 726, 748, 749, 760, 766, 796,842, 849, 862, 863, 870: n = A,T,C or G
ggagctccaccgcggtggcggccgaggtacacctcacaaatgatagtggctgagagccaaatgatgagcttctctgtgttatgtctacctagctgtgattatatcaggcacaggattgcgcgcgtgtgctctaatcccactgtgtcatgcaggatttttacctcggcctatgcctgcctggcagcaacacagccatgttccttacactccgccccctaggccaagggggtcctcttaatgggaactcgtgcacataggggagcaccctggacccataggccacagcaacaataaagagagcaacaacctactactaatattcctgctatgctacctatgattataagagcccagtgtaggccanagcccanagacacccaccatctctgcaggcggtcatcagtaangtattcaattgccttaatctcccatgacatgacaccccctgcaaagctgccactatgttctggtggttgtcagggatgaatgtncctgcccnggcggccgctcttagaactagtggatcccccgggctgcaggaattccgatattcaagcttatcgataccgtcnacctcgangggggggcccggtacccaacttttggttccctttaantgangggtaaattggcgccncttggcggtaatcaatggtcatagccttgttttccctnnnggtgaaaantggttnttccgcttccanaatttnccnaacaaacattacnaaacccggggagccttaaaagnngttaaagcccngggggnggcctaatgggagtggagcctaaacctcanatttaattggggttggggctcacttgccccctttttcaggtggggnaaacctntcggtgcccactnnatttatn

SEQ ID NO: 5479 - DNA, 824 bp, Homo sapiens
  misc_feature 597, 600, 672, 682, 687, 698, 782, 784, 813, 817: n = A,T,C or G
ggagctccaccgcggtggcggccgaggtaccgtgttttaagcttagttcagtctcaagtgtttgcagccacatctgaagaccaataaagcaactgctggtttatcctttgggagctgacagaatttcttctcccaaatacatacacagtaaaatcataagccttccaacatcgttactgttgcactttacgcagtcaagtgtccaactcctcagatgagcaagtggtcggccctaaaaagggcctttgggatcgaaacgcgcaaagctggggcggcggcctagcctccgaagccgtacctgcccgggcggccgctctagaactagtggatcccccgggctgcaggaattcgatatcaagcttatcgataccgtcgacctcgagggggggcccggtacccagcttttgttccctttagtgagggttaattgcgcgcttggcgtaatcatggtcatagctgtttcctgtgtgaaattgttatccgctcacaattccacacaacatacgagccgggagcataaagtgtaaagcctggggtgcctaatgagtgagctaactcacattaattgcgttgcgcttcactgcccgctttcagtcnggnaacctgtcgtgccagctgcattaatggaatcgggcaacgcccgggagaggccgttttgcgtattgggcgctntttccgcttncttgnttaactgactnggttgcgctcggtcgtttcggcttgcggcgaacggttttaacttactcaaaaggcggtaattaccggtattccaccagaaattnanggggataaccgccaggaaaagaacattgntgangcaaaat

SEQ ID NO: 5480 - DNA, 1097 bp, Homo sapiens
  misc_feature 2, 3, 6, 7, 11, 17, 23, 24, 25, 27, 31, 33, 34, 35, 38, 39,47, 50, 57, 59, 60, 64, 70, 72, 74, 76, 77, 78, 79, 81,82, 83, 89, 90, 91, 93, 95, 96, 97, 98, 99, 101, 102, 104,105, 107, 108, 113, 117, 125, 156, 206, 302, 335, 342, 359: n = A,T,C or G
  misc_feature 384, 400, 466, 497, 498, 520, 591, 657, 662, 667, 670, 671,674, 677, 678, 680, 681, 684, 688, 689, 722, 723, 756, 757,759, 760, 769, 776, 789, 796, 801, 802, 803, 804, 810, 832,837, 840, 845, 851, 853, 868, 872, 881, 884, 886, 890: n = A,T,C or G
  misc_feature 895, 906, 909, 912, 915, 918, 919, 935, 936, 953, 965, 966,969, 979, 988, 1005, 1016, 1019, 1020, 1039, 1054, 1055,1058, 1062, 1070, 1071, 1072, 1075, 1076, 1084, 1087, 1094: n = A,T,C or G
tnntannattnattctntttttnnngntttntnnnttnntgatatanttntatttantnncttnattttntnantnnnntnnnggatannnantnnnnntnnanngnntatanggcnacttgaanctccaccgcggtggcggccgaggtacctgtntccattgttgctggcttatgaagatatgatgaaagagaaggacgagctcnatgcctccctcaaggaggaaatgagaatgtttaggatgcgagcccaagaagtggtgaaagaaaatgaagaattgcaccaagagttaaataagagtngtgctgttaccagtgaggaatggcgtcagcttnagactcnagcaaaactggttttantaggaaaacaagttgtttgctggancagttggaggattcancaaaagggaaaagccaaggacagccaccagggagccgcctccaaggaaagttttctaagctggacntaaacaacttaatgctccctgggagggcaannaaccccaccggcccagggtaanaaggagctggccggagcaacaggggaaccagcttggagattttttccgtgcccaaatgcccaaagaaactnaaaacaacacttcgggatgggcaaaatccgcagttgggaaggttcataaaatcaattggtgaatgnaattnttccnaannttnttnntnnccntttnncaaatggtttccttgccccgggccgggccgctnntaaaaactaagtggggatcccccccgggcttgnnanngaaatttcntattttnaaagcctttattntggattncccgnnnnaccctntggaagggggggggggcccccnggttnccncaagntttttngnttcccctttttaggngganggggtttanttncncccnccttnggcgtaattcnatnggnccntanncctggtttttcttggnngttgaaaaattggtttntttccgcttccnnaantttccaaaanaaaaaattncccaaacccccggggangcattaaaatnggnntaaaaagcccttggggggntggcccctaatttgnnggngagnccttaacnnncannattttaanttngcgggtngcg

SEQ ID NO: 5481 - DNA, 843 bp, Homo sapiens
  misc_feature 2, 29, 84, 134, 144, 153, 258, 265, 291, 319, 342, 361, 364,392, 396, 406, 418, 435, 466, 472, 487, 492, 525, 541, 547,587, 596, 626, 680, 683, 693, 712, 713, 717, 726, 730, 731,750, 751, 758, 795, 805, 806, 815, 827, 832, 838: n = A,T,C or G
  misc_feature 842: n = A,T,C or G
gnggtggcggccgcccgggcaggtacttnttttttttttttttttttttttccatttttttttttccggcccttggaccttggntttattgatggcccaactgcacactgccaaatgctgtcacaagaggggcnccaccacttntaaatctgngagaggatcagaggttaacatatcatcaatgtaatgaaacaggcagaccccttttgggcatttccaggcagctaaatccatggcaacaagaccaggacaaatggnggggctntgcacacagccctgtggcagcatggngaaagtccattgtcatccttcccacgtnaagacaaacttctcctggctctntggagcaatgtcaatgganaanactgcattagctaagtccaccacaaagnggtncctcggccgntctagaactagnggatcccccgggctgcnggaattcgatttcaagcttatcgataccgtnacctcnagggggggcccggtncccancttttgtttccctttagtgagggttaatttgcncccttgggcggtaatnatggtnatagctgtttcctgtgtgaaaattgtttatcccgcttcanaaattccanacaacattacgagcccgggagccataaagntgtaaaagcctgggggggccctaatgaggggagctaaactcacatttaattggngtnggcggcttcncttgcccgttttttcaatnngggnaaaaccttnttcnngcccaacttggattttaannaaaatcngggccaacccccccggggaaagggcgggttttcggtnttttggggcnnttttttcgntttccttgcttnaaatnaactcncttng

SEQ ID NO: 5482 - DNA, 1053 bp, Homo sapiens
  misc_feature 1, 2, 4, 6, 8, 11, 12, 14, 15, 16, 17, 18, 19, 21, 22, 24,25, 26, 29, 30, 31, 32, 34, 40, 41, 42, 43, 44, 45, 48,49, 51, 53, 55, 56, 57, 58, 59, 60, 63, 67, 70, 71, 75,79, 80, 81, 83, 84, 85, 86, 87, 88, 89, 90, 92, 93, 94,100: n = A,T,C or G
  misc_feature 102, 104, 105, 106, 115, 130, 163, 176, 177, 191, 195, 196,200, 202, 223, 225, 456, 504, 606, 612, 683, 748, 749, 762,763, 795, 841, 843, 848, 849, 856, 871, 879, 887, 890, 909,916, 917, 933, 954, 955, 962, 963, 964, 974, 980, 994: n = A,T,C or G
  misc_feature 1006, 1019, 1027, 1030, 1031, 1039: n = A,T,C or G
nnancncnatnncnnnnnntnngnnnaannnntntaattnnnnnnttnnanantnnnnnnttnttantanntatnaatnnntnnnnnnnntnnnagaagngnannnatggctctnctatgggcgaattgnagctccaccgcggtggcggccgaggtacatgancaggctcagcctnngggaataattgccnacanncacngnggggaagcctgggaccatggntntgccaggaatctgtgacatctccagggcatcatttgagtcctgccttctcaaagtacctgcccgggcggccgctctagaactagtggatcccccgggctgcaggaattcgatatcaagcttatcgataccgtcgacctcgagggggggcccggtacccagcttttgttccctttagttgagggttaattgccgcgcttggcgtaatcatggtcatagctgtttcctgtgtngaaattgttatcccgctcacaaattccacacaacataccgaagccggngagccataaagtgtaaaagccctggggtgccttaatggagtgaagcctaactcacattaattgcgttgcgcctcactgcccgctttccaagtcgggaaaacnctgtcngtgccagcctgccattaatggaattcggcccaacgcgccgggggaagaaggccggttttgccgtatttggngccgctcttcccgcttcctcggctcactgacttcgcttgcgctcggtccgttcgggctgcgggcnnagccggtatcaannctcacttcaaaaggcggtaaataccgggttantcccacaggaattaaggggggataaaccgcaaggaaaaagaaacangnttganncaaaaanggcccagccaaaaangccccatnaaaacccnttnaaaaagggccctcgttttncttggcnntttttttcccattaangcttcccgcccccccctggannaagcatnnnacaaaaaaantcgacncctcaaaattcaanaaaggtgggccnaaaacccccgccnagggactnttnnaagaaaancccaggccgttttt

SEQ ID NO: 5483 - DNA, 1223 bp, Homo sapiens
  misc_feature 2, 5, 6, 9, 10, 11, 12, 13, 17, 20, 21, 22, 26, 27, 28, 29,30, 31, 32, 33, 34, 35, 38, 39, 43, 44, 46, 48, 49, 52,53, 54, 55, 56, 57, 58, 63, 66, 67, 73, 74, 78, 79, 80,81, 84, 87, 88, 89, 90, 91, 93, 94, 95, 96, 98, 100, 104,108: n = A,T,C or G
  misc_feature 109, 111, 115, 119, 122, 138, 152, 171, 206, 307, 462, 519,527, 530, 553, 588, 592, 610, 633, 636, 640, 649, 675, 684,687, 727, 732, 743, 779, 785, 786, 797, 800, 826, 829, 844,845, 849, 855, 861, 867, 888, 889, 890, 893, 925, 940: n = A,T,C or G
  misc_feature 957, 975, 983, 984, 986, 1011, 1012, 1021, 1043, 1049, 1054,1059, 1062, 1078, 1079, 1081, 1087, 1098, 1123, 1134, 1135,1142, 1145, 1153, 1158, 1159, 1161, 1176, 1178, 1182, 1190,1198, 1199, 1212, 1213, 1215: n = A,T,C or G
gnaannaannnnnatanatnnntaannnnnnnnnntgnnttanntntnngannnnnnnatatntgnnatttgnnaatnnnnttnagnnnnnannnnanangganattnntngatnactntgnctatatggcgaattgnagctccaccgcggnggcggccgaggtactcggnggttacttcctgggagacttcaggtgtgggtagcncggcgccgcgcccatagccggacggggatctgagctggcaggatgaatgtgggggttggcacacagcgaagtaaaccccaacacccgagtgatgaatagcncgaggcatctggctggcctacatcatcttggttaggattgctgcatatggtttctactcaagcatccccttcttcagcattcctgttggtctggacccttgaccaaccgtcatcccataaacctgggcttacgtatgtcttccttcataaccggnggaaaaggggaccacccttttgagaactccctgaccaaagggaaaaggcttcgggcntacttgancancaccttggggaaggcaaatgggnactattggggctcccaagttttacctctttcccgncaangttccctcaagcaatctntccttattgggggcctcctattnttncctngggcccaangctttcttattacccaaaggtattgnattgccttnccnccaccttttcccttcaatggaaaaacaacaaagccctttnaattnggcttaaaagntggttacccttggcccccggggggcgggggccggcnttcttnngaaaaccttanggnggggattcccccccccgggggcctgngcnaaggggaaattttcnnaatnaattcnaaaggncttttnattccggatttacccccttcnnnaanccttcggaaggggggggggggccccgggttanccccaaacttttttnggtttcccctttttaantggaggggggtttaattntggcgccnncnttgggcggttaaaattcaattgggnngcaataaanttggttttccctgggggggganaaaatnggttnttccngcntcacaaaattttcccnnancaaaanattaccgaaancccggggggaaccattaaaaggggntaaaaagcccnnggggggnggncccttaantgggnngnggaggccttaaaccntnaaanttaaaatngggggttnnggggccttcaatnngnccggtttt

SEQ ID NO: 5484 - DNA, 1160 bp, Homo sapiens
  misc_feature 4, 7, 8, 11, 14, 21, 22, 23, 30, 31, 37, 38, 41, 43, 44,56, 62, 67, 71, 77, 78, 81, 82, 83, 84, 86, 96, 99, 101,104, 106, 110, 111, 162, 203, 417, 425, 444, 450, 586, 595,611, 638, 642, 655, 685, 691, 697, 718, 719, 723, 734, 738: n = A,T,C or G
  misc_feature 743, 753, 756, 761, 770, 775, 786, 800, 802, 816, 818, 820,844, 846, 857, 860, 862, 871, 879, 887, 904, 906, 922, 925,930, 948, 953, 957, 964, 965, 972, 983, 985, 986, 1010,1011, 1013, 1022, 1027, 1040, 1044, 1046, 1056, 1060, 1069: n = A,T,C or G
  misc_feature 1074, 1079, 1082, 1090, 1097, 1099, 1108, 1110, 1111, 1115,1124, 1127, 1133, 1138, 1146, 1150, 1152, 1154: n = A,T,C or G
atgntgnntgngtnatatggnnntttttgnnttggtnnttntnnttttgtatttgnggttangtaantttngttttnntannnntnttagttaggnggngngancnagtnnctatagggcgaattggactccaccgcggtggcggccgcccgggcaggtacncggggacttccactcgtgcgtgaggctgagaggagccgganacgagaccagaggccgaactcgggttctgacaagatggccgggctgccccgcaggatcatcaaggaaacccagcgtttgctggcagaaccagttcctggcatcaaagccgaaccagatgagagcaacgcccgttattttcatgtggtcattgctggccctcagggattccccctttgaggggagggacttttaaactttgaactatttcctttncagaaagnaataccccagatggggcangccccntaaagtacccttgggcccggctcttagaaactagtgggaatccccccggggctgcagggaaattcgatattcaaggcctttaatccgaattaccgtccgaaccctttgaaggggggggggccccggggtaccccanccttttttngtttcccttttaagtnggagggggtttaaatttggcggccgcntttngggcgttaaaatnaattggggtccattaaggccttggtttttnccttgntgttgnaaaatttggtttattcccggnnttcnaccaaattttncccncaacnaaaccatttnccngaagnccccggggnaggcnattaaaaaggnggttaaaaaggccntnggggggttggcccntnantggaggttggaggccttaaacctncnacaatttaaanttngnggtttgggnggccttcnaacttggnccccggcctttttcccnanttcgggggaaaaaccnttnttccngggcccaagccttggcantttanattngaaaatnnggccccnaaacccccccngnngggaaaaagggccggttttttgcnntntttgggggngcctnttttccccggttntccntncggtttaaantggnatttcgttngggcnctccnggnccgttttngggtttncngggtgaaancnnggtnttaaaaccnttncttttnaaaangggggggntaantncngggttt

SEQ ID NO: 5485 - DNA, 1098 bp, Homo sapiens
  misc_feature 2, 3, 5, 6, 8, 9, 11, 12, 14, 15, 17, 18, 19, 21, 22, 23,24, 25, 26, 27, 28, 29, 31, 32, 33, 34, 37, 38, 39, 40,41, 42, 43, 44, 45, 47, 48, 49, 50, 52, 53, 54, 55, 56,57, 58, 59, 61, 63, 64, 65, 66, 68, 70, 71, 72, 73, 74,75, 76: n = A,T,C or G
  misc_feature 77, 78, 80, 81, 82, 85, 86, 88, 90, 91, 93, 96, 98, 99, 100,101, 102, 103, 106, 113, 123, 125, 128, 129, 130, 133, 144,155, 332, 407, 450, 451, 474, 556, 557, 634, 635, 636, 637,672, 674, 682, 693, 703, 715, 718, 770, 782, 809: n = A,T,C or G
  misc_feature 817, 854, 869, 881, 923, 965, 1004, 1013, 1024, 1028, 1052,1053, 1054, 1059, 1066, 1073, 1084: n = A,T,C or G
cnncnncnnanncnnannntnnnnnnnnngnnnntcnnnnnnnnnannnnannnnnnnntngnnnntngnnnnnnnnngnnnaannananngngangnnnnnnagnaattaangctttggaangnccnnnctntttggcgaatnggagctccacncgcggtggcggccgcccgggcaggtacggcttcggaggctaggccgccgctccagctttgcacgtttcgatcccaaaggccctttttagggccgaccacttgctcatctgaggagttggacacttgactgcgtaaagtgcaacagtaacgatgttggaaggtttatgattttactgngtatgtatttgggagaagaaattctgtcagctcccaaaggataaaccagcagttgctttattggtcttcagatgnggctgcaaacactttgaggactgaactaagcttaaaacacggnncctcggcccgctctagaactagngggatcccccggggcctgcagggaattccgatatcaaagccttatcggatacccgtcgacctcggaggggggggccccgggnncccaagccttttgttccctttagttgaggggtttaaattggcgccgccttggccgtaatcatggtcaatagctgggnnnnctgtggtgaaaattggtgtatcccgctcaccaatntnccacacanccatgaccgangcccggggangccaataaaagnggnaaaagcctgggggtgccctaaatggaaggggaagccttaacttcaccatttnaaattggcggtntggccgcctcacctggccccgcttttncccaaggnccgggggaaaaaccctgggtccggtggccccaagccntggcaatttaaaatngaaaatcggggnccaacccccctccggggggaagaaggcccgggttttgccttnatttggggggccgcctcttttcccgcttttccttgggcttcnacttggactccgcttggcgccttcgggtccgttccgggntgccgggcngaagccgggtntcangcttcaccttcaaaaggggcgggnnnattanccggttnattcccncaggaaatcanggggggaataacct

SEQ ID NO: 5486 - DNA, 1293 bp, Homo sapiens
  misc_feature 1, 2, 3, 4, 5, 6, 7, 8, 9, 10, 11, 12, 13, 14, 15, 16, 17,18, 19, 20, 21, 22, 23, 24, 25, 26, 27, 28, 29, 30, 31,32, 33, 34, 35, 36, 37, 38, 39, 40, 41, 42, 43, 44, 45,46, 47, 48, 49, 50, 51, 52, 53, 54, 55, 56, 57, 58, 59,60: n = A,T,C or G
  misc_feature 61, 62, 63, 64, 65, 66, 67, 68, 69, 70, 71, 72, 73, 74, 75,76, 77, 78, 79, 80, 81, 82, 83, 84, 85, 86, 87, 88, 89,90, 91, 92, 93, 94, 95, 96, 97, 98, 99, 100, 101, 102, 103,107, 110, 111, 113, 114, 115, 116, 117, 118, 119, 121: n = A,T,C or G
  misc_feature 122, 127, 128, 135, 623, 647, 654, 678, 713, 715, 721, 734,739, 789, 792, 803, 832, 907, 911, 1007, 1043, 1060, 1067,1094, 1120, 1121, 1128, 1136, 1140, 1141, 1198, 1221, 1230,1256, 1259, 1262, 1264, 1281, 1286, 1288, 1291, 1292: n = A,T,C or G
  misc_feature 1293: n = A,T,C or G
nnnnnnnnnnnnnnnnnnnnnnnnnnnnnnnnnnnnnnnnnnnnnnnnnnnnnnnnnnnnnnnnnnnnnnnnnnnnnnnnnnnnnnnnnnnnnnnnnnnnnnnaagnggnncnnnnnnnannctacnnactatanggcgaattggaagctccaccgcggtggcggcccgaggtacaaatgcagtcagctttggaatacgtttggggtagaagacaaaaatggaaactcatgggattccaatagccgagcccttcccatgttcctgggacatatccaattctagcacatccaccatttttaaataaacttaagtggattttcaagggtcccctggtccaccattaaaaaaaaaaataaagttacattaaattatttcaaaaactggggctttttttggctatttcttttgggggggaccacccaaggggaattgtgcaaggaaaaggaccattggggaagcttattggcccctcaaggaccaaaaggtggccatggggccatccaagccttgcccttctttcaattttaccaaaaggggtacccttgcccccgggggccgggcccgcttcttaaggaaacctaagtggggaatcccccccgggggccttgccaagggaaaattnccgaatattccaaaagcctttatncggaatnaccccgtgcggacccttccggaangggggggggggccccccggggtacccccaagcttntntggttnccccttttaagtnggaanggggtttaaatttggccgccgcctttgggggccgtaaaatccaatggggntcnattaggcttgntttcccctggtggtggaaaaaattgggtnaatccccgcttcaccaaatttgcccacccacaaaccaattacccgaagccccggggggaagcccattaaaaagtnggtnaaaaggcccttggggggtggcccttaaatggaagtggaagcctaaaccttcaccattttaaatttggccggttggccgcctcacttggcccccgcntttttcccaaggtccggggaaaaacccctgggccgnggcccaagcctggccanttaaatngaaaatccggggcccaacccccccccngggggaagaaggcccggtttttgccnntattttnggggcccncctnntttccgcctttcccttggcttcaacttggaacttccgcttggcggcctccggtcccntttcccggccttgccgggcgaancccgggtantcaagccttcaacttcaaaaaggccnggntanantacccgggtttattccnacaananaannn

SEQ ID NO: 5487 - DNA, 1202 bp, Homo sapiens
  misc_feature 3, 6, 7, 11, 13, 15, 16, 17, 20, 21, 22, 26, 28, 30, 33,34, 36, 39, 40, 41, 42, 43, 45, 53, 62, 65, 66, 69, 71,72, 73, 75, 80, 81, 84, 89, 90, 92, 96, 98, 99, 100, 102,105, 109, 114, 116, 120, 128, 130, 141, 146, 197, 213, 216: n = A,T,C or G
  misc_feature 219, 221, 222, 224, 226, 239, 361, 370, 440, 451, 467, 496,598, 613, 638, 641, 669, 671, 675, 743, 750, 794, 798, 801,802, 812, 827, 865, 923, 934, 974, 982, 989, 993, 996, 1007,1014, 1026, 1030, 1033, 1046, 1047, 1083, 1094, 1104: n = A,T,C or G
  misc_feature 1107, 1126, 1137, 1141, 1143, 1167, 1191: n = A,T,C or G
ccnctnnccananannntannncaanantnttnngnaannnnntnaaattttnttatataanatnnttntnnntnactannatnatttnntnaagnannnantgntatntatantnaggncgaattgnanctccaccgcgntggcngccagcccgggcaggtacaggcctccaagcccggtcttgttttggcgcgcnacaaaaaacttccganaanaananntncnccttcttggctanaaaaacgttccgcaagcaatgcagctgaaactttcgggttttcttttttttgtccctctctccttttttttaatatttttgtttttgccgcctttacgctccgaggcccatcctgccggagnacctcggcncgctctaagaactaagtggatcccccgggctgcagggaaattccgatatcaaagcttatcgatacccgtngaccctcgaanggggggggccccggtnacccaagccttttttgttcccttttaatngaggggttaaatttggcgccgcctttgggccgtaaattcaatgggtccataagccttggtttttccccttggtggtggaaaaatttggtttaattccccgcnttcaaccaaaatttncccaccaccaaaaccaattaaccgnaangcccccgggggaaggccattaaaaaagntnggtnaaaaaagcccctgggggggtggcccctaaaattggaagttggaaagccttaaaccttcaaccaatttnaaatttnggccgttttgccggccttcaacttggcccccgctttttcccaantccnggnnaaaaaccctngtcggtggccccaancttggcaatttaaaatggaaaatccgggccccaaacanccgccggggggaagaaaggcccggttttggccgttatttgggggccgcctcttttccngcttttccttngctttcaacttggacttccgccttgcggccttcgggtccntttcgggncttgccngccnaangccgggttttnaagcctnaacttcaaaaanggcnggnttaattacccggnntattcccacaaaaaaattcaaggggggaataaaccnccagggaaaangaaccattgntgnaaccaaaaaagggcccacncaaaaaagggnccangnaaacccttaaaaaaaaggcccccntttggcttggccgtttttttcccntaaggccccct

SEQ ID NO: 5488 - DNA, 337 bp, Homo sapiens
  misc_feature 3, 5, 21, 28, 29, 34, 36: n = A,T,C or G
gcntnctggtactcactctgntggcctnnttggnanctccaccgcggtggcggccgtgcgagccctctgccagatcactgatagcaccatgctgcaggctattgagcgctacatgaaacaagccattgtggacaaggtgcccagtgtctccagctctgccctcgtgtcttccttgcacctgctgaagtgcagctttgacgtggtcaagcgctgggtgaatgaggctcaggaggcagcatccagtgataacatcatggtccagtacctcggccgctctagaactagtggatcccccgggctgcaggaattcgatatcaagcttatcgataccgtcgac

SEQ ID NO: 5489 - DNA, 1057 bp, Homo sapiens
  misc_feature 1, 2, 3, 4, 5, 6, 7, 8, 9, 10, 11, 12, 13, 14, 16, 17, 18,19, 20, 21, 22, 23, 24, 25, 26, 27, 28, 29, 30, 31, 32,33, 34, 35, 36, 37, 38, 39, 40, 41, 42, 43, 44, 45, 46,47, 48, 49, 50, 52, 53, 55, 56, 57, 58, 59, 60, 61, 62,63: n = A,T,C or G
  misc_feature 64, 65, 66, 67, 69, 70, 71, 72, 73, 74, 75, 76, 77, 78, 79,80, 81, 82, 84, 85, 86, 87, 88, 89, 90, 91, 92, 93, 94,95, 96, 97, 98, 100, 101, 102, 103, 105, 106, 107, 110,111, 112, 113, 114, 115, 116, 117, 118, 119, 120, 121, 125: n = A,T,C or G
  misc_feature 128, 135, 279, 417, 466, 528, 549, 590, 591, 610, 730, 790,847, 879, 886, 889, 923, 947, 956, 975, 977, 981, 998, 1013,1018, 1032, 1041, 1056: n = A,T,C or G
nnnnnnnnnnnnnntnnnnnnnnnnnnnnnnnnnnnnnnnnnnnnnnnnnanntnnnnnnnnnnnnngnnnnnnnnnnnnnntnnnnnnnnnnnnnnnannnngnnnggnnnnnnnnnnnnatcnatnactatanggcgaattggagctccaccgcggtggcggccgcccgggcaggtacgcgggaggactcctcagttcaccttctcacaatgaggctccctgctcagctcctggggctgctaatgctctgggtctctggatccagtggggatattgngatgactcagtctccactctccctgtccgacacccctggagagccggcctccatctcctgcaggtctagtcagagcctcctccatagtaatgggaacaactatttggtttggtacctcggcccgctctagaactaagnggatcccccgggctgcagggaattcgatatcaagcttatcgatacccgncggacctccgaggggggggccccgggtacccaagccttttgttccctttaagtgaaggggtntaaattgcgccgcttggcgtnaatcatggtcataagcttgtttcctggtgtgaaaattggtnnatcccgctcacaaatttcncacacaaacataccgaagcccggggaagcataaagtgtaaaagcctggggtgccttaatgaagtggagctaactcacattaattggcgttggcgctcactgcccccgctttttccaagtncggggaaaacctggtgcggtgcccaagcttgccatttaaatgaaattcgggcccaaaccnccccggggggagaaggccgggttttgccgttattggggcccctcttttcccgctttncctcggcttcacttggaacttccgcttggcgnctccggntcngtttcccggctttgccgggccgaaacccggttantcaagcttcacttcaaaaagggcnggtaaatanccggtttattccaccaagnantcangggggaataaccgccanggaaaaagaaccatnttgangccaaaaaggcccngccaaaaanggcccaggaaacccnt

SEQ ID NO: 5490 - DNA, 490 bp, Homo sapiens
  misc_feature 29, 30, 32, 41, 42, 52, 54, 57, 58, 61, 64, 74, 81, 89, 90,409, 429, 452: n = A,T,C or G
tggccgtcgttttcacacaggaaacagcnntnaccatgatnnctggccgccntntcnncanagnaatcatagantactttnagcgggtnncgttatattatttgtcagaagttggggtctccgtgggcattgtgatccgtcccaggcagtggattaggaggccagaaggagatcccttccacggtgctaggctgagatggatcctctcagggcccaacagctggctgcggagctggaggtggagatgatggccgatatgtacaacagaatgaccagtgcctgccaccggaagtgtgtgcctcctcactacaaggaagcagagctctccaagggcgagtctgtgtgcctggaccgatgtgtctctaagtacctggacatccatgagcggatgggcaaaaagttgacagantttgtctatgcaggatgaanagctgatgaagagggtgcagcanagctctggcctgcatgaggtccctgtcagtatacaccc

SEQ ID NO: 5491 - DNA, 1277 bp, Homo sapiens
  misc_feature 2, 4, 5, 6, 7, 8, 9, 10, 11, 13, 15, 16, 17, 18, 19, 20,21, 23, 24, 25, 26, 27, 29, 30, 31, 32, 33, 34, 35, 36,38, 39, 40, 41, 42, 43, 44, 45, 46, 48, 50, 51, 52, 53,54, 55, 56, 57, 58, 59, 60, 61, 62, 63, 64, 65, 66, 67,68, 69: n = A,T,C or G
  misc_feature 70, 71, 72, 73, 74, 75, 77, 78, 79, 80, 82, 83, 84, 85, 86,87, 88, 89, 90, 91, 92, 93, 95, 96, 97, 99, 100, 101, 102,103, 104, 105, 106, 107, 108, 109, 110, 111, 112, 113, 115,116, 117, 118, 119, 120, 122, 123, 124, 126, 132, 133: n = A,T,C or G
  misc_feature 139, 142, 143, 144, 145, 148, 150, 151, 152, 157, 158, 160,163, 165, 171, 175, 214, 262, 337, 342, 354, 376, 378, 399,414, 430, 475, 515, 552, 558, 610, 649, 714, 725, 811, 865,887, 946, 1001, 1011, 1045, 1153, 1159, 1185, 1191: n = A,T,C or G
  misc_feature 1193, 1194, 1198, 1207, 1214, 1215, 1219, 1223, 1224, 1238,1242, 1251, 1267: n = A,T,C or G
tncnnnnnnnntnannnnnnnannnnntnnnnnnnntnnnnnnnnntnannnnnnnnnnnnnnnnnnnnnnnnnnannnntnnnnnnnnnnnntnnntnnnnnnnnnnnnnnntnnnnnnannnangttganncctttntannnnccncnnnctttnntntangncgaatngganctccaccgcggtggccgggcccgccccggggcaggttcncgggctcatgaggagagggaacatgctgagaaactgatgaagctgcanaaccaaccgaggtggcccgaatcttccttcagggatatcaagaaaccaggactgtgatgactgggagaagccggngctgnaatgcaatgggnagtggtgccattacatttgggnanaaaaaaaatgtgggaaatcangtcacttacctgggnaaacttgccaccaaanacttgggccacctggaccaaagaaaattggactccccatttttgnggttggaccttcatttggaaggacaccattttacccttgnaaattggaagccaagggttggaaaaagcccattccanaaaagnaatttgggggggttggaccccactgtggacccaacctttggccgccaaaagnatgggggggaagccgccccggaaaatccttgggcctttngggccggggaattaatccttctttttggaccaaagccaccaccccttgggggaaggaccaaggtnggaattaaatngaaaaaagcttaaaggccctccgggggccttaatttttcccccaataagccccgtgggggggggttggactttccccttgggtcancccaaaggggcaaggtgccaattgccattggtttgggggggttttccctttttnaccctttttcttattaaaagtngggtacccttccggggccccgcttcttaagaaacttaagtggggatccccccccggggncttgcaaggaaatttccgaatattcaaagcctttattccgattaccccgtccganccctcggaanggggggggggcccccggggacccccaaccttttntggtttcccccttttaagtggaaaggggtttaaattgccgccccctttggccgtaaaatccaatgggtccattagcttgttttcccttgttgtggaaaaattgtttantccccnttcaccaaatttccacaaccaaccanttaccnanncccngggaaccantaaaagnngttnaaannccctgggggggggncctnaatggaagnggaaccttaacctcancattttaaat

SEQ ID NO: 5492 - DNA, 1099 bp, Homo sapiens
  misc_feature 1, 2, 3, 4, 5, 8, 9, 11, 12, 13, 15, 20, 22, 23, 27, 30,31, 34, 36, 37, 38, 41, 42, 43, 44, 45, 47, 48, 49, 50,51, 52, 53, 55, 60, 61, 62, 64, 65, 67, 71, 74, 75, 76,77, 78, 80, 81, 84, 86, 89, 92, 93, 94, 97, 98, 100, 102,105: n = A,T,C or G
  misc_feature 111, 112, 114, 123, 128, 135, 207, 222, 317, 320, 380, 425,505, 526, 549, 659, 671, 714, 810, 823, 857, 886, 915, 931,950, 953, 965, 983, 1002, 1020, 1025, 1029, 1044, 1045,1046, 1050, 1060, 1071, 1073, 1074, 1083, 1086, 1089: n = A,T,C or G
nnnnnaanncnnntntgaananngaanttnnggntnnntcnnnnngnnnnnnngngattnnnanngnaatngannnnngnnagntntgnttnnntannangnggnggaaanngntgatttacntactntagggcnaattggagctccaccgcggtggcggccgaggtacgcggggacctcattcatttctacccggtctctagtagngcagcttcggctggngtcatcggtgtccttcctccgctgccgcccccgcaaggcttcgccgtcatcgaggccatttccagcgacttgtcgcacgcttttctatatacttngtnccccgccaaccgcaaccattgacgccatgtcgggttattcgagtgaccgagaccgcggcncgctctagaactaagtggatcccccgggctgcagggaattcgatnatcaagcttatcgatacccgtcgaccctcgagggggggggccccggtgcccagcttttggttccctttagtggaggggtntaattgccgccgcttggcgtnaaatcatggtccataagcttgtntcctgtggtgaaattgtgtatccggctcaccaattcccacaacaaaccattaccgaagcccggggagccataaaagtgtaaaagccctggggggtgccctaaatggagtngaagctaaactncaccattaatttgccgttgccgctcacttggccccgctttttncaagttcgggggaaaacccttgtgcgtggccccagccttggcattttaaatggaaattcgggccccaaccgccgcccgggggaagaaaggcccggnttttggccgttanttgggggccgcttctttcccgcttttccttcggnttcaacttggacttccgcttgcgccttcnggttcgttttcgggcttggccgggcgaangccgggtattcaagcntcaccttccaaaagggccnggntaataacccggngttatttcccacaagaantcaaggggggataaaccgncaaggggaaaaagaaacnattgntgangccaaaaagggcccnnnccanaaaagggccnagggaaacccntnnaaaaagggnccnggnttgtttggct

SEQ ID NO: 5493 - DNA, 1193 bp, Homo sapiens
  misc_feature 4, 5, 6, 7, 10, 12, 18, 20, 28, 30, 31, 34, 38, 40, 42, 43,44, 45, 46, 48, 50, 54, 56, 62, 72, 73, 79, 85, 86, 94,97, 98, 100, 101, 105, 106, 109, 110, 111, 113, 115, 118,120, 122, 128, 131, 142, 184, 194, 207, 384, 415, 430, 464: n = A,T,C or G
  misc_feature 510, 521, 586, 647, 655, 680, 711, 757, 765, 766, 777, 801,813, 817, 818, 825, 838, 845, 873, 875, 884, 885, 887, 910,911, 926, 942, 943, 961, 966, 970, 986, 990, 995, 1017,1032, 1033, 1038, 1040, 1041, 1047, 1089, 1094, 1098, 1102: n = A,T,C or G
  misc_feature 1108, 1110, 1112, 1113, 1118, 1120, 1121, 1132, 1136, 1141,1143, 1148, 1150, 1154, 1159, 1168, 1170, 1171, 1174, 1175,1179, 1185, 1189: n = A,T,C or G
cctnnnnctntntactancnttgatttntnnttnatgntnannnnncntntttntntatttnttcaccattnnttttcntttccnnttgatttntcnngnngtgnnggnnntntnttntncnttcttntantgcttcattgnatctccatcgtggttggcggctcgcccgggcaggtactcggngggatttccnctgagtgaccctnacaagtccttcttgatcctggactgggttaggtgccgctgttgctgctcgtgttgaatctagaaccgtagccagacatgggactggaggacgagcaaaagatgcttaccgaatccggagatcctgaggaggaggaagaggaagtaggaggaattagtgggatcccctaacaaccagntgaagaagagttaattgccgagccagtttgngagaaaattgtgtanaaggcccggggagccggcttaggagcctcttgtngaattgagccgttgtattccttctcgaatccaccatacaggaaagnagggatttgcnacccgggagggagcttctttttgacctttctttgccattgccgaaggggaacccatttggcggtngggcccccaccaaaaccttccttttaaaccaaactttggaaaaaaataaaaatggttggtngggacctntaaaatttccaacccccccaagttncttttcaattcaattcttggggggccattcnaagaaaataattttcccctttaatgggtttttttggggaattggtnacccttcnngggccccggcntccttaagaaaccttaagtggggnattccccccccngggnncttggcnaagggaaatttcngattatncaaaggctttaatcctgattaccccggncngaacccctnntnagggggggggggcccccgggttnnccccaaacttttttngtttcccctttttaanntggagggggtttaaattntgccngccnccttggggccgtaaancaantgggnccattaacctttttttcctggnggtggaaaaatgggnnattcncnnttcacnaaatttccacaccaaaacatttaccgaagcccggtgaagccnattanaagnttgnttaaancncnntgggngnntgcacttaatntagnggggngnctcancncacnaattnaatttggcntnnggnncttnaacttnggcnccct

SEQ ID NO: 5494 - DNA, 1087 bp, Homo sapiens
  misc_feature 3, 4, 9, 10, 11, 12, 13, 14, 15, 18, 22, 23, 25, 26, 27,28, 29, 30, 31, 32, 34, 38, 40, 41, 42, 43, 44, 45, 48,52, 55, 56, 59, 62, 65, 67, 69, 72, 76, 82, 84, 85, 86,89, 91, 92, 93, 94, 96, 97, 99, 101, 102, 104, 109, 110,111: n = A,T,C or G
  misc_feature 113, 115, 116, 137, 372, 428, 437, 572, 633, 638, 669, 700,731, 793, 808, 834, 860, 862, 863, 883, 894, 897, 907, 968,979, 1004, 1014, 1020, 1028, 1030, 1055, 1060, 1065, 1067,1074, 1077: n = A,T,C or G
acnncaatnnnnnnntgngtannannnnnnnntnaatntnnnnnnttngaantannatnaantanantngtnaatnataggntnnnttntnnnntnnangnngntggannnantnnattactatatggcgaatatgnactccaccgcggtggcaggccataggtacgtggggcttccggtggcggagcggcggattagccttcgcggggcaaaatggagctcgaggccatgagcagatataccagcccagtgaacccagctgtcttcccccatctgaccgtggtgcttttggccattggcatgttcttcaccgcctggttcttcgtttacgaggtcacctctaccaagtacctgcccgggcggccgctctanaactagtggatcccccgggctgcaaggaattcgatatcaagcttatcgatacccgngcgacctcngaggggggggccccggtaccccagcttttgttccctttagttggagggttaattgccgcgcttggggcgtaaatcatggtcatagcctgtttcctgtgtgaaaattgtttaatcccgcttcacaattccacacanaccattaccgaaggcccgggaagcataaaagtggtaaaagccttggggggtgccctaaatngaagntggagcctaacttcaacatttaaatttgcgnttggcgcctcaacttgccccgcttttccaanttcgggggaaaaccctggtgcgtgccaagcntgccatttaaatggaaatccgggcccaaaccgccgccggggggaagaaggccgggttttgcngtaatttggggccgncttctttcccgctttccttcggcttnacttgaacttccgcttgccgcttccngnnccgtttccggcttgccggcngaagccggtanttnaatcttcaantcaaaaaggccggttaatacccggtttattcccacaagaaattcaagggggaattaacccncaagggaaaangaaacattgtggaagccaaaaaaanggccaagcanaaaaangggcccangnaaacccttaaaaaaagggcccccgnttgcntggcnanttttttncantaaaggccct

SEQ ID NO: 5495 - DNA, 1212 bp, Homo sapiens
  misc_feature 5, 12, 19, 20, 23, 31, 32, 35, 37, 41, 43, 44, 50, 52, 54,55, 56, 59, 61, 65, 66, 67, 75, 76, 77, 81, 85, 88, 94,95, 96, 99, 101, 103, 104, 115, 118, 122, 123, 131, 133,135, 142, 154, 155, 165, 175, 181, 183, 185, 191, 196, 202: n = A,T,C or G
  misc_feature 205, 209, 214, 215, 216, 253, 376, 452, 493, 543, 555, 570,645, 650, 681, 697, 712, 729, 730, 741, 745, 760, 767, 769,791, 825, 854, 878, 890, 910, 915, 919, 922, 935, 940, 945,949, 950, 952, 958, 960, 968, 982, 984, 1006, 1007: n = A,T,C or G
  misc_feature 1015, 1024, 1027, 1029, 1041, 1043, 1052, 1058, 1069, 1109,1114, 1116, 1121, 1122, 1123, 1136, 1137, 1142, 1148, 1149,1151, 1158, 1159, 1174, 1179, 1181, 1183, 1195, 1203, 1205,1208: n = A,T,C or G
ccccncctgcanaaattanngtngttggatnnatnantttnanntcgggntngnnnatnancagnnnggtaagtnnntttngagnttntttatnnntangngnnactatttaggnttnctcnnttctctanantngaatagncagctccaccgnngttggcaggnctaagtaccntggtcngnancgccanactgnatggcnccnggangtggnnnacacggaaagcttatggccctaaagtcgacatatggnctctggggatcatggctattgagatggtagaaggagagcctccatacctcaatgaaaatcccttgagggccttgtacttttcatatcttttaccagttgttatctggagcaggaagaacaccntaaagtctggatttgcttcctccggaaaggatttaaataactaccagggttttctctccaatggcctatatttccntattcccggggaccagccaaggacaaaagaataaattttcncagggaagacccatgggaaaagccaaatggccaccataaatgggggcttnctcccccattgnaaagaagaatttctngttcaaatggcctttaaaaagtaaggtaatcctttcaaggtggccttaccaggttttggggaaaattatttttcnttttncaaaaaaaaggggaagaagaaaaattacctnggatccaaaggccttncccaatggcccaagnaaaaaaattaccaagtnnggccgccaagnaaanccttcttggtcattnctttctntngggggattggaaaatggtggantggggaaggtttttaccttccgggggcccaatgncctggacctcccccccggggattccaaangggtccggggccccgcttcttaanaaaacttaaggnggggattccccccccggggncttgncaanggnaaatttcccaatnatttnaaagncttnntncgaatnanccccggtnccggaaccctccgnangggggggggggccccccggggnncccccaanctttttttnggntncccctttttaantnggagggggntttaanattggccgccnccttggggccgggtaaaattcaattggggccaataaagcnttggntnttccnnntgggggaaaaatnngtttnttccgnntntcacaannttgcccccccaaaanattancnanacccgggggagncattaaangnggnaaat

SEQ ID NO: 5496 - DNA, 1104 bp, Homo sapiens
  misc_feature 2, 3, 5, 7, 8, 9, 10, 11, 14, 16, 18, 19, 20, 21, 23, 24,25, 27, 28, 29, 30, 31, 32, 34, 35, 36, 37, 39, 40, 42,43, 44, 45, 47, 48, 49, 50, 51, 55, 56, 58, 59, 63, 64,66, 70, 71, 73, 75, 76, 77, 78, 81, 82, 83, 84, 85, 89,91, 93: n = A,T,C or G
  misc_feature 99, 100, 103, 107, 108, 113, 115, 116, 119, 129, 349, 505,558, 617, 653, 697, 708, 711, 729, 736, 761, 785, 795, 797,825, 826, 835, 836, 876, 906, 926, 940, 946, 956, 976, 995,1015, 1045, 1052, 1085, 1086, 1088, 1090, 1095, 1096: n = A,T,C or G
  misc_feature 1104: n = A,T,C or G
cnnantnnnnnaantnannnnannntnnnnnncnnnnannannnnannnnnaatnntnnaatnnangagnntnannnntannnnntgtnanangtgggnnttngganntaatntnnttnggcgaattgnactccaccgcggtggcggccgaggtacgcgggtgaataaaaagacatacttctcagctgcaaatattatggagaattggggcacccacaggaatgaagagagaaagcagctccctaacttcaaaaccattttggtaccactctttggatgtgatagcattcctgctggcctgcgtggcaactatgatatttatgatcacaaaatgttgcctgttttgttnccgaaagcttgccaaaacaggaaagaagaagaaaaggggattagttatatcaaaagcctgaagtgggaatggaccaaaaagatggggactcctcctttattcccagcatggagggttttaaaatgggagggatttccttttttcctgccgaccaanaacgtctttttcacaaaccttacccctgtttaaagtcaaaaaatttatttttnccaagggaaattttaaataatggttaccctggccccggggcccggcccgcttcttaagnaacctaagtggggaatccccccccggggcttggcanggaaaatttccggatattccaaagccttattccgattacccggnccggaccttcngangggggggggcccccgggnaccccangctttttggtttccccttttaagtngaagggggttaaatttggccgccncttggggccngnaaattccattgggttcaataaagctggnntttccctgnngggggaaaaatttgggttattccccgcttccaccaaattnccccccaccaaaccattacccgaagccccngggggaagccattaaaaagnggttaaaagccctngggggnggcccttaantggaagtggagcctaaactncacaattaaatttggcggnttgcggctcacctgccccgntttttccaaatccggggaaaaaccctgtcnggggccnaactggcattaaattgaaattcggggccaaacnncncnggggnngaaggccn

SEQ ID NO: 5497 - DNA, 1073 bp, Homo sapiens
  misc_feature 1, 5, 7, 8, 9, 10, 12, 15, 18, 20, 21, 22, 23, 26, 27, 29,30, 31, 33, 34, 37, 43, 46, 47, 49, 51, 58, 59, 61, 62,63, 64, 65, 69, 72, 73, 75, 77, 78, 79, 81, 82, 83, 85,88, 89, 90, 93, 94, 98, 100, 103, 107, 111, 162, 167, 171,172: n = A,T,C or G
  misc_feature 173, 183, 185, 186, 188, 194, 199, 202, 208, 212, 217, 222,252, 256, 263, 284, 337, 394, 444, 458, 490, 539, 550, 561,562, 735, 805, 806, 813, 847, 854, 888, 889, 893, 907, 922,939, 960, 963, 969, 997, 999, 1001, 1008, 1017, 1026: n = A,T,C or G
  misc_feature 1035, 1044, 1052, 1063, 1065, 1066: n = A,T,C or G
ncctnannnngnaanttnannnngtnnannntnnatnattganttnngntnaaatttnngnnnnntgantannantnnntnnnanttnnnggnngggntncgncttntacnctcatatagggcgaattggactccaccgcggtggcggccgaggtacgcggngactnacannngacggtggtntnngngcacgnttgtnatnagatcntgantgttngtccnaatgccacacgacacatcagggtcctgagncagntcagaanaaaccacagaacctatgcaangagtgaagagagtgagccagagaggggtccaggccatggtggggacaccccanaactctgcttctgagcccacagctccccgcgtacctgcccgggccggccgctctagnaactagtggatcccccgggctgcagggaattccgatatcaaagcttatcngatacccgtcgacnctcggaggggggggggcccccgggtacccaancttttgttccctttagtggagggggtaaattgccgccgcttgggccgtnaatcaatgggncattagcctgnntcctgtggtgaaaattggttatccgctcacaaattccaccaccaacattaccgaagcccggggagcattaaaaagtgttaaaagcccttgggggttgccttaatggaagtgaagcctaaactcacatttaaatttggcgtttggccgccttcactggccccgcttttccaagntccggggaaaaccctggtgcggtggccaagcttgcatttaaatgaaatccggcccaacgcgccgggggannaagccgnttttgctttatttgggccgcttctttccgctttnccttcgntttacttgacttcgcttggcggccttcgggttcnntttncggcctggcgggcnaaagccggtaattcnaacttcaacttcaaaangggcggggtaaattacccggnttntttccnaccagaaattcaaggggggaataaaccncnanggaaaanaaacaattntggagcccnaaaaagggnccagccaanaaaggccnagggaaacccngnnaaaaaag

SEQ ID NO: 5498 - DNA, 862 bp, Homo sapiens
  misc_feature 451, 514, 557, 567, 598, 607, 613, 658, 660, 666, 681, 703,705, 707, 712, 717, 725, 726, 727, 728, 745, 748, 757, 766,768, 779, 789, 798, 802, 806, 814, 823, 841, 843, 844, 862: n = A,T,C or G
gggcgaattggagctccccgcggtggcggccgcccgggcaggtacagcagagagccaggaggtccaactgccgtagacaggaaggaattaaaattgtcctggaagacatctttactttatggaggcaggtggaaaccaaagttcgagctaaaatccgtaagatgaaggtgacaacaaaagtcaaccgtcatgacaaaatcaatggaaagaggaagaccgccaaagaacatctgaggaaactaagcatgaaagaacgtgagcacggagaaaaggagaggcaggtgtcagaggcagaggaaaaaaaaaaaaataaaaaaaaaaaaaaggtccctcggccgcccgggcaggtacatggcaattagaagttgtcatggcaaaagaaaaccacagctggcctgccacagccaacacaagaaccagaaaatggtagatgaaatgaaggaataaaggnggggtttattccttattataaaagaaaaaaaatatttcttcagcagtcttaacaaagacatcnagatcaaaatttccagtgttttgactccagccctttccccatnttcctcaaanagcagaggtagggagacagtttgaaagcaanccaagccantttttnttaaaaatttcccttagaaaacccctccaaattttgatttaaaantntaaaancttcttttaattttngctttttttaaaaaaattttantntnaaaanggccntgctttannnngacatggttattccttnccnagaaaaatnacccccaantncccctcttttnagttacattngctccaagntggnccancccacttnttttttttnaaccctttttgggccaantnntgtttttttaacccaaan

SEQ ID NO: 5499 - DNA, 686 bp, Homo sapiens
  misc_feature 2, 4, 22, 33, 44, 149, 196, 204, 205, 206, 210, 213, 220,227, 228, 229, 230, 231, 244, 247, 248, 249, 250, 251, 252,253, 254, 255, 256, 261, 271, 272, 276, 277, 279, 282, 283,284, 285, 286, 291, 292, 294, 295, 297, 298, 299, 302: n = A,T,C or G
  misc_feature 303, 304, 305, 306, 307, 308, 309, 310, 311, 312, 313, 314,315, 317, 318, 319, 320, 321, 328, 331, 334, 336, 343, 344,347, 348, 349, 350, 351, 353, 355, 359, 360, 362, 363, 368,369, 370, 371, 372, 373, 379, 384, 385, 387, 391, 392: n = A,T,C or G
  misc_feature 393, 396, 397, 398, 399, 402, 405, 406, 407, 408, 413, 415,416, 426, 430, 433, 434, 438, 440, 441, 442, 445, 448, 463,468, 469, 471, 486, 487, 488, 489, 490, 491, 493, 494, 496,497, 499, 500, 501, 502, 505, 510, 511, 515, 517, 518: n = A,T,C or G
  misc_feature 520, 527, 528, 529, 535, 536, 539, 557, 559, 562, 565, 567,569, 570, 573, 581, 582, 584, 585, 590, 599, 602, 604, 608,616, 617, 619, 623, 626, 627, 630, 632, 633, 634, 635, 636,637, 638, 641, 643, 644, 648, 651, 653, 655, 658, 661: n = A,T,C or G
  misc_feature 662, 665, 669, 676, 677: n = A,T,C or G
gngnttttcgtgatacgaactncactcttatgntcgacttggantctaccaccgcggtggcggccgttaaacatgtgtcactgggcaggcggtgcctctaatactggtgatgctagcaggtgatgtttttggtaaacaggcggtgtaanatttgccgagttccttttactttttttaatctttcattatagaacancacctgcnnncttntgnccattgnggatatnnnnnttttttttttttnttnnnnnnnnnnttttnttctcttttnntttnncnttnnnnnctttnntnntnnntcnnnnnnnnnnnnnntnnnnnttttttnttnttncntcttttnnttnnnnntntntttnntnnctttnnnnnntttttnttttnntntttnnnttnnnnttnttnnnnttttntnntttttctttncccnttnntttntnnnctnttnttttttttttttttnttctnntnctttttttttttttnnnnnncnntnntnnnnttnttttnntttntnntntttttannntttttnnccnttttttttttttttctcntnttnttntntnnctntttttctnntnnttttntttttttcnttntntttntctttcanncntttnttnnttnannnnnnnttntnntttnttntnanttnttnnaanaaanataaacnnaaaataaat

SEQ ID NO: 5500 - DNA, 1318 bp, Homo sapiens
  misc_feature 6, 13, 15, 16, 18, 19, 20, 21, 26, 28, 31, 34, 41, 43, 47,49, 51, 52, 54, 60, 62, 66, 71, 74, 75, 79, 86, 88, 91,98, 100, 105, 106, 109, 110, 111, 113, 115, 118, 120, 121,135, 136, 140, 143, 145, 148, 149, 156, 173, 176, 180, 181: n = A,T,C or G
  misc_feature 195, 206, 210, 214, 220, 229, 230, 269, 309, 345, 367, 420,446, 474, 478, 493, 495, 499, 502, 564, 568, 578, 589, 594,595, 611, 613, 624, 627, 631, 646, 655, 697, 719, 720, 722,743, 746, 747, 748, 751, 755, 760, 769, 774, 788, 792: n = A,T,C or G
  misc_feature 793, 807, 810, 811, 819, 820, 828, 829, 836, 845, 854, 860,866, 868, 871, 878, 887, 891, 899, 906, 916, 917, 924, 926,933, 937, 938, 946, 951, 952, 964, 969, 972, 984, 990, 994,996, 999, 1001, 1008, 1011, 1013, 1014, 1019, 1021: n = A,T,C or G
  misc_feature 1024, 1044, 1046, 1048, 1050, 1051, 1057, 1064, 1074, 1078,1082, 1084, 1091, 1100, 1109, 1115, 1118, 1135, 1137, 1139,1145, 1146, 1150, 1155, 1160, 1162, 1174, 1178, 1186, 1196,1201, 1203, 1210, 1213, 1218, 1224, 1225, 1227, 1231: n = A,T,C or G
  misc_feature 1242, 1247, 1251, 1255, 1256, 1267, 1270, 1275, 1287, 1291,1297, 1302, 1307, 1308, 1309, 1313, 1315: n = A,T,C or G
ctcccncctaccntnntnnnnttttntnaantcntcttatnantttntnanntnatattntntttnatttnatnngtgntaaaatnangcntatccangncaagnnggnnntngnganannaatgacttcacgannaatnttnantgnntctcctntgtatgatgcctgcctnatnttannccgggtggtacatnaatctggatgnctancaangggtancagtcttcnnatgctccgtgatgcattgaggctctgcacaaccactacncgcagaagagcctctccctgtccccgggtaaatgagtgcnacggccgctctaaaactagttggatccccccgggcntgcaagggaatttcgatatcanagctttatcgataccgtctgacctccgtagaggggggggccccggttacccancctttttgtgtccctttagttggagnggtttaaaattgccgccgcttgggccgntaantcattgggtcataancntgtnttnccctgttgttgaaaaatatgtttaatcccgcttcaacaatttttccacaacaaaccaatacngaantcccgggggnaagctattaanatgtnnttaaaaggcccttggngngttggcccttnaanttgnaggtggaagccttanaacctttcnaccaatttaaaattttggccggtatggtcggccttccacctnggcccccagctttttttcccanntnaccgtggggaaaaaacccttnttnnntgncccnaatcnctttgccantttanaatggtaaaattcngggnnccaaaacctgccgnccnngaggggannaagggccnngtttttngccgtttantttgggggnccggcntccctntntcnacctttntccatgcgncttncaactttngaacatncgacttgtcnncctccgngntccggtntacnngccttgcngggcnnaaagccggggtntttcnaanccttccacttcnaaaaanggcngngananattaccnggntnnattcncnacnaggaaattcaatggggggantnancnnccagtnggaaaangaaaccattnttgnaagncnaaaaaangggcccagnccaaaaaangccctnagnaaacccgttaaaaaaangngncccccnntttngcttnggccntntttttccaatanatgnctttccgncccccccttngatgnangcatttnaanaatanaatttnnancgcnttcaagtttcnatganggtnggcnnaaaacccctcnccnggganctttttaaaaangatnccccanggcgnttttnnncccntntgg

SEQ ID NO: 5501 - DNA, 463 bp, Homo sapiens
  misc_feature 18, 43, 86, 88, 89, 264, 388, 407, 432: n = A,T,C or G
cccccttcagcatttacnatcgggcgaattttccctctagatncatgctcgagcggccgccagtgtgatggatatctgcagaattntnnttagcgtggtcgcggccgaggtacttattggcacaaattcgggcagcctccagggcttcagaggacagctgctcatattcatctgacaccatgtggccacaaagcggaaactcatccacttttgcctttttccgccccaggtcaaaaatgcgaatcttggcatcagggacacctnggcagaagcgagactttgggtacctgcccgggcggccgctcgaaattccagcacactggcggccgttactagtggatccgagctcggtaccaagcttggcggtaatcatggtcatagctgtttnctgtgtgaaattgttatcncgctcacaattccacacaacatacnagccggaagcataaagtgtaaagcctggggt

SEQ ID NO: 5502 - DNA, 1070 bp, Homo sapiens
  misc_feature 1, 3, 4, 6, 9, 12, 14, 22, 23, 29, 30, 32, 33, 34, 35, 37,41, 52, 53, 54, 55, 57, 58, 59, 61, 71, 72, 73, 77, 80,81, 84, 86, 87, 88, 89, 91, 100, 102, 103, 104, 105, 111,423, 438, 523, 595, 702, 703, 710, 727, 796, 805, 838, 840: n = A,T,C or G
  misc_feature 842, 849, 871, 897, 911, 912, 944, 946, 950, 957, 959, 966,970, 978, 980, 987, 999, 1000, 1003, 1005, 1022, 1024, 1025,1028, 1051, 1064, 1066: n = A,T,C or G
ncnngngtnttnanatttttanntgtaanntnnnnanatanttataggtatnnnntnnntntattcgtacnnnaatntgnnttntnnnnanaaggtgttntnnnntgtatncgatcactatagggcgaattggactccaccgcggtggcggccgcccgggcaggtctgaggttgcatcataaatacaaaggactgaagttataaaagagaaaagagaagtttgctgctaaaatgaatctgagcaatatggaatattttgtgccacacacaaaaagcatctggcacaatgtttttgtttggtttggtttggtgttgtaaagagagaggatcttgctatgtttgccagactggtctcaaactcctggtctcaagtcatcctctcaccttggcctcccaaagcattaggattacaggacattgagnacatcacacccagcncccagcacaaatgttggaatgttacctccggccgctctaagaaacttagtgggatcccccgggcttgcagggaattccgaatatnaaagcttatcggataccgtcggaccctcggaggggggggccccggtacccagccttttgttcccttttagtngaggggttaaattgccgccgcttgggcgtaatcatgggtcattaggctggttttcctgttggtgaaaaattggttatcccgcttcacaaattccacacaaccatacnnagcccgnggaagccattaaaagtngtaaaaagcccttgggggttgcccttaattgagtggagcctaaacttcacatttaaatttgccgtttgncgcctcacntgccccgcttttccagtccggggaaaaccttgntngntgcccancttgccatttaaatggaaattngggcccaacccctccgggggaagaanggcgggtttttgcnntattttggggccgccttttttccgcttttacntnggcntcaactngnacttcgncttngccgcttncnggttcgnttccggctggcnnggngnagccggttattaagctncnnttnaaaaaggcggggtattatccggnttttccccaaaantngggg

SEQ ID NO: 5503 - DNA, 819 bp, Homo sapiens
  misc_feature 2, 5, 7, 9, 12, 16, 21, 22, 26, 33, 35, 43, 44, 541, 589,604, 618, 632, 635, 691, 723, 781, 795, 813: n = A,T,C or G
gnttngncncgnagtncgcgnnatangacttantntatggccnnattggagctccaccgcggtggcggccgcccgggcaggtacctttgtgtctagttttaaccttttgatcccaggtcctgccatgaccttcaacatgggggccaggtcttcagcatagcggcacataggaccagtgcacagaaacaactcctgggctcccacagccaagggaaactgacctttgttgggaaccacacctggagaaggcttgtgtccaaatataccattgaagaaagcaggcattcgaatgctaccaccaatatcagagcccacaccaataactgagcaggcagctgccagtgtgcagccctcaccaccagaacttccacctacaatatgctgtaaatcatatgggttgtttgatcggccatagatcttgttactggattcataccacatacacaactcactacagttggttatgccaagaggaatggcaccagctcccttcagtaatgccaccacagtgggcatctgttttggcaatggcatcacgacngttcatgagtccagaagaattgggcattccttgtaactggaaagcttnctttgactgtcaaangaaccccaaggaanggccatttattttncanggtggcttcatcttcctgcttctctgcaagcttttgatctacagcatgagccttcnttatcgtttcttaaacctgtacttgggcgctntaaactatggatcccccggcttgaggaattcatttcaacttatcgatccgtcaactcnagggggggcccgtnccaactttgttcctttantgaggg

SEQ ID NO: 5504 - DNA, 1118 bp, Homo sapiens
  misc_feature 4, 5, 17, 34, 67, 171, 182, 237, 240, 287, 336, 346, 366,370, 398, 441, 460, 461, 468, 497, 506, 511, 529, 536, 557,577, 582, 597, 603, 609, 621, 647, 653, 659, 665, 673, 686,691, 714, 720, 724, 732, 734, 745, 747, 750, 754, 755: n = A,T,C or G
  misc_feature 767, 768, 784, 803, 806, 844, 877, 884, 901, 903, 911, 912,913, 914, 916, 917, 918, 919, 920, 921, 922, 923, 924, 925,928, 929, 932, 933, 934, 935, 936, 937, 938, 939, 940, 941,942, 943, 944, 945, 946, 947, 948, 949, 950, 951, 952: n = A,T,C or G
  misc_feature 953, 954, 955, 956, 957, 958, 959, 960, 961, 962, 963, 964,965, 966, 967, 968, 969, 970, 971, 972, 973, 974, 975, 976,977, 978, 979, 980, 981, 982, 983, 984, 985, 986, 987, 988,989, 990, 991, 992, 993, 994, 995, 996, 997, 998, 999: n = A,T,C or G
  misc_feature 1000, 1001, 1002, 1003, 1004, 1005, 1006, 1007, 1008, 1009,1010, 1011, 1012, 1013, 1014, 1015, 1016, 1017, 1018, 1019,1020, 1021, 1022, 1023, 1024, 1025, 1026, 1027, 1028, 1029,1030, 1031, 1032, 1033, 1034, 1035, 1036, 1037, 1038: n = A,T,C or G
  misc_feature 1039, 1040, 1041, 1042, 1043, 1044, 1045, 1046, 1047, 1048,1049, 1050, 1051, 1052, 1053, 1054, 1055, 1056, 1057, 1058,1059, 1060, 1061, 1062, 1063, 1064, 1065, 1066, 1067, 1068,1069, 1070, 1071, 1072, 1073, 1074, 1075, 1076, 1077: n = A,T,C or G
  misc_feature 1078, 1079, 1080, 1081, 1082, 1083, 1084, 1085, 1086, 1087,1088, 1089, 1090, 1091, 1092, 1093, 1094, 1095, 1096, 1097,1098, 1099, 1100, 1101, 1102, 1104, 1105, 1106, 1107, 1108,1109, 1110, 1111, 1112, 1113, 1114, 1115, 1116, 1117: n = A,T,C or G
ggtnngacgcgcgttanacgacttactatagggncgaattggaagctccaccgcggtggcggccgangtacttgttgttgctttgtttggggggtgtggtggtctccactcccgccttgacggggctgctatctgccttccaggccacttgtcacggcttccgggtagaantcacttatganacacaccagtgtggccttgttggcttgaaactcctcaaaagaaggccgggaacanaantgaacccaagggggcaacccttggggcttgacctaaggaacggtcanctttggtcccttccccccgaaaaacccacaatgaatttgtttgtcaaancccgcaaaantttaccaagttaattagttnaagncctttaattcctttaaacccttgggggncccccacttgaattgggtcccaaaggggggaaactgggggggnccccttggaaccttgggannccccggnaaaaaaaatttttttttaaaggggatttncccttgaanggggnccaccttcaaccttgggnttttttnttaaaaatcaacccccccccnccaaaggggggcccttgggnccctngggcttttttttggnttgggnaaaccncccccaaaaaantttttttttttttttgcccaaaaaancctttncccccnggggcngggccccntttttttaaaaanataantggggatttccccccccggggcnttttanaggnaaatttcnantattttaaagncnttntttnnataaaccccgtnngaaaaccctttaaaangggggggggggcccccggnaancccaaactttttttttttccccctttttaaatggaaanggggtttaaatttgggccccccctttggggggnaaaaaanaagggggcaaaaaaacngnttttcccnnnngnnnnnnnnnnagnnaannnnnnnnnnnnnnnnnnnnnnnnnnnnnnnnnnnnnnnnnnnnnnnnnnnnnnnnnnnnnnnnnnnnnnnnnnnnnnnnnnnnnnnnnnnnnnnnnnnnnnnnnnnnnnnnnnnnnnnnnnnnnnnnnnnnnnnnnnnnnnnnnnnnnnnnnnnnnnnnnnnnnnnnnnngnnnnnnnnnnnnnng

SEQ ID NO: 5505 - DNA, 475 bp, Homo sapiens
  misc_feature 424, 475: n = A,T,C or G
ggagctccccgcggtggcggccgaggtactttctttttttttcttttttctttttttggtcatcagctatcgtcagtgtattttatgtgtggcccaagacaattcttcttccagtgtggcccagggaaatcaaaagattgaacactcctgtgctacggggtgagaaaatccaggcacgacctagcagactccctaagttctggggagatcaagatggctagagttctcagggcagaatcctggtgaggaaacagatatatagagagaacttgtgacatctacagaggctgtctctcaagttttcagcagaatactgacaatcacattcatgtgaggaatctttctgagactggagaaggaactgcttgaaaggagtgaaaggaacaatactcagagtgcacataagcctggaaatactgccttnctctctaccagattagagggtcacataattggtggggtattggttaagagn

SEQ ID NO: 5506 - DNA, 554 bp, Homo sapiens
  misc_feature 2, 4, 5, 7, 10, 13, 18, 19, 21, 26, 28, 29, 34, 37, 39, 40,42, 44, 45, 46, 47, 51, 55, 57, 58, 66, 67, 69, 74, 75,77, 78, 82, 84, 86, 87, 91, 94, 96, 97, 98, 101, 116, 453,482, 554: n = A,T,C or G
tncnntntantgnaattnnanatgtngnntaatnttntnncncnnnnttgncgcntnnaagaaggnngnttgtnnannagtnangnnttgngtntnnntgnactcccccggtggcngccgaggtacgcgggagagacaaaaacagaagaggggaaacatgtttcctactgacgacaggtgattacacgtgtgcttctgatggagggatcaggaaagataactgcaaagaggttgtcattactggttacacgcaagccgaggccagatctcttacttaatgacttggggaaggcacaaaacatgagagaaagtgttgtacctgcccgggcggccgctctagaactagtggatcccccgggctgcaggaattcgatatcaagcttatcgataccgtcgacctcgagggggggcccggtacccagcttttgttccctttagtgagggttaattgcncgcttggcgtaatcatggtcatagctgtntcctgtgtgaaattgttatccgctcacaattccacacaacatacgagccgggagcataaagtgtaaagcctn

SEQ ID NO: 5507 - DNA, 1288 bp, Homo sapiens
  misc_feature 2, 3, 5, 8, 10, 18, 22, 23, 27, 30, 32, 33, 37, 38, 42, 47,49, 50, 52, 54, 55, 56, 60, 63, 70, 71, 78, 79, 82, 83,84, 89, 92, 98, 102, 104, 105, 110, 112, 129, 133, 136,139, 141, 143, 161, 179, 216, 217, 246, 297, 324, 356, 378: n = A,T,C or G
  misc_feature 426, 440, 444, 456, 475, 477, 491, 509, 543, 569, 593, 631,638, 639, 648, 678, 679, 686, 688, 702, 712, 722, 753, 759,776, 780, 787, 804, 814, 818, 823, 827, 831, 835, 839, 846,847, 854, 864, 868, 876, 887, 894, 899, 901, 907, 925: n = A,T,C or G
  misc_feature 938, 941, 960, 961, 966, 968, 972, 974, 976, 979, 987, 988,997, 998, 1004, 1016, 1036, 1039, 1050, 1053, 1061, 1063,1069, 1082, 1095, 1121, 1122, 1126, 1136, 1139, 1142, 1152,1154, 1164, 1177, 1183, 1188, 1189, 1194, 1224, 1247: n = A,T,C or G
  misc_feature 1250, 1256, 1261, 1266, 1273, 1276, 1283, 1284: n = A,T,C or G
cnncnctntngattatgnttanntttnatntnntacnntacntattntnnantnnntttnaanaatcttnnttttttnnttnnntctcnttnttattngggnanntattnanatcattttaatctattnctcntanggntnanttggagctccaccgcggntggcggcccgccagaaangtttgctgagggcaatcactccctggtgccgggctanngggaggttatgtacctgcccggtctttcngctctagaactagtggatcccccgggctgcaggaattcgatatcaagcttntcgatacccgtcgacctcgaggggggngccccggtacccagcttttgttccctttagtngagggttaattggcgccgcttnggccgtaatcatgggtcatagcctgttttccttgtgtggaaaattggntattccgcttcacnaatntccaacacaacnattacggaagcccgggggnangcattaaaaaggtngtaaaaggcccttggggngtggccccttaaatggaagttgaagccttaaacnttcaccaatttaattttgcccgtttngccggccttcaacttggcccccgncttttcccaagttctgggggaaaaaccctgttctgttngcccaannccttggcantttaaattggaaattccgggccccaaacgnnctccggngnggaggaagggccgngttttttggncggtaatttngggggccggccttcctttccccgccttttcnccttcngccttcaacttggaacnttcngccttgncggccttcgggtttcgntttctgggcnttgnccggnccgnaagnccgngttnttccaannctccacnttcaaaaaangggnccgggttnaaattaacccncgttttnattcncnccaagnaaaattccaatggggggnatttaaaccgccnaanggaaaaaagaaaaccattnnttggnangcanananaanggccccannccacaaaanngggccnaagggaaaaccncgtttaaaaaaaaggggccnccngttttgcctgngcncgtttttntntccaantaagggccttccngccccccccctgncccgaaggcctttaccaaaaaaaatnntgancgcttcaaanttnaanaaggtgggcnanaaacccccgnacctgggtacctnttatanggatnncccangggccggttttccccccttggggaaagccnttccctttcggggccgccttttnccngtgttncgaanccttngcccgcnttnacccggnntacc

SEQ ID NO: 5508 - DNA, 1318 bp, Homo sapiens
  misc_feature 2, 6, 8, 12, 16, 23, 29, 31, 33, 37, 39, 40, 41, 42, 44,45, 47, 54, 57, 59, 62, 63, 65, 74, 75, 76, 79, 80, 83,85, 87, 95, 97, 98, 100, 101, 102, 103, 107, 108, 113, 114,116, 117, 122, 123, 125, 126, 128, 131, 133, 134, 143, 145: n = A,T,C or G
  misc_feature 152, 154, 156, 182, 220, 224, 228, 230, 231, 255, 256, 277,337, 349, 360, 379, 386, 392, 411, 423, 439, 476, 492, 515,545, 591, 598, 601, 612, 615, 625, 637, 640, 651, 652, 661,662, 673, 675, 699, 709, 720, 757, 762, 773, 779, 797: n = A,T,C or G
  misc_feature 814, 842, 844, 869, 889, 896, 915, 926, 931, 935, 942, 952,958, 963, 964, 966, 967, 973, 976, 977, 982, 983, 984, 985,992, 993, 997, 999, 1012, 1013, 1034, 1055, 1059, 1063,1081, 1087, 1091, 1097, 1105, 1106, 1111, 1113, 1128, 1137: n = A,T,C or G
  misc_feature 1147, 1148, 1173, 1176, 1183, 1184, 1186, 1188, 1189, 1196,1198, 1200, 1202, 1203, 1215, 1218, 1219, 1222, 1224, 1231,1236, 1237, 1245, 1246, 1256, 1260, 1261, 1263, 1266, 1267,1271, 1279, 1286, 1307, 1313, 1315, 1316, 1317, 1318: n = A,T,C or G
cncgcntntacnatgntattttntttaantnanatanannnngnntntttgatngangntanntntattatatnnntanntantntnaatacttntnntnnnncagnnagagnntnntgtgnntnntngtntnntatttttgntntgaattngnanctccacctgcggtggcggccgaggtncacagcactcagtcaaggattatcctttgaattaatgncatncagngnncctgacctttcttcacattacatnntgttctcctgggcagcgttgngatctttgccaccttcgtgactttatgcaatgcatcatgctattttcatacctaatgagnggagttccaggnagtattcaacncagggaaatgcattggatnctcaacngggaanacaaacatccccagattanaacttcgggagntggccaggccttgacnaaacttgttgaagcacaatggcacttttgccttaccnaaaaccaggaaaattntttcaatggtttggcaccccttngtttatcttaccacccttggttggggtttnattggaaccaaataagaaccaaaccttgccccaaaaaggaaattcntttccanagnaaagggggagngancttggccaangttaattaatcngtngggttggggannaaagtaaannggaaccccccnanaaaaaaagaaccccttgtttttcntggttccagnttggaaattgnggattaaaattccttaattggtggccttttcttaagnttaangggccacccangggggnttcccccaaggggcccangggccccttcaatttcnttccctttctgggcccctttttaaatangnttccaaatggatttcggtgggtaangccccattggccccttaatnaaggtanaaaaaaaaggaattttttntggaaggcctnccccncttntatcttngtaggagagntgggtnggttnncnnggtttngcnnacaannnntttaaanntaanangtttttcccttgnnccccgggggccgggccccggntttttaaaaaaacttaagttngggnattncccccccggggaccttgncagggnaaanttttcntattattnnaaagncntttattcggggattncccggcaanacccctttannggggggggggccccgggttaccccnaanttttttnngntnnccctttntnangnnggggggggggtnaannttngncgcgccntgggnngttaatcnntgggagaatnggcnngngtnncccngtgggggnaaatttnttaatccgggttaacaaattntccacnannnn

SEQ ID NO: 5509 - DNA, 459 bp, Homo sapiens
  misc_feature 1, 2, 3, 4, 5: n = A,T,C or G
nnnnngccctatacgatactatagggcgaattggagctccaccgcggtggcggccgaggtaccaggctaagaagctgctaatactctgactggccctgcaggagagggtggctctttccccaggagacgaagacagggtggccggagactgtgtcaacacaatttctccggtggtatctgggagccagagtagcaggaggaagagaagctgagctggggcttccatggttccctctgggtcctaactgagcagttcctcccccgcgtacctgcccgggcggccgctctagaactagtggatcccccgggctgcaggaattcgatatcaagcttatcgataccgtcgacctcgagggggggcccggtacccagcttttgttccctttagtgaggggttaatttgcgccgcttgggcgtaatcatggtcatagccttgtttcctgtgtgaaattgtttatc

SEQ ID NO: 5510 - DNA, 1187 bp, Homo sapiens
  misc_feature 1, 11, 13, 15, 16, 18, 23, 29, 30, 33, 34, 35, 37, 38, 41,42, 43, 52, 55, 59, 61, 64, 65, 66, 69, 72, 73, 74, 75,77, 78, 83, 84, 87, 88, 89, 90, 92, 93, 95, 96, 97, 98,100, 102, 104, 105, 106, 107, 108, 110, 111, 115, 116, 117: n = A,T,C or G
  misc_feature 118, 124, 127, 128, 148, 157, 172, 199, 201, 209, 211, 228,235, 276, 286, 419, 446, 464, 490, 491, 517, 537, 549, 559,589, 601, 627, 658, 747, 784, 792, 793, 803, 820, 845, 847,850, 851, 904, 906, 916, 932, 965, 967, 1000, 1015: n = A,T,C or G
  misc_feature 1022, 1023, 1025, 1026, 1036, 1039, 1040, 1055, 1078, 1084,1088, 1093, 1103, 1104, 1123, 1169, 1186: n = A,T,C or G
ncacaccctananannantatantataanntannntnntannntatattatnatnttantnatnnntanttnnnnannctttnntcnnnncnngnnnnangnannnnngnncggnnnnacactnatnntaattcgagctgcacctccnccgcggtgncaggtccaggtacanatttcaaaccaagctgcatttactccntngagacaangnaaaaaagttgcttccanatggttncattgttaattccataatcgcatttacaatatcattactgntgttcttcanggctcggactgcctttgctctcgacacatttgcttgtgacatgaccaattctatgtccttaacttctacacctgtttcatcgacctcttcctcttcactctcctcttgtacctgcccgggcggccgcatctanaactagtgggatcccccgggcttgcangaattctgatattcaaangcttatcgataacccgtcggacctcnnaggggggggggccccgggtaccccanctttttgtttccctttttangttgaggggttnaaatttgccnccgcctttgggcgattaattcaattgggtncattaggcctgnttttcccttggtggttggaaaaattnggttaattcccggcttccaccaaatttcccnccaacaaaccaattaccgaaagccccggggggaggccaattaaaaaagttggtaaaaaagcccctgggggggtgcccctaaatggaagnttggaggcctaaacccccaccaattttaaattttggncgtttggnnggcctccacntggcccccgcctttttnccaaattcggggggaaaaaccctgntncgnnggcccaagccttgcaatttaaattgaaaattcgggccccaacccccccccggngnaaggaagggnccggttttggccgtantttggggccgccttttttccccgcttttccttngncttcaactggaccttcgcttgccgccttcgggnccgttttccggcttncggggcnnanncgggtttttnaanncttcaccttcaaaangggcgggtaaataaccgggtttnttcccnccanaaaantcaagggggnnataaaccccaagggaaaanaaacatttttgatgcccaaaaaaggccccccaaaaagaggccatgnaaaaccctttaaaaaang

SEQ ID NO: 5511 - DNA, 1202 bp, Homo sapiens
  misc_feature 4, 9, 11, 12, 15, 18, 23, 30, 31, 33, 38, 40, 43, 44, 45,55, 59, 62, 65, 67, 69, 70, 74, 75, 79, 80, 84, 85, 90,91, 92, 93, 96, 102, 105, 106, 111, 114, 116, 120, 129,140, 150, 152, 161, 165, 379, 462, 483, 489, 522, 536, 564,597: n = A,T,C or G
  misc_feature 621, 660, 707, 740, 746, 784, 789, 822, 850, 863, 867, 875,876, 880, 891, 896, 929, 939, 941, 942, 963, 964, 979, 980,981, 991, 997, 1002, 1009, 1011, 1015, 1048, 1052, 1054,1063, 1066, 1069, 1070, 1077, 1099, 1121, 1124, 1127: n = A,T,C or G
  misc_feature 1128, 1130, 1137, 1148, 1152, 1155, 1158, 1161, 1167, 1169,1170, 1171, 1172, 1174, 1177, 1181, 1183, 1184, 1192, 1194,1195: n = A,T,C or G
cccncgacncnngtnacnatgantccttgnntntcatnanttnnnccgtagttgnctgnttnctntncnnaganntgtnntcanntttcnnnnccnagcagngannggggnggngnatgngtgtcacantctcctattantcataattgnanctccaccgnggtnggcggccgcccgggcaggtacacttgaaaccaaatttctaaaacttgtttttcttaaaaaatagttgttgtaacattaaaccataacctaatcagtgtgttcactatgcttccacactagccagtcttctcacacttcttctggtttcaagtctcaaggcctgacagacagtaagggcttggaagattttttttctttacaattcagtcttcangcaacttggagagctttcttcatgttgtcaagcaaacagagcccgtatctgcatggttccgttaagccataggagaccgggtntttgaatatctttcccaagtngataantccggcttctaacctgtcagaaagaattggggntcaaacaaaaacantaaatccttggggggacatacttgggcncaatcaagggaagaaaaagggtggttttggtcnagtttggttttcattaaacccagnatttggagggaaggggacaaaacttggctcttgcccaantttcttgggattttccttttatttttcaagccaaaaccacctttttnttttaaaaagccttgggacctggtggttggggncacttnaattcccaaggtggaatggaaaataaatccattcaaanggggnttttggtttggctttggtcttttgggaattttnattattaagaagccttttcttttccaanaattggttccttnggangttcccannaatngaagtttgggntccanccccccaaacccttctttgggaaaaaggggttntgggggggcnannattttgggggtccggaaaaanncccctttttgggggnnncctttttttngggccncccangggtttngnactnggtgggggaattctccttgggccccaaaattgntatngnaaaaggggnccnacnnatggggngggcaaagaaaattggcttgcnccctgggaaatttttcttcccntgnggnnanacttttnggatttttctnaacnccnccntgncctttngnnnnanaantctngnngggttttngnnaatcccg

SEQ ID NO: 5512 - DNA, 1140 bp, Homo sapiens
  misc_feature 2, 3, 4, 6, 8, 10, 11, 14, 17, 19, 22, 24, 25, 26, 28, 29,30, 31, 33, 35, 36, 37, 39, 41, 42, 43, 44, 46, 49, 50,51, 58, 60, 62, 64, 65, 66, 67, 69, 71, 72, 73, 75, 78,80, 82, 83, 84, 85, 86, 90, 92, 99, 105, 108, 109, 122,430: n = A,T,C or G
  misc_feature 517, 589, 596, 671, 683, 699, 702, 714, 722, 726, 733, 745,759, 795, 797, 799, 810, 815, 836, 853, 855, 858, 878, 881,896, 901, 909, 913, 916, 917, 931, 939, 943, 950, 954, 959,966, 967, 968, 970, 975, 981, 991, 995, 999, 1006: n = A,T,C or G
  misc_feature 1014, 1020, 1025, 1027, 1030, 1031, 1033, 1038, 1041, 1042,1043, 1046, 1063, 1064, 1073, 1079, 1089, 1095, 1101, 1113,1120, 1121, 1125, 1128: n = A,T,C or G
cnnnancnanntanatntnatntnnntnnnntntnnnanannnntntannntattgtntntntnnnnanannnangtnantnnnnnagtngngggggtngggggnggnnttcactgtagggngaattggagctccaccgcggtggcggccgaggtacctgagagatgtgtctgaggtggacaccagaaccacaatccaaggggaggagatcagtgcccctatttgtatcgcacccacagggttccactgccttgtctggcctgatggggaaatgagcacagcaagagctgcccaagcggctggtatctgctacatcaccagcacatttgccagctgtagccttgaagacattgtcattgcagctcccgaaggcctccgatggttccaactctattgtgcatccagacctgcagctgaacaaacaagttgnatccagaggggtaagaatccctaggtttcaaaagactttgggtaataaaccttttggataccaccctgttatggtgggcaaccaggncgaccattgaacatttccgaaaaccaagttgaagggagggaaacctttaaccaccttaaccaagaatctttnaaatcanccctaaaaaaaagggggaaaaaatgccaaataccctttaattttcccaggaatgaactttccttattcaagccancttttcttcttnttgcttgggaaaatgnaanccttcttccctngggttttnaaanccttgcncccggggccggncccgccttctttanaaaacctagggtgggattcccccccgggggctttgncnangggaattttcnaatanttcaaaggctttaattcgganttacccggtcggacccntntgnagggggggggggccccgggntanccccaagcttttttngtttncccttttnaatnggnnggggttaatttgcncccccttngggnggtaaanaaantgggntcataannntnttttncctgtngtgaaaattntttnattncccttcncaaatttncccacnaaacntnacnnanccccnggnnnccnttaaaaagtgttaaaannccctggggngggccntaattgaggnggagcntaaccntccacatttaanttgcggnngggnccncccctgcccccg

SEQ ID NO: 5513 - DNA, 1083 bp, Homo sapiens
  misc_feature 2, 3, 4, 6, 7, 9, 10, 13, 15, 16, 18, 19, 20, 22, 24, 31,36, 39, 40, 46, 47, 49, 50, 54, 59, 60, 68, 69, 70, 71,72, 73, 74, 82, 85, 87, 88, 91, 93, 95, 101, 103, 105, 109,110, 503, 585, 632, 651, 681, 706, 725, 738, 783, 795, 808: n = A,T,C or G
  misc_feature 811, 824, 837, 847, 854, 856, 861, 864, 868, 880, 881, 887,891, 893, 897, 910, 915, 930, 934, 936, 941, 943, 950, 956,969, 981, 986, 989, 1000, 1002, 1007, 1029, 1033, 1041,1050, 1052, 1053, 1068, 1071: n = A,T,C or G
cnnncnntnnatntnntnnntntncctattntaaantgnntccatnntnngccnttttnnattatttnnnnnnntagtgagnggngnngangngntcatcnantncttnnctaatggatctccaccgcggtggcggccgcccgggcaggtacaacactctgtccctacaagggcacaggtgccaccttgagcagctgtgactatgtctaaggccatccggttttgcatcaccaccttcctgatctgatcaatctcatcaattaacaaaaggagggcagctcaggtgtaattcatgggcccaatctctgtgttctgcaagggctgtaacctgcatttctacagtgatgacacctgttccagggacagttattgctaaggggtagaaaccactagggggctcaatgcactcaccaaaaactggggaacacagccaccttcccaagttatgtgtgtgactaaagcaatgtggggaagcacagttggcaggccacaagaaggcccanttcccagggtaccctcggccgctcttagaactaagtgggatcccccggggcttgcagggaattcgaatatcaaagctttatncgatacccgtcgacccttcggaggggggggggcccgggttacccaancttttttgttcccttttangtggaggggtttaaatttggcgccgccttnggccgtaaattcatggggtcaatangcttggttttcccttgtgntggaaaaatttgnttatttcccgcttcacaaaatttcccaccaccaaacattaaccgnagcccgggggangccattaaaaagntgntaaaaaggccttngggggtgcccttnaaatggaagnggaagcntnacctncancaantaaaattgggcnnttggcncttnanttgnccccggctttttncaagntcgggggaaaacctngttngnggccnancttggcntttaantgaaatctggccnaacccccccggnggganaanggcgggttttngncgtantttgggggcgcctttttccccntttntttgcttncactgaacntnngttggggcttcgggnccntttcgggttggg

SEQ ID NO: 5514 - DNA, 1118 bp, Homo sapiens
  misc_feature 2, 4, 6, 8, 9, 10, 11, 13, 15, 21, 25, 26, 28, 31, 32, 33,34, 36, 37, 38, 44, 45, 48, 51, 52, 55, 57, 58, 63, 65,67, 72, 75, 76, 77, 78, 80, 81, 82, 84, 89, 93, 95, 98,100, 103, 104, 105, 106, 107, 108, 118, 119, 120, 123, 533: n = A,T,C or G
  misc_feature 575, 602, 667, 676, 707, 710, 723, 761, 776, 784, 791, 800,848, 861, 872, 874, 877, 878, 886, 902, 916, 928, 943, 966,974, 975, 980, 993, 994, 996, 1010, 1012, 1020, 1038, 1040,1041, 1044, 1054, 1055, 1059, 1062, 1081, 1085, 1086: n = A,T,C or G
  misc_feature 1096, 1104, 1105, 1111, 1113, 1114: n = A,T,C or G
cnantntnnnngnantttttntganntntannnngnnnatcttnnttnaanntcngnnttatngnantatantannnncnnntngtagngggngnggngngtnnnnnntaattttatnnntcnaattggagctccaccgcggtggcggccgcccgggcaggttccaaccaccacctgaggctctccgggcacgaaggaaaggcacatctggcagccctcgctaatctctttggggaccagagggcgacaacgcagcgccactcttacaggaattcccttcacctcttccttcatgatcctatctcagcaccgtctttgggagattcacgctccatgacttggccagggctggaccgcccgtcagccctgcactctaaagagagtgcacgggcttctgaaaggcaaagaaaaaactccaacggggacggcgacaaagaaccaaagccctagggtacctcggccgctctagaactagtggatcccccgggctgcagggaattcgatatcaagcttatcggatacccgtcgacctngaggggggggcccgggtacccagcttttgtttcccttttaantggagggggttaatttgcgccgccttnggcggtaattcaattggggtcattaaggctggttttcccttgtggttggaaaaaatttggtttantcccgcttnaacaaattttccaccacaaaacattaaccgnagnccccgggggaagnccattaaaaaagtgggttaaaaagcccttgggggggtngcccttaaaatggangtgggagncttaaanctccaccantttaaatttggcggtttgcggctttcaccttgggcccgctttttccantttcgggaaaaancttgttccgtngnccnnccttgcanttttaattggaaatcnggggccaaactccncccggggggaanaagggccggtttttngccgttatttgggggccggcctntttttcgnnttttnccttcggcttcanntngaacttccctttgngncttcggtnccggttttcggcttgggngnngangccgggtttnnagcnttnactttcaaaaggggggggngaannacggggtttnttcccccnnaaaatnanngggg

SEQ ID NO: 5515 - DNA, 1166 bp, Homo sapiens
  misc_feature 2, 5, 11, 13, 14, 18, 19, 20, 21, 23, 24, 27, 29, 32, 37,44, 47, 50, 52, 55, 58, 61, 70, 75, 78, 79, 83, 85, 88,89, 90, 91, 92, 94, 95, 97, 98, 99, 104, 106, 107, 109,112, 119, 120, 126, 128, 129, 135, 137, 147, 158, 205, 207,220: n = A,T,C or G
  misc_feature 221, 224, 230, 231, 232, 233, 236, 274, 287, 290, 343, 407,433, 455, 462, 464, 470, 491, 526, 536, 602, 615, 626, 635,644, 650, 653, 664, 667, 693, 705, 713, 715, 716, 723, 725,728, 748, 761, 769, 784, 793, 799, 805, 809, 810, 831: n = A,T,C or G
  misc_feature 834, 840, 845, 854, 857, 858, 896, 909, 923, 924, 929, 945,947, 953, 960, 981, 996, 997, 1000, 1006, 1014, 1016, 1035,1053, 1093, 1102, 1103, 1114, 1123, 1126, 1132, 1138, 1142,1162: n = A,T,C or G
cntanattaantnnattnnnnannttntnttntatanatagttntantanantcnttntantaccttctntcttntanntctntntcnnnnntnncnnnagtantnnanggnggtgtcnnatttgntnngaattnanctccaccgcngtggcggcctnaggagaaatagaacagcgcaggcaaaagaagaaaggcgcgggctggngnggaagaggattcnnacnaaattnnnntgnattagcagcagagcgagaaaggatgataagaggcaganaaggcgacggcanaanaaaaaaggaaaaactgcggccgctctagaactagtggatcccccgggctgcangaattcgatatcaagcttatcgataccgtcgacctcgagggggggcccggtacccagcttttgntccctttaagtgagggttaaattgcngcgcttgggcgtaaatcatggntcatagncntgtttncctgtgtgaaaaattgttatnccgcttcaccaattccacaacaaacaataacggancccggggagncaataaaagttgttaaaagcccttgggggtgccttaaatgaagtggaagcctaacctccaccattnaatttgccgtttngcgcctcaccntggccccgnttttcccangttcgnggnaaaaccctggnccngtggcccaagcttggcatttaaattngaaaatcggggnccaaaccncnncccgggngnaangaagggccaggtttttgcanttattttgggggnccgccttntttttcccgcttttnccttccgcnttcaancttgancttnncctttgcgccttcggggtacngtntccggnccttncccgggccnaannccgggttatttcaagccttccaacttcaaaaagggccnggttaaatttacncgggtttattcccnncaagnaaaattcaaggggggntnaaaccncaagggnaaaaaaaaaccatttttgganccaaaaaagggcccnnccnaaaaanggcccaangnaaaccccttaaaaaaaagnccccccttttgcttgggncgtttttttccataaaaggcttccgcccccccctggtccnaagcattannaaaaaaattcngaccccttnaantttaanaagggngggnaaaaaccccaccaggacctntaaa

SEQ ID NO: 5516 - DNA, 1077 bp, Homo sapiens
  misc_feature 2, 3, 4, 7, 9, 10, 13, 14, 15, 17, 18, 20, 24, 25, 28, 30,31, 32, 33, 34, 35, 36, 38, 41, 43, 44, 45, 46, 47, 51,56, 57, 58, 60, 61, 62, 63, 64, 65, 68, 69, 70, 71, 72,75, 76, 79, 81, 82, 83, 84, 85, 86, 90, 92, 93, 99, 105,106: n = A,T,C or G
  misc_feature 107, 114, 196, 213, 220, 222, 231, 260, 465, 466, 653, 738,781, 785, 797, 812, 832, 835, 840, 855, 858, 859, 863, 870,883, 939, 942, 954, 968, 972, 980, 1016, 1022, 1023, 1031,1064, 1067, 1074, 1076: n = A,T,C or G
cnnnccntnnttnnntnntntatnnttntnnnnnnntnatntnnnnngttntattnnngnnnnnnttnnnnnttnnttntnnnnnnctangnntaacgnggatcnnntcctatnggcgaattggagctccaccgcggtggcggccgaggtacccagcaccgctctctcagcctccccatttccaaggatcaggggnggatggcttcatttctnatgactntntcccggcancataacactgaaattcgaatggcagtcancaaagtggctgataaaatggatcatctcatgactaaggttgaagagttacagaaacatagtgctggcaattccatgcttattcctagcatgtcagttacaatggaaacaagcatgattatgagcaacatccagcgaatcattcaggaaaatgaaagattgaagcaagagatccttgaaaaggagcaattcggatagaaggaacannaatggaccaaggattagtggaactaattgaaccgaaaatcaagaggtattgtttgaagcagagtaaccctgatgatgggaggaagaggaaccaactcacttcagtaccagcccacaggaaaaccaccacagggcaagaagtaattggcatgctggaacaagaagaaaggcccaagggttgacaggangagttaagcagcggcccactgcacagggtctctcatcttgcagctgaaaatggactggctcacccaaaaaaaaggggaaacccgnagcttgcagaatgccagcttgaccaagaaaaggcccttggaanggangaccaggaatcnttttttcaggggggncccagcctttcaccccaaangtngccanggccaaaagcctctncannaagncttcccnaagaaaacccctnttggagcccaagccccagggtccccaaatttcaaaaaaggttggaaaaaagccagnaanccccggaaaacnaacttgggaacctncaangggggacntttcccttgggagggagagggaacctggactggccntttccnntttggagnaagggaagtcccttgggaaaaaaaaaaccctcntcnaaaaaangng

SEQ ID NO: 5517 - DNA, 1138 bp, Homo sapiens
  misc_feature 1, 4, 6, 7, 8, 10, 13, 15, 22, 23, 24, 29, 30, 34, 37, 39,44, 46, 52, 53, 55, 60, 64, 65, 68, 70, 72, 74, 76, 77,80, 82, 83, 96, 97, 102, 103, 111, 118, 400, 484, 511, 560,590, 596, 600, 622, 642, 661, 675, 695, 704, 735, 739, 749: n = A,T,C or G
  misc_feature 775, 786, 788, 806, 822, 827, 848, 871, 883, 893, 894, 896,903, 907, 935, 942, 943, 958, 985, 1007, 1011, 1017, 1018,1022, 1034, 1039, 1041, 1043, 1058, 1060, 1069, 1074, 1076,1083, 1089, 1094, 1099, 1101, 1102, 1118, 1120, 1125: n = A,T,C or G
  misc_feature 1128, 1132: n = A,T,C or G
nccncnnnanttnanaatgtcnnnattannaatnttntntatantnactttnncntaatnatanngtntntnancnnttntnnctagtgagggggnnagcgnngccgctgnctattgncgaattgtacctccaccgcggtggcggcccgcccgggcaggtacctctgtggaaatcccttccttccagaagcctccactcacttctgatgccaaggagcttctgcggcgccctgcacgcacctttacagatgcaggtggctgtttcctgtgtcccccgcgtacctcggccgctctagaactagtggatcccccgggctgcaggaattcgatatcaagcttatcgataccgtcgacctcgagggggggcccggtacccagcttttgttccctttagttgagnggttaaattgcgcgccttggcgtaaatcaatgggtcataagctgttttcctgtgttgaaattgtttattcccgctcacaatttnccaccaccaacataccgagcccggggnagcattaaaagttgttaaaagccttggggtgccctaaatgaggtgagcntaactccacaattaaatttgccgtttgcgnctcacntgcnccgctttttccaagtacggggnaaaacccttgttcggtgccnaggcttggcaatttaaatngaaaatccgggccnaaacgccgccggggtgaagnaaggccggntttttgccgttatttgggggccgcttctttnccgnctttccctcngacttcaactggacttcgtttggcgnctacggggttngnttacgggcttggcgggcnaaggccggtaattcangcttnaactttaaaaaaggggcgggntaaataaccggggttaattccancaagaaaattcnaaggggggannanaccgccnaggnaaaaagaaacaattttgaaaccaaaaanggcccanncaaaaaaggggcccngggaaaccccttaaaaaaagggccccngttttgcttgggcgtttttttnccantaaggnntccnagccccccctgnaccangncntttaacaaaaaaatntnggacccttncaaantnaagaggngtgggngaaanccccngnntggggacttctaaaananacccnagnccgntttccc

SEQ ID NO: 5518 - DNA, 1211 bp, Homo sapiens
  misc_feature 1, 3, 5, 8, 10, 12, 16, 21, 25, 28, 30, 36, 37, 38, 40, 41,42, 43, 45, 46, 53, 55, 56, 60, 72, 75, 83, 89, 92, 94,95, 97, 100, 101, 102, 105, 112, 117, 118, 120, 126, 128,129, 132, 135, 136, 150, 166, 179, 208, 220, 237, 239, 317: n = A,T,C or G
  misc_feature 353, 371, 378, 389, 419, 429, 444, 460, 483, 530, 547, 560,594, 598, 602, 657, 660, 718, 723, 724, 734, 767, 784, 806,809, 817, 831, 837, 839, 861, 863, 881, 884, 890, 899, 906,928, 929, 931, 944, 962, 971, 994, 1002, 1015, 1019: n = A,T,C or G
  misc_feature 1030, 1031, 1034, 1047, 1049, 1053, 1056, 1064, 1072, 1075,1081, 1089, 1109, 1114, 1116, 1117, 1122, 1123, 1124, 1131,1132, 1137, 1145, 1153, 1158, 1160, 1165, 1172, 1176, 1182,1188, 1194, 1200, 1207: n = A,T,C or G
ncncnccncncncctnttacntaanatngntttatnnntnnnntnntatggangnntttntatgtcttcttnttntaattacncctttnttntnntnagnnnagntttatanttatnntnacactnanncanatnnttactccacccgcngtggcggccgccctgncaggtacgcgggngtaactgaaaatccacaagcacagaatanaggagatctcanaggagcctgactatttntnaaccctgcagaacggctgcctaatttacagcaaccatgaggccacttaaggatgcagcaagaaggagccatctgcaantccaggaagaaattccttgccaggaaccaaattggnttgtcaccttcatcttangactttntagcctcgaanaacttaccaaatgggtgattgatcattcangtcaagggantaggtccttggcagncaatttggagcattgntcaacttttaccattgggggagnttatcccattttgaattgaccgaattgaaaaatgcccttgattttanggaaaaaaccaggaagntcttgggaatcangatttggaaatttcccttaggacaacccaaatanccanttgntgggggaattaccaccaaacccttaccttaagcccttatggttgggaaacaaccnttngaaaaagggcccagtaaatggagggaaaagcccccttggaaagaagcctttaaaaaancaaanncttggaaaanacttttaaatgccaggggaaaggaaaccattgnaccaacccaaagccaanaatttttgaagggaaggttctnggntgaacccntggggggccaaacnttattncnctggggattggtatttaacccnancattggggcccaagaacnttnggccanaaaagcccnaagaacnttttcccttgggaaccaaaggnntngggaagaaaaacnatttttgccaaagaaaancctttttcnaaaaaaaccccctttcccccttnttagaaantgggaagtttttnccanaaaaattatannctntttttgggaaaangnattnggnccccttgnctcgaaantgnttggangggaaaanaaaatttttttaaaccgggnccccnannggccnnnctttttnnaaaangggggctnttgaaaantgggnanccctncaaaaancccntgaaanaccccncccctngggttntcccaanccct

SEQ ID NO: 5519 - DNA, 1272 bp, Homo sapiens
  misc_feature 3, 4, 5, 11, 14, 16, 17, 19, 21, 33, 34, 41, 49, 53, 58,60, 64, 68, 72, 73, 76, 78, 79, 81, 82, 84, 85, 88, 89,90, 101, 102, 103, 104, 105, 106, 108, 109, 110, 114, 115,120, 121, 122, 124, 126, 127, 131, 132, 137, 140, 142, 144: n = A,T,C or G
  misc_feature 148, 154, 162, 164, 230, 233, 234, 251, 252, 256, 258, 259,267, 317, 354, 481, 530, 616, 629, 638, 723, 763, 786, 806,807, 822, 825, 831, 835, 890, 902, 913, 921, 944, 968, 971,982, 992, 995, 998, 1019, 1035, 1040, 1043, 1044, 1051: n = A,T,C or G
  misc_feature 1054, 1065, 1070, 1071, 1077, 1091, 1095, 1098, 1099, 1101,1102, 1111, 1117, 1119, 1128, 1134, 1136, 1156, 1162, 1163,1167, 1175, 1177, 1189, 1190, 1195, 1201, 1205, 1215, 1216,1225, 1228, 1229, 1230, 1242, 1243, 1244, 1257, 1259: n = A,T,C or G
  misc_feature 1262, 1265, 1270: n = A,T,C or G
ccnnncccctnctnanntntntatttttatatnnttattanttatatangtantgtantntatntaanaatnnatntnnanntnngtnnncatttttttannnnnngnnngagnngtatnnngntnntgtnntatancantnantatnatgtcntatttagnangctccactcgtggtggcggcccgcccgggcagagtaccatgtgaaagaagtttttctatcatgganggnnaggttcattatacacanngtantnnattagcantccttccaaagaaatccgtaatatttggattggccgccattttgcagcangaagagttgcacaagcctcctgcctcagttgtacctnggccgctctagaactagtggatcccccgggctgcagggaattcgatatcaagcttatcgataccgtcttaccttcggaggggggggggccccgggtacccagcctttttgttccctttaggtgaagnggttaatttgcgccgcttggggcgttaatcaattgggtcaatagcctgntttcctgtggtggaaaaattgtttaatccgcttcacaaatttccaccaccaaccattaccgtagccccgggggaagcattaaaaanttggtaaaaaagncccttgggngggttggcccttaaaatggaaggtggaagccttaaaccttcaaccattttaaattttggcggtttgccggccttccaacttggcncccggcttttttccaaggtccgggggaaaaaacccctggntccattggcccaaggccttggcnaatttaaaattggaaaattnngggcccaaaccgccngcngggggngaangaagggcccgggttttggcccgttattttggggggccgccttctttttcccggcntttcccttccgncttcaacttgnaaccttcngctttgccgccttccgggttccntttttcctgggcttggccgggccnaangccgggttatntcaaggcctncanttncaaaaaggggcccgggtaaantaccccgggtttattncccancannaaaaatncanggggggggatnaaacnngccaanggaaaaagaaaccnatgngtnnannccaaaaaanggcccnanccaaaaaangggccnanggaaaccctgttaaaaaaanggcccnnctgnttggcctngnccgtttttttcnnattanggcttncccncccccccttnnacggaagcnttnnncaaaaaaatttnnnccctttaaagttnanaanggntggcncg

SEQ ID NO: 5520 - DNA, 872 bp, Homo sapiens
  misc_feature 27, 28, 106, 134, 144, 171, 226, 241, 275, 279, 282, 285,298, 315, 329, 333, 345, 362, 384, 400, 405, 419, 421, 432,444, 456, 471, 472, 484, 485, 492, 500, 508, 527, 529, 535,541, 553, 554, 555, 556, 565, 568, 573, 576, 588, 597: n = A,T,C or G
  misc_feature 603, 606, 612, 619, 624, 625, 640, 641, 645, 649, 651, 660,662, 666, 669, 672, 691, 699, 706, 714, 722, 744, 750, 758,765, 782, 792, 802, 803, 806, 807, 808, 817, 819, 822, 825,826, 827, 828, 838, 840, 852, 869: n = A,T,C or G
tccccgcggtggcggccgaggtacttnntttttttttttttttttttttttttttttaaggggctttagtcagggccttttgttttacaaggaaatggcaattacnactggttttgataaggatgctctgacanaatctttttnttcatgggactgcttttcatgatgcancaccttgcagtatttctctttctttgaaatcactggtattgccctttattaaaanccacttgccttattnttatttaggaattactatgttaccaaagtttcanaatnttncanactgaaagagccntgaatgaactttttgtntgactccaaatgcnccantttctttattcnccttctacactggcctngttgttgcagcccaaaatggcncctgtatgggtcaagngggtntccttttttaaatntntgacttcaccntgaagaaaacanggggaaattccnggggcttccaccctnnctggacattagnnacaaaanttccacancaccactnaatttttgggccctggttngnaggaanaagganactttttctgtnnnntccccccgntgnaaccntgnccccggggcggnccgcttttnaaaaanaangggganccccccnggggnnggggggggaaatttnnaaantcananccttttccnantccnggncanaccttctgagggggggggncccgggancccaaanttttgttncccttttnttggagggggtaaattgggccncttggncggaaatnattgggncataagttgtttccccngggggaaaangggttttccnnttnnnaaattcccncnaanaannnngaagcccggngncataaaaagggnaaaagccgggggggccnaaa

SEQ ID NO: 5521 - DNA, 1135 bp, Homo sapiens
  misc_feature 2, 5, 8, 9, 10, 11, 13, 14, 17, 22, 23, 25, 28, 30, 33, 35,36, 38, 40, 41, 46, 49, 50, 53, 59, 61, 62, 63, 65, 68,70, 71, 73, 78, 79, 81, 82, 86, 87, 88, 90, 91, 92, 95,96, 99, 104, 105, 108, 109, 110, 113, 123, 128, 130, 131,134: n = A,T,C or G
  misc_feature 151, 194, 211, 229, 234, 237, 422, 462, 507, 509, 608, 611,642, 680, 681, 704, 720, 730, 744, 760, 769, 775, 797, 800,807, 825, 833, 845, 852, 853, 865, 867, 874, 877, 880, 884,898, 934, 947, 954, 971, 978, 981, 990, 992, 998, 1015: n = A,T,C or G
  misc_feature 1026, 1042, 1043, 1065, 1067, 1085, 1086, 1087, 1108, 1111,1124, 1125, 1131, 1135: n = A,T,C or G
cnatnctnnnncnnttntctanntnttntntantnntntnngtttntannttnttattnannnanatntnnanatctnntnnctcnnntnnnccnnttngaggnnttnnnggnggggggattnacttntnngcnaattggagctccaccgnggtggcggccgaggtacgcggggatgtgaatcactttaccatnactggcatgttaataanggaggtggtcttacaaanaatgnttnggtttagttcctactataaggatccatgttttctgaggtctgaagtttttacatatgggtaggctttctataagtgggtatgaaaggaaatattttgctagacgaggtggcccatgcctgtaatcccagtacctgcccgggcggcccgctcttagaaactagtgggatcccccgggcctgcaggnaatttccgatatcaagcttatcgatacccgtcggacctcnaaggggggggccccgggttacccaagcttttttgtttccctttantngaggggtttaatttgccgcgcttgggccgtaattcatggtcatagctgtttccctgtggtgaaattgttatcccgcttcacaaattttcacaacaacantancggagccggggagccattaaaagtgtaaaancctggggggtgccctaattgaagtggaagcctaacctnnccatttaattgccgtttgccgcntcacttggcccccgcnttttcccaantccggggaaaaccnttgttcggtgccccanccttggcantttaanttgaaattcggccccaacctcnccnggggganaaaggcccgtttttgcanttattttnggggccgccttnttttccnnctttttcctttncntttaacntgnaanttcngcttggcgcccttnggggtccgttttccggcctttgcccggccgaaagcnggttattcaaacnttcaccntccaaaaagggccgggntaattanccngggtttttncnacaaanaaattcacggggggganttaacccccanggaaaaagaaaacatnnttgtaaacccaaaaaggggccnanccaaaaaaaggggcccannnaaacccttaaaaaaaggcccncgntttgcctgggccnntttttnccan

SEQ ID NO: 5522 - DNA, 1170 bp, Homo sapiens
  misc_feature 6, 7, 12, 13, 14, 16, 19, 23, 26, 27, 28, 33, 34, 36, 39,42, 43, 46, 48, 49, 51, 52, 53, 58, 60, 63, 70, 71, 72,78, 80, 81, 83, 85, 86, 87, 92, 96, 99, 102, 103, 104, 110,120, 128, 163, 195, 446, 465, 511, 538, 539, 540, 609, 624: n = A,T,C or G
  misc_feature 655, 656, 701, 705, 708, 721, 730, 732, 746, 757, 759, 770,802, 827, 831, 837, 842, 851, 855, 857, 872, 874, 879, 887,888, 895, 903, 906, 907, 916, 917, 927, 930, 952, 954, 960,962, 968, 973, 976, 978, 980, 990, 994, 1001, 1002: n = A,T,C or G
  misc_feature 1004, 1008, 1010, 1020, 1044, 1046, 1047, 1049, 1050, 1061,1062, 1065, 1081, 1093, 1095, 1108, 1111, 1117, 1119, 1137,1149, 1150, 1152, 1158, 1162, 1169: n = A,T,C or G
cccccnncgtgnnnangtnaatngtnnnaacanncnaangcnntgngnnannnagtgnanttntttggtnnncaaggngnntntnnnagttnagtntanaannnaaggcnctaactatanggcgaatnggagctccaccgcggtggcggccgaggtacctganaaactggactatccacacctggattaggcagngtctaaaatatgatgcacaagacaaagccctatatacccttgtaaataaggttcaatatggaatttttccagataactttacattcaatttactgatggattctttcataaagaaagaaaattacaaagatgctttatctgtggtttttgaggtcatgatgcaagaagcctttgaagtgccttccacccaacttctctccctctatggttttatttcatttgcctggcaaaggaagacaggacttcagttnggggaaaggaggaggaggnaactttgggtgccatcccttttggcttgccaggcctaaagaacaanaaggaaccttcaagtggggttttcaannntcccagttttgtaatgggctattgcactttcttgggggaaaagggtgggagtttgcaagccaaaggggnctaccgggggcctgnggttacccttgcccccggggccgggcccggnntccttaagaaaacttaaggtgggaatccccccccgggggccttgncaanggnaaatttcccgatnattccaaangncttttattccggantaaccccgtgncngaccctttcgnaaggggggggggggccccccgggtgacccccnaggctttgtttggtttccccctttntaangtgganggggnttaaaattnggcntncccctttggggccgntnaattnattggggnnccattangcttgttnttnnccttggtgnngagaaaaatnggntaattcccccttcaacaaattntncccacnanccaacnattanccnangncccgggggangccnttaaaanntngggnanaaaccccctngggggggtggcccctaaattggangnngnngccttaacctnnacnatttaatttggcggtngtgccgccttcncnttgcccccccttnttntcaaantnggggaaaaaccccttgtnccgtgtgccccnncntgccantttnaatagant

SEQ ID NO: 5523 - DNA, 1219 bp, Homo sapiens
  misc_feature 15, 16, 22, 24, 32, 35, 36, 38, 40, 42, 43, 50, 57, 58, 59,61, 62, 63, 64, 71, 72, 75, 79, 86, 88, 96, 99, 103, 105,109, 113, 116, 117, 121, 123, 127, 129, 130, 132, 136, 138,141, 142, 143, 147, 149, 153, 165, 200, 203, 209, 223: n = A,T,C or G
  misc_feature 231, 245, 320, 401, 407, 443, 454, 455, 475, 506, 529, 535,536, 570, 596, 597, 600, 606, 608, 620, 625, 630, 636, 637,642, 644, 648, 660, 663, 664, 668, 673, 675, 680, 682, 684,686, 700, 703, 709, 713, 738, 761, 763, 764, 770, 789: n = A,T,C or G
  misc_feature 797, 820, 832, 836, 849, 852, 853, 860, 881, 884, 911, 921,922, 935, 937, 956, 968, 978, 981, 984, 992, 994, 997, 1004,1012, 1017, 1031, 1039, 1042, 1045, 1047, 1050, 1053, 1055,1061, 1068, 1071, 1079, 1080, 1081, 1082, 1086, 1089: n = A,T,C or G
  misc_feature 1095, 1096, 1100, 1103, 1104, 1109, 1110, 1115, 1118, 1124,1126, 1131, 1142, 1145, 1149, 1155, 1157, 1159, 1162, 1164,1171, 1176, 1182, 1191, 1192, 1193, 1194, 1197, 1198, 1202,1203, 1206, 1217: n = A,T,C or G
ctccctaatcctggnnttagtnanatatgacntcnngntncnnactgtgntatagtnnntnnnnattattnnttnaatngtatacngnttttggtnttnttangntagngtgnaanngaangnttancnnantacntnttnnngatngnggcngaattggacctncactcgcggtggcggccgcccgggcaggtacagcnggnagtcgntctgaagcggcggncagagaanagtcaagggcacanagcatcggccatgcctttcttggacatccagaaaaggttcggccttaacatatatcgatggttgacaatccagantggtgaacagccctacaagatggctggtcgatgccatgcttttgaaaaagaatggatagaatgtgcacatggaatcggttntactcnggcagaagaaaggagtgccaagataagaatatggangatttcgttannaagtgtttttgctttcggcnggaaaaaccgattgtaggactgtggcaaggntaacccttcgggcccggctttcntagganncttaagtggggattcccccccgggggcctggcanggggaaatttccgaattattccaaannccntttatncnggattaccccgntgcangaacncttctnnaaggngngggnggggcccccggngtnnaccncccantnctttntntngnttgccccctttttnaantggaangggntttacattttggccgccgccttttngggccggtaaaattcaattgggngnnaattangcttggattttccttggtngtagaaanatttgtttaattcccggttccancaaatttgcccncaancataccaataacntanngcccggnggtaggccattaaaagggtgnganaaagcccttggggggtgcccttaaatngaagtggganncttaaccttcacnanttataatttggcggtttgncgcctcactggnccggcttttnccnagntcggggtnanacnctggttngtggcccncctgntattaattgaaatntggcccancanccncntgnggnanaagccnggttttngcnataatttnnnngacnccntttttnncacnttnnctatnnttcanatngaactncnttttnggctccagttncgntatngggttngngngcnangcgggtnattcnaactcncactttcannnnggnngggnnatntccttgttaanct

SEQ ID NO: 5524 - DNA, 1342 bp, Homo sapiens
  misc_feature 5, 8, 9, 14, 19, 21, 22, 26, 27, 28, 30, 35, 46, 54, 57,59, 61, 62, 64, 65, 66, 68, 69, 73, 80, 84, 85, 90, 95,97, 99, 104, 105, 128, 133, 134, 145, 149, 152, 160, 163,168, 169, 172, 173, 177, 202, 286, 316, 391, 412, 426, 439: n = A,T,C or G
  misc_feature 465, 484, 493, 510, 537, 561, 566, 574, 579, 610, 615, 625,654, 668, 673, 684, 700, 703, 705, 712, 716, 731, 737, 738,756, 773, 774, 796, 812, 829, 852, 853, 859, 868, 869, 882,894, 896, 918, 930, 931, 932, 937, 945, 949, 951, 954: n = A,T,C or G
  misc_feature 959, 983, 984, 986, 989, 1002, 1010, 1012, 1030, 1032, 1041,1049, 1054, 1059, 1060, 1079, 1080, 1086, 1090, 1095, 1104,1116, 1118, 1119, 1121, 1128, 1129, 1133, 1134, 1137, 1141,1143, 1145, 1147, 1160, 1164, 1169, 1172, 1181, 1184: n = A,T,C or G
  misc_feature 1187, 1191, 1192, 1201, 1202, 1203, 1210, 1213, 1217, 1222,1226, 1236, 1237, 1239, 1243, 1251, 1255, 1264, 1265, 1271,1276, 1279, 1283, 1323, 1327, 1332, 1334, 1338: n = A,T,C or G
ccccnctnntgtcncattntnntttnnntncctcnttcttacctcntttctatntanancnntnnnanntggnttgctgnttanngtatnttacntncntaagnngagggggggggggggggagggantttcnntctgtatgacnattntgnaacctccnccntcctnngcnngacngccacgggcatgtacctaccaattnaatgcctggcaagagagtaaatgcacttagtactcatttttcggcaaatggtttgaatccttactggcttgacactgctttcgntaattcttaaagcagatgcactatggacangaatccaccaatattatgctgtgaacctctgtcaggaccggaactggctgccagattcttgaggtggattacaanggagcttgaaagcccccggcntaccttcggccgcntcctagtaactangttggatccccccggggcttgcaggnaatttcgaatattcaaagngttattcgnattacccgttcggaccnttcggaggggggggggggccccccggntacccccaagctttttttggtttnccccntttttaangtggnagggggttttaaaatttgcccgcccgccttntgggncggttaaaantccaattggggatccaataaggccttggnattttcgccttggnggggnggaaaaatatnggtttattccccgggnttncnacaaaantttnccaccaccaaacaantacccnnaagcccccggggggaggncatttaatatggtgggnnaaaagccccttgggggggttgncccttaaatgggaggntggaagccctaaacttncaccattttaaaattttgggcgnntttggnagccttcannttgggccccgggntttttccccgantncggggggaaaaacccctggtcnggatggcccaannntttgnaattttanaatngnaanttcgnggcccccacccccaccccgggggnnanaangggccggtattcngcccgttnantttgggggccggccttcntnttcccggcnttttcctntcganttaannttggaacttctgacttggnngccttngggntccgntttccgggnattgcgcgggcnanncncgggttnnttanngcncttnancntncaaaaaagggcgncggnaaaanaancggggttanttnccnacanncgaaatccnnnggggggnatnaacngccgngggnaaaaataacnntnttgngaacccanaaanggccccagnntaaaanggggnccngggnaatcccggtaaaaaagggccccccggatgcttgggggttntttncccananggcncccg

SEQ ID NO: 5525 - DNA, 1148 bp, Homo sapiens
  misc_feature 2, 3, 4, 5, 6, 7, 9, 10, 12, 15, 16, 17, 19, 20, 21, 22,24, 25, 29, 30, 31, 33, 34, 35, 37, 38, 40, 41, 44, 45,47, 50, 51, 54, 56, 57, 59, 61, 62, 63, 65, 68, 69, 70,72, 73, 75, 76, 77, 78, 79, 81, 85, 86, 88, 89, 90, 91,92, 95: n = A,T,C or G
  misc_feature 98, 100, 109, 110, 111, 112, 114, 116, 118, 119, 120, 121,124, 125, 128, 130, 132, 135, 137, 386, 449, 618, 667, 672,719, 744, 765, 788, 832, 836, 851, 852, 853, 854, 872, 876,883, 884, 903, 909, 919, 923, 928, 950, 970, 974, 999: n = A,T,C or G
  misc_feature 1004, 1010, 1033, 1037, 1040, 1041, 1042, 1048, 1049, 1050,1052, 1056, 1074, 1085, 1086, 1088, 1094, 1101, 1109, 1115: n = A,T,C or G
cnnnnnntnncnttnnntnnnntnnttannntnnnanngnnttnntntgnnctncnntngnnntntannncnnannnnntntctnntnnnnnagnagngnggagagggnnnngngntnnnnagnntcntntnggncnaattggagctccaccgcggtggcggccgaggtacgcgggggcaggagtcagacccagtcaggacacagcatggacatgagggtccccgctcagctcctggggctcctgctgctctggctcccaggtgccagatgtgacatccagatgacccagtctccttccaccctgtctgcatctgtcggagacagcgtcaccatcacttgccggaccactcagagtattggtatcttgttggcctggtatcagcanaaaccagggaaagcccctaagttcctgatccagaggggcctctaagtttagaaagttggagtnccatcaaagattcagccggcagtgggatccggggacaagaaattcaactcttaccatcacccaacctggcaagcctgatggatttttgcaaactttatttacttggcccaacaaatatataaaggttctttcttccactcacctttcggccaaaggggaccaccgactnggaagaatttaaaaccgaaacttgtggcttggcaccattctggttcttncattncttttcccccgcccatttttgattgaagccagttttgaaaaatcttngggaaacctggcccttcttgtttgntggtgcccctggcctggaaantaaacctttcttattccccaagnaggagggggccaaaaagttaaccctggcccccggggcccggggncggnttcttaaaaaacctnnnntggggatttccccccccngggncttggcnnggggaaaatttccgaattntttctnaagcctttanttcngaatnaccccgtccgaccctttctaangggggggggggcccgggtancccnaaccttttttggtttccctttaaangggangggggntaaatttggcgccgcctttgggncggnaannnattggnnnanaaanttgggttttcctgtggtngaaaaattggnntntttccnttcacanaattttcnccccanacataccgaaacccccgggggccataaaaatgg

SEQ ID NO: 5526 - DNA, 1159 bp, Homo sapiens
  misc_feature 2, 3, 5, 6, 8, 9, 10, 11, 12, 14, 15, 16, 17, 18, 19, 23,24, 25, 27, 28, 29, 30, 31, 32, 36, 37, 38, 39, 40, 41,45, 46, 47, 50, 51, 54, 56, 60, 61, 64, 65, 67, 70, 71,72, 73, 75, 76, 77, 78, 79, 80, 81, 82, 83, 85, 87, 93,97, 99: n = A,T,C or G
  misc_feature 101, 105, 106, 107, 108, 109, 111, 112, 114, 115, 117, 123,124, 547, 672, 690, 708, 714, 732, 747, 749, 751, 775, 801,814, 816, 819, 822, 832, 858, 867, 894, 913, 917, 921, 934,941, 949, 952, 957, 965, 979, 997, 1007, 1022, 1025: n = A,T,C or G
  misc_feature 1029, 1036, 1040, 1042, 1044, 1047, 1050, 1067, 1079, 1081,1082, 1085, 1089, 1103, 1107, 1108, 1112, 1113, 1130, 1135,1141, 1157, 1158: n = A,T,C or G
tnnanngnnnnntnnnnnntttnnntnnnnnnttgnnnnnntttnnnttnnaantntaanntanntngtnnnntnnnnnnnnntngnagaggngtgntnangagnnnnntnncnntncctatnnggccaattggagctccaccgcggtggcggccgaggtaccaatacaaataggtctttccatcactatgcaggaggctctgactagacttgcaggagatggaggccggctgtccaggggtgacggacagagagagtggagtctgggtcatcacaatatctgcactggatccaggtatccagagcattagcagcaccctgacgctgagcaaagcagactacgagaaacacaaagtctacgcctgcgaagtcacccatcagggcctgagctcgcccgtcacaaagagcttcaacaggggagagttgttagaggggagaaagtgcccccccccgcggtaccttgcccggggccggccgctcttagaactagtgggatcccccgggctgcaaggaaattccgatatcaaagcttatccgattacccgtncgacccttcgagggggggggccccggtaccccaagccttttttggtttcccttttaagttggaggggtttaaatttgcgccgccttttgggccgttaaattccattggggtccattaagcctggnattttcccttgtggttgnaaaaatttggtttaattncccgcnttcaacaaaatttcccancaacaaaaccattancnangcccgggggaagccattaaaaagntggttaaaaaggccctggggggggtngcccttaaattgnangtngangccctaaacnttcaacaatttaaatttggcggtttngcgccttcnacttgcccccgcctttttccagatcgnggggaaaacccttgttccntggnccanccttgccatttanaattggnaattcggnccnaaccncccccggngggaagaagggccngggttttggcggtatttngggggcgccnttcttttcggctttnctnttgnttttaanttgnananttnggnttgcggctttgggtccntttctagactgncnnggngaangccggttattcagnttcnncttnnaaaaggggcggggtaanttctnggttanttccccaataaaatcnng

SEQ ID NO: 5527 - DNA, 1233 bp, Homo sapiens
  misc_feature 3, 4, 5, 6, 9, 13, 14, 15, 16, 20, 23, 27, 32, 36, 38, 40,42, 48, 52, 53, 57, 59, 63, 66, 71, 76, 78, 84, 86, 87,90, 92, 105, 114, 118, 120, 121, 122, 123, 126, 130, 132,134, 136, 147, 198, 338, 363, 364, 411, 414, 418, 421, 449: n = A,T,C or G
  misc_feature 471, 502, 507, 515, 519, 531, 539, 540, 547, 583, 593, 616,622, 638, 660, 663, 667, 687, 700, 731, 741, 749, 771, 796,814, 815, 818, 826, 850, 852, 879, 887, 906, 918, 919, 922,923, 925, 934, 937, 939, 946, 960, 981, 987, 993, 995: n = A,T,C or G
  misc_feature 996, 997, 1001, 1002, 1007, 1023, 1030, 1032, 1033, 1036,1045, 1051, 1057, 1058, 1059, 1061, 1067, 1072, 1081, 1090,1092, 1095, 1100, 1105, 1106, 1127, 1129, 1135, 1140, 1141,1145, 1149, 1158, 1161, 1165, 1168, 1169, 1174, 1182: n = A,T,C or G
  misc_feature 1193, 1202, 1204, 1205, 1216, 1218, 1224, 1225, 1227, 1230,1232: n = A,T,C or G
cannnnatntggnnnntctnttntctnattantaantnantntctttnttgnnatananaaanacncttcntggtntntgtttncnnatngngtggggtgggggntggtctaanactntnnnntanggcntntngnttctccaccgnggtggcggccgcccgggcaggtaccgggacatccggctgatggtcatgganatccgcaatgcttatgctgtgttatatgacatcatcctgaagaacttcgagaagctcaagaagcccaggggagaaacaaagggaatgatctattgagagccctctctcccattctgtgatgaagtacgcggggaatcaanaattttggccgtgcaacctggggannagcttaggcctaaagtttggtcattgatgccagaaagctacttcaanatngcanttncggctttggtcctggctcttggcccctnatcccttggttttctgggaaantccctccagttcaaagggttatccctaccgncgggnatgaagcncagnggttacccctcngggcccgnnttcttanaaccttaggttgggatcccccccgggggcttgccanggaaatttcngattattcaaaggcctttattcngaatancccgttccgacccctncgttagggggggggggcccccnggnttanccccaagtctttttttggtnttccccctttttnaagattgaaggggggttttaaattttgccgnccgccctttnggcccggntaaaattccattggggttccanttaaggcctggtttttccccttggngggtgggaaaaattttgnntanttcccganttcaaccaaatttccccacaccancnattaccggaagccccgggggaggcccnttaaaaangttggttaaaaagcccctngggggttgcccnnaanntngaattgganccntnaacttcnccatttaaatttgncgtttgccgcctccacttggnccccgntttttncnnnttcnnggganaaacccttgttcctgncccagcntnncanttaaattgnaattcnggcccnnncncctccnggggngaagaaggncgggttatncngtntttgngggcnnccttctttccggctttccttngntttcanttganntttnattngcgccctcnggncctnttnngattngcgggccnagccgggtatncatcctttnanntttaaagggcngngaaaanncnggntnt

SEQ ID NO: 5528 - DNA, 1183 bp, Homo sapiens
  misc_feature 3, 7, 10, 11, 12, 16, 17, 20, 21, 22, 24, 25, 26, 27, 28,31, 33, 34, 35, 37, 38, 45, 46, 48, 51, 52, 54, 57, 60,62, 65, 67, 69, 74, 77, 78, 79, 81, 83, 84, 85, 86, 87,88, 90, 94, 95, 97, 98, 99, 100, 101, 105, 111, 117, 119,191: n = A,T,C or G
  misc_feature 398, 399, 405, 411, 466, 467, 472, 480, 482, 483, 490, 497,502, 505, 509, 515, 534, 546, 547, 552, 561, 567, 580, 581,592, 593, 594, 595, 596, 597, 602, 603, 606, 608, 609, 611,619, 625, 627, 632, 638, 645, 647, 648, 653, 654, 655: n = A,T,C or G
  misc_feature 661, 670, 671, 672, 676, 690, 691, 695, 696, 699, 701, 709,712, 714, 732, 739, 741, 743, 750, 753, 762, 764, 765, 767,768, 770, 779, 790, 791, 794, 798, 803, 805, 810, 816, 822,833, 837, 838, 844, 846, 847, 852, 864, 869, 870, 873: n = A,T,C or G
  misc_feature 874, 880, 896, 897, 902, 910, 913, 915, 918, 930, 932, 937,938, 942, 947, 954, 979, 981, 992, 994, 998, 1004, 1006,1013, 1016, 1018, 1021, 1023, 1024, 1025, 1032, 1036, 1037,1042, 1048, 1055, 1057, 1059, 1073, 1086, 1095, 1097: n = A,T,C or G
  misc_feature 1100, 1101, 1102, 1109, 1110, 1112, 1117, 1120, 1121, 1131,1133, 1137, 1144, 1147, 1151, 1153, 1158, 1161, 1173, 1180,1181: n = A,T,C or G
atnatcntannnaatnnaannntnnnnnatnannnannttagtgnnanagnnanctntantntangnanaattntannnantnnnnnnanaagnntnnnnnatcnaattcnaatatntntatttggactccaccgcggtggccggccgggcaacccgaggctgcaatagctccagaactggcctccacagngtcttcctctacgggagtcagctggttgtgtcacttgacccctcttgttgctaagaggcagcagggacacccattttcacttccgcttccggttgtcccccgcgtacctgcccgggcggccgctctagaactagtggatcccccgggctgcaggaattcgatatcaagcttatcgataccgtcgacctcggaggggggggccccggnncccagnttttgnttccctttagtgaggggtttaattgcgcgcttgggcggtaatcatgggtcaatannctggnttcctagngnngaaaatnggatatnccatntanacantttttnatcacaaaaaaaaacagantccttggggganncattnaaaagctgnaaaaancccccgggggggnntccctaaattnnnnnntagcnntcntnncnccacccanttatantntgggngggggnggggccnanncaaannntccccnatttttttnnnaaantggggaaaaaaaanncttnntgngntcccaccntgntnttaataaaaaaaaaaatnggccccncncnccccccncanatgaaaaananncnnanttttttatnatttatttccnnccntttnttgtntntgtgntttttnaaaaanaaaaaaaaaanaaannctcccncnngtatnttgagattggtnatttnngtnnaaaaangggctaatttttcttnncaccnctcccaanccngnggngggggggggggncnctccnncccncacanttttgtnttttcggaacaataaaaaaaaatantntttttttaatncnatancacctnangaacacnagnanccncnnntaaaaanaaannccagngtggcnggggggntngnttttgtatattaantataaaaaacccnccccccccntngtnnnggttaannanaaaanttnnttatttctantngagnggggggngcnccancnatctnatnaaaaataaaatnaattatnnct

SEQ ID NO: 5529 - DNA, 1160 bp, Homo sapiens
  misc_feature 5, 6, 8, 9, 10, 12, 13, 14, 16, 17, 19, 20, 21, 22, 23, 27,34, 35, 36, 37, 38, 39, 40, 41, 42, 43, 44, 47, 48, 49,51, 52, 54, 57, 58, 59, 60, 62, 67, 69, 70, 72, 73, 74,77, 82, 85, 88, 90, 91, 92, 94, 95, 98, 99, 100, 101, 102: n = A,T,C or G
  misc_feature 501, 559, 589, 627, 665, 703, 705, 708, 739, 749, 750, 763,767, 816, 860, 876, 878, 887, 901, 923, 938, 939, 961, 972,997, 1012, 1018, 1020, 1021, 1041, 1051, 1076, 1085, 1088,1104, 1137, 1140, 1142: n = A,T,C or G
tgtanntnnnannntnngnnnnntttnttttttnnnnnnnnnnnatnnngnntnttnnnnanttttntnntnnngtnaaggnttntantnnntnnttnnnnnttattagggcgaattggactccaccgcggtggcggccgaggtacaggtgtagaagacagtttgcccttcatcggctgaacgcatctgtctggtgtggtatgccattccttcatgaccacatcgagggcagcgcctgtcaaccacaggtccctggcactcaggcccttcctccaccgacataggcatggctgtccccagttggtggaacacaaccgaagtcttcacaaccttcccctcaaagtcccgaacgtttgatgttgaagccacagcgaatacaggtgacccgtatccttgagccccgggcaagaggcaggacccgagcccgcaatcttgaaacaagaaatcccaggtcccgacttgaaaagctgggaagcaagttattggcgaagggtcccatgnacaagacatgcgggtcggggtctttttgcgaccaaaggaagccggaaaacgccccggnaatttcccaagacagcgttcggggttaccntggccccggggccgggccgcttctaagaaacttaagtngggatccccccggggccttgcagggaaatttccgattnttcaaagcctttattcggattaccccgttcgaaccctncnaangggggggggggccccccggggttacccccangccttttttnntttcccctttttnagtnggaggggggtttaaaatttggcggccgcctttgggcggtaaattcaatngggtccattaagcttggttttcccttggggtggaaaaaatttgntttatttcccggtttnanaaaattttnccaccaccaaaccnattaccgaagccccggggggangccatttaaaaggtnnttaaaaaggcccttgggggggnggccttaaatnggaggtgggaggccttaaccttcancattttaaatttggncgtttngnngccttcaacttgggcccgcntttttcaagntcgggggaaaaaccttgtctggggnccaaacctngcnatttaattgaaaatcnggccaacccccccgggggaaaaagggggttttnggntnttttgggggccctttttt

SEQ ID NO: 5530 - DNA, 854 bp, Homo sapiens
  misc_feature 169, 248, 302, 309, 406, 444, 455, 528, 561, 562, 577, 580,584, 586, 588, 598, 605, 606, 609, 611, 622, 628, 630, 631,640, 647, 648, 650, 652, 656, 658, 659, 662, 665, 673, 678,690, 693, 696, 698, 700, 701, 703, 710, 719, 720, 725: n = A,T,C or G
  misc_feature 734, 738, 745, 746, 748, 752, 756, 759, 760, 770, 771, 784,786, 787, 790, 791, 793, 794, 801, 802, 808, 810, 811, 821,829, 831, 835, 837, 843, 844, 847, 849, 852, 854: n = A,T,C or G
ggagctccaccgcggtggcggccgaggtacttttttttttttttttttttttttttttttagaatgattgaaacattttattaattctaatatttctgagaacccactgtgttctaggaacacatagttacacagatgatgtaatgaatgagacaaaatctgtatcttntagttgcgccaaaagcagtaatttctaaggtatgtgtggtggggaaagggtgctctgaggagagggagatggggaacanaatcacttgagagtgaggatttgtttccaattaattaacatgcccacaagaatntgccatntcccacatcaagaatcattgctttaatatagattgatgaattgatgacgttaatgagttgatgactgtctcccaggtacctgcccgggcggccgctntagaactagtggatcccccgggctgcaggaattcgatntcaagcttatngataccgtcgaccttgagggggggcccggtacccagcttttgttccctttagtgagggttaattgcgcccttnggcggaaatcatgggtcatagcttgtttccctnnggtgaaaatttgttnttnccgntnanaattcccaanaacaatnncgnancccggggagcnttaaangnntaaaaaccnctggggnngncntaantnnggnggngcccaacnctccnctttaattgggntgnggncntnncntgcccgntttttcaanntgggngaaaacctngtgnggccaanntntgcntttnatnnaattgggccnncccccccgggggngnnggnngnntttccgnnttgggngnncttttttccnttttcttngntaangnaaattnntgngngcntn

SEQ ID NO: 5531 - DNA, 832 bp, Homo sapiens
  misc_feature 623, 634, 641, 685, 731, 746, 751, 767, 769, 777, 782, 799,803, 818, 822: n = A,T,C or G
ggcgaattggagctccaccgcggtggcggccggggaccgcgcggcagcgcaagccatcttcacaagagtctcaacaacccaggagccgcagggagaaacccggcagaaacccgggaggaacccggctctgagtttccgagacagcccgcttttccccccgcgtacctcggccgctctagaactagtggatcccccgggctgcaggaattcgatatcaagcttatcgataccgtcgacctcgagggggggcccggtacccagcttttgttccctttagtgagggttaattgcgcgcttggcgtaatcatggtcatagctgtttcctgtgtgaaattgttatccgctcacaattccacacaacatacgagccgggagcataaagtgtaaagcctggggtgcctaatgagtgagctaactcacattaattgcgttgcgctcactgcccgctttccagtcgggaaacctgtcgtgccagctgcattaatgaatcggccaacgcgcggggagaggcggtttgcgtattgggcgctcttccgcttcctcgcttcactgactcgctgcgctcggtcgttcggctgcggcgagcggtatcagctcactcaaaaggcggtaatacggttatncacagaatcanggggatnaccccaggaaaagaacatgtgagccaaaagggcagcaaaaaggncaaggaacccgtaaaaaggccgcgttgcttggcgtttttttcatangcttccgcccccctngacgnagccttaaaaaaaatngncgctcaangttanaaggtggcgaaaccccncccnggactttttaaaganaccnaggccgttct

SEQ ID NO: 5532 - DNA, 1142 bp, Homo sapiens
  misc_feature 1, 4, 6, 12, 13, 14, 15, 17, 28, 30, 32, 33, 34, 35, 39,41, 44, 45, 46, 47, 48, 50, 52, 54, 56, 57, 58, 63, 66,67, 69, 74, 76, 77, 78, 79, 80, 81, 82, 83, 84, 87, 92,93, 96, 97, 98, 100, 103, 104, 105, 114, 206, 346, 363,431, 521: n = A,T,C or G
  misc_feature 523, 544, 617, 629, 676, 695, 700, 708, 720, 722, 746, 748,785, 799, 846, 850, 853, 867, 878, 879, 881, 886, 890, 892,900, 904, 919, 923, 927, 929, 938, 942, 950, 964, 986, 988,989, 993, 995, 1000, 1001, 1005, 1011, 1014, 1023: n = A,T,C or G
  misc_feature 1024, 1027, 1028, 1032, 1034, 1052, 1055, 1065, 1067, 1071,1075, 1077, 1081, 1083, 1092, 1101, 1104, 1118, 1124, 1125,1128, 1131, 1132, 1133, 1134: n = A,T,C or G
ntananttgttnnnnanataaatattantntnnnnattnanttnnnnnantnantnnnttatnctnntnttaantnnnnnnnnnagngagannggnnngntgnnnattctatanggcgaattggagctccaccgcggtggcggccgcccgggcaggtacttttttttttttttttttttttttttgttttttgaagttctcagganaccgcgtattcttagattcagccgccgaagccatacagagtgcgcccctgacgttttagggcatatactacatccatggctgtgacagttttgcgcttggcgtgctccgtataggtgacggcgtctcgaataacgttctntaagaaaaccttaagcncacctcgagtctcctcatagataagaccggaaatgccgcttgacgccacccgcgccgagccaaacggngaaatagccggttttgtaatgccctggatgttatcccgggagccaccctttacgatggcgctttaaacacccaacccttttcccccaaancncttttttcccgcctttttgcncgcggacccaggaccattgaatttccctaattcggcaagttcccccccggcggtaccctttggggcccggttnttataaaacttnaggtggggattcccccccgggggccttgcaagggaaaattccgattnttcaaaagcctttatttcngaatnaccccgtncggaaccctttngnaagggggggggggggcccccgggntnccccccaagcctttttttggtttccccttttaaggtngggaggggggtttnaaatttggcgccgcctttggggcggtaaaatcccatggggggcaatnaggnttnggtttttccttggnggtggaaaaanntnggttnttcncngctttcancaantttcccccaaaaaanattnacgnangccgggggnggcnttaaaagnggtaaaaagccccngggggggggcctaaatgggggngnngccntnaactnnaccnttttanttnggggttggnnccnnaacntngccccctttttcctaaanggnggggaaaaancntttngtgngnccancnttggttttnataaaaaancgngccccccccccccngggggnnaanggnnnntttttttt

SEQ ID NO: 5533 - DNA, 1172 bp, Homo sapiens
  misc_feature 1, 2, 4, 5, 6, 12, 18, 28, 29, 33, 34, 38, 39, 43, 44, 46,48, 49, 55, 58, 59, 60, 61, 67, 69, 75, 79, 80, 81, 82,85, 90, 93, 99, 100, 103, 108, 109, 112, 113, 119, 122,130, 142, 162, 289, 389, 491, 519, 521, 527, 551, 607, 617: n = A,T,C or G
  misc_feature 623, 673, 725, 740, 743, 747, 759, 762, 764, 765, 772, 795,797, 809, 816, 820, 822, 824, 828, 829, 840, 843, 853, 856,863, 864, 874, 876, 886, 907, 920, 925, 926, 930, 933, 935,939, 943, 945, 947, 959, 964, 968, 969, 977, 985, 988: n = A,T,C or G
  misc_feature 990, 1001, 1002, 1004, 1009, 1013, 1020, 1022, 1026, 1036,1040, 1043, 1046, 1049, 1062, 1065, 1066, 1067, 1073, 1085,1090, 1099, 1104, 1117, 1121, 1131, 1132, 1133, 1136, 1146,1148, 1149, 1151, 1152, 1153, 1158, 1160, 1164, 1168: n = A,T,C or G
  misc_feature 1170: n = A,T,C or G
nnannntttaangacttnatttattttnnttcnntctnnttannantnntatttnatnnnntatttngntatttnattnnnnagngaggnggnggtggnngtnattannatnnctatantcnaattgtanctccaccgcggnggcggccgcccgggcaggtncgcgggggctgaataaagccgtgtctcatctacctgctgtctcccaagtgttcttccagctccctgcccctcatcaacccactctcctcagacctcagctggggcttgaacctgataattggtgtantcaccaggatgagatttagaagtggtggtgcccctcttgtgacagcatttggcagtgtgcaattgggccatcaataaatccaaggtccaagggccggaantgtctgccaaattcttgggagttattttgcttcaagcccacaggttgggcatgctccaacaacattggtgggacctgggcctcacaccctattgccttgagngtgggccaaatgttcttcccaactgttngnaatctngccaccaacccctttccaagccancaaacttgtgggaatggggcctttgccctttgggccaatggttgccatccccaagnctttttttgntggaanagaaaacctggggaccattggggcttaaggaaaaacctttgggggggttnccccaaccagaaccaaattggggggccgggggggattgccaaaccaattggnggggaagcccttttnggnaatnggggggggttgntcnannaaaaaanccccaattgggccaaagggcccntngccccccccctngggcttnaacntncnttannccattttcccnttntattggaaanttnggggggnntttggctttnantgggggaaanaaaaaaaaatttgggtggggnccccccattttgncaaanntatnccntngggnccgncntnttaaaaaaactnaaggngggnncccccccnggggcttnggnanggtaatttccnnanattcnaaanctttatntntttntcccgtgctncatnccnttnaangggggggggcccnggnnntccccnaaaacttttttnatttncccttttangtganggggggtaaattngccnccctcggggnnntantaaaagggtnannannnttgtntnctcntggngnaa

SEQ ID NO: 5534 - DNA, 912 bp, Homo sapiens
  misc_feature 391, 433, 434, 436, 437, 441, 444, 457, 459, 461, 467, 473,474, 484, 487, 489, 492, 497, 498, 506, 507, 514, 517, 524,533, 541, 543, 549, 550, 555, 558, 561, 566, 569, 572, 575,582, 586, 587, 595, 618, 622, 628, 652, 656, 661, 663: n = A,T,C or G
  misc_feature 664, 695, 697, 698, 705, 709, 714, 717, 725, 733, 734, 743,747, 751, 752, 756, 759, 767, 770, 775, 793, 806, 811, 818,826, 827, 828, 830, 831, 834, 835, 836, 846, 857, 863, 873,875, 877, 878, 880, 883, 891, 892, 896, 901, 912: n = A,T,C or G
ggagctccaccgcggtggcggccgcccaaagctacgccgaccaatccaagtagcgaaagtcgctttggccctggcccgttacctccgcgtcctgggaagtatcagcctttaccagctaccggaagtaactgcgcacgaaatctcccgcgggagctaagcctcttcgacaagaattctatagcgcgagcaaatcagcatctcgcccccgcgtacctcggccgctctagaactagtggatcccccgggctgcaggaattcgatatcaagcttatcgataccgtcgacctcgagggggggcccggtcccagcttttgttccctttagtgagggttaattgcgcccttggcgtaatcatggtcataagctgtttcctgtgtgaaattggttattncgctcacaatttcacacaacataccaacccgggagccttaanngnnaaanctnggggggcctaatnanangagctnacttannttaaatttgnggntnggncccannctggcccnntttttcnaantgggganaaaaccttngttttggncnccttgnnttttnaanganaattntgnccnaanccccccngggnngaagggcngggttttggggtatttgggggcncttnttttcngtttttcctttgtttaaattgaantttngcttngnnccttcggggaattttggcttttcggcggaancnnggttttnaatnttaantcntaaaaggngggggaannaccgggttntttncccnnaatntangggggggntanccccngaaaaaaaaaattttgtnccaaaaaaagggnccccnaaaaaangggccccnnnannccnnnaaaaaagggnccgggttggtngggggnttttttactnanannanccncccccccnncaanaaaanaaaaaaaaaan

SEQ ID NO: 5535 - DNA, 473 bp, Homo sapiens
cgaattggagctccccgcggtggcggccgaggtacacctcacaaatgatagtggctgagagccaaatgatgagcttctctgtgttatgtctacctagctgtgattatatcaggcacaggattgcgcgcgtgtgctctaatcccactgtgtcatgcaggatttttacctcggcctatgcctgcctggcagcaacacagccatgttccttacactccgccccctaggccaagggggtcctcttaatgggaactcgtgcacataggggagcaccctggacccataggccacagcaacaataaagagagcaacaacctactactaatattcctgctatgctacctatgattataagagcccagtgtaggccagagcccagagacacccaccatctctgcaggcggtcatcagtaaggtattcaattgccttaatctcccatgacatgacaccccctgcaaagctgccactatgttct

SEQ ID NO: 5536 - DNA, 1219 bp, Homo sapiens
  misc_feature 3, 8, 11, 14, 16, 20, 24, 26, 30, 34, 37, 39, 43, 45, 46,57, 58, 66, 68, 69, 71, 73, 79, 80, 83, 84, 85, 88, 91,94, 97, 100, 101, 104, 106, 111, 114, 124, 147, 152, 161,185, 194, 215, 224, 312, 399, 429, 440, 441, 458, 486, 495: n = A,T,C or G
  misc_feature 499, 506, 507, 528, 539, 582, 584, 590, 600, 630, 638, 651,654, 674, 708, 715, 719, 737, 742, 755, 758, 759, 770, 779,791, 801, 803, 816, 849, 862, 869, 872, 886, 898, 899, 906,951, 955, 965, 969, 971, 972, 974, 977, 1000, 1003: n = A,T,C or G
  misc_feature 1006, 1023, 1028, 1041, 1043, 1044, 1049, 1052, 1055, 1058,1070, 1074, 1081, 1083, 1084, 1101, 1109, 1114, 1117, 1127,1128, 1129, 1132, 1137, 1141, 1152, 1155, 1163, 1173, 1179,1180, 1184, 1186, 1187, 1188, 1192, 1201, 1209, 1213: n = A,T,C or G
  misc_feature 1215, 1216, 1217, 1219: n = A,T,C or G
ccntactnttnggntntttngttngnacgntttnacntnatgngnnagtcattttcnnaaagattntnntnangcggtnnttnnntcnagngcngangcnngcnanacctnttntactatttgnatctccaccgccttggcggccgnggttncatctccgntgcagatcgattcacacctgcttntcctcggtncacttttggctctgcaaccantttaatatntaaaacctggccagcaatcattctgccatcctctcctgctacagcagcccgggcatttctctcattaacatactgaacgaaggcaaancccttatgaacagagcagcccacaattttgccatacttcgaaaagattgcctccacatcagatttcttggaccaccaagagtgttgnaggatttcccaatggaaatacacggggganttcaatggganncggagggatctgtcttngtttggtaaccgtttgcttggcccatcnggtgttttngatnggttaanngttttctcacaaaaaggccgnaaaaaaacttntttacccaattcaaccccaagggaaaggggttgttggccaatncntggttnccccgaaaanggccccccccccttggggcttcccaagggntccaattnccctggggccttngcnttgggcctggcttccccaanggccttggggggccaattccccattggttttggncttggcnaacnccttttggtagggttttntggtngaaagggggggtnaannttggtaacccnttgcccccngggggccggggncccggcttcntnatgaaacttaagntgggggattccccccccgggggccttgggccangggaaattttccnaattatncanaagccttttattcngaattaccccgnnccggacncctctgaaggggggggggggcccccgggtacccccaagctttttngggntccccctttnaagngnnanggngtttaatttggcgccccctttgnggncgnttaaattcaattggggncaatnaagcctgtggtgntnnccctngtnggnggnaaaaatttgggntttntccccgncnnccaccaattttcccccnccaaacanttacnaanggccccgggnnnccnctaanaaantgggtaaaaanccnctgggggnagccctaaantggagnnggancnnnaccncccaatttnaattgggngtgngnnncn

SEQ ID NO: 5537 - DNA, 857 bp, Homo sapiens
  misc_feature 565, 640, 645, 664, 689, 716, 738, 760, 766, 777, 781, 801,807, 810, 814, 818, 819, 824, 826, 833, 840, 844, 849, 850,853, 857: n = A,T,C or G
tatgactactatagggcgaattgggccctctagatgcatgctcgagcggccgccagtgtgatggatatctgcagaattcgcccttagcgtggtcgcggccgaggtacttttttttttttttttttgctgcacagctttaaaaagttgaagtctattggaaaccttcttataagaaaccttcctagtcagagaattcaattttcttcttttcttcattcatgaaaatgcagatccactgagaaagggaataaggtaaaagtatcattttcctttgggaatcaggtttttctgtcagaggaataaaggcctttctttccaggtcaattcctgttgtgctgaaggctgggaatcatcacgcccttttggtgtgggccccagctttgagcctctgtgatgatggtagaatctggaagtcagaagcccatatcctagatcagctgccttgctgggctgaccttcagtgtgatcctgcatcccaaactcctgacctctccagagaacttggggtgttctcccaagatgctgggcctctgggaagcatcttcttaaggtgaacagccccaanatgcctcttcttaagttgggctaagttactccatgctgactatcaacccccaagtgtgaaaaaacacgtttattnctgangggaaacaccggagttgtncctaactctacctttgcttcttaanaacacctttgcttttggttggaaatgnaaaatttcaagtaaaggggttngggttttttttccggataattntaattntttaattcccnaaanccttgttttgggtggaagcncttccnccnaagnttanngtcananaaaaaanacctgcncggngggcnnccnggcn

SEQ ID NO: 5538 - DNA, 855 bp, Homo sapiens
  misc_feature 3, 637, 650, 651, 701, 785, 800, 803, 806, 811, 822, 828,831, 834, 836, 841, 843, 846, 851: n = A,T,C or G
atnactactatagggcgaattgggccctctagatgcatgctcgagcggcccgccagtgtgatggatatctgcagaattcgcccttagcgtggtcgcggccgaggtaccaacatgctttaccatgctgcaaaatttaggatcctgtggctgaaatattttgtaagaaatgatgcatcctgaatttatcattgaatttcaagtcttgaaataagtaaattcacatttccttgttttggcatagaagtgtttagctgattaaagtttttggcacttgttttgcatttcctctgagagggcactaatgtatgagagaaggtaaaccgaaccttctaagggaaaggaaagttaaggaggcaggaaaagcatctatagctctgttttcgggatttaagagtataggttctggaggcagactgctcagcagactggagccaggtcccaagtctggctttgcctgtcactagctgtgtgagctctgccttagtgagtctcagttttctcatctgtcaaatggaggtgacgagggctgtggtgaggatcaagtgaaaaattcacaaggagcccttagcccagtgcctggcgcttagtaaatattcaacaaatgttattagcaatttgctgtctgtaaggacacctntacagctactcannaatattctgagagctagtgggttctttggctaaggggaagatgaagagtnttactgaatcgcacattcattcttagtaaaaccatttcccattctggtgcttgggaattttgagactggatgaagggaattttnttttttcctaaaagnccnccnggaanggggcctttantaaaancantgnanctttntnaantaaanggaa

SEQ ID NO: 5539 - DNA, 875 bp, Homo sapiens
  misc_feature 3, 96, 112, 149, 170, 215, 222, 231, 234, 242, 265, 306,314, 347, 385, 387, 402, 405, 411, 416, 417, 434, 438, 442,443, 452, 454, 469, 485, 487, 503, 507, 509, 514, 516, 519,531, 545, 554, 561, 569, 570, 578, 596, 598, 600, 601: n = A,T,C or G
  misc_feature 603, 610, 621, 637, 673, 674, 677, 678, 682, 685, 686, 688,691, 703, 705, 708, 710, 711, 712, 716, 722, 724, 725, 731,739, 748, 755, 756, 760, 762, 776, 779, 783, 789, 795, 796,806, 810, 812, 815, 826, 827, 830, 832, 835, 839, 840: n = A,T,C or G
  misc_feature 856, 857, 862, 865, 868, 872, 874: n = A,T,C or G
tanttttacgactactatagggcgaattgggccctctagatgcatgctcgagccggcccgccagtgtgatggatatctgcagaattcgccctttcnagcggccgcccgggcnggtactgagctccacaaacgtggccatggttggtgcngaaatgattctgagtgagcangtagaagtctcacgtcctgctgtgtccagagttggttccttccanagggttngtggtctcnctngcttcaanaatgaagccgtggaccttcacantgtgtgttacagctgttaaagatgttgtgtctggagtttgntccttcanatgtgtctggagtttctcccttctggtgggtangtggtgtcgctgacttcaagaatgaaaccctagactgncntggtgatcgctgtanctnttaaangtggnntggacccaaacagtgancaancacnngatttttcntnaagaggggtaaaaanaaaatttccactgatntngaagggaatctaagcngttncntgctncncgngtaccttggggncgctccacgcttanggccaattncaacccnctggcggnngttactanaggaatccttagcttggnancnnanttttggngcaaacatggnccatagcttgtttccngtggagaaattgagattgagttgacaatttttaccnnaanntttnganncnctngtttttatagtntntancnnngggngcctananngggggncttacctnccatttgtntgggttnngctnanctggtccattttcnagntcgngaaatnctggtnngcccatttgnaatnanttnatctgtctaannacngnganaagnngatttagttttttgcnnttttnccnttntatnant

SEQ ID NO: 5540 - DNA, 881 bp, Homo sapiens
  misc_feature 500, 531, 532, 544, 560, 589, 611, 623, 629, 631, 648, 659,678, 687, 691, 706, 708, 714, 720, 721, 722, 737, 745, 756,760, 762, 764, 769, 772, 780, 784, 786, 791, 800, 803, 806,811, 814, 826, 832, 835, 839, 843, 855, 856, 858, 862: n = A,T,C or G
  misc_feature 863, 866, 871, 874, 877, 881: n = A,T,C or G
gtatacgactactatagggcgaattgggccctctagatgcatgctcgagcggccgccagtgtgatggatatctgcagaattcgcccttagcgtggtcgcggcccgaggtacttttttttttttttttttttttgtcataagataatgcagaacagagagatggctacagccatgcagatgagaagaagaaaagaaatttcaaatcttggatgtttcttttgcccctaaggcttgaggacagggaacaaaaaatgagaaacacttaccctatataaagcacccagttcagcaggcctgtgcggaacagaaatgactcctgaggaaaggtgggggccggtcctgaatagttgatttctctctttaatgaaaaagaacatgaggccggatgcggtggctcacgcctgtgatcccaacactttgggaggccgagcaggtggatttgcttaagctcaaggagttcaaggaccagtctgggcaacttgggtgaaaacccccgcctntacaaaaaaatacaaaaaaattattcaggcnntggtggtgtgcncttgtagtcccaactnctttgagggggctgaaggcaggaaaatcncttgaaccttgggagggttgangctgcatttgancccaananttgagccactgggactnctgcccgggcngggcggttcgaaaggggcnaaattccanccancttgcggggcgtatntnagtggnattccnnnctttggtaccaaaanttgggcgnaaatttggggnaaancntngtttnttnggggaaanttgntntcccnttcacaatnccncanaaatntcngaacccggaacnttaatnggnaaancctngggggtccttanngnggtnnctnacctnccnttnagtn

SEQ ID NO: 5541 - DNA, 886 bp, Homo sapiens
  misc_feature 1, 691, 692, 718, 721, 724, 729, 759, 769, 775, 776, 787,791, 799, 811, 818, 820, 826, 833, 834, 839, 846, 847, 857,860, 861, 875, 881, 884, 886: n = A,T,C or G
ntgatacgactactatagggcgaattgggccctctagatgcatgctcgagcggccgccagtgtgatgggatatctgcagaattcgcccttagcgtggtcgcggcccgaggtactctgcgttgttaccactgcttcccgcgtacacattacttacacaaactgtttttgatttgtcccttactgaaactgtccttatgcttaatcatttttgtctttctttcatatctattagtttctctctaattgctttgatctgtatttttagctacattcactgttattttcctaagcctttcttgtattttgaagtgtccattttgtttccaactctctctcgtttttgtatattatttttatctttagtttttatatattaagttttatctttaagtttttaagttttctaatttttaaaattagttccagcatgtgggtatataattttaatttttaaacttatgccccccaatggattacttaaattattcttttctgagaatttacaagaattttaattataatctctattttggtattaataagattggatgggcataaattaaaaggtgttattttttcatgaaaaaagttagaaaattaaaacctttctttggcttatactaattcaaatttttgggttctttttttttaaaggccgggcatttttttcagaaaccaaaaaattccttannaaaaaggaaagcattctcccggtacnatnttnaaatnagagcctgggggcttggttaatgggaatanaatcccaaantaacannggggtttaaangccngaccaggngcttattttttnatcattngncaaatntggaggnnagggnccaattnnggtctggganatnnacccccttaatccngggggnttncn

SEQ ID NO: 5542 - DNA, 859 bp, Homo sapiens
  misc_feature 2, 3, 8, 36, 616, 638, 700, 712, 771, 778, 788, 812: n = A,T,C or G
tnntagantgtaatacgactcactatagggcgaatngggccctctagatgcatgctcgagcggcccgccagtgtgatggatatctgcagaattcgcccttagcgtggtcgcggccgaggtactggggggatgcacttgagtgccatttctgatactgtcattgtatgactgctgatgctcgtttatgttgttctttggaagctatagtgagcctgatgttttcacattttaaaaaaatgcttcctgagacttctttaagctcctctaacttcttcagtgcatttgggatcaaacttagctcttagatcagcaaacctgacttgcttctacttttgcaatttttcaggccttaccatatttcttatctctgtcttcccacctgataggaaaatcttgcagatttgaaacagtggtttctggcctgctgctgcagcaaattccctatgtttatttaagaagtcgggcctatgcttttaacctacaaatgatgagtaatttacttgcaatgaacacaggtagcctgctgctgtttataacctgttgaggatatttatagcaggcaggaggcaggcctagtgtgttattgacaggtgactttagagaatgtcattggccnggtgcggtggctcacgcctgtnatcccaagcactttgggaagccgagcggccggatcatgaagtcaagagaatgagaccatctnctggctaacacngtgaaaccccgtcttttacttaaaaatccaaaaaaaaaaaaaaagaaaagtcctggccnggccggncgcttgaaanggcgaatttcacccactggcgggncggttctagtggatcccagcctggttccaacttggcgttaatcatgg

SEQ ID NO: 5543 - DNA, 870 bp, Homo sapiens
  misc_feature 2, 3, 4, 33, 594, 604, 767, 864, 866, 868: n = A,T,C or G
tnnntagtgtatacgactcctatagggcgaatngggccctctagatgcatgctcgagcggccgccagtgtgatggatatctgcagaattcgcccttagcgtggtcgcggccgaggtacgcggggacctgctgtgctcttgcttgcacagtgtcctggagctggacctggctctgggtttccaggaagcagtttgactaaaggcagcaagctgcttcctctgctgcctgagataccagaaccatacagaaagacatgcaaagcacaccaaattgtctacagcttaagatcaacaaaaatcctttttcattaattataaattcacagagaatataaacaatgatccttattatcccctttactggctcacacagggagagagaagccaaaagcccaactgattcccaatggtgaagattgagaaaaacgctcccacgatggaaaaaaagccagaactgtttaacatcatggaagtagatggagtccctacgttgatattatcaaaagaatggtgggaaaaagtatgtaatttccaagccaagcctgatgatcttattctggcaacttacccaaagtcaggtacctgcccgggcggncgctcgaaanggcgaattccaacacactggcggccgttactagtggatccgagctcggtccaagcttggcgtaatcatggtcatagctggtttctgtgtgaaaatggtattccgctcacaatttcccacaacatacgacccggaagccttaaagtggtaaaagcctggggtgnctaatgagtgagctaactcacattaattgggttgcgcctactggccgctttccatcgggaaaccgtcgggcaactggattaatggaatcggccaccncncngg

SEQ ID NO: 5544 - DNA, 875 bp, Homo sapiens
  misc_feature 2, 3, 4, 360, 470, 496, 527, 535, 548, 558, 559, 564, 568,576, 579, 599, 605, 610, 611, 616, 618, 631, 633, 634, 637,640, 643, 644, 658, 660, 661, 671, 675, 676, 678, 683, 685,688, 694, 699, 700, 701, 702, 707, 710, 717, 719, 721: n = A,T,C or G
  misc_feature 722, 725, 727, 728, 737, 738, 745, 747, 749, 753, 754, 756,757, 761, 763, 766, 767, 772, 775, 776, 777, 780, 784, 789,791, 792, 795, 796, 797, 798, 799, 800, 804, 809, 810, 811,812, 816, 825, 834, 835, 836, 837, 840, 844, 845, 847: n = A,T,C or G
  misc_feature 850, 851, 852, 853, 855, 856, 858, 859, 860, 861, 862, 863,865, 866, 868, 869, 870, 871, 872, 873, 874: n = A,T,C or G
tnnnatattgtatacgactcactatagggcgaattgggccctctagatgcatgctcgagcggcccgccagtgtgatggatatctgcagaattcgcccttagcgtggtcgcggccgaggtactgagctccacaaacgtggccatggttggtgcggaaatgattctgagtgagcaggtagaagtctcacgtcctgctgtgtccagagttggttccttccagagggttcgtggtctcgctggcttcaagaatgaagccgtggaccttcacagtgtgtgttacagctgttaaagatgttgtgtctggagtttgttccttcagatgtgtctggagtttctcccttctggtgggtttgtggtgtcnctgacttcaagaatgaagccgcagacagtcgtggtgatcgttgtagctcttaaaggtggtgtggacccaaagagtgagcagcaacaagatttttcgtcaagagggtaaanaacaaaagttttcacggtgtggaaanggtattctgaaccggttcccttgttccccgngtacctgnccgggcgggccgntcgaaagggnnaattncaanacactggnggnccgttcttgtgggatccganctcggnccaannttggngnaatcatgggcatnanntgnttnctnngtgaaattgttatncnnttaaaaattnccannanattcnanccngaagcntaaannnntaaanccnggggggncntnngangnnagctaactnnaattaantngngttnngnntaantngcnnttttnaannnggnaaanctttntnnccnnnnnntttnttaannnnccancccccgggnaaggggttnnnnatngggnntnttnnnntnntnnnnnntnnannnnnnng

SEQ ID NO: 5545 - DNA, 885 bp, Homo sapiens
  misc_feature 9, 413, 594, 616, 637, 639, 651, 671, 682, 683, 699, 703,706, 739, 748, 757, 766, 779, 780, 797, 798, 807, 808, 810,811, 820, 826, 838, 839, 840, 853, 857, 860, 861, 863, 865,866, 875, 876: n = A,T,C or G
ggtgtatcnactcactatagggcgaattgggccctctagatgcatgctcgagcggccgccagtgtgatggatatctgcagaattcgcccttgagcggcccgcccgggcaggtacagttttgacagaaggcacacattttatttctaaatttctgttaaaacaggatcctccagtttgagtccgttactttttgcaaatggtggagttggagacagtagagaaagttttgcagcgttaagtatgatgtcacaattaaaggttataaaaagcaaatgtgaaggtcctttgtaaaagaagtggttcactgggcgtgagttgaatttacaaattaagcttttgaaattaatgctaaatatcaacttataaaacatttttccctggaaagaaaaaaaaagtatatcttacttctgcancatatttctttttatccacaggtatgctcttgaaccttgtccatcaagtgaaccccagtgaaagtgaaactgaatcaatcttgtaagtgccatccaggggtcctcccttgagccactgctttgtcctggagagtcatcaaactccacgttgaaagccatgaccattgttgaggatcctcanggaaagtttgcttggacatagngaaaacaaaacgggggctttnangggaaagggcantactttggcttgaatgaagngttcgaatgtnnaacaaggggacttggncctnttncctttggcaatgggggaagtcctttattgccantggctaagntcccgttgnggtttggcnaaaccttgggccnngaaccccccctaagggnnaattttccnncnncttggcggncgtttntaagtggatccnnncatggttccaaancttngcnnanannaggggaaanntggtttcct

SEQ ID NO: 5546 - DNA, 908 bp, Homo sapiens
  misc_feature 4, 607, 621, 627, 652, 659, 682, 697, 702, 710, 719, 720,738, 752, 755, 758, 759, 773, 780, 788, 789, 793, 803, 806,811, 833, 837, 841, 843, 847, 850, 861, 868, 877, 878, 883,891, 893, 902, 903, 906: n = A,T,C or G
ggtnatcgactactatagggcgaattgggccctctagatgcatgctcgagcggccgccagtgtgatgggatatctgcagaattcgcccttagcgtggtcgcggcccgaggtacgcggggacctgctgtgctcttgcttgcacagtgtcctggagctggacctggctctgggtttccaggaagcagtttgactaaaggcaagcaagctgcttcctctgctgcctgagataccagaaccatacagaaagacatgcaaagcacaccaaattgtctacagcttaagatcaacaaaaatcctttttcattaattataaattcacagagaatataaacaatgatccttattatcccctttactggctcacacagggagagagaagccagaagcccaactgattcccaatggcgaagattgagaaaaacgctccccgatggaaaaaaggccagaactgtttaacatcatggaaagtagatggagtccctacgttgatattatcaaaagaatggtggggaaaaagtattgtaatttcccaagcccaagcctggatgaatcttattcttgggcaacttacccaaagtttaaggtacctgccccggggccgggccgntcgaaaaggggccnaatttncagcacacttgggcgggcccgtttnttaagtnggatccgagcctcggtacccaanctttggcgtaatcantggtnaatagctntttcctgtnnggaaattggttttcccgnttccaaattccaancancannacaaacccggaagncttaaangggtaaanncctngggggtgccntantgagngggccttaactcccattatttnggtntgtncntcanctngccccgttttncaagatngggaaaacnntggtntggccctncngcatttatnnggnat

SEQ ID NO: 5547 - DNA, 918 bp, Homo sapiens
  misc_feature 1, 18, 31, 36, 39, 41, 44, 47, 58, 163, 423, 438, 466, 498,505, 518, 524, 525, 526, 530, 535, 565, 571, 572, 575, 581,583, 585, 601, 611, 619, 621, 634, 636, 648, 657, 659, 666,671, 677, 679, 681, 682, 683, 688, 693, 695, 703, 709: n = A,T,C or G
  misc_feature 711, 714, 715, 731, 738, 740, 750, 751, 765, 766, 778, 780,782, 783, 786, 787, 798, 799, 817, 832, 839, 840, 850, 856,868, 874, 886, 891, 894, 901, 903, 912, 916, 917: n = A,T,C or G
nggatcactactctactnctatagggccctntggangcntnctntancgctcgccacngtcatggatatctgcagaattcgcccttagcggccgcccgggcaggtactgagctccacaaacgtggccatggttggtgcggaaatgattctgagtgagcaggtngaagtctcacgtcctgctgtgtccagagttggttccttccagagggttcgtggtctcgctggcttcaagaatgaagccgtggaccttcacaagtgtgtgttacaagctgttaaagatgttgtgtctggagtttgttccttcagatgtgtctggagtttctcccttctggtgggtttgtggtgtcgctgacttcaagaatgaacccgcaaactgtccgtggtgatcgttgtaactcttaaaggtgggtgtggaccccaaanaagtgagcaaccagncaagaatttttcttcaaaaagggtaaanaacaaaagtttcccaccggtgtgggaaaaggntattttngggcgggttcccntccccnnngtanccttnggccagggaaccacgcctaaagggcgaaanttcccnnccnaaatgngncnggccctttactaaatnggacccccancctccggnancccaaactttggncntaaataataggncaataaacntnttttccnttggnaaaaantngnnnttccncgttncnaatttccnaatcananttnncaaatcccggaaaaanttaaatntntaaagccctnngggtggcctaaaanngtgggggtagcnananntannggcttcccccnntttaccccttttcccatnaaggaaaaacctttnttggccnngtaaattttnaaatcncccccccccccngggaanagggcccttttnaattnggnccccttncnttttctcgncccnna

SEQ ID NO: 5548 - DNA, 893 bp, Homo sapiens
  misc_feature 5, 22, 402, 503, 509, 551, 556, 562, 573, 595, 607, 608,611, 629, 644, 649, 656, 666, 680, 695, 705, 709, 714, 715,716, 718, 719, 721, 722, 736, 745, 748, 755, 756, 759, 772,773, 779, 782, 783, 799, 806, 813, 817, 820, 821, 840: n = A,T,C or G
  misc_feature 842, 851, 856, 865, 868, 870, 871, 881, 890, 891, 893: n = A,T,C or G
tactnctatagggcgaattggnccctgtagatgcatgctcgagcggcccgccagtgtgatggatatctgcagaattcgcccttagcgtggtcgcggcccgaggtactgtgggttctgagtcaaggatcccagtgctgccaggaaccagcagtcagctgcgcctccttgttggatgtcaaatcttgcttatatcatccaggatgaagtgaggaggaccccctggtagatcctgtggccgcttccatatcacattggagaggcgtttttcctggagcagcttctggcctatggaagaatctgctgcagggaatgtctcatccttaaacgtcccggcccatgttcaggtagtgatcccgcaaggtgggtaaagtcctggtctttgaacttgatgatggaggtctncactgaaggctcctggtaatacgccatgactctccttaaaagacttccgagtccttttcctgtttcctaggcaggtgtgttctgatggaggaggggaaacnggccangttccacagggctcttcaaggttaaaagagtggtgggagganactgnccaaangaaggaagaancatggcccggccgttctttggnaaaaaagaccannggnttggtgtttttcccgcgntaccttgccccgggncgggnccgttcnaaaagggccnaaatttcaaccccnatttggccgggccgnttaattaggnggantcccnnncnngnntcccaaaccttggngaaaaaatnggnacaatannctntttccctggtgtnnaaattnttnnttccttccccattttncccccancatttcngaanccnnaaacttaaaattgtaaaancntggggggcnaaatngagtgcccnacntnnttttaatttnctgtggccnncn

SEQ ID NO: 5549 - DNA, 893 bp, Homo sapiens
  misc_feature 9, 10, 12, 362, 637, 702, 715, 719, 725, 730, 764, 829, 834,836, 846, 853, 854, 867: n = A,T,C or G
tatgattgnntncgactcactatagggcgaattgggccctctagatgcatgctcgagcggcccgccagtgtgatgggatatctgcagaattcgccctttcgagcggccgcccgggcaggtacacactatgattgcacaacaacgcattcacctattgacgcatttctcagaacacagcctcattgttaagtgacacacgactgtattttagttggccgtgagttttgctgagagctaaacagcttccattgagggttctgccatctacctaggggcagttgaactaggaagtccccaagatctcttctgtaaaccttctatgacgttttctgtcttgggcagacaagctggatggagcctangggaggctgcttggcgacgcttctcccaactgccggagcgcctgtaacctggtcccatggatgtctccattctagtgaccctgctgtgagtgccacatctcaaaacctgcagacgcagggctcccattgacttccaatgctgaaaatgcccagtgtggaaaaaaagactaactgtcctcagtgcggttcttcgatcagaaactccttgttgggttcccagaaagcctggtttcgaagactctgaccctgggacgggcgacaggcacgccagtttnccaatgtctctgaagaccactccttctgtcaggtcacgcttcccgctggtcgcgtggtatgctanaactgccttattnctancatttnatacnctatctggatttcatgaatgccaaacttttgcanatgggctgactaccccaaagaaagaaaaaaatctctgggggcctacagggcaaatcttgacaaancttangncggtcctacntccttcnngggaggaagtganatcccgaaaggccagataacccgggg

SEQ ID NO: 5550 - DNA, 921 bp, Homo sapiens
  misc_feature 350, 427, 477, 514, 527, 618, 635, 649, 661, 668, 704, 706,709, 713, 744, 762, 773, 781, 786, 787, 789, 818, 820, 827,834, 836, 844, 845, 847, 852, 858, 862, 879, 880, 883, 885,890, 894, 895, 915: n = A,T,C or G
atatactacttagggcgaattgggccctctagatgcatgctcgagcggccgccagtgtgatggatatctgcagaattcgcccttagcgtggtcgcggcccgaggtactactgtgtgttgactcttgtaaatcctcccagtgaagagtcatcaaacctgggagtggtcttggggccctgacataccacttcatggagctggtgatggaaatttgctgatgttgttggccacccgaatgagcatgcgagcccctttcatgtgatctccatttttaacatgaatctttactagtatatagctgtgcagaatcatgaggttggtggccatctcggagggaattttgatcttctnggatttcaagttcttgcatacatactgaagagaacatcgtgtgcattcccggtagttgcctgcaaactgctcttttntggcaatgatgatgggcagtctggggcagcttcttcgggtattgcttcanaacccatgtaccttgcccggggcgggccgctcgaaangggcgaatttcancacactggcggccgttactaagtggatccgagctcggtaccaagcttgggcgtaatcattggtccatagctgtttcctggtgtgaaattgnttatcccttacaatttncacacaacataccnagccgggaagcntaaagtntaaaaccctgggggtgccctaatgaagtgacctacntnacnattnattgccgttgcctcacttgccccttttccantccgggaaaacctgttcntgcccacttgnatttaatngaatnngnccaaccccccggggaaaaggccgttttcntnttgggcnctttttncnctttcttnntnaattnacttgnttcncttggtctttcggtttnnggnanccggnttannttacttaaaagccggtaatncggttt

SEQ ID NO: 5551 - DNA, 887 bp, Homo sapiens
  misc_feature 630, 770, 811, 831: n = A,T,C or G
tagctacttagggcgaattgggccctctagatgcatgctcgagcggccgccagtgtgatggatatctgcagaattcgcccttagcgtggtcgcggcccgaggtacgcggggccggatggatccgtcggcgccacagccccgcgcggaaacctcaggcaaagacatatggcatccaggagaaagatgtcttgccccttctccagataatggaaaactttgtgaagcaagcataaaatctatcacagtggatgaaaatggcaagtcatttgcagtcgtcttatatgcagattttcaagaaaggaaaatacctcttaaacagcttcaagaagtgaaatttgttaaagattgccctaggaatcttatatttgatgatgaagatttagaaaaaccttatttcccaaaccgaaaatttccatcatcttctgttgcttttaaattatctgacaatggagactctattccttataccatcaataggtatttgagagactaccaaagagaaggaacccggtttctttatggacactacatccatggaggagggtgcattctgggtgatgacatgggacttggaaaaacagtacctgcccgggcggccgctcgaagggcgaattccagcacactggcggnccgttactagtgggatccgagctcggtccaagcttggcgtaatcatggtcatagctgtttcctgtgtgaaattggtattccgctccaattccacacaacatacgagccggaagcataaagtgtaaagcctggggtgcctnatgagtgagctaactcacattaattgcgttgcgctcactgnccgctttccagtcgggaaanctgtcggccactgcattaatgaatcggcccaccccccggggaaaaggcggtttgct

SEQ ID NO: 5552 - DNA, 905 bp, Homo sapiens
  misc_feature 618, 643, 684, 721, 743, 791, 827, 850, 874, 876, 878, 879,899, 900, 901, 905: n = A,T,C or G
atatgactactatagggcgaattgggccctctagatgcatgctcgagcggccgccagtgtgatggatatctgcagaattcgcccttagcgtggtcgcggccgaggacgcggggatgagatctggttgtttgaaagtgtgtagcacctccaccttctctctctccctccctctccctctcctgcagccaagtgaagacatgcttacttccccttcaccttccttcatgatgttaccattggaatgacatactgcatcctatagttataccatccactctgaaatcaatgtgactttaacttcagttccatacagaaacttcttttccacaggtaagaaacggttgaactggatgcaatttttatcacagcttgtgtaagactgcctctgtccctcctctcacatgccattggttaaccagcagacagtgtgctcaggggcgttgccagctcattgctcttatagcctgtgagggaggaagaaacatttgctaaccaggccagtgacagaaatggattcgaaataccagtgtgtgaagctgaatgatggtcacttcatgcctgtcctgggatttggcacctatgcgcctgcagaggttcctaaaaagtaaagctctagangccgtcaaattggcaatagaagccnggttccaccatattgattctgcacatgtttacaataatgangagcaggttggactggccatccgaagcaagaatgcanatggaagtggtgaaaagagaanacatttttacctttaaaagctttggagcaattccatcgaccagaagtnggcccaccaccctggaaagggcactgaaaaaatttnaatggactatgttgacctttttntattcattttccagggctgtaaancngnngaggaagggatcccaaaaannnaaan

SEQ ID NO: 5553 - DNA, 925 bp, Homo sapiens
  misc_feature 591, 595, 604, 624, 642, 655, 691, 710, 737, 744, 780, 787,792, 805, 807, 816, 821, 837, 860, 870, 878, 892, 896, 906,917, 922: n = A,T,C or G
tatcactactatagggcgaattgggccctctagatgcatgctcgagcggccgccagtgtgatggatatctgcagaattcgcccttagcgtggtcgcggccgaggacgcggggatgagatctggttgtttgaaagtgtgtagcacctccaccttctctctctccctccctctccctctcctgcagccaagtgaagacatgcttacttccccttcaccttccttcatgatgttaccattggaatgacatactgcatcctatagttataccatccactctgaaatcaatgtgactttaacttcagttccatacagaaacttcttttccacaggtaagaaacggttgaactggatgcaatttttatcacagcttgtgtaagactgcctctgtccctcctctcacatgccattggttaaccagcagacagtgtgctcaggggcgttgccagctcattgctcttatagcctgtgagggaggaagaaacatttgctaaccaggccagtgacagaaatggattcgaaataccagtgtgtgaagctgaatgatggtcacttcatgcctgtctgggatttggcacctatgcgcctgcagangttnctaaaagtnaaagcttttagaagccggcnaattggcaatagaagccngggttccacatantggattctgcacatggttaccataatgaaggaccanggttggactgggccttccnaagcaagaattgcaaatggcaatgtgnaaaaaanaaaaaatatttacctttaaaagctttggaccaattnccattcnaccanaagttggtcccancnagccttggnaaggncacttgaaaaatcttnaattgggccttttttgacccttnttttatttanttttccangttttttaaaaccngggnaggaagggancccaaaaaagnaaatnggt

SEQ ID NO: 5554 - DNA, 639 bp, Homo sapiens
gattgtaatacgactcactatagggcgaattgggccctctagatgcatgctcgagcggccgccagtgtgatggatatctgcagaattcgcccttagcgtggtcgcggccgaggtacttttttttttttgttttttttttaattttgaacaactgaagaatactaaatcagagagtagctgaagcctctgccccggtgaccattgtcagccagggacaggccttgaacaactcttttccctgttagatgtaaagttagactagtgcttagtagctctgaataaatacttttctctgtcagtaaagtgtctgcattaataataaatattaattatatgggacagttttgacagttggaactgcctgtcttcatggaaaaattcagaaattgtttaaattgggaacatttttgccttctttattgagtagtatagttcctatattaactttgttattgttgtagttgacctcactttaattagaactgtggtcagtatggaaaggatactcatcatacttgagccgaaatgagattatttatttataagcattgaatgtgggccaagctggcaggaacattagagtaaataaagccttggctgctaaactttgaaaataaactatcaagcatgatacatacc

SEQ ID NO: 5555 - DNA, 931 bp, Homo sapiens
  misc_feature 3, 639, 655, 673, 691, 737, 745, 763, 821, 837, 848, 849,850, 859, 870, 874, 877, 884, 897, 898, 908, 917, 921: n = A,T,C or G
tangggattgtatacgactactatagggcgaattgggccctctagatgcatgctcgagcggcccgccagtgtgatgggatatctgcagaattcgcccttagcgtggtcgcggcccgaggtacgcgggggcggacgggcagcactctttctgcagaaggtaaaaatcaccttgctgaggaagcttttcgtctgctgattcttctttgtgacatcggggaataaggatttatttctaacagtcttgggggctcgtctgggatcacccagtctccttcgggtcggggcctctgattcccgcccccccaccaaggggaggcgccccactgccttactgcggtggcctcagggactgggaatccggacttacccgttgtgatgaataaacccggaccctcagcaacgtggaaaacggcgaataggcttgcattgcactgcctcggggaccagataaactctgttcacagagcaaagtaaagaaacgtcgcaagggtgcgacaaagtacctgcccgggcggccgtcgaaagggcgaattccaacacactggcggccggtactaatggatccgagctcggtaccaaacttggcgtaatcatggtcatagctggttcctgtgtgaaaatggtatccgctcacaattncacacaacataccaanccggaaacataaaatgtnaaagcctggggtggcctnaatgagtgaacttacttacattaattgcgttgcgcttacttgcccnttttcaantcgggaaaacctgtcgtnccaacttgatttaatgaatcggccaacgccccgggaaaggcggtttgcgtattgggcncttttccctttcttgnttacttgaatnnnttgggcttnggccgttcggnttgnggngaagcgngattaacttaatnnaaaggggggnataccggtnttcnaaaaataagg

SEQ ID NO: 5556 - DNA, 911 bp, Homo sapiens
  misc_feature 1, 2, 3, 22, 57, 675, 747, 763, 804, 813, 816, 823, 872, 893: n = A,T,C or G
nnnactacttagggcgaattgngccctctagatgcatgctcgagcggccgccagtgngatggatatctgcagaattcgccctttcgagcggcccgcccgggcaggtacttttaggcagctcacagagctgatctcaactttgagcaccatgggaggtaaagacctcagggcagttggcctcttgtgcagctaaagtgtttagaaagccagaacgaagtgaaaggaagaccctagagtgggtcagctttctgccaaagatagagaatatagctatagaatgctcccagcctacagtatagagctgttgttgggaagtggctgctcagccagtgcctgtatgccctagcctctcacacagttggactacatgactagttcttgccaatggagtgtgagtagaaatgacgtcagccacttctagaactgtcccataaaaacctcctactatccccctgcctgccagctggatgtcaatactcaaaggcatattaaagccatgtttttaaagggtatgtcagcttggatcactgaatacctgtataaagcagaaccctactgtagattggatgttaagtgagcaaggaatatatttctgggttatgttaggtcattgaaatttgacctattatttgtttcagcagttagcataaccttatttggaacaaatgatctctntgttgtgactggagtgaactggatattggttggactgtctgctggcatttaataatggccccaagaaatctnaagacaatttaattancccttggggttgggacttgcttattatattaacctttaagntaaactcanccncttttgnaaaggaatattggcctaataatggcaatttcaatttgcctaatcataanaatccaaaataagtcctttgnaaatggctggatatgtaa

SEQ ID NO: 5557 - DNA, 876 bp, Homo sapiens
  misc_feature 271, 360, 375, 378, 394, 435, 441, 442, 461, 462, 463, 475,477, 482, 495, 500, 502, 505, 514, 531, 552, 553, 558, 573,575, 587, 609, 611, 615, 620, 624, 633, 642, 647, 651, 663,664, 668, 673, 676, 685, 687, 689, 691, 697, 704, 720: n = A,T,C or G
  misc_feature 721, 726, 731, 733, 738, 740, 746, 749, 752, 754, 755, 763,771, 774, 775, 779, 784, 788, 789, 807, 808, 812, 815, 817,818, 840, 842, 843, 845, 848, 851, 856, 857, 860, 874, 876: n = A,T,C or G
tgctcgagcggccgcccgggcaggtactgggattacaaagcataggccaccgggcatggccccaattctgagcattaatttatttattggtgagatgaaagtggtaatttctgttcttctacctttctaggttttgagactcaaaattaataatacatgaattttttgtgataaagccctaaataaatataaggcattgatatgaatcactccatgtattcccaccctggaccttggcttcaacctgatattatgcaatagaataagtatnaggatagctcaacttggatatgcttaaatctagcatgttcaaaaatatcccctgcccattctcgatcctttatttctcagcttccctgnttatttcgaggcatntcnatttttataggtcccngggtagaaaccttatattctttgatgattacttctcttttnctgcannccctttttaaggcttgcannntctttccaaaantntctgntgaattggcctgnctatntntgnaatgggtgnatatagatgccacgaantaatacttttgcggtgctctnnccttnggtattaaagtgggncntggtataaaatnaaaaatttaaagtgccctttgntntggncttantaangaacaattncgtgaatgnagacnaacnccttttacttannccanagaanggnattgtgaantntncnatcatnaatggcnttgagaatctttaccnnttggncccangntaatncnatggtnaanatncnntcctaaanacgaggtnttnntganggccngtgnntgagatacccaggacccnntggncgngnnaccccatgaggggcgaaatttncnncnccncgnggcgnnganataatgagggaatncn

SEQ ID NO: 5558 - DNA, 874 bp, Homo sapiens
  misc_feature 472, 538, 545, 618, 626, 631, 662, 697, 723, 728, 750, 752,763, 766, 773, 776, 782, 791, 798, 804, 815, 817, 826, 836,839, 841, 846, 858: n = A,T,C or G
gggccctctagatgcatgctcgagcggcccgccagtgtgatggatatctgcagaattcgcccttagcgtggtcgcggccgaggtacatcagcctgtcttagcctgagctgctttgaagaccatggggtcttgtgtttccaacttcgaagtgctgatgtggacagtttgccaatgttctcttctattgcaagttcagccagactccatgactcatctgatcccttttatggccaaatcatccttcagagtagggaacactcagacattctgtgcatgttgttcccccaaagcatggtcatcacaaaagtcctgagttctggtgtgtgctcccgcctcctgggtatacaagagagaaggcaggaatcaggagttccagaagcatatacatgtggctaccccagcaacaagcgcatcctgtgctcagataagctgcatggttgggagtgttttttctcgcacgttgaggcttagnggagatgggcaccactgccatttgcttcagaagaagggctggtctggtccttaactggcatccccnactgccnagatcattctaggaataggttatttctgaaatgttttattagaatttcttaataccatcctggtttgggtcangccaattnctttngattgggaaagggtcaacttgggggccaagnggtgccttaagggcaaggccccacacaacttggcncacctttttcccgttaatgacccacnagcanaacagaattttgaggcccaacncnctaataattanctngcccggnccngtcctnttaaaaggngcgaaantccaancaaaattgggngnccgttactnagtggggatngancnctgtncccaactttggntgaaacatggtataag

SEQ ID NO: 5559 - DNA, 903 bp, Homo sapiens
  misc_feature 25, 515, 543, 623, 651, 653, 733, 753, 798, 803, 829, 831,851, 871, 873, 895, 898, 901: n = A,T,C or G
gtgtatacgactactatagggcganattgggccctctagatgcatgctcgagcggccgccagtgtgatggatatctgcagaattcgccctttcgagcggccgcccgggcaggtaccactttgagctgagcaatggacgtggacaagaactccacttcctggtccagctggttcttgagcatttctagctgcggagattcagctccgtgatgttaatagactgcgccatgttgggaaggccgacttaacgaagagccccgcgtacgcggggacaacaaagagctggcagctcctgaaggaaaagggcttgtgccgctgccgttcaaacttgtcagtcaactcatgccagcagcctcagcgtctgcctccccagcacaccctcattacatgtgtctgtctggcctgatcaagtgcatctgctcggagacgctcctgacaagtcgggaatttctctatttctccactggtgcaaagagcggatttctccctgcttctcttctgtcacccccgctcctntcccccaggaggctccttgatttatggnagctttggacttgcttccccgtctgactgtccttgacttctaaaatggaagaagcttaactggtgaaagggaaagacttnaggccatcacaagataaaaagaaaaatncngggaaagaaaatctcacaaaaaccgtctgaaaatagaggaagacaaacttaaagcccccaccatttgaagaaaaaggccnttgagggaagaaatggcttntagatggaatcaagcaaccggaaaaagaacagggaagagattaanaaacnaaaattaaccagaaccggcccccgantncaggttttagaaaaaaagtnttcttaagctttgaaaaaananaatccaagaatttttgaaaaanctnaanct

SEQ ID NO: 5560 - DNA, 888 bp, Homo sapiens
  misc_feature 683, 729, 733, 749, 756, 784, 787, 806, 809, 818, 819, 833,863, 865: n = A,T,C or G
agtgtatacgactcctatagggcgaattgggccctctagatgcatgctcgagcggccgccagtgtgatggatatctgcagaattcgccctttcgagcggccgcccgggcaggtacgcgggtctgtggaaaaattgtcttccatgaaactggtccctgatgccacaaaggttggagaccgctgctttagatggtgaattaattgtaagaaggataaaatatgtgtccactacttacatactataattttatctatcttcagttggaactgaaaaaaaaatcaagttaaatggttgcagaaataattcaacgtaaaaaaagtgaagttagaaaaaagtaacttaataatgactaaaataaggcagatgagtttgagatggggctgttatcctttattcctgtaaaggtctaatgatacagagttaggaaataccgaagtgccatttgcaaacactcctgaaatctaatgaccgtggtagatgatacaaatcaaccacagttcttttatctactgcatttagacatagcttcaaaatactttgtaatcaagctgttggtctttttaaatgaaaacctatttagtgtcctagatgcaatctaataagggagggaaagtaggtaatggaaaagtcagaaacaatctttagatcacttattcagatccagttagccctccaaagcgtanaccttctgttacattgaatttatagaaagctagagcacatcagttntggnggttctcaaccttganacccaanatctcaccacctgatgtgttgggatggntgncacaaatgttttttcattnatngatgaagtnnaagttggttttggntttaggaatagccccaaccttcaacccgtnanttaggttcgtcattggaatccat

SEQ ID NO: 5561 - DNA, 890 bp, Homo sapiens
  misc_feature 1, 21, 28, 32, 34, 38, 44, 47, 435, 649, 658, 742, 752, 758,766, 814, 815, 860, 864, 871: n = A,T,C or G
ngtatacgactcactataggnctatatnggcncntcgngccctntanatgcatgctcgagcggcccgccagtgtgatggatatctgcagaattcgccctttcgagcggcccgcccgggcaggtacgcgggaggcttttgacttctggttttagactttctttagcttctgttgttagacaacattgtgcaagcttggtttttataagtttgcgtggattaaactgaacttaatgaaattgtccctccccccaaattctcagcacaatttttaggcccacaaggagtcaagcacctcaaggagatcttcagtttgaacttggtgtagacacagggatactgatgaatcaatattcaaattagctgttacctacttaagaaagagaggagaccttggggatttcgaggaagggttcgtaagggagattttagctganaaataccatttgcacagtcaatcacttctgaccaagttatcagaaaaaggagaaaagaatgtctccccactaaatgttctagggtgggtgagaaatctaggttggttatctaaatcaacaatatttagatattccaatatctaaatattggtggaaatctctcctgaagtgttcattgaactctaaaagagacagcttgtgtatcaagtggcangggtttaanggtcaattttttattcccatattaatcctttaatatttaaacaaatttccttcttgagtttaaggataaaatggggatgggttnttgcctgggncctggnccctcatngggaccatcaaaagggcaatggttgcaaaaaaaaaaaaaaaaaaattnnacccttcaaattgcattggggggaaccccccccataattaaatancttnccccaancccacccttggcacccggg

SEQ ID NO: 5562 - DNA, 874 bp, Homo sapiens
  misc_feature 2, 17, 18, 20, 22, 683, 692, 694, 719, 740, 769, 770, 800,809, 817, 820, 823, 826, 831, 834, 869: n = A,T,C or G
angtatcgactcctatnngncnatattgggccctgtagatgcatgctcgagcggccgccagtgtgatgggatatctgcagaattcgcccttagcgtggtcgcggcccgaggtactaaaacatacaaacaaaatttaaaaattaagagttattgaacctaaagataagaaaaaaggttaacctgaattatttgaatagccaagacaacaaaacctgaaggatgcttaaagctttcttaggaaagctactttctaataggaaaaaggcgtatccaactagaaactcttaatagtttcagcccttttagaagctgtcccatcatttcaaaatttcgaaggcaagtcttggcaaattgctagctagtgtgggtactgtgatttaaattcaggtagtttagatcagagttgccatttttaagcattagtctataatgacctaaacctcaatttaattcttcttattaaaaacttttttttaaaataggaaattaataaagaaggcaaaaacaacagtgtctgctaggaattactaaaactcagtatattgcatttggcaaagtaaaagcttaaattaagaaaatcatcatatcatttcaatttagaaagtgagtcttacttggtttccctggtattgcagatgcattagcttttgtaataaaagtctttgcaactgaagaagtagatnggtgctcantngccactggatctacaaccactcggntgcttctggttcgaaccacanaactagatttggtttaccggttatcttgnnccgcattgggtcttggcggtattgaaccgntaggggtanaaaaagcnaangtnganctttntgntttaacttggggtttaagaaccttttttcctttangggtg

SEQ ID NO: 5563 - DNA, 898 bp, Homo sapiens
  misc_feature 676, 757, 768, 793, 801, 824, 831, 874, 883, 887, 890, 896: n = A,T,C or G
gtgtatcgactcactatagggcgaattgggccctctagatgcatgctcgagcggcccgccagtgtgatggatatctgcagaattcgccctttcgagcggcccgcccgggcaggtacagttagcaagaggataactttttttattatctctgtccttctccctcaggaagcagagaattatcagattggtgagagaaaggaaataaaggtctgaacatgtgtctcaagtcacctcttttgggagcactctgttctcagtttattttaattctgtttctcaatttaatgagtttactagagcagggtccactattaccctgtggagatccttaatgatacatggatatgtttaattctgggaataaagtagttaaactggctagtgattatgccacattgttagagtcatctttgtcaataagaaaagttgttcatatttatgacatctgtatccatttcttcagaagtgtgactattattcatatatccccaatacacacaaaatatatagttttaactaaatttttaatctgttacatatttttctgggttactagctagagacatcctggttgtttccaatttgttgtaaactggaaatttgatgctaaacaagtagtgttatgacaagccttcttattcataacttgacatgccttttgccagtatatttttanatgaaattttgagaatatggtggagtcaaaatcatatgaacacctttaaattttgctccggttattacccatattccctgngcaaaaagtgncccaattttacaatgccctatttgnatagacgngtttaatgggaccctcggcccgngaccccncttaaggccgaaattccaaccccactggcgggcggtactaagnggaatccgngctnggnaccaanct

SEQ ID NO: 5564 - DNA, 912 bp, Homo sapiens
  misc_feature 4, 10, 13, 423, 439, 444, 463, 511, 536, 544, 567, 573, 583,592, 596, 611, 613, 614, 615, 629, 634, 636, 638, 641, 642,644, 654, 656, 658, 663, 671, 673, 677, 688, 692, 696, 699,700, 701, 704, 707, 708, 709, 710, 712, 723, 727: n = A,T,C or G
  misc_feature 728, 730, 737, 738, 746, 747, 749, 753, 755, 757, 759, 760,762, 763, 764, 768, 769, 774, 780, 783, 788, 789, 795, 798,804, 809, 811, 814, 828, 829, 832, 838, 839, 840, 841, 844,848, 851, 853, 854, 855, 856, 857, 859, 860, 861, 863: n = A,T,C or G
  misc_feature 865, 866, 867, 870, 871, 872, 873, 876, 877, 879, 880, 881,882, 883, 886, 887, 888, 890, 894, 897, 898: n = A,T,C or G
cgantatacnacnactatagggcgaattgggccctctagatgcatgctcgagcggccgccagtgtgatggatatctgcagaattcgccctttcgagcggccgcccgggcaggtacaaaagttaagctccatttaccactcacttgacagcgtcctttaaatctgaacttgctcttgctcatgcggagcttggctaagagaaaccagatcagaatgcaagctgtaggtgggtgggtgagtgtgtcccctcccacactgctctctggtgggtttgggcagtccctggctctagtctctgctgcagattctcaggaccaaaatgtgggtgatttgtctgggtccaggcaggaaacagaaatcacacaagctctttttattagagataatataaagaatgattaaccaggtgacagtaaaagggcanggaagggaatacaaangtatncatggaggtagcaccacanggaagcaggcattcacactttgaggcttgggaacaagggggaaagatncttggactcatttgaaaggtggttnctttgganaagggacaatggggctgaatctnaaaacnttttgaagtngggggagtngggnatgccacttcaatgnannntggtattttttaanctttnangnaanncntgtggggggntngntccanccttcttntnaatnagggggaaatngttntttnggnnnatnttnnnngngacccctattnaggnntntttttgnnagagttgnnanaatncnananntnnnaatnnaattntttttngtngggannttcccnttntgtttngttananaanatgccctttttggnntancatacnnnnttngatnggntnnnnnannntntnnnaannnnacnntnnnnnatnnnantatnttnntctgggcctattct

SEQ ID NO: 5565 - DNA, 885 bp, Homo sapiens
  misc_feature 159, 571, 619, 696, 697, 722, 770, 786, 796, 802, 810, 822,834, 839, 869, 872, 884: n = A,T,C or G
gactactatagggcgaattgggccctctagatgcatgctcgagcggccgccagtgtgatgggatatctgcagaattcgcccttagcgtggtcgcggccgaggtactcatttcattgtagttcctaggttagggtcaaggtcatgaggtggaccaagcanctagctccaaactgccctccctgttgcgtggttccaatccctgctcaccttgcacaggttgcagggttcccatgacaccctctgccttctctagacacacctgcatcctacccactcaggcaaagaaagtcctctgctccaaattcatgatacgggaggcagcatggtggatagaaaatgcatgggctttgggttcagacagatttggcttccaaattctggttctagcttttgggaaactgatccaactattcaaactttctgagcctcagttatctgcaaaattgggataataacactgacgactttttaaaagtaataaatgagaggattactttacatccattgaactggcaaaaatcagaaagaaacaaaaataacagttgctgatagaaatatgaattgcttatancctattgggaaagcaatttggcaaccatctattaaaaacccatactgnttgaaagcagaacttcacatttctggaatctttccattccaaattaaaagcattcagcatataaaggatattgtgtnncaagaatgtctatttgcagcataantctattgtgggcaattgaatggaaaaaaaaggctttgtttattaatangagaaatgggttgaanaaattattgntcctgncccgggcngccggtttaaangggcaaataccngacanttggcggccgttcttatggatcccaactcnggncccaacttggcnt

SEQ ID NO: 5566 - DNA, 869 bp, Homo sapiens
  misc_feature 496, 645, 725, 740, 741, 794, 848: n = A,T,C or G
tactatagggcgaattgggccctctagatgcatgctcgagcggccgccagtgtgatggatatctgcagaattcgccctttcgagcggccgcccgggcaggtactgcctaagcttctttccacatggagtataatatgctacttctccttgaaggcgccctccaaagtttcttattcttgtctctctctgccagccatattccaatggaatacgcagttcgcgttcatctgttactcttcttcttttggaagtgccagagtgtgggcttgaagtaagtgtggaagaagatgtaccgtattacttttctattgcttctttaccaaataaatacaagctttgcagtttaaaacaacagaaatttaattttttatagttctgagggtcagtaacctaaaaactgatcttatgaaataaagttaaatcttggggatatgggtgtgggacagggctggtttcttctggggctctgatggtaaaatttgcttccttgcctttnctccttctagggagcctgcattccctgcctcctagtggcttcctcccatcactcgaacctctgtttccagcctcaggattcctaatgtgactctgaccgtttcatctcccgttatgaggaccctcttgaattggtaagaatcatacggngacactatggaagttaacttgaagaataaaaccctggaaaatagaaagaatcttctatgggtttatcacagaagattacnaagggcctgaattannagtggggacaatttcatcccctggaaaatgggataaaaacaattgaaatgaanctttggggggaacttaacaggactttatggcaaacttcatatgggagacttacntgaagggaggaaaaaatcctt

SEQ ID NO: 5567 - DNA, 862 bp, Homo sapiens
  misc_feature 3, 17, 23, 26, 631, 648, 690, 708, 711, 721, 722, 723, 772,786, 819, 822, 833, 844, 846, 853, 854, 858, 861: n = A,T,C or G
ggntcactccttcagtntagggngantcgggccctctagatgcatgctcgagcggcccgccagtgtgatggatatctgcagaattcgccctttcgagcggccgcccgggcaggtacattgtaattatgtttggttgcatggctgtcttatttccctttgatagatttagagacctcccaaagatttcttgattagtgataaacttagttatccactaatggaaaggaacagtgatgcatgtagattatagaaaatcaaacactgaatattctgattctcaattaatgttattttcaaatgattttgattatattagtattaatttgtattattcaatttttttccccagtatgagaataatgttatcactattgatctggttcaaaattcttctcaaaaaactcaaaaatggatgtggacatagctgatgtggcttattattttgaaaaagatgtgagtatcatcttctttattcctgggtcaggaatgtaagtctatcatgcctcaatgaattaaatatatttcatcacctttttatccacttacagatcaaccaaatggttcccttgctgccggtaattttggcccccctgcactcacatgcatcttgcttggttggatatttaagccncttatcaattggtctgnccaaaatatctcccctcttcttaaaaatcttaattattaacnacttggggggtacttaanttnggcctatatnnncccctatgatatttataatttccccaataaaaagtctgttaaaaaaagnctggacccgaattnataaaatatttggtggaaccttaaattatttanggngggattttcgntgaaaaatgangntggcttnnaaanaant

SEQ ID NO: 5568 - DNA, 919 bp, Homo sapiens
  misc_feature 361, 458, 476, 512, 531, 536, 539, 547, 550, 552, 556, 568,584, 586, 589, 602, 604, 614, 616, 617, 631, 633, 634, 647,651, 653, 674, 683, 685, 688, 700, 709, 712, 724, 727, 730,746, 749, 753, 762, 768, 769, 774, 779, 786, 790, 792: n = A,T,C or G
  misc_feature 800, 812, 813, 815, 816, 818, 830, 845, 847, 856, 866, 868,871, 872, 873, 878, 879, 887, 901, 908, 909, 918, 919: n = A,T,C or G
gactcctatagggcgaattgggccctctagatgcatgctcgagcggcccgccagtgtgatggatatctgcagaattcgcccttagcgtggtcgcggccgaggtactgtgaatgcaaagattctgaaactaaataaaaagaaagatagtaaaagactaatgtgctataaaggctaagggaaaataaaaacccatatattaattttcccggccatcttaattttcagacccttccaagtaagtccaacgaaagccatgaccacatggatgatatggatgatgaagatgatgatgaccatgtggacagccaggactccattgactcgaacgactctgatgatgtagatgacactgatgattctnaccaagtctgatgagtctcaccattctgatgaatctgatgaactggtcactgattttccacggcctgccagcaaccgaagttttcactccagttgtnccccagtagacacatatnattggcccgaggtgatagtgttggtttatggactgngggcaaaattctaagaagnttccntanaccctgtncantncaanggttaaatcctnttaaaaaaaacaccancncgnttgggttcttgantnagcggcttananntttagggaaaccananntctggcatttttnattnanttcatttcatcccattccttnaatccaatncngcnaggaatttattncatattctnacntttaatggcccnttngantaccaaaaattttttnttntttnggcggggtntttggnnagttntacanaaatttntctntngattttgntgtttaaaacannanntncttacttttttngaaattcctggatcncnttatttttnaaattataananaannngtaannaccacttntttataataaaatncaggggnntaggttttnn

SEQ ID NO: 5569 - DNA, 941 bp, Homo sapiens
  misc_feature 376, 420, 433, 449, 467, 470, 472, 479, 486, 490, 512, 516,519, 531, 533, 536, 538, 541, 542, 544, 546, 552, 553, 558,561, 564, 568, 570, 572, 573, 577, 583, 584, 585, 589, 592,606, 609, 615, 621, 627, 628, 630, 631, 632, 637, 640: n = A,T,C or G
  misc_feature 641, 645, 646, 658, 662, 668, 674, 678, 685, 686, 689, 691,696, 700, 702, 708, 722, 725, 731, 732, 733, 737, 740, 741,744, 746, 753, 757, 770, 771, 773, 774, 776, 777, 782, 783,791, 793, 794, 795, 797, 803, 804, 805, 806, 811, 813: n = A,T,C or G
  misc_feature 825, 827, 828, 829, 846, 848, 849, 850, 851, 853, 857, 858,861, 864, 872, 875, 880, 886, 890, 893, 902, 914, 915, 918,921, 926, 927, 929, 932, 938: n = A,T,C or G
actactatagggcgaattgggccctctagatgcatgctcgagcggccgccagtgtgatggatatctgcagaattcgcccttagcgtggtcgcggccgaggtactttttttttttttttttttttaaccttcattaacctccaggcttctaaatcccatgctgcattgctgttttggatgataagcatgcgacatgaccaagcctagctgctacatcagttcccctctaaagccactcaacattactatcaacataaaaacagtgcatttgctatgcatttgcagttttgtcactatcccagccagactgctacctaaaacctttcctgtaaagaaatctcaaattgcctcagaccacaatttggtctgtgacaatntgctgcgaggttatgtgtgtgttcgtgtgtcatgccccagtganggatgatgaaacngtgcatgggacaggtntgtgggttgtgtgtaatnttngngtgtcangccccanggantggatgaatgtaggggtgcatntggnacngtgtgggggatnanttntntgnncntntatagnnagcgnganacnaatnanannatanatgacnnntatntgnttggtgtgacatanacntacatnattgtntcgtgnngnnngtttnatnnattnncgcatagcttantttntgatcntgcgtnaganacagggnngangngtcanagangngatggnttcagtacgtgagntcntgatgnnngatntgnngangntgtcatnatgntgatatcagtganngnnannatatnngatgacgnannntnttatannnntgacnanatatgatgatgntnnncgatgtgatcattatgntnnnntncacnncgnttntgatatcntgncaagnatgaancggngangtcgtagtntcttaattatannatnatnatganntntcntcatgnccg

SEQ ID NO: 5570 - DNA, 896 bp, Homo sapiens
  misc_feature 1, 6, 647, 666, 669, 671, 673, 676, 705, 720, 727, 731, 742,768, 775, 779, 784, 811, 812, 816, 819, 842, 844, 846, 866,877, 884, 888, 892, 893: n = A,T,C or G
ngggtngaatcgactcctatagggcgaattgggccctctagatgcatgctcgagcggcccgccagtgtgatggatatctgcagaattcgcccttagcgtggtcgcggccgaggtacatcagtgatcacactgttatttcccaaacgacccttcagctggatacgacatttcctgattgcagctgtgcttattgcacttaataatgttctggtcatccttgtgccaactataaaatacatcttcggattcataggggcttcttctgccactatgctgatttttattcttccagcagttttttatcttaaacttgtcaagaaagaaacttttaggtcaccccaaaaggtcggggctttaattttccttgtggttggaatattcttcatgattggaagcatggcactcattataattgactggatttatgatcctccaaattccaagcatcactaacacaaggaaaaatactttctttttctattggaaatggttacaagttatactccaaaagatatttgaattatcttgattggaatgttattcataggaaataacaggaagattccaaagacgtttacccagtaatatcaccaggcacctgcagaagaaggaaaaatcctgtttttgtcaaaggatgggttggggantgtgtttaaaaataaaaanctngngngcncaaaaaaaaaaaaaaaaaaaaaaaggacnctgcccggggcgggncggttcnaaanggcgaatttcnaacacacttgcgggccgttactaagnggatacnagcntcggnaccaaagccttggggtaaaacatgggnnaaanctngttctggggggaaaatgttattncntnacaatttcccacaaaaaacnaacccggaganattaaantgtnaaanncct

SEQ ID NO: 5571 - DNA, 911 bp, Homo sapiens
  misc_feature 406, 501, 527, 535, 543, 569, 571, 589, 610, 616, 636, 643,649, 658, 686, 696, 704, 713, 720, 724, 739, 741, 745, 752,754, 760, 789, 790, 795, 801, 804, 814, 815, 828, 831, 844,848, 862, 866, 869, 887, 891, 892, 895, 896, 905, 906: n = A,T,C or G
  misc_feature 910: n = A,T,C or G
gactcactatagggcgaattgggccctctagatgcatgctcgagcggcccgccagtgtgatggatatctgcagaattcgcccttagcgtggtcgcggccgaggtacgcgggtattaccataggtaaacagttttcacactctgccggcttctatgatgcagcaaaactaaagtataagaaagcgaatgaagagcaccatcgtttacttaaaggagcaccatttaagttaaatcttcacccaagggactattttgacgctaatccttatttttctgaggaatctttaccaccaattaaaaaagaagagaagaagaaaacaatttcaaatacttttaaaccgtcttctcctggtaaaaagcctggtggaatgaaggcaggaaccatttgatccttacccatcacattntgctgacccttattgggctaaattggcaaatattttctggcaaagatgataagattttccacccaccaagtgggaccaaaaaagcagaccagttnaaagtttaatgacttttgaatgtcanaaagggcnctaaattnaaagaacttccagaacttttttcaantncctgcccgggcgggccgntcgaaaggggcgaaattccancacaantggccgggcggtacttagtnggatccnaagctngggtccaanacttgggcggtatttaatggggcatagntgtttccttnggggaaanttgttattncggcttncaanttccacacaaaatancntagnccgggangnattaantgtgaaaagccttggggtggccttaatgnnggganctaaantcncattaaattnncgttgggccctanttngccgcttttcaanttanggggaaacctgtcntggncancttgtattatattaatanggcnnaanncccgggggnnggcng

SEQ ID NO: 5572 - DNA, 906 bp, Homo sapiens
  misc_feature 4, 301, 318, 372, 495, 609, 610, 616, 619, 620, 623, 627,628, 630, 632, 640, 657, 781, 793, 828, 835, 840, 843, 865,881, 887, 890: n = A,T,C or G
tatnttagggagtcgcccacgcgtcccgcaagattcagagggctcaacgagctgtcaagacaagattgaggcttcaccgtctcctccaagggttccagagtgaggtgggaggctggtatctggaccagactggctctggagagtaggcggcattgagagaaggtggtacaccagagtctagactcccatgtgaacacaaggatgctatctgccccacctgtctcctcttccagcctcactttcacctgccctagcaccccatgctctggccctccccagcctggagctacaaagccatcangactggacatgaggtanaggctgggcaattggccactgctcttgagacagaactaccccctccttagtgtncaaggaggcctgcggatggagaggaaggctctatgagtctacctacctgctcatgcccaccttccacaggctgcccatacacccagggagcccccagaccatgggggactcgcagctgtacanggcttatgtagagtggaatctcttggatgcagcttcagaaataagttttcccccttttaaacaatttataaaaaatcacacatggcatttaaaggaattttttaaaaaagtttnnaatatnccnnggntaanngnanggggcggnccctagactaatctaanaaaaaaaaccttccacaccttccccttgaacttggaacataaaatgaatgccaatggttgttggtaacttggttattgcacttatatgggtaccaataaacaatgcatccaaatttcacaaatnaagcattttttnactgcttttaattggggttggccaacccataatgnatttatntgttnganccccggtcccaactcgaataantcttttcgcttcttgntaatgntcnttgccttggccttcgg

SEQ ID NO: 5573 - DNA, 913 bp, Homo sapiens
  misc_feature 2, 604, 611, 676, 718, 750, 761, 817, 831, 838, 858, 861,889, 893, 895, 902: n = A,T,C or G
antatactatagggagtcgacccacgcgtccggttaatatgaattttttaatgcttaagatttgatttttacttttcaaagcaacattttgttgaatttttttctgcacagctttccaaaataaaaagcagaagtataaaaacccaaacaagtccaccactcccagtattctctccttctgccaaaccagagctatgcagatgcaggtcactcttcttctccatagcctgcttcctctgaagctctgagcctgtggggccagaggagtcatccagaagccatcggccaggaacgtgtgagcccaacatgcttccaccctcagggttcctggaatgctaacaggagtgacaaaccaaactgccagccaggccggagaaaagatggagatacatgtatatatatatatatttatatatttttcttttttcctttttgaatttcaacccaaaaacatattccaggaaaagatgtagaggctgggctgggtctccttcaaaggacattcgatatcaaggacagtgggctggcctacagccaggctaccccagcccacttctcctgcttactccaggatgagaggaacagtagaggtgggggtcagctnggaacangggccagggcagtggtggctctggggtaagaagctgggctgaggcttaggataggtgggagctgnccatgtgcaggcatctttggcccagtgacaccctaaaactgncagggcttaaaacctacataggcatttgtganggaaggctaancaggatgcttgaacttaagggttggccttcctttttaactgaagaactggccgggncggccatagccggnatgcccncctgggagggttctttgtgntgncctttgaaggccaagacggctttccctnctgnantggctgnttggaaaccct

SEQ ID NO: 5574 - DNA, 910 bp, Homo sapiens
  misc_feature 1, 4, 19, 52, 405, 406, 408, 412, 413, 414, 415, 416, 417,418, 419, 420, 421, 422, 423, 424, 425, 426, 427, 428, 429,430, 431, 432, 433, 434, 435, 436, 437, 438, 439, 440, 441,442, 443, 444, 445, 446, 447, 448, 449, 450, 451, 452: n = A,T,C or G
  misc_feature 453, 454, 455, 456, 457, 458, 459, 460, 461, 462, 463, 464,465, 466, 467, 468, 469, 470, 471, 472, 473, 474, 475, 476,477, 478, 479, 480, 481, 482, 483, 484, 485, 486, 487, 488,489, 490, 491, 492, 493, 494, 495, 496, 497, 498, 499: n = A,T,C or G
  misc_feature 500, 501, 502, 503, 504, 505, 506, 507, 508, 509, 510, 511,512, 513, 526, 547, 563, 564, 569, 582, 585, 588, 589, 594,600, 604, 616, 623, 627, 636, 637, 638, 640, 642, 648, 652,664, 665, 679, 682, 693, 700, 706, 716, 717, 719, 720: n = A,T,C or G
  misc_feature 721, 725, 738, 739, 750, 751, 763, 764, 765, 766, 767, 768,776, 777, 778, 779, 780, 781, 782, 783, 785, 789, 790, 791,792, 793, 796, 806, 809, 813, 829, 846, 848, 854, 855, 857,861, 869, 873, 875, 876, 887, 895, 896, 900, 902: n = A,T,C or G
natnttagggagtcgaccnacgcgtccgacagatgagcccctgatgggagtncaccctcagcaggcacagacacgcaggatggggtatgcggatggacagacgccaagcaggcctcacagccgagtgctggccccagcagctgccacttactttgagcttcatcctcttcttgtcgggatcgtgcacgacactgtgcctcatgagactctgctgcagtgcaagggaaagaaggacgcttgacctggcctgcagacgtggctcagtgcttacagcattcgctgctcgaggaggacacgggtttggttcccagcacccgtactccagttccagtaaaaactcttggtgtctgctaaccttaagatgcagtggtccagtgtgcaataataaactaccagctgccaaannanaaannnnnnnnnnnnnnnnnnnnnnnnnnnnnnnnnnnnnnnnnnnnnnnnnnnnnnnnnnnnnnnnnnnnnnnnnnnnnnnnnnnnnnnnnnnnnnnnnnnnnngggggggggcgtnaaatttttttaaaaaaaaacntcccaccccccccctnnaaccngaaaaaaaaaagnaangcnntgggngggggnaacnttttttttgggnctttaangggnccaaaaaannnantnccttcnaaantttaaaaaaaannctttttttcccggnttnaaggggggggngccaaanttaaangggttttttnntnnngggnccccggggccccnncccaaaaaaanntttttccgtttnnnnnnaaaaaaannnnnnnncngggnnnnnggntgggggaagnggnttantttttttaaagggggnaatcgggtttcccaaantngggggnnancccngaaaaaantttntnncaaaggccccnaaaggccnnaacntnaaaaggct

SEQ ID NO: 5575 - DNA, 771 bp, Homo sapiens
  misc_feature 137, 394, 485, 499, 528, 549, 552, 557, 572, 583, 589, 592,604, 609, 614, 628, 636, 652, 653, 659, 670, 683, 692, 699,718, 724, 731, 739, 743, 744, 748, 749, 752, 755, 764, 771: n = A,T,C or G
ctcactatagggcgaattgggccctctagatgcatgctcgagcggccgccagtgtgatggatatctgcagaattcgccctttcgagcggccgcccgggcaggtacttttttttttttttttttttttttttaatttnaaggatgccatttagcaaatatgtttccaacagataccaattcatgaacagtggaacagggcagggcttctggaaatagtattctataaattgtgcttcaacttgcaagtattacatttgaaataagcagttaccaataaagaaatgtgccttgaagtaggtacagtttattttatatttatataaactacccagctaaatactaaatataaaaatcaatgggtatatcatttactttcacatagattctttttacnttgttgctatttttttctgtaataaaaattaatatagctgattaatggagggttggaagaaaacaaaactgagaagaaaaaaaatgaattncaatggcatttagnaaaggattacttgttgctccttcttggcnagggagacttccttgtgcctnttntccancccttggggcatttntgcaaagtctnggaaanatncttttatagggntgcanagganctttcccttaaccntcccttanaatccccttggaaaanntggtanaaaataacaanggttttttcccanaaaaaattncatttanaaaatccctcttttttggnctactnctttaangctccctntttnnaatnntgnaantaaaatggngatttan

SEQ ID NO: 5576 - DNA, 795 bp, Homo sapiens
  misc_feature 4, 6, 254, 325, 346, 348, 355, 360, 363, 382, 400, 408, 411,413, 414, 428, 430, 434, 437, 442, 443, 444, 446, 459, 463,477, 478, 492, 495, 497, 500, 502, 509, 510, 512, 513, 521,522, 526, 529, 530, 532, 534, 536, 540, 544, 545: n = A,T,C or G
  misc_feature 547, 548, 550, 551, 553, 554, 560, 561, 562, 566, 567, 569,571, 577, 579, 580, 585, 590, 591, 592, 593, 600, 603, 604,606, 609, 617, 619, 620, 627, 630, 635, 636, 637, 639, 643,647, 657, 662, 665, 667, 670, 673, 678, 679, 683, 686: n = A,T,C or G
  misc_feature 687, 691, 694, 696, 697, 698, 700, 702, 703, 706, 711, 717,718, 719, 721, 724, 725, 727, 730, 735, 736, 737, 740, 741,742, 743, 745, 751, 752, 753, 756, 757, 761, 763, 770, 771,774, 776, 777, 779, 781, 782, 785, 786, 787, 792: n = A,T,C or G
tatncnactcactatagggcgaattgggccctctagatgcatgctcgagcggccgccagtgtgatggatatctgcagaattcgcccttagcgtggtcgcggccgaggtactgagctccacaaacgtggccatggttggtgcggaaatgattctgagtgagcaggtagaagtctcacgtcctgctgtgtccagagttggttccttccagagggttcgtggtctcgctggcttcaagaatgaagccgtggaccttnacagtgtgtgttacagctgttaaagatgttgtgtctggagtttgttccttcacatgtgtctggagtttctnccttctggtgggtttagtggnantaactgnctttnaanaatgaaccccgtagactgnccgtggagacgatgttancctttaanagnanntattgaccccaaananttgnacnagctnnntnaaaaattttttcnttanggattctaaccacnntttttcttttttgntananggngntttaaanngnntcattggnnaccncanntntntncccnatgnntnncnntnntaaaannnttanntntntttcananntttcnttttnnnnttcttcntannantantaaaatantnntaatatnttntcttnnnanttanaaantttaaaaatngcttnctnanacntanattcnntaantcnntttnttngnnncnanntcnattangttacnnnanttnnanccnatttnnnttnnnnantcttgnnntanngtcntnctaattnntcncnncngnnctnnntagtnccg

SEQ ID NO: 5577 - DNA, 766 bp, Homo sapiens
  misc_feature 589, 643, 688, 693, 701, 726, 741, 746, 748: n = A,T,C or G
gggtgtatacgactcactatagggcgaattgggccctctagatgcatgctcgagcggccgccagtgtgatggatatctgcagaattcgcccttagcgtggtcgcggccgaggtactcattggaggatcagctcacctgctttgctctcgatgtagcctagctgggtttagagccttcccttgaatgaagaaccctccccagctggaaggggatgctcttgaaagctcagctgacaacacacatgggcatcaagtcattggccacattcatgcctcaagtgtcctaaaaccgaatatgatcaaaagaaaactgctgttcagcaagtggagactggcatgcagattccctggcctgcaagcctagtgtaaaaagataccaaatactgctggaagaatgaaaagggatgaaagggatgtcatcaaagtaagttttttcacttgatggaaaagactaaaacagcaaagcaagttcaagatcaaacacaacaccacagggatcctttgatgagaagtgaacttaagaccatgaaaatgctgttgatgattttaacccaccagccttctttgatttgagaagccacaagcccttnccccttccaattggtgatcaactatgatcaggtacctggcccgggccgggccgnttgaaagggcgaaattccaacacacttggccggccgttactaggnggatnccgagctnggtaccaaagcttggcgtaatcatnggcataagctggttncttgngngaaaattggtattcccct

SEQ ID NO: 5578 - DNA, 751 bp, Homo sapiens
  misc_feature 1, 16, 20, 23, 652, 653, 655, 660, 688, 708, 729, 730, 733: n = A,T,C or G
ngtgattgaatacgantcantcnactcctatagggcgaattgggccctctagatgcatgctcgagcggccgccagtgtgatggatatctgcagaattcgcccttagcgtggtcgcggccgaggtactttttttttttttttttttttaaagggcagcaaaatcttcttgagaaattacattttataagaaacccaaataaactcggataaaatagataacattattagtaagcctcaatttgaaaattccaaattcacaacatttgcttattatagagtatcaatctattttataaaggcaatttgagcaaacaaaaaatacataaaatcgcttgttacatttccttcatttccgggtttcatttagttgtacacgatcaataaaagtctgactcatagagacgtatagttgcaaatggtaaaagtttaacaattcatctccattaaatagacagcagaggttttcttcctgaagatgtcataaaaacaagttaagctggcaataaaagcagcacatggatggtcaccaatgctaaaagttttaaataataaaaagaaatgctttaaaaaattgaaccaaacatgtaatgaaattccttgaaacatatccaaaaatatttggattgagaaaaggttactcacttacactctnnantttanaccactctactaaaatatttttaggaanggaaaacattttcctcattntatgaagcccatataactttnnatnccggacagaacccgggtt

SEQ ID NO: 5579 - DNA, 941 bp, Homo sapiens
  misc_feature 1, 536, 545, 568, 570, 593, 597, 605, 641, 646, 647, 649,671, 673, 677, 679, 697, 712, 714, 718, 721, 729, 743, 746,759, 760, 763, 767, 770, 776, 777, 793, 794, 803, 805, 806,810, 811, 816, 817, 818, 819, 821, 822, 824, 828, 832: n = A,T,C or G
  misc_feature 834, 835, 836, 839, 843, 844, 847, 849, 850, 852, 855, 856,857, 858, 859, 863, 866, 869, 870, 873, 875, 877, 882, 884,890, 893, 910, 912, 915, 916, 918, 920, 921, 925, 927, 928,929, 930, 931, 932, 934, 939, 941: n = A,T,C or G
ngatccactactatagggcgaattgggccctctagatgcatgctcgagcggccgccagtgtgatggatatctgcagaattcgccctttcgagcggccgcccgggcaggtactctcccagtgacatgcttcttgaccacaatggatgaactgtgcccagcatgcccactttccaatgctccactgatcccatgttttgtttctgaaggacaaccagccttggaataatggcaaataccttcttaagttcctacaaagtatggtccctgggaagtttatgtctgtaagtcaaaccttgggaagtaactgagttttgatgcctcttccagcatcatcaagcatcatgctattacaatcccaaaccatgggggtttctcacaagctttacaccaaaaggggcatcactatccctcaaagagaagaaacctggacacatgtaccttcggcccgcgaaccacgctaaaggcgaattccagcacactggcgggcgttactagtggatcccagcttcgggaccaaactttggcgtaatcatggncatagctgnttccttgtggtgaaattgttatncngttacaattccacaacaacattncaancccggaancataaaagtgtaaaagcttgggggtgcctaatggangtganntnaattaaaattaaattggggttngngctnantggccccttttccaatcngggaaaacctgtcgngnccanttncattaatngaaatcgggccaanccncccggggaaaagnnggnttgntanttgggnnctttttccctttcttnnttaattaantnntttnntcggnnnntnngnttgngggnannnggnttannctntnntnaannnnngtantcnggnnttncnanaaatnangggatnacncttgaataaattttgtnantanngncnntaangnnnnnnanacttnan

SEQ ID NO: 5580 - DNA, 923 bp, Homo sapiens
  misc_feature 443, 444, 501, 530, 537, 541, 544, 574, 579, 585, 587, 593,595, 605, 611, 618, 620, 631, 636, 640, 647, 648, 649, 656,665, 667, 681, 683, 687, 691, 692, 694, 696, 697, 699, 705,706, 710, 718, 722, 728, 732, 737, 743, 750, 751, 756: n = A,T,C or G
  misc_feature 764, 766, 767, 773, 774, 778, 785, 790, 791, 799, 800, 803,805, 809, 815, 818, 821, 822, 827, 829, 832, 838, 844, 846,847, 849, 852, 863, 864, 865, 871, 875, 876, 877, 878, 887,888, 891, 892, 894, 895, 896, 899, 902, 907, 912, 914: n = A,T,C or G
  misc_feature 916, 922: n = A,T,C or G
cgactactatagggcgaattgggccctctagatgcatgctcgagcggcccgccagtgtgatggatatctgcagaattcgcccttagcgtggtcgcggcccgaggtactgagctccacaaacgtggccatggttggtgcggaaatgattctgagtgagcaggtagaagtctcacgtcctgctgtgtccagagttggttccttccagagggttcgtggtctcgctggcttcaagaatgaagccgtggaccttcacagtgtgtgttacagctgttaaagatgttgtgtctggagtttgttccttcagatgtgtctggagtttctcccttctggtgggtttgtggtgtcgctgacttcaagaatgaaccccaaactgtcgtggtgatcgttgtagctcttaaaggtggtgtggacccaaagagtgaagcagcaacaaagaatttttnngtcaaaaagggtaaagaacaaaattttcacggtgttggaaggggtatctgaaccggnttcccttgctcccccgcgtaccttgcccnggccggnccgnttnaaaagggccgaatttccaacacaactggcnggccnttactngnggaatncnagcttcggtncccaanccttggncngaaatcatggncatancttnttccctnnntgaaaanttgatattncnctcacaaatttccncncaancatnncnanncnggaagnntaanatgtaaancctnggggtncctnaatgngtgacntaacctnnaattnaattgcgntnnccttanngtcnccttttncattnnggaaaacnngtnancccnctttgnttnatnnaattngncancccccnggagangnngnttngttttggggcnnntttccntttnnnntaaataaannttnntnnnatnttnagttnggaancngnaatatnt

SEQ ID NO: 5581 - DNA, 733 bp, Homo sapiens
  misc_feature 548, 557, 560, 562, 563, 565, 567, 568, 642, 682, 721, 733: n = A,T,C or G
tagggcgaattgggccctctagatgcatgctcgagcggccgccagtgtgatggatatctgcagaattcgccctttcgagcggccgcccgggcaggtatgcgggtctggggggagtttagaaggactgggaaagaagacagacaaatattggagttttcctgaatttgttgctcaagaagaaaaaaatacagtgaaagttcaaatgggaaaatattaagtcagaaacaaattaaattcatatgcgagttctttctaaaatgaagaatttaaaaagccaaagcaacagctgacaatgttctcctaaaaccagtattttgtgtttgctgttcaatgggccattctattctgggaggctttatccctataaaaacttcaccagctggaaaaagacgagcagccccagtctgttctgctggtcctgtctctctaccacccccatcacaagtgatagtgttaggactcaggtaagtctgctggagcctctgaacagaaggcaccatcagaataaagcagatctacttaaaattggaagaggagaacatagcccncatgaaaanacngnngntnnaggtccttggccgcgaccaccctaagggcgaatttcagcacactggcggcccgttactaagtgggatccccaanctcggaccaagcttgggcgttaatcatgggtcatagctgnttcctgggggaaaattgttatccgctccccaattccccncaaccataccgn

SEQ ID NO: 5582 - DNA, 684 bp, Homo sapiens
  misc_feature 2, 3, 5, 8, 12, 19, 24, 34, 42, 48, 61, 70, 71, 77, 79, 80,96, 99, 107, 108, 110, 285, 294, 316, 338, 371, 381, 396,431, 436, 439, 443, 497, 499, 507, 514, 541, 542, 547, 550,570, 571, 575, 578, 585, 605, 615, 629, 646, 650, 662: n = A,T,C or G
  misc_feature 674: n = A,T,C or G
tnntntantatntcatttntttgnatattataantttattanatctantcttatctattanatgtattanntctatntnntatttatattaaatantangatctggnntnttgtaaacgatcatatagggcgaattgggccctctagatgcatgctcgagcggccgccagtgtgatggatatctgcagaattcgccctttcgagcggccgcccgggcaggtacaaaagccaagatgcccattgtgggcctgggcacttggaggtctcttctcggcaaagtgaaanaagcggtcnaaggttggccattgattgcatnaatatctgccacattgactgtngcctatttctattgagaatcaacatgtagggtngggtagaagnccattccatagtagnaatgtatctcaagtagaaaggcctggtgtattgcnggtgnagngacnctggtttcaccccgttcagctaaagggtgttgttccacactttttcctttttgnangagaaccncctttgnttgaagggaaaaaggccctttttgaannaaagnacncccttcaatgggaacccctnnaaangcnttgaagncctaattcttggggaaccgnttctaattcntttaatttccaacnttggggccccaccaagngggnaattttccaaanggaaacttgggnggggaattgg

SEQ ID NO: 5583 - DNA, 795 bp, Homo sapiens
  misc_feature 2, 3, 5, 8, 9, 13, 14, 17, 19, 20, 23, 24, 30, 38, 41, 44,45, 50, 51, 56, 60, 62, 63, 67, 70, 72, 83, 86, 98, 101,111, 119, 121, 124, 125, 127, 138, 147, 162, 167, 192, 320,344, 360, 375, 424, 440, 472, 488, 494, 499, 505, 509: n = A,T,C or G
  misc_feature 514, 524, 550, 555, 568, 575, 579, 581, 586, 606, 611, 612,613, 640, 650, 679, 698, 706, 717, 720, 722, 726, 727, 732,738, 745, 747, 756, 759, 765, 769, 773, 792, 794: n = A,T,C or G
tnncnctnnattnntantnnatnntactantacacttnttnttnnactannttctnattnannttantcnantattattattntcngattataatganatnatcaactttntaaatttnanganntngtttgatcttnattgtatcntatcactatagggcngaatngggccctctagatgcatgctcgagncggcccgccagtgtgatggatatctgcagaattcgccctttcgagcggccgcccgggcaggtacttttttttttttttttaagaaaaaaagaattattttataaacctgaagttggaaaaatttttanaatatttttctgtttttgatcctnccctggccccccattnaccttagtatacagnaatttaccttttttttggtggacgtttttgccctttaaggttcaattcncatttaaaatataaantggatttataaaattattgccccttaaaattnaacctttcttggttgnttgtanaaaanttaggncccncaagngggggtaaanaatttgaattttaaaaaatttcttanccacngggaaaaaccttntcttggncatncnaattnagggggttaattaattttanaaaannnaaaaaattggaaaattaaccacccaanaccttaattntttttccttttaaccttaaaaggaaaaanaattgtttgggaaaccctnaagttttntatttttttgnggngngccnnaattncatatnaaaaaantnggggggggntcnaaaaanattntttnttaattccttaaatttttntng

SEQ ID NO: 5584 - DNA, 730 bp, Homo sapiens
  misc_feature 1, 3, 5, 16, 21, 23, 25, 27, 38, 41, 44, 53, 55, 58, 59,62, 66, 68, 69, 71, 72, 73, 74, 75, 78, 82, 92, 97, 98,103, 118, 119, 127, 318, 323, 326, 360, 381, 384, 398, 419,437, 440, 451, 474, 489, 491, 505, 537, 544, 549, 553, 569: n = A,T,C or G
  misc_feature 575, 576, 581, 595, 622, 634, 642, 653, 654, 658, 669, 676,693, 721: n = A,T,C or G
nantntttatcgtttntatantntntntaattattttnttnatntataatttntnatnnatntatnanntnnnnntcntatntttctttttnttatnnattantatgtagtatatctnntatatacnatcactatagggcgaattgggccctctagatgcatgctcgagcggccgccagtgtgatggatatctgcagaattcgccctttcgagcggccgcccgggcaggtactggatcagtttctcctgcgtgaggtatgggtgacactcaacctggttagtcactggtttatattttcagtccaggttttgttcaantagcnctntcgtatctggtaagtggtttgaaatttgtagacncccaagggtctttttactcantcncctctcgttccacncaaacttactctcattggtcncttcaccaagggccattntcnaaagtaaacgnttttccttttttttccaccttgnattccaataatatancncttttttattcaanttctttttgggggggaaaaaaaaagggttcanttcgccnccagnttcnttttggaaaaattccnctttgnntgggnccccatgtttgtanaattaatgttaattaggtaaccgttcnccaattattaanggccttcnaagtccctttnnaaanggttacccctnttgtaanggggggtttctttttcnttcaaaaaaggggcctttttttcccttntaaccaaat

SEQ ID NO: 5585 - DNA, 944 bp, Homo sapiens
  misc_feature 3, 4, 375, 386, 466, 571, 587, 593, 608, 613, 616, 623, 631,633, 646, 657, 660, 677, 680, 682, 739, 751, 755, 758, 769,799, 807, 840, 842, 852, 856, 861, 865, 868, 870, 894, 934,942, 943: n = A,T,C or G
agnncgactactatagggcgaattggccctctagatgcatgctcgagcggccgccagtgtgatggatatctgcagaattcgcccttagcggccgcccgggcaggtactttctttttcttccctctttcttcttctctagccccctccccatcacctactccatctgctccccagcttcctctttaatattggataactaagtagagaaggaggccaggagaatgtggaaatgtgaaacttccctaagcctccaccttattcgctttccaccagtctttaactttacccaatggactctctgacctcagggaacttttgtaggcttttgagtgattttaacttttccctgttttactgtggaatgctctatcctgngggtcttcggnattatttcccatgttattggatattatgctatttaagtagaaacttcatagaatgcaccttaattttatcattgctttgnacatttagtattccattaccaaagtgataataatggaatgagttaaataattgtctgaatgcaggccatttcccagaatattgggctcttttgagaacgaaaaanatttaaatttggctgngcctcnaaaggttttaattcnttttnggntctaaanattttttncncctttttttttcntttttggctantangcccctaaatttccaanaancncaatgaattgggatattgtggcacggtggacagcaaaaattgggggggtctggtttnatctattaaaancttnaanaatggacattnggcctttgggaccagggattcccggtttgnattttttnccaaaaaaagggttaatttggattccaaggccnanttttttggtngganaaaangggnagntnggaaattttaaaaatgccttaaangggtttttcctaaaagggttttaaaaagaaaaggggcttntacaaaannt

SEQ ID NO: 5586 - DNA, 472 bp, Homo sapiens
  misc_feature 4, 313, 339, 342, 354, 359, 378, 379, 423, 425, 427, 442,452, 455, 467: n = A,T,C or G
ggcnaattgggccctctagatgcatgctcgagcggccgccagtgtgatggatatctgcagaattcgccctttcgagcggccgcccgggcaggtacttttaggtgctgggttcaaattctgtctgctgtggtcattaacgggaagaggtggccagttgtgtgggcctgcctgaggcaccactggccccagctgacctttccaatcaaaggaatggctgaccaaaccaggatggtattaagaaattctataaaacattcagaaataacctattctagaatgatctgggcagtgtgggatgcagttaggaccagancatccttttttttgagcaaatggcanttngtgcccatcttncactnagccttcaaacgtgctgannaaaaaaaaccatctttcccaacccaatgccaggttttaatctgnancnacaagggaattgccncctttgtttngcntgggggggtaancccct

SEQ ID NO: 5587 - DNA, 463 bp, Homo sapiens
  misc_feature 163, 282, 283, 288, 304, 332, 340, 342, 345, 389, 397, 399,424, 429, 430, 434, 445, 461: n = A,T,C or G
gcatgctcgagcggccgccagtgtgatggatatctgcagaattcgcccttcgagcggccgcccgggcaggtacctgaaaaacagctggtaggatggaggaactgagcttttaaataggcaaatgtggctaggagctaccatactggacagcacagtgtattantttggtgcaaaagtaattgtggttttggccatttttaagtggattggtaagcctggctatttaaagtgtggtccacagagcaggagaatcactacacctgagagctggtggaaaatgtnnatctntgaccgttagccatangctttctaaattcaagaaactgcatttntaaccaananctntcttgggtgctttttttaaatggcaccaggtaaaaaggtttatnaaaaagtntntgggaagaattgccaattaccaaanatggnntttnttaattttctnggacttggcacctttnat

SEQ ID NO: 5588 - DNA, 837 bp, Homo sapiens
  misc_feature 150, 151, 158, 166, 275, 317, 339, 342, 348, 349, 351, 358,362, 365, 368, 369, 371, 376, 377, 379, 383, 385, 386, 388,389, 391, 392, 393, 394, 396, 398, 402, 403, 404, 406, 409,410, 412, 414, 416, 417, 419, 420, 421, 422, 423, 424: n = A,T,C or G
  misc_feature 426, 428, 429, 430, 431, 432, 433, 434, 435, 436, 439, 440,441, 443, 444, 445, 447, 449, 451, 452, 453, 454, 456, 457,458, 459, 462, 463, 464, 465, 466, 467, 468, 469, 470, 471,472, 473, 474, 475, 477, 478, 479, 480, 482, 483, 484: n = A,T,C or G
  misc_feature 485, 487, 488, 489, 490, 491, 492, 494, 495, 496, 497, 498,499, 500, 501, 502, 503, 505, 507, 508, 509, 510, 512, 513,514, 515, 516, 518, 519, 520, 521, 522, 523, 524, 527, 528,529, 530, 531, 532, 533, 534, 536, 539, 540, 542, 544: n = A,T,C or G
  misc_feature 545, 546, 547, 548, 551, 552, 554, 555, 559, 560, 561, 562,563, 564, 565, 566, 568, 569, 570, 572, 574, 576, 582, 583,584, 585, 586, 588, 589, 590, 591, 592, 595, 598, 601, 603,604, 605, 607, 610, 613, 614, 616, 617, 618, 619, 622: n = A,T,C or G
  misc_feature 623, 625, 626, 627, 628, 629, 630, 631, 632, 633, 634, 635,636, 637, 639, 640, 641, 642, 643, 644, 645, 646, 649, 650,651, 653, 654, 655, 656, 657, 660, 661, 663, 669, 670, 671,673, 674, 677, 678, 679, 680, 681, 683, 687, 689, 692: n = A,T,C or G
  misc_feature 693-696, 698-701, 704-706, 710, 712, 713, 716, 717, 719,720, 722-733, 735, 736, 737, 741, 742, 744-749, 751, 754, 755,756, 758, 761, 763, 767-768, 771-776, 778-782, 786-787, 789-794796-801, 807, 813-818, 821-822, 824, 826-827, 834, 836: n = A,T,C or G
tacgactactatagggcgaattgggccctctagatgcatgctcgagcggccgccagtgtgatggatatctgcagaattcgccctttcgagcggccgcccgggcaggtactgagctccataaacgtggccatggttggtgcggaaatgatnntgagtgntcatgtanaagtctcacgtcctgctgtgtccagagttggttccttccagagggttcgtggtctcgctggcttcaagaatgaagccgtggaccttcacaagtgtgtgttacaagctgntaaagatgttgtgtctggagtttgttccttcagatgtgtctngagtttctcccttctggtgggnttntggtgnntnacttaanaatnaanccnnanacttnntnttancnnannannnntnangttnnntntgnncntnannannnnnnantnnnnnnnnnttnnntnnnantntnnnnannnnttnnnnnnnnnnnnnnannnntnnnntnnnnnntnnnnnnnnnntntnnnntnnnnnannnnnnnttnnnnnnnntnttnntntnnnnnttnntnntttnnnnnnnntnnntntntntttaannnnntnnnnnttnttntanannntnttnttnntnnnnttnntnnnnnnnnnnnnntnnnnnnnntannntnnnnnttnntntttttnnnannttnnnnntntttntnatnnnnntnnnnttnnntttntnnttnnanntnnnnnnnnnnnntnnntttnntnnnnnntnttnnntnttnnnaaanntannnnnntnnnnntttnntnnnnnntnnnnnntttttntaatannnnnnttnntnannttttttnant

SEQ ID NO: 5589 - DNA, 892 bp, Homo sapiens
  misc_feature 2, 4, 5, 26, 27, 52, 426, 512, 583, 637, 651, 691, 692, 749,769, 777, 804, 839, 844, 846, 879, 892: n = A,T,C or G
gngnntcgctacttagggcgaatcgnnccctctagatgcatgctcgagcggncgccagtgtgatggatatctgcagaattcgcccttagcgtggtcgcggccgaggtaccctttctgcagaaagtataaaaatggccttgctaaggaatttaaatttacattcaagtgctatttctttacagcaccggaaacaagcatttcaaacaagacctactatacaatgacagtaattaagataatgtgatactggtggaggaataagcacgtagacaaatcgaacataatagagaacccagaaataaacccctacaaatatatacgcaactattttttaacaaagattcaaaagcaattcagtggagaaaaaatgaccttttcaacaaataatggtggagcagttgaacatctacagcaaaaacaaagctnaacttcaacctcacacctgatataaaacatgaataaaaaactatgaaacttttagaaaaataaataaataaaccttagggatctanggccaggcaacatgtttttatacttcacatcagatccataaaataaaattaatacattggacaataaattnaaaacctttgcactgcaaaagactggtaaaatcatcaaaggtattgagcgggcnggagaaaattcaancacgtcctggcccggcgggcggtcgaaaggcgaatttcannacactggcggccgtactagtggatccgagctcggtaccaacctggggtaatcatggncatagctggttcctgggggnaattgttntccggtcacaattccccccacattccnagccggaagcattaagggtaaaacctgggggcctnaaggngngacctacctccatttaattgggttgggctcatngcccttttcaatn

SEQ ID NO: 5590 - DNA, 897 bp, Homo sapiens
  misc_feature 112, 119, 152, 159, 161, 331, 521, 566, 568, 579, 582, 588,608, 612, 615, 631, 636, 641, 664, 683, 685, 697, 698, 709,715, 720, 729, 733, 736, 745, 751, 766, 767, 768, 778, 783,793, 800, 801, 810, 814, 817, 818, 819, 820, 822, 827: n = A,T,C or G
  misc_feature 830, 832, 833, 837, 839, 848, 849, 850, 851, 852, 854, 855,856, 857, 860, 862, 864, 866, 868, 869, 870, 871, 873, 874,875, 876, 877, 879, 880, 882, 883, 884, 885, 887, 890, 897: n = A,T,C or G
acgactcactatagggcgaattgggccctctagatgcatgctcgagcggcccgccagtgtgatggatatctgcagaattcgcccttagcgtggtcgcggccgaggtactttnttttttntttttaaaaggggttttagcacatctctgccgncaggaantnttgttttaatgtcaaaaacatctattctaatataatggtgaatttataaatttctccttgtagttgttatgtaggtttatgtatgttgaacctgtattatctggtataagtaacagaattctagtatcttcctggtaaactaaaccttttattgttatatgatgtggtanagactgcaggtggctttcccagaatcaccactccctcagtaaagtccagttttattctgggcagcctaattaccttgcagcaaagggctaatgaagttactaggtagaacttcttgtgaaaccactttaaggtcatgtatgttggctcatgcctgtaatcccaacactttggggggcccgaggcccagangatcacttgagcccaggagctcaagacccagactgggcaataccngnaaaaatcccgnctntacaanatagttttttaaaaaattancccngcnttgggggggtgtgccnccttngggtncccaacttcttaaggaggcctantttttgtttaaatttttgnangaaacaagatcnnaccatgttttnttaagnttggncttaaagcngaanccnaatgctttnggcccncctaaaggctggggnnnccgggccttnggccnactttccccncccctanngggggtttnaatnaannnntntttcngtncnntttnanaataaaaannnnncnnnnttntntnantnnnntnnnnntnntnnnntnttnaaaaaan

SEQ ID NO: 5591 - DNA, 430 bp, Homo sapiens
  misc_feature 398: n = A,T,C or G
ggcgaattgggccctctagatgcatgctcgagcggccgccagtgtgatggatatctgcagaattcgccctttcgagcggccgcccgggcaggtacttttaggtgctgggctcaaattctgtctgctgtggtcattaacgggaagaggtggccagttgtgtgggcctgcctgaggcaccactggccccagctgacctttccaatcaaaggaatggctgaccaaaccaggatggtattaagaaattctataaaacattcagaaataacctattctagaatgatctgggcagtgtgggatgcagttaggaccagaccagccttcttctgagcaaatggcaagtggtgcccatcttcactaagccttaaacgtgctgagaaaaaacactcccaaccatgcancttatctgagcacaggatgcgctttgttgctg

SEQ ID NO: 5592 - DNA, 910 bp, Homo sapiens
  misc_feature 4, 178, 192, 195, 196, 198, 201, 202, 427, 493, 540, 563,569, 576, 577, 578, 579, 580, 582, 583, 584, 588, 589, 591,592, 602, 604, 608, 609, 621, 635, 664, 674, 681, 691, 716,736, 767, 770, 779, 791, 798, 805, 806, 813, 815, 816: n = A,T,C or G
  misc_feature 826, 829, 830, 834, 847, 850, 852, 856, 865, 866, 868, 885,893, 906, 907: n = A,T,C or G
tagngatacgactcactatagggcgaattgggccctctagatgcatgctcgagcggcccgccagtgtgatgggatatctgcagaattcgccctttcgagcggcccgcccgggcaggtacgcggggttttgtcactggtccaacatacctggtgaaggaataaatccattaggtaggantagttgggtttttnggnngngtnntttttttttaatagaaagctttggttaaaaaaaaaaaaaaagaacagggtattttaaaattttgtgtttgaaattaaataacagttttccaggcatatgtttaaattactgagatgagtacttttgaggagactactatcttaactgaaaattttaattttaatgtgattttgggttgccgccttaaaatctgcatgttttcaaatttgaaataaaaccaactgnagtgagaggtcttgactaattgtgatttaaactttgcaagtagtttgccaaatttcaaatcctaanggaaatatttgtaaaataaaaatatatctttttttaaaaaaaattangactttagtaaccagtctatttnttttgnaaaaaannnnntnnntaannannggttcctttngnccgnnaaccccccttangggcgaatttccanccaactggcgggccgtttcttagtggatnccgacctcgntcccaancttgggcggnaatcaatgggcatagctgtttcctngggtgaaaaatggttttccnttcacaatttccccaaaatttccaacccggnaancataaagtntaaaccccgggngggcccnattgggnnggctaancnnatttatttcnttnncctncttgcccctttcnaantngggnaaccttttnngnccccttcatttattaantcggccancccccgggggggnnggg

SEQ ID NO: 5593 - DNA, 703 bp, Homo sapiens
  misc_feature 1, 6, 9, 12, 26, 39, 40, 42, 46, 56, 59, 66, 70, 83, 85,88, 94, 96, 99, 100, 103, 110, 128, 316, 317, 343, 367,378, 451, 471, 479, 507, 510, 520, 526, 533, 534, 539, 547,559, 575, 580, 593, 595, 600, 601, 607, 610, 616, 639, 654: n = A,T,C or G
  misc_feature 656, 661, 684, 688, 694, 696: n = A,T,C or G
ntcatnctnttnatctcatcatattnttatattattttnntntatntttattaatnttntaatctntatnattttttattttntnttnattttntntannatngtatagnttttattttaatatactntcctatagggcgaattgggccctctagatgcatgctcgagcggccgccagtgtgatggatatctgcagaattcgccctttcgagcggccgcccgggcaggtacaaaagccaagatgcccattgtgggcctgggcacttggaggtctcttctcggcaaagatgaaaagaagtcggtgaaaggtggccanntgatggcagaatattcgccacatttnactgttgccctatttctattgagnaatcaacattnatggttggggaggaattccatctcatagtagtaagtattccatagtagtaagtgcttgttgtattgtcggggnagggactcttgtttcattcngttcaagncaaagtggtggttggccccaacttttcnttntggaagtagnactccnctttgtnnagggnaaaaaagnccctttttgtanaaagtacccctttcanagtgnacccttgtaaagncntggannccttantcntggggnaaccgtttcttaattcttttaanttttcaaacttgggncnccacnaaggggggtaattttccaaaagnaacnttgggngnggaattt

SEQ ID NO: 5594 - DNA, 890 bp, Homo sapiens
  misc_feature 113, 119, 123, 146, 149, 154, 157, 158, 393, 397, 412, 466,482, 557, 588, 641, 661, 662, 674, 691, 692, 702, 719, 727,730, 744, 770, 774, 784, 785, 788, 802, 804, 808, 836, 837,867, 872, 874, 879, 883, 884, 890: n = A,T,C or G
tactatagggcgaattgggccctctagatgcatgctcgagcggccgccagtgtgatggatatctgcagaattcgcccttagcgtggtcgcggcccgaggtactgtgctgctcntctgcnaganggacctccttacacactaagccnaanactgnttnncttgatagctttaggactgaactatgggggagggggagacacctaatcatttttagagaaaacagtagctttaatgaaaaagtggaaaactatagcttttccaccaaatatcacaaatatttattttatatcacttcccaaatcttgtttacatgtctattggtctgctagagctaccatacaaaattaccacagactgggtggtttaaacaacataaacatattttctcacagntctngaagctagaggtcanaaatcaatgtttcatcaggtttgatttcttacaacaccttcctccctagcttgnaggttgccatcttctntgtcctcatgtggccttttctttgtggtgtacctgccccggccggccgttcgaaagggcgaattccaacacactngccggccgttctagtggatcccagctcggtnccaagcttgggccgtaattaatggtcataactggtttcctgtgtgaaaattgntattccgctcacaattccannacaacattccgnccccggaggcataaaannggaaaggccnggggtgcctaaaagaantggagctnccncacattaatttgcnttgcccctcacttgccccttttccanttcnggaaaacctnncgngccccttggattantnaaancgcccaccccccggggagaggcggtttnncttttggggcgctttttcccttcttggttnatgantngttgngctnngtattn

SEQ ID NO: 5595 - DNA, 894 bp, Homo sapiens
  misc_feature 632, 635, 732, 772, 774, 786, 867, 868, 881, 882: n = A,T,C or G
ggtatacgactactatagggcgaattgggccctctagatgcatgctcgagcggccgccagtgtgatggatatctgcagaattcgcccttagcgtggtcgcggccgaggtacttatgaagcccatctaagtaagatcatttcttctaattcaattttctaaaatcatttgtgttttagaaatctcatgattccaggaaaaaaattttaaattgtgatacaggtttgacagccttttagtcaaataagttaaaacacacacgcaaactcatttactcactttgccattataattcaatcacaaagaaattttggccaggcgtggtggcttacgcctgtaatcccagcactttgggaggccgaggcaggtggatcacgaggtcaggggatcaagatcatcctggctaacatgtgaaaccccgtctctattaaaaataaaaaattagcctggtgtggtggcgggtgcctgtagtcccagctactcgggaggctgaggcagcagaatggcgtgaactcaggaggcggagcttgcagtgagccgagatcgcgccactgcactccagcctggatgacagagccgagacttccgtctcaaaaaaaaaaaaaaaaaaaaaagtcctgcccgggccggccgntcnaaagggcgaaattccaacacactggcgggccgttctagtggatccgacttcggtaccaacttggcggtaatcatgggcatagctggtttcctggggngaaaattggttattccggtcacaattccacacaacatacnancccgggaagcantaaagtggtaaagcccgggggtgcctaatgaggtgagctaactcacattaaattgcgttgcgctcactggccccttttcanncgggaaaactttnntgccactttatt

SEQ ID NO: 5596 - DNA, 888 bp, Homo sapiens
  misc_feature 93, 98, 150, 151, 156, 157, 162, 525, 546, 571, 590, 617,630, 634, 641, 648, 652, 662, 664, 667, 680, 683, 685, 686,691, 694, 697, 698, 709, 713, 719, 731, 734, 735, 745, 746,751, 754, 758, 760, 772, 799, 801, 802, 806, 831, 835: n = A,T,C or G
  misc_feature 836, 842, 848, 850, 852, 857, 863, 867, 869, 875, 876, 878,882, 887: n = A,T,C or G
tagggcgaattgggccctctagatgcatgctcgagcggcccgccagtgtgatggatatctgcagaattcgcccttagcgtggtcgcggccgangtacncggggacctgctgtgctcttgcttgcacagtgtcctggagctggacctggcnntgggnngcagnaacattttgactaaaggcagcaagctgcttcctctgctgcctgagataccagaaccatacagaaagacatgcaaagcacaccaaattgtctacagcttaagatcaacaaaaatcctttttcattaattataaattcacagagaatataaacaatgatccttattatcccctttactggctcacacagggagagagaagccaaaagcccaactgattcccaatggcgaagattgagaaaaacgctcccacgatggaaaaaaaaagcccagaactgtttaacaatcatggaagtagatgggagtccctaccttggattttatcaaaagaatgggggggaaaaaagtttgtaattttcaaagccangccttgatgatcttatttctngcaaccttaccccaaagtcaggttncctggcccgggccgggccngttttgaaaaggggcgaatttccaacnccactgggcgggnccgnttacttngtgggantccnagcctcgggnanccnaagcttggggggnaancnntgggncantannctggtttcctngggntgaaanttgttattcccnttnncaaatttccnnacaanatnccanancccggaaagcantaaagggtaaaagcctggggggccctntnngggncctaaccaaaattaatttggttggncctnnctgccngctttncnantgggnaaaccngttngnccacgnngntttnatgant

SEQ ID NO: 5597 - DNA, 885 bp, Homo sapiens
  misc_feature 5, 6, 7, 8, 9, 10, 11, 12, 40, 587, 591, 631, 640, 704, 711,715, 772, 785, 796, 797, 812, 818, 822, 825, 827, 835, 839,844, 861, 867, 870, 873, 876, 884: n = A,T,C or G
ggtgnnnnnnnnttgtatacgactcactatagggcgaatngggccctctagatgcatgctcgagcggcccgccagtgtgatgggatatctgcagaattcgccctttcgagcgggccgcccgggcaggtacaggacacaatccctgcttcattcttggctgacacagtataccacccagcatcttcttttgtggctccctgaatgagcaggcagatgtagccgtggttgtcctggtgcatgctggagaaaaggataaagtcattagggttctaaattttttaaaagtggctttggacatgaagcatcatttttaattagatcattagaaacagaattgtgcaagtagctgataatagggtcatacttattctgtagagattactaagctccattaaagttaatgggagaaagaacagaccgtcaagagttgaatacatctgtgtgcttaattcctagttgaggatctgcctttacaaaaaccactgaatagtcttttatcactaaagcaaatgaattcatcttttcttttaaaatagaatgataaacacttttaaaaaatcaccattagatcaaacacccatagcttncttntaaaagcttaatcctacattgggtaacccatgggttttgnctttgaatngatttcatcaaaaatcaaaacatcttttgtggcttttacaccatagaatttccatgcctttttnaaaatgnattnttttgatacattattaggactggaacaggttaagggtcagggtcttatttgggcaancttaacctaattnggtcagggctnngaggtgaagggattnattttntttnttncnaaaaattngaanggggngggacttccaaaaaacnaaattncanccnacnggttcctnt

SEQ ID NO: 5598 - DNA, 877 bp, Homo sapiens
  misc_feature 5, 6, 7, 8, 9, 10, 12, 521, 588, 612, 620, 632, 672, 683,741, 747, 751, 758, 763, 773, 824, 830, 841, 858, 863: n = A,T,C or G
ggtgnnnnnncnactactatagggcgaattgggccctctagatgcatgctcgagcggccgccagtgtgatgggatatctgcagaattcgccctttcgagcggccgcccgggcaggtacactcggccactgttctctgacctactgccagccctagtgctgcctgcaccccaggagctagctgtaagacctggggcaggtatgcagcccgctgcaagccttggttccacaccacgcctgtgaaaggaaggaaggatacaaggcaatgagccacacagctccttccagcgccaacagccactgcgaaattaggctcttttgctttggccatacttgtataccggcattcgggctcagctgggcactggaaagcagctgttccgtgcttgttaaggtaattaagcaacggtggccctcgactaaatctatctaaccaccaacagatgggcatttcaactgttctaggcatttaattctttcccttagaggacagtaaatcacaaggaaactatggaaataaacnggtagcctacccaacctggggctgcatttgttgctatttctacccatcgaattcaaaataccgaatnctggatcaactttccttccactgnaatgaaangggttgcacacnggagaaggaacacaaggaagaaaagctctctctgctttangtttacatggncatggggattcactgggtgggacaaaacattgttcagtgtcaaatatttgtcaacttntttatntggngcttcangactnctggagtagnggtttccttccacttgaaaaagacaccaggggaactgggccttgaaatcanccccancccaaaaagtnttttggatgcccttttnaaacncaagctggttgaat

SEQ ID NO: 5599 - DNA, 877 bp, Homo sapiens
  misc_feature 1, 14, 19, 487, 491, 494, 536, 550, 554, 591, 619, 625, 656,673, 684, 686, 701, 708, 719, 758, 763, 780, 792, 795, 799,800, 802, 810, 862, 867, 870, 873, 876: n = A,T,C or G
ngggttgtatcgantaacnactactatagggcgaattgggccctctagatgcatgctcgagcggcccgccagtgtgatggatatctgcagaattcgccctttcgagcggcccgcccgggcaggtactgagctccacaaacgtggccatggttggtgcggaaatgattctgagtgagcaggtagaagtctcacgtcctgctgtgtccagagttggttccttccagagggttcgtggtctcgctggcttcaagaatgaagccgtggaccttcacagtgtgtgttacagctgttaaagatgttgtgtctggagtttgttccttcagatgtgtctggagtttctcccttctggtgggtttgtggtgtcgctgacttcaagaatgaaagccgcagactgtcgtggtgatcgttgtagctcttaaaggtggtgtggacccaaaaaagtgagcagcagcaagatttttcgtcaagagggtaagaacaaaatttncacngtntggaaaggcatctgaaccggttcctgcttcccgcgtaccttnggccggcgaccacncttngggcgaattccaacccacttggcgggccgttctaatngatccgagctcggtccaaccttggcgtnaatatnggcatagctgtttcctggggtgaaaatgttntccgtttacaatttccnacaaacatacnanccggaaccttaaaanggtaaancctgggggtgnctaatgaagtgaactttacctcacattaatttgcgttgngctcnctgcccctttttcaatngggaaaaccttnttnccanntnctttaatnaattcggcccacccccgggaaaagccggtttgcctttttggggccttttccntttcnttngtnaana

SEQ ID NO: 5600 - DNA, 853 bp, Homo sapiens
  misc_feature 4, 5, 6, 7, 8, 9, 10, 12, 481, 521, 560, 570, 617, 641, 663,693, 716, 724, 732, 766, 771, 773, 782, 798, 815, 820, 823: n = A,T,C or G
ggtnnnnnnncnactactatagggcgaattgggccctctagatgcatgctcgagcggccgccagtgtgatggatatctgcagaattcgccctttcgagcggcccgcccgggcaggtactttttttttttttttttgctgttgttttcttctctgtctttttaactttgcagaaagcccttccagttatcactcagaccctgttcaggacgttggtggccaaacagtccccttttgttaagcgagcgtcccatttttgtttctcttgaaaggtgccctccgggacagcagagcctttctttgggctgtttataattgagccctgaagaaaaacagaaatcattctaaacccaggccaagtgcctccttggcctagctaggcaaagctaaactcacacaagatgaaatctaaccagctggttacctgagaaccaccttcgggagttctccggcttgactgctttcgccttggccaccatctcnagctccagcgacagctgagggtcagggcctctctgtgcanaagagtaggaagagaatcatagctgttggtgaaaggtangttgcattgnttgaaaaggtcctatgtcagcttgcaaaatgctatggatctgtaaanaatcctgaaaaaaatgggttgganaaaaaatttatgaccggaagtntaagttggctttgagggggcaatttaaccnggaaatttttctttttgggggtnaaggtttnaaaaagtnccttttaaaaaaagcggggggatctatttttttnttaantnacataaaangggtttataactttancccccttgaaaactttnggccnttnttttttggcttttttttaccaaaataagaa

SEQ ID NO: 5601 - DNA, 891 bp, Homo sapiens
  misc_feature 115, 151, 264, 417, 480, 567, 606, 633, 647, 714, 726, 734,744, 751, 752, 790, 830, 833, 837, 845, 852, 861, 867, 868,882, 883, 889, 890: n = A,T,C or G
cgaattggccctctagatgcatgctcgagcggccgccagtgtgatggatatctgcagaattcgcccttcgagcggccgcccgggcaggtactttttttttctttttttttttttncctgctgagttgtatagtagaaaattcacattccanttttggagtttagctcataattgctgccatttttaaacgtcaaaatattttatttagctaactatagttgtttatgaaataggatccattttttaaatgcaaagaaactcagntcattaaccactaaaaagcgagtccaagggaaagggcctgacacatgaattagcaaatcacaatgtagtaaaacagaaaaagctgtctgttcaaaggtgaaaatcagaatcatgtaaatggctatctgttgcttttattttttcagttggttnccaaaacagaaatatttactaatataaattttattttatttttttgagataggggtcttgctntgtcacccaggctggactgcagtggtgtgatcatagctcactgcagcctcgaactcctgggctcaaacaatcttcccgccttacctnccaagtagctaggacccatggtcacattccaccaagccnggctaatttaatttttaattttttttngaccagacaggggnctttatcatttttgcccaaggctggtcttcgaacttctgggggtcaagcaattcctcccaccttaancttctaaaggtnttagggantacccgggcntgaaccnnccatgccaagccaatttttacttaaaataaagggccangttttttttaaaaaaaggcccccattttcctactttcttncanaggnaaaaaccnattggcntttacttgntgaaanngtgggaaaggggtnnaagatnnt

SEQ ID NO: 5602 - DNA, 884 bp, Homo sapiens
  misc_feature 10, 14, 21, 106, 504, 508, 659, 680, 683, 701, 710, 745,749, 758, 760, 769, 784, 791, 807, 812, 815, 831, 842, 851,855, 862, 873: n = A,T,C or G
ggtgttgatncgantatacgnttcactataggggcgaattgggccctctagatgcatgctcgagcggccgccagtgtgatggatatctgcagaattcgccctttcnagcggccgcccgggcaggtacttttaggtgctgggttcaaattctgtctgctgtggtcattaacgggaagaggtggccagttgtgtgggcctgcctgaggcaccactggccccagctgacctttccaatcaaaggaatggctgaccaaaccaggatggtattaagaaattctataaaacattcagaaataacctattctagaatgatctgggcagtgtgggatgcagttaggaccagaccagccttcttctgagcaaatggcagtggtgcccatctccactaagcctcaacgtgcgagaaaaaacactcccaaccatgcagcttatctgagcacaggatgcgcttgttgctggggtagccacatgtatatgcttctggaactcctgattcctgccttntctntgtatacccaggaggcgggagcacacaccagaactcaggactttgtgatgaccatgctttgggggaacaacatgcacagaatgtctgaatggttcctactctgaaaggatgatttggccataaaaagggatcaaatgagtcatggagtctngcttgaacttgcaataaaaanaanaacaattggcaaactgtncacaataancactttgaaagttggaaacacaaaaaccccatggncttnaaaaacaantnaaggctaanaaaaggctgatttanccttggncgcgaccacccttaanggcgnaanttcaacacacttgggnggccgttactnagtgggatnccanctcggtnccaactttggngttattattgg

SEQ ID NO: 5603 - DNA, 943 bp, Homo sapiens
  misc_feature 2, 111, 391, 399, 443, 447, 448, 458, 462, 482, 483, 487,491, 492, 494, 497, 502, 512, 514, 526, 527, 529, 530, 534,544, 548, 549, 551, 558, 565, 580, 581, 593, 604, 607, 615,618, 620, 623, 626, 649, 653, 654, 660, 661, 662, 663: n = A,T,C or G
  misc_feature 683, 688, 692, 696, 713, 719, 725, 727, 733, 735, 743, 750,753, 758, 760, 763, 764, 765, 773, 777, 781, 784, 791, 792,793, 797, 806, 810, 817, 823, 835, 841, 845, 849, 853, 857,858, 867, 870, 873, 875, 879, 886, 890, 896, 898, 903: n = A,T,C or G
  misc_feature 906, 914, 918, 927, 930, 932, 933, 937, 940: n = A,T,C or G
gnggatttaaacccacttttactatagggcgaattgggccttttagatgcatgctcgagcggccgccagtgtgatggatatctgcagaattcgcccttagcgtggtcgcgntcgaggtactgagctccacaaacgtggccatggttggtgcggaaatgattctgagtgagcaggtagaagtctcacgtcctgctgtgtccagagttggttccttccagagggttcgtggtctcgctggcttcaagaatgaagccgtggaccttcacagtgtgcgttacagctgttaaagatgttgtgtctggaatttgttccttcagatgtgtctggagtttctcccttctggtgggtttgtggtgtcgctgacttcaagaatgaagccgcaaactgtcgnggtgatcnttgtagctcttaaaggtcggtgtggacccaaaggagtgggcagncatnnaagatttttngtcnaagaggggtatagaacaaanntttncacnngngtngaaanggtatatgancngggtccctgctnncnngcgnaccctggacngggnngncccgatngaaaagngcgaatttcccattnnaactgggcggtnccgttaccttnatntgatcccnagncntgnggncccaaggcttggccggaagtcantggnncattannnngcttttctgttgtaaaaatnggtanttcncgcntcccatattttccaccncaagangacaangnccgtgnangctacttnagtggcnaangcccngnggnnnggctaaanaatngtanccnaaactannnactncatttgttnttgngatatancatgtnccggtttctaantatggngtanaacntgtngganncgagcttgnttnatnanattnactcaancccnggcggnanaagangtntatcacgnttantggtccccnatncnntatnatnccg

SEQ ID NO: 5604 - DNA, 865 bp, Homo sapiens
  misc_feature 486, 611, 645, 647, 652, 669, 672, 674, 677, 679, 690, 691,692, 702, 703, 708, 718, 719, 729, 734, 740, 743, 753, 760,762, 763, 767, 770, 778, 796, 803, 827, 829, 830, 836, 841,853, 856, 864: n = A,T,C or G
gaattgggccctctagatgcatgctcgagcggccgccagtgtgatggatatctgcagaattcgcccttagcgtggtcgcggccgaggtactttttttgttctttttttttttttttttgctgacctgtagtttgatttccagtgtctagacttaacagtctgaatttaaacacgaggcatatacacaaaatcatctggaactgatttttttcacactaaacacttctttctgatcctactttccaggaggctccttcctccaaacatatctccagatgaaaatcacttaattaaccaagaaagactcaaccgcccttaactgcttttctaaacagtcacacatactggatttacttattttgagacatgacaaaccagttgcaaaccacaaattcattctcatgggccctccacacggtctcttgttccttctgaagagggtcttgctgaggaccattttgtcccccttcctgcacagctactcantcggtgctggagagtgtggcctttcgaactattttgcgggttttcctgccacatgatgctgacggacgtcagcctcttccggccttgggtgcacatacaaacagccttgtaaaagctccactttntatttccagattgctggtatgcggtctggctttntnattcnaaagggaaattaaaganggngnatngnttaaattcggnnnctttgtgcanntaccntggtttaatnnaaaaatgaancttgnattgcntanaattcaaccntccaggnanncggnggngggccttnactggggggggatttggnaactcanctttcctttggggccccccccaangnntttggngcctngggggggggccnttnattgtggng

SEQ ID NO: 5605 - DNA, 1252 bp, Homo sapiens
  misc_feature 1, 3, 4, 5, 14, 18, 19, 20, 22, 26, 28, 29, 35, 36, 42, 46,48, 50, 51, 52, 57, 58, 60, 62, 63, 64, 77, 81, 83, 90,93, 96, 99, 102, 103, 107, 115, 116, 121, 124, 127, 146,169, 382, 433, 437, 465, 473, 480, 498, 517, 539, 541, 572: n = A,T,C or G
  misc_feature 577, 591, 610, 627, 628, 657, 664, 672, 709, 712, 720, 726,732, 734, 738, 753, 756, 772, 783, 789, 790, 797, 813, 814,815, 830, 835, 837, 846, 864, 868, 873, 877, 896, 903, 921,925, 926, 928, 936, 941, 957, 958, 974, 980, 985, 986: n = A,T,C or G
  misc_feature 991, 996, 997, 999, 1001, 1002, 1008, 1010, 1015, 1018, 1019,1025, 1029, 1031, 1039, 1040, 1046, 1048, 1054, 1055, 1059,1060, 1063, 1067, 1068, 1069, 1070, 1072, 1075, 1079, 1080,1085, 1091, 1094, 1097, 1100, 1102, 1105, 1107, 1116: n = A,T,C or G
  misc_feature 1126, 1128, 1132, 1137, 1138, 1140, 1141, 1144, 1148, 1151,1156, 1165, 1166, 1173, 1176, 1183, 1188, 1193, 1194, 1195,1199, 1201, 1209, 1212, 1215, 1216, 1220, 1221, 1222, 1223,1224, 1230, 1231, 1239, 1240, 1243, 1244, 1245, 1252: n = A,T,C or G
ncnnntcccgttgnaccnnnanctangnnccctcnnctttcnttananannnttatnntntnnnttaccctattctntttntntttaacnccnctngtnagnngtgntgattttnntcacntanggngatttggggcccctctatntgcatgctcgagcggcccgccantgtgatggatatctgcagaattcgcccttagcgtggtcgcggccgaggtacttactggtgtggaaaatagcctgcaggtaggaccattgcagtgatgggcagatgcgtctttcacacggaatcaggcacagtggccttctgtgacatgtgtttataaaaaatggttaagtatataataaattgaacatctttgagattgggaagaattatgtngagattttccaccatttatgttttactgggatttcaaatacctggtccctntgcntttgtttttaattgccagggcaaaagcnaaagggcnaaaatgngccctaaaaaatgcctgntgggctttaattaattttntggaattaaaggaaaaatccananaaaaaaccccaattttgggttttaaaaaatnaatgncaaaactttcaagnaaagatcctggggaaaagntattttccttggaaaannccatttcccattttttaaccccggttccnaggtttngaacaaangggttttaggaagggtacctccccctggccttttggntantttagggngtggancatttngngggnccccaattggggggntancccttggcccccgggngccggggtccngtttcnngaaaaanggggcccgtaaatttnnncaaaacaccaacttnggtcngngggcccggntaacctaatttgggaatncccnaagcnttcngggtaccccaaaacctttngggtcgntaaatccaattgggcccntaanncnttgttatncctgngggtggaaaaaattgnnttatttccgcttcacnaaattntcccnnccaanaattnncntnnaccccngngaagnccnnttaaanaatntnaaaccccnngggggntngccttnnaagnnggngagnnnnanacncccnnttttnttttgntgnttntcncntancntggcccccntttctcaagntnttgnaaaanntnnatntgtnccnatttnttttttaanntaaactnggncctcacnccccngggannngggngntttttgtnaanttnnggtnnnnntttttnntgttcttnnttnnntattaan

SEQ ID NO: 5606 - DNA, 823 bp, Homo sapiens
  misc_feature 442, 449, 456, 497, 513, 602, 616, 661, 698, 699, 714, 723,749, 769, 779, 788, 791, 795, 805, 807, 811, 812, 815, 817,822, 823: n = A,T,C or G
agggcgaattgggccctctagatgcatgctcgagcggccgccagtgtgatggatatctgcagaattcgccctttcgagcggccgcccgggcaggtacctgactttgggtaagttgccagaataagatcatcaggcttggcttggaaattacatactttttcccaccattcttttgataatatcaacgtagggactccatctacttccatgatgttaaacagttctggctttttttccatcgtgggagcgtttttctcaatcttcaccattgggaatcagttgggcttttggcttctctctccctgtgtgagccagtaaaggggataataaggatcattgtttatattctctgtgaatttataattaatgaaaaaggatttttgttgatcttaagctgtagacaatttggtgtgctttgcatgtctttctgtatgggtctggnatctcangcagcanaggaaagcagcttgctgcctttagtcaaactgcttcctggnaacccagagccaggtncagcttcaggacactgtccagcaagaccccagcaggtccccgcgtacctcggccggaccccgctaaggcgaatttcacacactggcggncgtactagtggaanccagctcggaccaacttggcgtaatcatggcataactgtttctgnggaaatgttttcccttcaaattcccacaacataccannccggaagcctaaaangtaaagccnggggggcctaatggggggcctacccncattaattggggttgggccncaactggccncttttccanttngggnaaacccttcntngccnnctncntttann

SEQ ID NO: 5607 - DNA, 814 bp, Homo sapiens
  misc_feature 648, 657, 660, 664, 666, 668, 766, 771, 785, 794, 804, 808,813, 814: n = A,T,C or G
gcgaattgggccctctagatgcatgctcgagcggccgccagtgtgatggatatctgcagaattcgccctttcgagcggccgcccgggcaggtacgcgggacctgctgtgctcttgcttgcacagtgtcctggagctggacctggctctgggtttccaggaagcagtttgactaaaggcagcaagctgcttcctctgctgcctgagataccagaaccatacagaaagacatgcaaagcacaccaaattgtctacagcttaagatcaacaaaaatcctttttcattaattataaattcacagagaatataaacaatgatccttattatcccctttactggctcacacagggagagagaagccaaaagcccaactgattcccaatggcgaagattgagaaaaacgctcccacgatggaaaaaaagccagaactgtttaacatcatggaagtagatggagtccctacgttgatattatcaaaagaatggtgggaaaaagtatgtaatttccaagccaagcctgatgatcttattctggcaacttacccaaagtcaggtacctcggccgcgaccacgctaagggcgaattccagcacactggcggccggtactagtggatcccagctcggtccaagcttggcgtaatcatggncatagctgnttnctgngngnaaatggtattcgctacaatttcccacaacattacgagccggaagcctaaagtgtaaagcctggggtgcctaatgggggggctactcacatttaattgngttgngcttactggcccgntttccatcngggaaaaccngtgngcccnn

SEQ ID NO: 5608 - DNA, 919 bp, Homo sapiens
  misc_feature 350, 353, 363, 388, 415, 428, 452, 453, 471, 476, 509, 524,533, 572, 589, 605, 607, 617, 633, 637, 647, 648, 650, 666,676, 677, 688, 689, 691, 694, 696, 697, 699, 700, 708, 709,710, 715, 718, 719, 720, 724, 727, 728, 736, 755, 757: n = A,T,C or G
  misc_feature 758, 761, 762, 764, 766, 772, 774, 785, 786, 787, 788, 789,790, 791, 792, 793, 817, 820, 822, 824, 825, 829, 841, 842,847, 852, 853, 856, 858, 859, 861, 865, 867, 870, 872, 874,883, 885, 887, 893, 900, 904, 912, 917, 918, 919: n = A,T,C or G
actactatagggcgaattgggccctctagatgcatgctcgagcggccgccagtgtgatggatatctgcagaattcgcccttagcgtggtcgcggccgaggtactgagctccacaaacgtggccatggttggtgcggaaatgattctgagtgagcaggtagaagtctcacgtcctgctgtgtccagagttggttccttccagagggttcgtggtctcgctggcttcaagaatgaagccgtggacctttacagtgtgtgttacagctgttaaagatgttgtgtctggagtttgttccttcagatgtgtctggagtttctcccttctggtgggtttgtggtgtcgctgacttnaanaatgaagccncacactgtcgtggtgatcgttgtanctcttaaaggtgggtgtggacccaaanagtgagcaaacancaaagatttttcgcaagagggtanngaacaaaattttcaccgngtggnaatgggattctgaaccggttttccttggttccncgggtaccttccccnggcggggcnttcacaaaggggcgaaatttcaacacaacttgtccggcncggttaacaaatggggntcccctaacttcgggntnccaaaacttngggcggaaattaattngggnattaagcttnntncccttgtgttgaaaanttgtttttcnnctttacaaaanncnccncnnannaataccannnccggnaannntttnaanntttaaaancccggggggttcccttaantnnttnntncntaaccncnccattaatttnnnnnnnnnctctaccgggccccttttttcaanttngngnnaacnccgggccccccnnctggnatttnnttnanntngccnanccncncnggggggaangncnctttgngaaattnggcncctttttnccctnnn

SEQ ID NO: 5609 - DNA, 854 bp, Homo sapiens
  misc_feature 210, 223, 231, 246, 249, 271, 348, 402, 408, 509, 513, 514,538, 541, 543, 544, 546, 547, 574, 580, 581, 594, 595, 604,605, 609, 610, 611, 612, 613, 617, 618, 619, 620, 621, 623,624, 625, 626, 627, 637, 639, 640, 644, 663, 671, 673: n = A,T,C or G
  misc_feature 679, 680, 683, 687, 703, 707, 708, 709, 715, 723, 726, 727,728, 729, 730, 740, 742, 743, 744, 751, 756, 759, 771, 774,776, 778, 780, 781, 784, 785, 787, 788, 789, 791, 792, 793,796, 797, 798, 803, 804, 805, 806, 807, 810, 812, 813: n = A,T,C or G
  misc_feature 814, 822, 827, 830, 837, 838, 839, 842, 843, 847, 851, 854: n = A,T,C or G
atagggcgaattgggccctctagatgcatgctcgagcggccgccagtgtgatggatatctgcagaattcgccctttcgagcggccgcccgggcaggtactttttttttttttttttttttttttttttatttttctctttcacttaccatcatctgacatactacgcacttgtttaatgttcgtctatccctagctccatgaggaaaganatttgtttgttgnggtactgnatcctcagcacctanaanaggatttggcgaatattaaacnctcgataaatatttgatgactgaatgagtgaatgcatgaatgaacaaagtcataaaactgggcttcaaaagctcatnttgtctagcatcataactagaaagtcataaaaaaaaaaaagttttttccctttntgacanaatagtacagtgagtcgaagccaaaatatcagggattcatgtagttatgggccaaaatgcaacaaggaaagagaatgacatatacctagcccttaagccantcannagacttatgattgggaggtttcanccnannannctttccatctggaaaaatccccaaaanttttanntaaaaaatggtcnntgcctgtgnntttnnnnngtgnnnnntnnnnnaaaaggcccntnncctncaccttggaaaaacaaacnaaaatttnanctttannggncccnttttccttttaccctntttnnnggggcntttccccnccnnnnngccggggggntnnncacctgntaatnccnaaactttagggnggngncnannaanntnnntnnnccnnnggggnnnnngangnnnaaaacccncttgnccnaaattgnnnaanncccnaacnccn

SEQ ID NO: 5610 - DNA, 824 bp, Homo sapiens
  misc_feature 111, 376, 509, 555, 649, 656, 751, 753, 771, 775, 785, 792,799, 800, 808, 809, 813, 824: n = A,T,C or G
gggccctctagatgcatgctcgagcggccgccagtgtgatggatatctgcagaattcgcccttagcgtggtcgcggccgaggtactttttttttttttttttttttttttngagattgttctactaggaatttattaatcagaaaagccaatgaagccatatatattttgttaatataaaactcataatttaattttctttttattatttgattaatataaaaaggaaacctaattcaatttataaatattttaattaacagaattatatcccatacaatataaaatctaacatagaattatggctataactatggattatactataatacaagattaatttttaatttatttctttcagagatgaatcttacagngatgtgtccttctattgacccactacattaccaccatttaacatacattcgtgtggaccaaaataaactaaaagaaccaataagctcatacatcttcttctgcttccctcatatacacactatttattatggngaacaaccgaagcactaatggtcaaacaatacaactaaagacacangttttcaggagatttccagatgatgatgatgaaagtgaagatcaccgatgatcctgccgatgctcatggagagcccagaacaagaaggagcagnaagggcncttttgaccttcattattatgaaaaatcaaggaattgccaggaactttttagggatacacttaccgacttcaaaaaaacctatacttaaatatangnaaatcttaagtaaaacanggtnttactcaaangtaatantttttannaattatgnnttantattaagaacn

SEQ ID NO: 5611 - DNA, 832 bp, Homo sapiens
  misc_feature 507, 519, 568, 614, 615, 635, 660, 674, 688, 703, 707, 730,738, 742, 744, 750, 775, 776, 798, 805, 814, 827, 829, 830,832: n = A,T,C or G
tagggcgaattgggccctctagatgcatgctcgagcggccgccagtgtgatggatatctgcagaattcgcccttagcgtggtcgcggccgaggtacttttttttttttttttaaaccatttcaagagagtctctggatttcttgatccttgatttgtggttttcatgttgtctgtgagctccagcagggcctcatcagccctgtccgtggtgctgctccagctctgtgctccccgataggtggccctgcgctctatgcacatccttcttaacataggaaagatgtatgcctttcaaagaaaggcattcaagacagatcagcaccaagtggaggctctacccacagatgttaatgtgcattaagaaacagcgttactgagaaatctgagccatcattccagagtctctctcctggggagaagtttgtttttactgctgggtttttttgtttggttttaattcagaatttggaactagaattatttgtaataaacctatcaaagcctancctaagggctgncatctctgtctaaattctagttggttatacagtataaaaaagacatttntaaagctctcaaagcctgatcctccctcaaatagtaaagggactgnngtgaaaggtttgtttaagcntggcttaaacaaccctttttttttnccccccagcctccngggggaaaaaagcnaaacttttttggccnaganctttttaaaactattaaaatagnagttattnaatntntttaanccaaatgaagggggtaaaaaagttnnttttttaaaaaaaagaaaaaanctttggnaattttccnaaaaagggggccngnncn

SEQ ID NO: 5612 - DNA, 394 bp, Homo sapiens
tacttagggcgaattgggccctctagatgcatgctcgagcggccgccagtgtgatggatatctgcagaattcgccctttcgagcggccgcccgggcaggtactggatcagtttctcctgcgtgaggtatgggtgacactcaacctgcaacagcaaacaatcctcatcacggggaaagccggctctgttttgcattgttcctagggagttctacacacaaaaagagtccaccaagcaaaggccaaacaagtgcgcactgagattcttgctaaatcacccatgagatcagcctcacacctccccaaagtgtcctgatcactgacccctgagataagactcagggcatagcattgaacattccccccgcaatgtttaagaagtaatagggcaggacc

SEQ ID NO: 5613 - DNA, 389 bp, Homo sapiens
tactatagggcgaattgggccctctagatgcatgctcgagcggccgccagtgtgatggatatctgcagaattcgcccttagcgtggtcgcggccgaggtacgcggggagactctgccttttcaacatggatggctcctcccgctgccgctgccgccccaggagacagcattacagagcatcagttaggtgcagagactgggcagtgcgcccgtgtgcaaagacaggagacacgaatcttccctgaaggagtgacagtctagggaggaaggcagactgcaggggacctacttctctcgggaatctcaatacttggaacaagaacctcctagacggaccctttggcataatgaattggaccaactgtaggttccaggactagagagccagc

SEQ ID NO: 5614 - DNA, 1156 bp, Homo sapiens
  misc_feature 1, 3, 4, 5, 7, 8, 11, 12, 13, 15, 16, 17, 18, 19, 20, 22,23, 25, 26, 27, 29, 34, 37, 38, 40, 46, 48, 50, 51, 52,53, 54, 55, 57, 59, 61, 62, 63, 65, 66, 67, 68, 72, 75,76, 77, 81, 82, 84, 85, 86, 88, 89, 92, 94, 95, 96, 103,104: n = A,T,C or G
  misc_feature 105, 107, 108, 109, 110, 112, 113, 116, 121, 122, 123, 130,134, 138, 143, 144, 152, 156, 160, 161, 165, 168, 174, 195,208, 209, 302, 364, 408, 478, 496, 501, 517, 626, 665, 672,675, 742, 755, 795, 809, 822, 825, 827, 831, 846, 861: n = A,T,C or G
  misc_feature 862, 917, 946, 947, 959, 968, 996, 1001, 1010, 1029, 1036,1040, 1044, 1045, 1058, 1059, 1071, 1073, 1074, 1083, 1089,1091, 1099, 1141: n = A,T,C or G
ntnnntnnatnnntnnnnnntnntnnntnttttntanntnataatntntnnnnnnantntnnntnnnnatantannncttnnannntnnctntnnntataggnnntnnnntnngtnagatnnntacacantatnatantcttnnacttctgntgcngttnnggcnacntgggangttgcctttaaaaaggtggcnttctgcttcctgnnggggctttgaaaacaccaaggcactccaggggtatcctggaagtcaaagcagcagccccggttgtttgcactccttgggggtgacatgggggnagccgcagtccaccctgtccttggctggcacggcacacttggtttgcagacaggcccacgtnaccttcggcccgctctaggaacctagtggatcccccgggctgcnagggaatttcgatatcaagcttattcgaataccggtcgaccttcgaggggggggcccccgggtaacccanctttttgtttcccttttnagtgnagggtttaaattgccncggcttggccgtaattcaattgggtcattagcctggttttcccttgtggtgaaaaattgtttattccgcttcaacaatttccaccaccaacattaccgaagcccggggnagccataaaaagttgttaaaagcccctggggggtggccntaaatgnagntgaagcctaaacctcacaattaaatttggccgtttggcgcctcacttggccccgctttttccaagtncggggaaaaaccntgttcggtggcccaagccttgccatttaaattggaaattncgggcccaaccgcngccggggggaagnagngnccgnttttttggccgttanttgggggccgccttnntttcccgccttttcccttcggctttcaacttggaacttcggcttgccggccttcngggtccggttttcgggactttgccgggcnnaaaccgggttantccaagccntcaccttcaaaaaggccggggttaaatnaaccngttttattnccaaccaacaaaattcaanggggggnattnaacnnccaggggaaaaannaaacatttgttnannccaaaaaangggccnancaaaaaanggcccaggggaaaccctttaaaaaaagggccccccgttttgnccttgggcggttttt

SEQ ID NO: 5615 - DNA, 1221 bp, Homo sapiens
  misc_feature 1, 7, 9, 11, 13, 23, 26, 27, 34, 37, 38, 44, 45, 46, 47,51, 54, 56, 57, 58, 61, 66, 70, 72, 80, 81, 82, 85, 87,88, 98, 100, 101, 105, 107, 110, 113, 120, 124, 126, 129,131, 132, 134, 135, 136, 137, 141, 143, 144, 150, 154, 174: n = A,T,C or G
  misc_feature 184, 205, 208, 209, 213, 216, 230, 235, 236, 249, 280, 285,291, 298, 300, 305, 324, 327, 329, 374, 416, 424, 462, 472,481, 502, 505, 511, 627, 654, 661, 669, 692, 712, 808, 831,861, 865, 872, 902, 911, 913, 918, 927, 930, 958, 966: n = A,T,C or G
  misc_feature 996, 997, 999, 1005, 1012, 1014, 1023, 1028, 1034, 1046,1047, 1049, 1058, 1082, 1101, 1109, 1119, 1123, 1125, 1136,1144, 1155, 1157, 1161, 1168, 1171, 1180, 1198, 1199, 1210,1213, 1215: n = A,T,C or G
nccgtcntntncntcgttttttnctnncctaatnttnntttccnnnncggnaantnnngcnttccnactngntagagctnnntcntnntttagagttnannggtnancgnatnttctccntttntnatnanntnnnntttnanntcgcancctncaccgcggtggcttgccgangtaccctggnagctgggtaactgctcagatnccnngggnggnggggggaaacaaanaaaannaccctcttgacanaaaaggccttgctgctgctcactctttgggntccanacgcancctatantnagctncaactgatcaccacggacngtntngccggctttcattcttgaagttcagcgacaccacaaacccaccanaagggaggaaactccaggcacatctgaaggaacaaactccanacaccaancatcttttaacaggcctgttaaccaccaccacctgtgnaaggtccacngggcttcantttctttgaagccagccgagnacncaccgnaaccccttttggaaagggaaacccaacttcttgggaccacaagccaagggaccgttgaagaccttttcttacccttgcttcacttcaagaaattcatttttcccgcccaccccaancccattggggcccaccgttttttggtngggaagnccttcaantttaccaaaaaaaagccccaaangaatggcccccattttggtngggggccccttgggggccaaccttttggggaagggttccttcttttcttccggggcaaaaagttggaaaaaagaaaagccgggttggaaaagggtngggttccattttggattggcccncaaattattccgccccacaaatttggaccntggnggccctnatttttcttattgaaggaaattccaaaccnttggaaggntnggggnaaagaaagnccnctccccaaaggagaaaagaattcccacngaaaaaanggcttgttggaatgcccgggaagggacccnngnttcatntgttcangnaaagggggntgggncccacnttttcttttgannanaaccccttngttgaagggaaaaggcccttttgnaaaaaaagaacccttccanggaacctnggaaaacttngaancntttttttgggncgtttttntcttttatttncncctnggccccnacngggaatttnaagggccccttgggaagnnaccttgtttgnacnanaggggc

SEQ ID NO: 5616 - DNA, 1278 bp, Homo sapiens
  misc_feature 2, 7, 8, 9, 12, 13, 14, 15, 16, 17, 18, 20, 21, 24, 25, 26,27, 28, 29, 30, 32, 34, 35, 36, 37, 38, 39, 40, 41, 43,44, 45, 47, 49, 51, 52, 53, 54, 55, 56, 57, 59, 60, 61,62, 63, 65, 70, 71, 75, 77, 80, 81, 82, 83, 84, 86, 87,89: n = A,T,C or G
  misc_feature 91, 92, 94, 96, 97, 99, 100, 101, 102, 103, 104, 106, 107,108, 109, 110, 119, 121, 123, 125, 127, 128, 130, 132, 134,135, 136, 140, 141, 143, 162, 174, 225, 246, 266, 293, 321,350, 373, 381, 385, 387, 415, 424, 459, 468, 484, 487: n = A,T,C or G
  misc_feature 519, 523, 525, 554, 581, 602, 603, 605, 616, 623, 653, 748,781, 808, 814, 815, 818, 820, 826, 828, 849, 853, 854, 860,862, 863, 864, 878, 900, 909, 956, 957, 976, 983, 1005,1010, 1020, 1027, 1038, 1041, 1053, 1061, 1082, 1083, 1087: n = A,T,C or G
  misc_feature 1092, 1101, 1104, 1111, 1112, 1113, 1117, 1118, 1119, 1124,1125, 1127, 1129, 1138, 1141, 1142, 1149, 1153, 1154, 1167,1170, 1173, 1174, 1176, 1177, 1182, 1190, 1191, 1211, 1214,1218, 1221, 1230, 1233, 1236, 1237, 1246, 1249, 1252: n = A,T,C or G
  misc_feature 1260, 1274, 1275: n = A,T,C or G
cncaacnnnttnnnnnnntnnttnnnnnnntntnnnnnnnntnnntntntnnnnnnntnnnnnantatanntttntngtnnnnntnntntnntngnnannnnnncnnnnnttttaagtngntntngnngngngnnnacanncnattcggcgaattgtgagcntccaccgcgtgnggcggccgaggtacttgagctccacaaacgtggccatggttggtgcggaantgattctgagtgagcaggtanaaagtctcacgtcctgctgngtccagagttggttccttccaagaggngttctgtggtctcgcttggcttcaaagnaatggaagcccgacggcaccttcacagtngtggtagttaccacgcctgttanaaaggatngttngnggtcctagggaagtcttgttcccttcantatggaagntatgggggaagattccctccctttcttgggtgggngtttttgtngggttggtccgcctgnacnttcaaaacaaattgaaaacccccgccaagacnttantncgccggggtggaatacggtatggtaagcntcttttaaaaaaggggtggggttggtngggacccccaaaaaggaagtnnangccaagccaanaccaaangaattttttttcggtccaaaggtaaggggnttaaaggaaaccaaaaagtttttcccaccgggttggttgggaaaagggggttattccttggaagccggggtttccccttgcttccccccggccgnttacccttgccccccgggccgggcccgccttcntaaggaaaaccttaaagttgggaatcncccccnnggngnctttgnangggaaaatttcctaataattnaaannctttantnnnaataccccgggcanaacccttggtaagggggggggngccccgggntaccccaagaaattttttggtcaaacccttttcaggtggaaaggggnntcaaattttgtcgccgccntttgggnggctcctttcaattggggccantaagncttgggtttnccctggnggttgaaaaanttngtttattccccncttccacnaaattttcccccaacaaaccnntaanccaancccccgggntanccaattnnnaggnnngtaannancnccttgggtngcnngcccctnaatnngaggggggaagtntanccnncnncaaanaaaaactnnggtttagcccccaaaaaggnccncccnaanatttgcccnatnggnnccaaaacantanaanggcccccnttttttttttttcnnttt

SEQ ID NO: 5617 - DNA, 1667 bp, Homo sapiens
  misc_feature 2, 4, 5, 6, 7, 9, 10, 11, 12, 13, 14, 15, 18, 19, 20, 21,22, 25, 26, 29, 31, 32, 33, 36, 37, 38, 40, 41, 43, 44,45, 46, 47, 49, 51, 53, 54, 55, 57, 58, 61, 63, 64, 66,68, 70, 71, 72, 74, 75, 77, 79, 80, 81, 82, 83, 84, 85,86, 87: n = A,T,C or G
  misc_feature 90, 91, 92, 94, 97, 98, 99, 101, 104, 105, 107, 108, 109,111, 112, 116, 117, 118, 119, 121, 124, 127, 128, 129, 131,132, 133, 134, 137, 138, 139, 140, 141, 142, 143, 144, 145,146, 147, 149, 150, 154, 156, 157, 159, 162, 165, 170: n = A,T,C or G
  misc_feature 172, 173, 176, 180, 183, 190, 194, 218, 223, 243, 244, 248,258, 260, 275, 276, 283, 285, 324, 335, 347, 349, 373, 378,387, 408, 413, 417, 445, 467, 490, 493, 515, 520, 523, 525,530, 538, 544, 560, 581, 602, 612, 617, 630, 642, 646: n = A,T,C or G
  misc_feature 652, 662, 665, 673, 679, 681, 694, 697, 702, 707, 715, 731,741, 744, 748, 760, 773, 780, 785, 790, 791, 798, 816, 822,826, 830, 833, 843, 914, 937, 946, 961, 964, 970, 988, 1005,1010, 1020, 1034, 1037, 1048, 1058, 1067, 1069, 1079: n = A,T,C or G
  misc_feature 1080, 1098, 1111, 1114, 1120, 1123, 1148, 1211, 1219, 1223,1242, 1246, 1250, 1255, 1260, 1309, 1329, 1334, 1367, 1405,1414, 1430, 1433, 1475, 1481, 1497, 1499, 1507, 1513, 1521,1527, 1531, 1535, 1538, 1539, 1542, 1543, 1544, 1545: n = A,T,C or G
  misc_feature 1561, 1566, 1574, 1581, 1583, 1584, 1585, 1586, 1589, 1592,1593, 1597, 1606, 1609, 1615, 1621, 1625, 1630, 1642, 1643,1653, 1656, 1664: n = A,T,C or G
tntnnnntnnnnnnnatnnnnnttnnttntnnnttnnntnntnnnnntntntnnntnnttntnntntntnnntnntnannnnnnnnnatnnntntannntnttnntnnntnntttnnnntnttnttnnntnnnnttnnnnnnnnnnngnntggnanntntangcnccttntnnaantccnccntaatttnttgngccgcaatatgtggagctctcacncgcgngtgggcgcggccgccccggnncatnggtacctccngnggggggccgggcganntaacccnanttccaaaccgtcttggcccctatccaactttttcggatnggtaagttctncccgtgcccttncnccatggtgtcgaacccactggggntttgnacttgcgcnaaatcaaagggggtttccggnatctncccncgtaaggaagtgtgcaagcccttggaanaaaaaccgggcttaccccactnttcccaaaagggtaaaagggtcnaanccaagcgtccggccgaccaaanaattnacncnccacnttcccggnactccngggggtgcaagtggtnaaggtagtaccggatacatanagaaagatatatacatttacncattttatanagagnggtgacccctttngggggcgccggntttncttaangaaaaccttnagngtgggggnattccncnccccccggggggnccnttggnaaagngggaaaanttttccgggaattaanttccaaaagnccntttnaatttctggaanttaacccccgggntcccggnaaccnctttnnggaaagngggggggggggggggccncccctngggnttanccncccccaaggncttttttttttgggtttttccccctcttttttttaaaaattgggaaggggggggtttttaaaaatttttgnccagcccggccctttttggggcnccggttaanaatttccaaattggnggntgcaanttaaaggcccttgggatntttcccccctttggttngcttnggaaaaaaantttgggttttaaanttnccccgcctttncaaccaaaanttttccccnanccacccaaannccattttaacccgaaaantcccccggggggnaangcccanttnaaaaagggttggtttaaaaaaaggncccttggggggggttgcctcttaaaattgggaaggttggaaggccttaaacctttcaaccaanttttaaantttnggccgggttttgggcggcnttcnaacnttggnccccnggctttttttccccaaaattcccggggggaaaaaaccccttggttccgnttggcccccagcccttggcnatttntaaattggaaaaattccgggtccccaaaacctnccgcccgggggggaagaaagggcccgtgttttatggcngtttttttngggggcccgcctttcnttnaccggcttttccccttaaggctttcaacttggaacttccggnttgccngcttttggggttccgntntacgggcnttggcnggggcccnacccantttnttcncgnnttnnnnctttcaaaaagggccngtttnatttcccngggggangnnnnccnccnnaaantttccaaanggngttttnaacccntcgnctaanggaaaacctttnnggaaggccantangggagccncgg

SEQ ID NO: 5618 - DNA, 773 bp, Homo sapiens
  misc_feature 1, 652, 724: n = A,T,C or G
ngggcgaattggagctccccgcggtggcggccgaggtactgtgggttctgagtcaaggatcccagtgctgccaggaaccagcagtcagctgcgcctccttgttggatgtcaaatctgcttatatcatccaggatgaagtgaggaggaccccctggtagatcctgtggccgcttccatatcacattggagaggcgtttttcctggagcagcttctggcctatggaagaatctgctgcagggaatgtctcatccttaaacgtccggcccatgctcaggcagtgatcccgcaaggtggtaaagtcctggtctttgaacttgatgatggaggtctccactgaaggctcctggtaatacgccatgactctccttagaagacttccgaggtcctttcctgtttcctaggcaggtgtgtctgatggaggaggggagacgggcaggttccacaggctctcaggttagagagtggtggaggagactggcagaggaggagagcatggccggccgctctagaactagtggatcccccgggctgcaggaattcgatatcaagcttatcgataccgtcgacctcgagggggggcccggtacccagcttttgttccctttagtgagggttaattgcgcgcttggcgtaatcatgggtcatagctgntttcctgtggtgaaaattgttattccgctcacaattccacacaacataccagcccgggagcataaaatggtnaaagcctggggtgccctaatgaagtgagctaactcacattaaatgcgtt

SEQ ID NO: 5619 - DNA, 772 bp, Homo sapiens
  misc_feature 682, 705, 717: n = A,T,C or G
ggagctccaccgcggtggcggccggccatgctctcctcctctgccagtctcctccaccactctctaacctgagagcctgtggaacctgcccgtctcccctcctccatcagacacacctgcctaggaaacaggaaaggacctcggaagtcttctaaggagagtcatggcgtattaccaggagccttcagtggagacctccatcatcaagttcaaagaccaggactttaccaccttgcgggatcactgcctgagcatgggccggacgtttaaggatgagacattccctgcagcagattcttccataggccagaagctgctccaggaaaaacgcctctccaatgtgatatggaagcggccacaggatctaccagggggtcctcctcacttcatcctggatgatataagcagatttgacatccaacaaggaggcgcagctgactgctggttcctggcagcactgggatccttgactcagaacccacagtacctcggccgctctagaactagtggatcccccgggctgcaggaattcgatatcaagcttatcgataccgtcgacctcgagggggggcccggtacccagcttttgttccctttagtgaagggttaattgcgcgcttggcgtaatcatggtcatagctgttcctgtgtgaaaattggtattcccgcttcacaatttcancaccaacattacgagcccggganccataaaagtgnaaaagcctggggtggcctaaatgaggtgagctaacttacaattaattggcgttgg

SEQ ID NO: 5620 - DNA, 1134 bp, Homo sapiens
  misc_feature 1, 3, 4, 9, 14, 21, 23, 24, 26, 27, 29, 31, 36, 37, 39, 43,44, 47, 48, 49, 51, 52, 55, 57, 58, 60, 61, 68, 74, 78,80, 82, 83, 86, 88, 89, 90, 94, 97, 103, 106, 114, 122,165, 167, 404, 587, 609, 654, 680, 683, 686, 748, 755, 793: n = A,T,C or G
  misc_feature 839, 864, 897, 909, 911, 913, 937, 942, 947, 959, 977, 979,994, 999, 1001, 1009, 1015, 1021, 1026, 1045, 1048, 1060,1062, 1066, 1076, 1080, 1086, 1090, 1092, 1096, 1097, 1098,1108, 1113, 1117, 1119, 1123: n = A,T,C or G
ngnntcccnacgcnttctgtncnncnnantnatatnncnattnnctnnnannaantnntnnttttaantcatcnaggncncnnggngnnngttnagnctttgnaancccctccntttcgaanggacctccaccgcggtggcggccgcccgggcaggtacaggacntnatccctgcttcattcttggctgacacagtataccacccagcatcttcttttgtggctccctgaatgagcaggcagatgtagccgtggttgtcctggtgcatgctggagaaaaggataaagtcattagggttctaaattttttaaaagtggctttggacatgaagcatcatttttaattagatcattagaaacagaattgtgcaagtagctgataatagggtcatacttattctgtangaggattacttagctccatttaaagttaatggggagaaaagaacaggacgtcaaggaagtttgaataccatctgtgttgccttaattcctagtttgagggaatcttgcccttttaccaaaaaacccacttggaataagttcttttttatcacttaaaaggcaaaaatggaatttccatccttnttccttttttaggattaggaantggataaaaccacctttttttaaaggaaaaatcccacccatttanggattccaaaaaccaccccccattangcnttncccttttcttaaaaaaggcctttaaattcccttaccaatttgggggttaaaccgccatgggnttttttnggtccttttggaattggaatattccattccaaaaaaantcaaaaaaccaatccttaatggtggggcctttttttaacaacaatnaggaattttccccaatggcctattnataaaaaaatgggtaatcctttttggattaacnaatccatttagngnancttggaaccaaggtttaaagggantcaanggttncttcaatttggnggcaaagtcctttacccntnaccttccggtcccanggtgncntgggaaanttgaanatgganttccnattttttccttttcttttnccnaaaaaatattcntngaangtgggggggncccnttcccnaatntnaccnnncattcccaancccgncacntngggnccccccccccg

SEQ ID NO: 5621 - DNA, 1138 bp, Homo sapiens
  misc_feature 1, 8, 9, 12, 13, 15, 17, 18, 19, 20, 23, 27, 28, 32, 33,34, 36, 37, 38, 40, 42, 46, 48, 49, 59, 63, 66, 67, 70,72, 73, 75, 76, 78, 79, 81, 82, 83, 84, 85, 86, 87, 92,94, 104, 111, 117, 123, 124, 126, 173, 398, 447, 535, 584,585: n = A,T,C or G
  misc_feature 635, 642, 653, 676, 681, 684, 700, 703, 746, 749, 767, 785,786, 796, 799, 869, 874, 894, 899, 907, 908, 915, 916, 922,926, 930, 933, 936, 938, 948, 949, 962, 967, 970, 972, 980,983, 1003, 1008, 1014, 1015, 1019, 1026, 1033, 1060: n = A,T,C or G
  misc_feature 1062, 1064, 1071, 1072, 1075, 1076, 1077, 1083, 1089, 1090,1091, 1097, 1099, 1101, 1109, 1110, 1112, 1128, 1129, 1130,1134: n = A,T,C or G
nggaaatnncgnnanannnnggntatnnccgnnnannncngnaaantnngggaaatttngaanatnngtnannanncnngnnnnnnnaagangnggttgaagcnttgaaancccccnactttnngncgaattggagctccaccgcggtggcggccgaggtactgtgggttctnagtcaaggatcccagtgctgccaggaaccagcagtcagctgcgcctccttgttggatgtcaaatctgcttatatcatccaggatgaagtgaggaggaccccctggtagatcctgtggccgcttccatatcacattggagaggcgtttttcctggagcagcttctggcctatggaagaatctgctgcagggaatgtctcatccttaaacgtccggcccatgctcangcaagtgatccccgcaaggtgggtaaaggtcctggtctttgaaccttgnatgaatggaggtctccactgaagggctcctgggtaataccgccatggactcttccttagaagacttcccgagggtccttttcctggtnttccctaggccaggtggtgtcttgatggggaggaagggggagaaccggnncaaggggtttcccacaagggccttcttcaagggtttaaaaagaagttggntggggangggaagaactngggcccctaaggggaggggaagnaaccnatnggccccgggccccgcntcntaagaaaacctaaagtgggggatccccccccgggggcctggcnagnggaaattttcccaattantcaaaggccttttatttnnggataacccnggnccggaaccctccagaggggggggggggcccccggggtaacccccaactttttttggtttccccttttaanggganggggtttaaaattttggcgnccccnttggggcnngctaaanncaattngggnccanaangcntnggtatccccnngtgggggaaaaanttggntananaccgcctnccncaaaatttcccccccccaanaattnccgaanncccnggggganccatatnaaagatggttaaaagccccctgggggntngncccttanntgnnnggggangccccnnncccccncnantttaattnngnggtttgggcgcctcannntggncccg

SEQ ID NO: 5622 - DNA, 1207 bp, Homo sapiens
  misc_feature 2, 4, 6, 11, 13, 23, 24, 25, 26, 30, 36, 38, 42, 45, 55,58, 59, 61, 62, 64, 68, 69, 74, 77, 78, 83, 86, 87, 89,90, 91, 96, 98, 99, 103, 104, 105, 106, 111, 112, 115, 117,121, 132, 134, 136, 146, 168, 193, 194, 219, 339, 351, 372: n = A,T,C or G
  misc_feature 376, 387, 422, 425, 439, 477, 508, 527, 528, 541, 550, 556,572, 580, 583, 597, 602, 606, 607, 623, 646, 706, 719, 730,749, 751, 763, 768, 770, 780, 809, 833, 838, 847, 848, 854,860, 867, 874, 879, 880, 887, 889, 896, 905, 906, 917: n = A,T,C or G
  misc_feature 930, 947, 956, 958, 967, 969, 970, 976, 997, 1000, 1004,1013, 1025, 1027, 1032, 1036, 1041, 1045, 1047, 1049, 1052,1053, 1056, 1057, 1062, 1065, 1088, 1095, 1098, 1106, 1114,1115, 1125, 1128, 1130, 1142, 1144, 1145, 1147, 1148: n = A,T,C or G
  misc_feature 1184, 1189, 1192, 1203, 1206: n = A,T,C or G
tnangngaaanantctgaatatnnnnaaantattcncntaantangtaatttatngannanntngtgnntttgnttnnatatngtnntnnnaggangnnattnnnnctttnnaanantctnattatacggcnantngctagctccnccgaggtggcaggccgcccggncaggtacgcgggggatctggactgnnctcaggcaaagccggggagtaactnttagttttgctcctgcgattattcaactgacgggctttcatttccatttcacacaccctagcaacacttataccttgcggaattgtattggtagcgtgaaaaaaagcacactgagaggtnaaaaaaaaaaanaaaaaaaaaaaaaaaaaagtncctnggccgctctanaactaagtggatcccccgggctgcaagggaattcnatnttcaagctttatcngaataccggtccgaccttcgagggggggggccccgggnaccccaagctttttttgtttcccttttaagnggaggggtttaaatttgcnncgccttgggcggnaaaatcaantgggtnaataagcctggttttncccttgtnggnggaaaaattgggtntattncccnntttcaaccaaaatttnccaacaaccaaaaccaattaacnggaagccccggggggaagccaattaaaaaaggtggttaaaaaaagccccttggggggggnggcccctaaaatnggaaaggtggnaggccttaaacctccaacnantttaaaattttngccgntntggcgccttncaactttggccccccgcttttttcccaanttccggggggaaaaaacccttggntccgntggccccannccttgncaattnaaaaatngaaaatncgggnnccaaaananccccccnggggggaannaagggcccggntttttgccgggtnatttggggggcggcctntttttccgncnttttcttcngnnttcaantgaacctcccgcttgccgccntcnggtnccgtattcncggcttgacggncnaaaancggntattnaaancntncannttnnaaaanggngggggaaaatacccggggtttanttccccnaanaaattcangggggggnntaaacccccnagngnaaaaaaaaacantnntnnaggccaaaaaaggggcccacccaaaaaagggcccangaaanccntttaaaaaaanggnc

SEQ ID NO: 5623 - DNA, 1232 bp, Homo sapiens
  misc_feature 1, 10, 12, 13, 15, 19, 23, 27, 30, 31, 32, 34, 35, 37, 43,49, 56, 62, 63, 70, 72, 93, 94, 97, 99, 102, 104, 105, 108,109, 111, 115, 124, 133, 135, 138, 139, 149, 157, 158, 188,193, 234, 264, 371, 402, 404, 408, 410, 411, 413, 421: n = A,T,C or G
  misc_feature 431, 493, 502, 528, 531, 539, 561, 597, 602, 614, 642, 656,663, 671, 689, 701, 702, 720, 732, 745, 762, 776, 778, 788,798, 799, 809, 811, 817, 829, 835, 855, 856, 857, 861, 870,881, 898, 912, 919, 920, 925, 927, 935, 951, 958, 967: n = A,T,C or G
  misc_feature 973, 976, 987, 996, 1003, 1021, 1025, 1032, 1039, 1040, 1041,1042, 1043, 1045, 1049, 1060, 1067, 1070, 1075, 1081, 1084,1085, 1087, 1089, 1095, 1106, 1107, 1109, 1120, 1121, 1125,1128, 1135, 1145, 1161, 1166, 1172, 1176, 1187, 1193: n = A,T,C or G
  misc_feature 1200, 1214, 1215, 1216, 1224, 1230, 1231, 1232: n = A,T,C or G
ngaaaaattncnnantatnttgngaanttnnngnnantcggangattcntgagaantggggnntaatttnanaaattacagttccccaggaanntgngnaananngtnntnatanttacaaaanttcgaattngnggnnactccaccgntggtggcnngccggccatggtaggctgatggggccggcnagcanatgagaccggtactcacccggggtcctgatgaagaagctgntgtggatcttggcaaaactagctcatctgngaacaccaagtttgaaaaagaagaactagaaagtcatagagctgtatatattgggtgttcacgtcccgtttagtaaagagagttccgtcggcgtcataaggccatcngcggtaccacaaaacatcacccacccataananaagnannantatgaaanaaaaaaagangttcccttcggcccgctcttagaaacctaagtgggaatccccccggggcctgccaggggaantttcgatanccaaagcctttatccggaataccccnttngaacctcngaaggggggggggcccccgggnaacccccaacctttttgtttcccctttttagttggnggggnttaaaatttgcngccgccttggggccggtaaaatccattngggtccaataagcntggtttntcccttgntggtggaaaaaatttggnttaatttcccgnnttcaccaaatttttcccnccaaccaaaacnatttaccctaagnccccgggggaagcccanttaaaaagggtggntnaaaaggcccntggggggggnnggccctccantnggaggnccggaagccttnaccttnaacaatttatatttggcggnnngggnggccttcancttggcccccncttttttcccaagtacnggggaaaaaccctnggtccgnngcccnanccttggcntttaaatggaaattcnggccccnccccccccngggggnaanaaagggccagntttttgccnttatttngggggccgcttttttccngctnttccttngggttcnnnnntngaanattggcattgncgcctcnggnatctntttccnggnntngnggggcnaaagccggggnnanccaggctctcnncttncanaaagggngggggaaaanaccgggtttattcccnccaanaaattnaagngggggttaaancccccnggaaaantaaccattttttgnnnccaaaaanggcccnnn

SEQ ID NO: 5624 - DNA, 780 bp, Homo sapiens
  misc_feature 58, 90, 352, 522, 626, 647, 654, 679, 704, 742, 747, 761,765, 776: n = A,T,C or G
tccccgcggtggcagcggccgcccgggcaggtacttttttttttttttttttttttgntgctggtggtggtggtggtctacattcactgnggaaacccagccagcccctagggggtgctaactctgatggcatcctaaattttagctggtgatttctttccaacgactgggccttccagaccacagaccacatcaaagcttagagaagcttatctggaagatatgaaatcacaggtagaaaaaagcaaagcatggacagtgatctttatatgcatccctacacacacacatatacatatgtatacacatgtataaatacacatatacatatgcacatatgtatatgtgtgtncgcggggaagtcaccaccgtggcctgcgacgaaatggcgaaaagtcttttgaagacagcctctctgtctggaaggacaaaattgctacatcaaacaggattgtcactttatagtacatcccatggattttatgaggaagaagtgaaaaaacacttcagcagtttcctggnggatccattgaccttcagaaggaagacaatggcattggcattcttactctgaacaatccaagtagaatgaatgcctttttcaggggttatgatgctacaacttntgggaaaaagtaattgaattnggaaaanttgggacaagaggggaaaaggcctnatttgtcccgtgggggccaaaaaanaactttttttttagggatctgatctggaatgctggtgnaaatnactttgggaacctncaanagggatgggantggg

SEQ ID NO: 5625 - DNA, 812 bp, Homo sapiens
  misc_feature 573, 622, 640, 672, 679, 681, 682, 684, 685, 687, 691, 693,696, 700, 701, 703, 704, 705, 707, 709, 712, 716, 717, 718,720, 721, 722, 725, 727, 728, 730, 732, 734, 737, 740, 744,750, 751, 752, 754, 755, 758, 762, 763, 766, 769, 770: n = A,T,C or G
  misc_feature 772, 773, 779, 780, 781, 782, 783, 785, 786, 787, 788, 792,793, 794, 795, 796, 807, 808, 810, 812: n = A,T,C or G
tccccgcggtggcggccgaggtacctggcataaaataagttactgtggtggccaaagtaataacccccaccgccaccaattgctcatgtcctatgttacacagcacaattacataggaagggggaattaatagtgcagataaaattaatgttgctcatcagctgaccttaaaacaagattatcctggagtatctaggagagcccatgtaattacaagcattctttataactggaagagggaggcagaaggttaagaaccagagacggtgggcacaatggctcatgcctgtaataccaatactttgggaggccagggtaggaaaatcccttgagtgcaggagttcaaggccagccgtggcaacatactgaggtcccatctctgaataacatgttgcccagtcagtttctcttcctggattcaagaagtctttcatggtaggtccagaatgaaaggtgatgtctggtgctcaggtgtgttgagggccccatgcctggactattgggtgctgagtgggatttactttgtccatccatttttatattcccacactggggaaaacttaggggtttatnccatctttgataaagatgtcatttaaattccccttttcgcaaagaaccncaaattgggaaagaaaanggcccatgaaaacccccaggacaaggtccccntccgggntnntnnantttntnttntctnntnnntnanttnaatnnntnnntcntnntntntnaanttntctntatttnnntnnatntttnnttnttnnannatttgnnnnntnnnnagtnnnnntttaaaatttnncnan

SEQ ID NO: 5626 - DNA, 1170 bp, Homo sapiens
  misc_feature 3, 11, 15, 17, 18, 19, 20, 25, 26, 33, 35, 45, 50, 52, 54,58, 63, 65, 66, 71, 73, 80, 81, 82, 84, 87, 88, 89, 91,93, 97, 106, 107, 118, 135, 143, 399, 454, 497, 571, 586,663, 692, 693, 704, 744, 746, 750, 820, 828, 852, 867, 869: n = A,T,C or G
  misc_feature 871, 873, 877, 882, 892, 904, 905, 907, 920, 926, 927, 944,952, 957, 967, 972, 973, 974, 984, 1000, 1003, 1006, 1007,1009, 1011, 1013, 1021, 1028, 1032, 1039, 1041, 1043, 1050,1059, 1071, 1073, 1075, 1076, 1083, 1090, 1092, 1099: n = A,T,C or G
  misc_feature 1100, 1115, 1119, 1120, 1127, 1130, 1134, 1141, 1142, 1143,1149, 1159, 1162, 1167: n = A,T,C or G
aanttttcttnattntnnnnaattnntggaaantnttgtaatttntttantntngaanatttntnnatttntnaaatttnnnanggnnntngnaatncttaaatcnntcatttaggcnaattggactccaccgcngtggcggncgcccgggcaggtactgagctccacaaacgtggccatggttggtgcggaaatgattctgagtgagcaggtagaagtctcacgtcctgctgtgtccagagttggttccttccagagggttcgtggtctcgctggcttcaagaatgaagccgtggaccttcacagcgtgtgttacaagctgttaaagatgttgtgtctggagtttgttccttcagatgtgtctggagtttctcccttctggtgggttttgtggtgtcngcttgacttcaagaaatgaaagcccgcaagacctgtccgtgggtgaatccgttgntaggctctttaaaggtgggttgtgggacccccaaaaggaagtngagccagccagccaaggattttttcgttcaaaggaaggggtaaagaaaccaaaaggtttttccaccgggtggtnggaaaggggttatcnttggaggccgggtttcccccttgcttcccccccgcggtacccctcggggcccggcttccttaagaaaacctaagttngggaatcccccccccgggggccttgccannggaaattttcntgaattattccaaagccttttatttccggatttaccccgntnccgnaaccctttcggaaggggggggggggccccccggggttacccccaagccttttttggttccccctttttangttggaanggggtttaaattttgccgcccgcntttgggccgttaaancnantngggncaatnaaggctttgnatttcccctggnngntggaaaaatttgngttaanntcccggttccaacaaanatttcccncaacnaaacaaatanccgannncccgggggancccttaaaaaggatgntanaannancncnggggggtngcccttnaaantggaggngnanacctaancttcccccnttttaatttggngngnntttgggnctctaantnggccccnnttttttccaaattcngggnnaaaaccntgntatntggcccnnntttgcntttaaattgnaanccggnccc

SEQ ID NO: 5627 - DNA, 1098 bp, Homo sapiens
  misc_feature 3, 4, 9, 10, 12, 14, 17, 21, 22, 24, 27, 29, 31, 33, 34,35, 36, 37, 38, 39, 40, 41, 44, 48, 49, 52, 53, 54, 56,58, 62, 63, 64, 69, 76, 77, 78, 79, 81, 85, 87, 88, 89,91, 95, 96, 98, 99, 100, 102, 103, 104, 106, 107, 112, 114,120: n = A,T,C or G
  misc_feature 124, 441, 654, 809, 822, 862, 881, 898, 907, 912, 947, 959,977, 985, 1021, 1024, 1029, 1030, 1042, 1051, 1056, 1068,1071: n = A,T,C or G
acnncctcnntntnttnaatnntntantnanannnnnnnnnttntctnnttnnntntnttannntgttnttttttnnnnantatngnnntntttnnannngnnngnntctcncntatacnactnatatagggcgaattggagctccaccgcggtggcggccgcccgggcaggtaccacaccttccggccagctgtcctcctgctgatgttcctcagtgtctacaaggcctttgttatggagaccttcgtccacctctgctcgctgggcagttgggcagctctactggcccgagcagtggtaacgaggctgctggccctcagcactttggccctgtatgtcgccgttgtcaatgtgcactcctaggcttggtgtctcagacatttgattgtacctcggccgctctagaactagtggatcccccggggcctgcagggaattcngatatcaaggcttattcggataccgtccgacccttcgaaggggggggggcccggtacccagcttttggttcccttttaagtggaggggtttaaattgccgccgcttggcgtaaatcatgggtcaatagcctgttttccctgtgtggaaaattggttatccgctcacaaatttcccacaacaaaccataccgaagcccggggagccataaaagntgttaaaagccctggggggtggcctaaatggaggtggaagcttaactcaacatttaaatttgcgtttgcggcttcacttgccccgctttttccaagtccgggaaaaaccttgtcgtgcccaagcctgcattttaaatggaaatccgggcccaacnccccgggggaagnagggccgggttttggccgtaatttggggcggcttcttttnccgcttttcttcgcttcancttggacttccggcttncggccttcngggtncgtttccgggctttgccgggcggaagcccgggtantttcaagcttcnactttaaaaaggggcggngaaaatancggggtttattcccaccaggaaaattcaaggggggnatnaaccnncaagggaaaagnaaccatttnttgangccaaaaaaggnccnatccaaaaaaggggccaggaaaccccg

SEQ ID NO: 5628 - DNA, 1188 bp, Homo sapiens
  misc_feature 2, 6, 11, 12, 14, 15, 19, 20, 21, 24, 25, 28, 29, 30, 38,42, 45, 48, 55, 58, 60, 61, 68, 72, 74, 77, 86, 88, 92,97, 98, 99, 100, 105, 108, 110, 112, 113, 116, 122, 124,128, 130, 133, 144, 147, 153, 156, 159, 161, 163, 165, 166: n = A,T,C or G
  misc_feature 167, 210, 214, 219, 220, 225, 232, 252, 306, 364, 395, 408,422, 426, 502, 520, 557, 587, 594, 622, 658, 668, 673, 680,685, 686, 689, 712, 737, 738, 743, 750, 773, 775, 788, 827,847, 856, 865, 867, 871, 883, 910, 912, 914, 925, 934: n = A,T,C or G
  misc_feature 939, 959, 960, 964, 966, 974, 975, 977, 980, 981, 988, 989,1006, 1010, 1017, 1019, 1029, 1044, 1048, 1049, 1050, 1054,1062, 1069, 1080, 1082, 1087, 1088, 1100, 1106, 1112, 1116,1117, 1125, 1127, 1140, 1142, 1144, 1149, 1151, 1152: n = A,T,C or G
  misc_feature 1156, 1158, 1159, 1166, 1168, 1172, 1173, 1174, 1175, 1176,1177, 1181, 1182: n = A,T,C or G
cnacancacgnnanntatnnncannggnnnctcgtgantagnttnttnagatcgntananntgacttntatntnatntattatttntnagtnagggnnnntcgcntantntnnttnttgggngnaacntngcncctcccgcagnggncccccngtnctntnantnnntccaagatgcccatagcgggcctgggcacttggaggtctcttntcgncaaanngaaanaagcggngaaggtggccattgatgcanaatatcgccacattgactgtgcctatttctatgagaatcaacatgaggtggganaagccatccaagagaagatccaagagaaggctgtgatgcgggaggacctgttcatcgncagcaaggtgtgggcccactttctttgaagnagacccctttgtngagggaaagccttntganaaagaccctcaagggacctgaagctgaagcttatcatggaccgttcttatctttatttcaccttgggcccacaagngggattttcaaagaactnggggggaatgaacttttttttccccccaaaaaggatnggattaaaaaggggtaaaattaatggaatncaagctngggaaaaaaaggggaaaaccgtttcctntggggattggcccttgggggaagggccccattgggnaagggaaagncttgnggttggnaaccnnaanggggggccttgggttggaaaaangcccccttttggggggggttccttnnaaaantttttcnaaaacccaccttttccccaggantncggaaggaggggncttctttggggaaaaccaaaaacccctggggacctgganaaaattattaaaaccccacnggtggaccntaacccaangngttnggaggtggttancccccattaacccttaaccgcaagggnangnaaaacttggantcccaagtnactgntccactttcccaagggggcnntttnancccggttnncnggnncttacannccccccttgggggcttnttcncgggaantngaaccctttngggggcccaaaaccnttgnnngggncccccttncccttgnctggggagggnanccccnnataattttaaangaggantttggntgcnnaatagctncnaaaaaaaaccccncncnccccngnnattntnntaatccntntttnnnnnnttcnnaagggg

SEQ ID NO: 5629 - DNA, 1155 bp, Homo sapiens
  misc_feature 1, 3, 5, 8, 10, 11, 12, 13, 14, 17, 18, 19, 22, 26, 28, 34,36, 38, 40, 46, 49, 51, 52, 53, 56, 57, 61, 62, 66, 70,71, 72, 74, 76, 79, 82, 84, 87, 88, 90, 92, 97, 109, 113,120, 126, 264, 323, 407, 516, 529, 537, 573, 625, 633, 662: n = A,T,C or G
  misc_feature 686, 738, 777, 802, 812, 843, 874, 882, 883, 911, 927, 938,958, 970, 984, 985, 992, 1005, 1008, 1015, 1021, 1024, 1026,1029, 1035, 1056, 1059, 1064, 1075, 1078, 1084, 1086, 1089,1092, 1095, 1102, 1108, 1112, 1113, 1124, 1127, 1130: n = A,T,C or G
  misc_feature 1132, 1137, 1140, 1141: n = A,T,C or G
nancncgntnnnnntgnnnctntgtnantctttnananangtgccntgntnnntannctanncgcnctannncngntcngcntncanncncnccagnaattaaacttgnaaancctcctnttggcnaattgcagctccaccgcggtggcggccgaggtacagcatggggtattgggggtcggggattcattgaattgtggttggcaggagcaagccctgctcacactctcacactcgcacccagaattgtcaaagatacagatngtaaaaatctacgatccctcagtctcactcacaaaaaataaaatctcatgtccccaacngaacccagagtcagacgacagctggagcattggcagggacagtcagaaaggagacaagtgaaaacggtcagatggacacaggcnggaggagaaaagacagagggagaagaggaccatcggggaaccaatcaagaggggccgagaccgatccaggaaaaagggtcaagccccggagtaccaggcctggagccangagttttcttagnaagccagnttttcccaatttcaaaccgggcttccgcctttttgnaggggcccaaccgttgaacccttaaggccccgaagggccttggcaagaaaanccgccttnaacaaccaccttcaacggccggccacggncaccaccaacaacaccaatcccantattaataaataagtattttaccttattaccattaattaaggattataaatntggccctttccgggaaaaacccaagggaaaaggggggantaaaaataagccttaaaggggaaantggggggtcnttggggaattcaagggaatgggggaagaacngccggccgaacaaaagggggggcaaccggtngggaaatnntttttttcaatgcccacccaccgggatntgggaaggggccgggnccgtttgggtncccaaccccccccggattantttaaaaaaaantaatcccccggcgnnaaccctnggccccgggggcnggnccggctnttaagnaantnggnggggancccccccggggccttggcaanggnaattnccgatatttcnaangccttnantcnganaanccggccngacccntctnnggggggggggnccnggngnacccnaannttttttggttcccc

SEQ ID NO: 5630 - DNA, 1191 bp, Homo sapiens
  misc_feature 7, 8, 9, 11, 13, 15, 17, 28, 30, 31, 32, 34, 35, 37, 39,40, 44, 47, 53, 54, 56, 61, 64, 65, 70, 76, 78, 79, 83,87, 95, 98, 100, 101, 102, 103, 108, 110, 111, 114, 115,117, 127, 162, 255, 335, 363, 367, 377, 411, 417, 418, 431,432: n = A,T,C or G
  misc_feature 446, 450, 453, 456, 462, 463, 464, 466, 467, 468, 469, 473,477, 487, 502, 503, 531, 537, 542, 545, 546, 555, 562, 567,573, 588, 591, 600, 603, 604, 613, 623, 637, 642, 647, 655,667, 671, 680, 682, 687, 690, 706, 714, 718, 721, 730: n = A,T,C or G
  misc_feature 732, 742, 743, 747, 748, 751, 754, 762, 770, 790, 791, 798,803, 804, 807, 809, 826, 831, 832, 844, 856, 858, 867, 870,872, 877, 879, 880, 883, 885, 899, 900, 904, 906, 911, 914,918, 928, 932, 933, 939, 940, 948, 950, 952, 954, 957: n = A,T,C or G
  misc_feature 961, 964, 978, 979, 981, 982, 985, 1000, 1002, 1003, 1010,1012, 1013, 1024, 1026, 1027, 1033, 1036, 1040, 1046, 1047,1067, 1072, 1083, 1088, 1089, 1097, 1100, 1101, 1121, 1128,1134, 1135, 1140, 1142, 1143, 1146, 1174, 1179, 1185: n = A,T,C or G
  misc_feature 1187: n = A,T,C or G
ccccccnnncncntncnaatatctcctntnnnanntncnntttnctntaacanntnttttnatnntgaantctatntnncttnttantctttctnttngnnnnggatngnncgnnancgactcctanaggcgaattggagctccaccgcggtggcggccgangtactgagctccacaaacgtggccatggttggtgcggaaatgattctgagtgagcaggtagaagtctcacgtcctgctgtgtccagagttggntccttccagagggttcgtggtctcgctggcttcaagaatgaagccgtggaccttcacagtgtgtgttacagctgttaaanatgttgtgtctggagtttgttccttcanatgntgtctggagnatctcccttctggtgggtttgtggtgtcgctganattcannaatgaaggccgcnntactgtcgtgggtnatcngtnggnaccttnnntnnnngagngggntggaccccanaagagttggagccanntagccaaagaattttttttcgtcccacncagggntggancanncaaagagtntttcccnccgantggtgngtaaaagggtattcntanaaagccggnttnnccttgcttntccccccggnaacccttgcccccngggcncgtcnccggcgtncttaagaaaccntaanttgggaaangnccggnctngggccttgccattggnaaatttcngtantantccaaaagncntttattccgnnttannccnttncgaacccnttcccaanggggggggggggcccccctnnttacccncaaannatntnatgacttcccccttttnaaaannaaagggggtttnaaatttttcaancngcctttggnccngnaaaantnnttngnttccaaaaaccccnntttnanccctnggngggngaaaaaaaanggtnntttccnnctttttcnanananagncccnccnaccaattaccttgnngnnggnggaaaaaaataaaancnntttttangnnccggggggggncnntttatnggngggnggggannaactccccccccatgggggnttttnctttttttttnccttnnaaaaaccncanngtttccctttttttccccanaaaaacntttttnngatgncnnccntttttttttttttttaaaggggggggcnctccnctcccngngttt

SEQ ID NO: 5631 - DNA, 806 bp, Homo sapiens
  misc_feature 670, 683, 708, 741, 798, 803, 805: n = A,T,C or G
gaattggagctccaccgcggtggcggccgaggtaccagctactgccttgtgtgtcttcgatgcacatgatggggaagtcaacgctgtgcagttcagtccaggttcccggttactggccactggaggcatggaccgcagggttaagctttgggaagtatttggagaaaaatgtgagttcaagggttccctatctggcagtaatgcaggaattacaagcattgaatttgatagtgttggatcttacctcttagcagcttcaaatgattttgcaagccgaatctggactgtggatgattatcgattacggcacacactcacgggacacagtgggaaagtgctgtctgctaagttcctgctggacaatgcgcggattgtctcaggaagtcacgaccggactctcaaactctgggatctacgcagcaaagtctgcataaagacagtgtttgcaggatccagttgcaatgatattgtctgcacagagcaatgtgtaatgagtggacattttgacaagaaaattcgtttctgggacattcgatcagagagcatagttcgagagatggagctgttgggaaagattactgccctggacttaaacccagaaaggactgagctcctgagctgctcccgtgatgacttgctaaaagttattgatctcccgaacaaaatgctntcaagccagacanttcagtgccccctggggttcaagtnccggctcttgactggacccagagttgtcttcanttcctgaatggcgggttaccttggcggcaggcttcttgctgaagggcttttcttgtntattntng

SEQ ID NO: 5632 - DNA, 1158 bp, Homo sapiens
  misc_feature 6, 10, 11, 12, 13, 16, 17, 18, 19, 20, 21, 22, 23, 25, 27,29, 31, 32, 36, 39, 42, 43, 47, 48, 51, 52, 53, 55, 56,57, 61, 66, 68, 69, 75, 81, 82, 84, 85, 86, 88, 90, 96,97, 101, 102, 106, 109, 111, 114, 117, 121, 427, 439, 450,472: n = A,T,C or G
  misc_feature 482, 526, 550, 560, 566, 571, 575, 583, 587, 592, 595, 598,619, 628, 631, 662, 671, 674, 679, 681, 700, 707, 713, 721,741, 753, 754, 756, 768, 777, 778, 786, 793, 802, 803, 813,814, 828, 830, 838, 839, 857, 858, 864, 873, 889, 892: n = A,T,C or G
  misc_feature 897, 914, 915, 918, 924, 934, 951, 956, 958, 966, 967, 969,981, 994, 997, 1007, 1009, 1015, 1018, 1023, 1029, 1032,1039, 1040, 1056, 1065, 1073, 1075, 1078, 1079, 1127, 1130,1137, 1141, 1148, 1150: n = A,T,C or G
ctcccncccnnnngtnnnnnnnntntntnanntttncantanntttnntcnnntnnntgantctgngnntttatntttatnnannntncntttagnngagnngagnttnanggnttntgantcctataggcgaattggagctccaccgcggtggcggccgaggtactgtgggttctgagtcaaggatcccagtgctgccaggaaccagcagtcagctgcgcctccttgttggatgtcaaatctgcttatatcatccaggatgaagtgaggaggaccccctggtagatcctgtggccgcttccatatcacattggagaggcgtttttcctggagcagcttctggcctatggaagaatctgctgcagggaatgtctcatccttaaacgtccggcccatgctcaggcagtgatcccgcaagggggtaaantcctggtctttngaactttgatngatgggaggtctccactgaaangctcctgggntaataacgcccatgactctcctttaggaagaactttccgagggnccttttccttgtttccttaggtcnggtggtgtcnttgatnggaanggangggggaanaacnggggncanganttcccaccagggccttcttcnaaggtttantanaaagttgggttgggaagggaagaacttgggncaccaaggnagngaagnancctattgggcccccggtcncgctttntttagnaaacctangggggggaattccccccccngggtccttgcanngnaaatttctccantaattaaanngcctttanttcggantaacccgtnngaacccctcnnaagggggggggggncncccggttnnccccaaggctttttttgnntccccnttttaaagnggagggggttacaatntgncgccnccttttgggccgttaanntcnattggntgccattaancctgggttttcccttgntggtngnaaaaaatnngntttattcccgtnttcaccaaatttnccnacaccaaacnanaacttnagnccctnggaagnccnttaaaanntgtgtataaagccccntggggggtngcccctanantgnnggggaggcttaacctccccaaattaaattgggggtttgggcccttcanctngcccccntttntctcaananctagggaa

SEQ ID NO: 5633 - DNA, 1140 bp, Homo sapiens
  misc_feature 2, 4, 6, 9, 21, 22, 28, 30, 32, 36, 37, 40, 41, 42, 44, 47,50, 54, 56, 65, 66, 67, 69, 70, 71, 79, 84, 85, 86, 89,90, 93, 96, 99, 103, 108, 214, 220, 348, 521, 552, 563,616, 639, 660, 665, 695, 700, 702, 718, 772, 779, 782, 842: n = A,T,C or G
  misc_feature 859, 860, 877, 881, 899, 916, 946, 955, 961, 963, 966, 967,986, 1015, 1019, 1027, 1031, 1034, 1035, 1039, 1050, 1051,1057, 1061, 1062, 1070, 1075, 1076, 1081, 1101, 1114, 1115,1116, 1125, 1138: n = A,T,C or G
cngngnatntttactccattnnttaatntncnaatnnttnnntntcnttnattntnatgaaatannntnnncatatatnttctnnntannagnggntgnggcngattntttatatagggcgaattggagctccaccgcggtggcggccgcccgggcaggtacgcgggggctcagttaggacccagagggaaccatggaaaccccagcgcagctnatcttnctcctgctactctggctcccagataccaccggagacattgtgttgacgcagtctccaggcaccctgtctttgtctccaggggaaagagccaccctctcctgcagggccagtcagagtgttagtagcanctctttggcctggtacctcggccgctctagaactaagtgggatcccccggggctgcagggaattccgatatcaagcttattcgataccggtcggaccttcgaggggggggggccccggtacccagctttttgttccctttagtggagggggttaattgccgccgccttggccntaattcatgggtcaatagctggtttcctggntgtgaaattgnttaatccgcttcaccaatttcccacaccaacattaccgaagcccgggggaagncattaaaaggtggtaaaagcccntgggggggttgcccctaaatngaagntggaaggcctaaaccttcaccaatttaaantttgncngttttggccggcttcnacttggcccccggccttttttccaagttccggggggaaaaaccccttgttccgntggcccnaanccttggccaattttaaaatggaaaattcggggcccaaaccgcctccgggggggaaggaanggccggggtttttgccnnttattttgggggcggcnttcnttccccgcctttcccttncggcttcaacttggacnttccggccttggcggctttccggggtccgntttcgggcnttggcngngcnnaagacgggttattcaagcnttcaactttccaaaagggccggggtaatnaccnggtttatncccncanngaantccaagggggnntaaccnccannggaaaaanaaccnnttttngaaccaaataagggcccaanccaaaaaaggccnnnggaaacccngttaaaaaaaggncc

SEQ ID NO: 5634 - DNA, 1122 bp, Homo sapiens
  misc_feature 2, 5, 8, 10, 11, 16, 17, 18, 21, 23, 25, 26, 27, 28, 29,30, 31, 32, 34, 37, 41, 42, 43, 45, 47, 51, 55, 56, 57,59, 61, 64, 66, 67, 72, 74, 78, 79, 80, 82, 90, 91, 92,94, 95, 96, 100, 111, 112, 113, 114, 115, 124, 390, 432,497: n = A,T,C or G
  misc_feature 532, 539, 575, 584, 585, 588, 589, 594, 597, 635, 693, 754,762, 770, 778, 785, 807, 809, 819, 823, 835, 846, 856, 862,877, 888, 897, 908, 909, 910, 938, 943, 947, 949, 952, 971,979, 982, 1005, 1009, 1011, 1015, 1016, 1025, 1027: n = A,T,C or G
  misc_feature 1052, 1070, 1077, 1083, 1092, 1093, 1103, 1113, 1118: n = A,T,C or G
cnatnttnanncgttnnnccntntnnnnnnnncnctncttnnntnantttntgtnnntntnacntnntttantnttannntntttctagnnngnnngtgnatggagtgctnnnnnctcactatngggcgaattggagctccaccgcggtggcggccgcccgggcaggtacgcggggctcttccgcttctgtggtctgatcttcctgcggctgaaccgcccggctgagccgacattgccggcgtcttggcgattcggcccgacgagctccgctttcgctacagcatggtggcctactggagacaggctggactcagctacatccgatactcccagatctgtgcaaaagcagtgagagatgcactgaagacaggaattcaaagcaaatgctngagaagacttctggcagcaacgtaaaaatttgtggaaagtanaagaagggaataatctacccctggactaaaagcttggaaaatgcttaccattttccaaggtgganagattgttgttggggccacaatgtttatgggccangattganaaaggggatctcatttccattggaggaaaagaaaantataattannttnntaagnaangggttacccttcggcccgctttttaagaaacttaaggnggggattccccccggggccttgcagggaaatttcggattattcaaagccttatcggantaccccgttctgacccttcgaagggggggggggcccccggggtacccccaagcttttttgntttccccnttttaagntgaggggntttaaantttggccgccgcctttggggcngntaaatccatngggnccattaggcctnggtttttcccntggggggggnaaaaanttggttttttcccgncttccccaatnttccccccnccaaacaattnnnggaggccccgggggaggccatttaaagntgttnaaangnccntgggggggtggcccttaantgggggtnggnggcttaaccctcccccaatttanattngngggnnggcggcctncncctgggccccggctttttccaagtncgggggaaaaaccctttnccgtggnccaacntggccattnnaatgaaatangggccaaccnccccncggg

SEQ ID NO: 5635 - DNA, 1066 bp, Homo sapiens
  misc_feature 2, 3, 7, 9, 10, 11, 12, 13, 14, 15, 16, 19, 20, 21, 22, 23,24, 25, 26, 27, 28, 29, 30, 32, 33, 34, 35, 36, 38, 39,42, 44, 45, 51, 56, 57, 60, 61, 63, 65, 66, 67, 68, 69,71, 72, 73, 74, 75, 79, 80, 81, 82, 83, 84, 85, 86, 87,89: n = A,T,C or G
  misc_feature 90, 94, 99, 100, 101, 106, 131, 132, 135, 181, 203, 510,525, 659, 674, 688, 725, 741, 742, 744, 752, 778, 779, 786,792, 811, 812, 819, 822, 841, 848, 857, 858, 907, 912, 917,933, 947, 949, 952, 954, 959, 967, 1006, 1026, 1028, 1029: n = A,T,C or G
  misc_feature 1031, 1046, 1049, 1051, 1065, 1066: n = A,T,C or G
tnnctanannnnnnnnccnnnnnnnnnnnncnnnnntnngananntgtgtngatgnntannangnnnnncnnnnnattnnnnnnnnncnncagncgagnnnttgangccctttgtaactcctacaggtttnnatnggagccccaccgcggtggcggccgcccgggcaggtacctatccttncagcctcaaattcccggccaancttgtttcatttatagttactcccagccccacggattcaaaggaaatcccagacatcctataatttcatcttcatgttgaaatttaaaaagtttgaaaattcaccaagatgtaatatatatgcaccaaacatcagagcccaaaatatatgaaacaaacattgacagaatcaaaggaagaaatggatagttctacagtaagagtaggagactgcagtagcccacttttcagtaaccggatagggacaacccaggacaggaagatcagtcgcaaaggaccaggaaccttggaacagccatcataccagnctggaccttaacagnacaccaacaagcagtacctcgggccgctctaggaactaggtgggatcccccggggcctgcagggaattccgatatcaaggctttatcggatacccgggcggacccttcgagggggggggcccgggtaccccagnctttttggtttcccnttaagtggaggggntaaattggcgccgcttggggcgtaaattcatggtcanaagcctggtttcctgnngnggaaattngttattccggctcaacaaatttcccnncaccaancattancgaagcccgggggagccannaaaaagntgntaaaaggccctgggggggnggccctnaatggaggnngaggcttaacctccaccattttaaatttggcggttaggcggcctccacnttggncccgnctttttcccaagtccnggggaaaaaccctngntcngngcccnggctggcnatttaatggaaattcgggcccaaccccccccggggggangaagggcgggatttgccgtnanntnggggccgcctttttnccngnttccttggcttaann

SEQ ID NO: 5636 - DNA, 797 bp, Homo sapiens
  misc_feature 159, 358, 385, 427, 433, 534, 634, 651, 668, 674, 677, 693,695, 711, 716, 721, 727, 743, 749, 782, 786, 788, 792: n = A,T,C or G
ggcgaattggagctccaccgcggtggcggccgaggtaccccggcctgggcgataagaccaagactccgtttcaaaaaaaaaaaaaaaactaatacaaaacaagagtttgacatttcacccaagattttgcagcatctgctctctatgtatttgtctcanatttttgacagtcgcttcgtgattttgacatttcacccaggatattgcaacatctgctctctttctatgtatttgtctcggatttttgacaatcacttcgtgattttgaacatgacgttccacgcagtttggctcattctctactgccactgtttcagcagcttgcgtttagaagtgcatccaaatactctctgggtgngggtgatctcagggccagtcacctggngtcatcttaagtggatggagacactactccaggagtcctgtngcaccngataaatagttgacaaatatttgacactgaacatgctctgggccacccagtgaatccccatggccatgtaaacctgaagcagaaagagcttttcttcctgngttcctctccggggcaaaccctttcatttcaatgggagggagagttgatccaggattcggtattttggaattcgatggggagaaatagcaaccaaatgcnagccccaggctgcgtangctaccccgtttatttncatagnttnccttgggaatttactngncctcttaaggggaaanggatnaaatngcctanaaacaagcttgaaaanggcccnatctgggtggggggggttagaaaaagaatttangccnangggnccccc

SEQ ID NO: 5637 - DNA, 834 bp, Homo sapiens
  misc_feature 546, 585, 595, 652, 678, 708, 709, 726, 755, 800, 814, 815,819: n = A,T,C or G
actcactatagggcgaattggagctccaccgcggtggcggccgaggtactgtgggttctgagtcaaggatcccagtgctgccaggaaccagcagtcagctgcgcctccttgttggatgtcaaatctgcttatatcatccaggatgaagtgaggaggaccccctggtagatcctgtggccgcttccatatcacattggagaggcgtttttcctggagcagcttctggcctatggaagaatctgctgcagggaatgtctcatccttaaacgtccggcccatgctcaggcagtgatcccgcaaggtggtaaagtcctggtctttgaacttgatgatggaggtctccactgaaggctcctggtaatacgccatgactctccttagaagacttccgaggtcctttcctgtttcctaggcaggtgtgtctgatggaggaggggagacgggcaggttccacaggctctcaggttagagagtggtggaggagactggcagaggaggagagcatggccggcccgctctagaactagtggatcccccgggctgcangaattcgatatcaagcttatcgataccgtcgacctcganggggggcccngtacccaacttttgttcctttagtgagggttaattgcgcgcttggcgtaatcatggncatagctggttcctgtgggaaattgntatccctcaccaatttcacacaacattacnnacccggagccttaaagngtaaagcctgggggggcctaatgagtggngctaactcacattaattgcgttgcgcttacttggccccttttcantcgggaaaccttcnngccngcttgcattaataat

SEQ ID NO: 5638 - DNA, 826 bp, Homo sapiens
  misc_feature 468, 517, 556, 588, 594, 621, 633, 638, 662, 674, 678, 680,682, 691, 694, 713, 716, 731, 755, 800, 802, 814, 823, 826: n = A,T,C or G
ctcactatagggcgaattggagctccccgcggtggcggccgaggtacctgactttgggtaagttgccagaataagatcatcaggcttggcttggaaattacatactttttcccaccattcttttgataatatcaacgtagggactccatctacttccatgatgttaaacagttctggctttttttccatcgtgggagcgtttttctcaatcttcgccattgggaatcagttgggcttttggcttctctctccctgtgtgagccagtaaaggggataataaggatcattgtttatattctctgtgaatttataattaatgaaaaaggatttttgttgatcttaagctgtagacaatttggtgtgctttacatgtctttctgtatggttctggtatctcaggcagcagaggaagcagcttgctgcctttagtcaaactgcttcctggaaacccagagccaggtccagctncaggacactgtgcaagcaagagcacagcaggtccccgcgtacctgcccnggcgggcggtctagaactagtggatccccccggctgcangaatccatttcaagcttatcgatacccgcganctcganggggggccccggacccaacttttggtncctttaagtgangggtnaatgccccctggcggaaacatggncataactggttnctgngngnaatggtatncgnccaattcccacaacatacnaanccggggccttaaatntaaagcctggggggcctatgaggnggcctaccccatttaattgcgttgggcccactggccgctttccancngggaaacctgtngtggccacntgn

SEQ ID NO: 5639 - DNA, 429 bp, Homo sapiens
  misc_feature 2, 3, 429: n = A,T,C or G
gnnattggagctccaccgcggtggcggccgccacgctggttttgcatcttcaggagacgctcgtagccctcgcgcttctcctcggccagttcgcggaagaagtggctcacgccttccagagccacatcatcgcggtcgaaatagaagcccagagagaggtaggtgtaggaggcctgcaggtacctcggccgctctagaactagtggatcccccgggctgcaggaattcgatatcaagcttatcgataccgtcgacctcgagggggggcccggtacccagcttttgttccctttagtgagggttaattgcgcgcttggcgtaatcatggtcatagctgtttcctgtgtgaaattgttatccgctcacaattccacacaacatacgagccgggagcataaagtgtaaagcctggggtgcctaatgagtgan

SEQ ID NO: 5640 - DNA, 821 bp, Homo sapiens
  misc_feature 482, 549, 565, 568, 572, 635, 642, 653, 656, 667, 680, 685,711, 725, 744, 796, 805, 807, 821: n = A,T,C or G
cgactcactatagggcgaattggagctccccgcggtggcgcggccgcccgggcaggtacctgaaaaacagctggtaggatggaggaactgagcttttaaataggcaaatgtggctaggagctaccatactggacagcacagtgtattagtttggtgcaaaagtaattgtggttttggccatttttaagtggattggtaagcctggctatttaaagtgtggtccacagagcaggagaatcactacacctgagagctggtggaaatgtagatctctgacgttagcataggcttcctaaatcagaaactgcattctaacaagatctcctggtgcttctcatgcacagtaaagtttagaaagttaggagatgcatacaagtggttctcatcctgacagcacttcagacacaactgagaaacattaaaagaagctgagcctaggtcacacccttccacccagagattcttaagttaatgggttaaangcttggcctgaacatgaaaagttttaaaagcactcttgggggattctaataaaaattcgagaccatnccagcataagccagtnctngggncgtctagactagtggatcccccgggctgcaggaattcgatatcaagcttatcgatcccgcgancctcganggggggggccngtncccacttttgntccctttagtgangggtnattgggccccttggcgtaatcatggncatactgtttctgnggggaaatggtttccgttncattcccacaaatacaaccggggcataaggtaaagcctgggggcctatgagngggctaccncnttatgggtggcccn

SEQ ID NO: 5641 - DNA, 819 bp, Homo sapiens
  misc_feature 632, 633, 652, 656, 701, 706, 712, 723, 742, 769, 779, 791,799, 808, 818: n = A,T,C or G
ggagctccaccgcggtggcggccgcccgggcaggtaccaggggttagaacttcagtggatcagctctgggggacacagttcacctcatggcactaactgttccctgggcctctggctgatgcacagaagaaggaatatgcccttgcaaagagtttcctttggtgtttccatgaaaaacttggcagcttcatagatggagtgggttgatggcccttgaggtcttcaggcactgacaggaggatacaaaatcagtgttttgtgacaaaatctaaaccaaggtcactacaggcaaccgggaaatttgtctctgatggtgaagcaaaacaactagtacctcggccgctctagaactagtggatcccccgggctgcaggaattcgatatcaagcttatcgataccgtcgacctcgagggggggcccggtacccagcttttgttccctttagtgagggttaattgcgcgcttggcgtaatcatggtcatagctgtttcctgtgtgaaattgttatccgctcacaattccacacaacatacgagccgggagcataaagtgtaaaagcctgggggtgcctaatgaagtgaagctaactcacattaattgcgttgcgctcactggcccgcttttccaagtnnggaaaaactgtccctgccnactngcatttaaattgaatcgccccacccccccggggaagaagggcggnttttnccgtanttggggcgctnttttccgctttcctttgcntcacttgaactcccttgggcttcgggncggttcgggntttgcgggcgangcggtatncaacttacntcaaaaggcng

SEQ ID NO: 5642 - DNA, 859 bp, Homo sapiens
  misc_feature 319, 378, 379, 381, 502, 512, 668, 677, 685, 693, 702, 715,726, 770, 796, 797, 804, 818, 827, 841, 850: n = A,T,C or G
ctatagggcgaattggagctccaccgcggtggcggcccgcccgggcaggtacagaattttgggagaggccatttggcaagccattggtctgaataatttggagggggaaatcctaaggtggtggagttgctgcgtggacacggctataggttggtgtgacatgatttcgcattaattgtttgtcagctgtcagtaggctgacctaacgttctagcatgcctcttgagggcctttccaactgagctctctggaggagggtaggaaagtcagggaaatcatgcaatcccatctggggaagggaaagcatctcaagatttgngaggttccctgggaaaggtgtttaccacaaatgtcacatcaattaaaggaaagtctgcnnanagagagagaaagccaagatcaggggtaaaagagaaaggcaaggtagcaccggggagcttgggcatgacacagaaacatctctgcttttaccagcagaagagaccaagcatccccagtgaangggctggcantgtgtttggaattctcatcctgacccgagcatcaggtggaactcctttttaccttcagatctttaccttcaactctctccttaatggttcctgtgacatcccaaatgtacctccggcccgtctagaactaatggatcccccggctggaggaattcnattatcaanctttatcnatccgccnaacctaganggggggccccgtncccaccttttnttccctttaattgaagggtaatttgcgccccttggcggtaatcnttgggccataacctggtttcctgtgnngaaaatnggttttcccctccncaatttccncacaaacataccgngcccggggngcttaaaat

SEQ ID NO: 5643 - DNA, 1111 bp, Homo sapiens
  misc_feature 1, 4, 5, 6, 7, 8, 9, 10, 11, 12, 14, 15, 16, 17, 18, 19,20, 21, 23, 24, 25, 27, 28, 29, 30, 31, 34, 35, 36, 38,41, 42, 43, 45, 46, 47, 48, 49, 50, 51, 52, 53, 54, 55,56, 58, 60, 62, 63, 65, 66, 67, 68, 69, 71, 73, 74, 76,77, 78: n = A,T,C or G
  misc_feature 79, 80, 84, 86, 87, 88, 89, 90, 91, 93, 94, 95, 96, 97, 98,99, 100, 101, 102, 103, 104, 105, 106, 107, 108, 109, 110,113, 115, 117, 119, 121, 126, 127, 143, 228, 584, 655, 818,820, 849, 853, 856, 869, 912, 921, 926, 929, 946, 951: n = A,T,C or G
  misc_feature 970, 983, 999, 1001, 1019, 1021, 1023, 1030, 1054, 1059,1063, 1080, 1082, 1087, 1096, 1098: n = A,T,C or G
nccnnnnnnnnncnnnnnnnngnnnannnnnctnnntnctnnncnnnnnnnnnnnntntntnncnnnnntngnnannnnncggngnnnnnngnnnnnnnnnnnnnnnnnngangngngngncgcgnnatacgactcactatantatcgggtcgaattggagctccaccgcggtggcggcccgaggtacctgactttgggtaagttgccagaataagatcatcaggctnggcttggaaattacatactttttcccaccattcttttgataatatcaacgtagggactccatctacttccatgatgttaaacagttctggctttttttccatcgtgggagcgtttttctcaatcttcgccattgggaatctggtatctcaggcagcagaggaagcagcttgctgcctttagtcaaactgcttcctggaaacccagagccaggtccagctccaggacactgttgcaagccaaagagcacaagcaggtggacccccgccgtacctgcccggggccggccgctctagaaactagtgggatcccccgggctgcagggaaattccgatatcaaagcttatcggataccgtncgacctcggagggggggggcccgggtacccagcttttttgtttcccttttagtggaggggtttaattgcgncgcttgggcgttaatcatgggtccattagcctgttttcctggtgtggaaaattggttattccgcttcacaatttccaccaccaacataccgaagccggggagcataaagtgttaaaagcctgggggtgcctaaatgagtggagctaacttcacaattaaattngnggttggcgctcacctggccccgctttttncaantcngggaaaaccctgntcgtggccaggctggcatttaaattgaaatcgggccaaccccnccggggganaaagnccnggttttgccgttatttngggcncttttttccgctttccttnggctttaaatganttccctttgggcttcngnccggttccgggcttggcngncnaaccggntattaaagtttaacttcaaaaggnggggnaaanaccggttattcccccananaatcnaggggggantnacccccaaggaaa

SEQ ID NO: 5644 - DNA, 879 bp, Homo sapiens
  misc_feature 1, 6, 8, 15, 16, 23, 231, 277, 281, 292, 299, 325, 327, 397,428, 437, 451, 476, 490, 493, 539, 577, 583, 606, 615, 625,629, 634, 653, 655, 662, 664, 671, 687, 697, 703, 710, 720,737, 741, 768, 787, 788, 795, 800, 811, 814, 846: n = A,T,C or G
  misc_feature 847, 859, 875, 879: n = A,T,C or G
ngattntncctcccnnggccgancggccgcccgggcaggtactgagctccacaaacgtggccatggttggtgcggaaatgattctgagtgagcaggtagaagtctcacgtcctgctgtgtccagagttggttccttccagagggttcgtggtctcgctggcttcaagaatgaagccgcggaccttcacggtgtgtgttacagctgttaaagatgttgtgtctggagtttgntccttcagatgtgtctggagtttctcccttctggtgggtttgtggngtcnctgacttcaanaatgaanccgcagactgtcgcggtgatcgttgnanctcttaaaggtggtgtggacccaaagagtgagcagcagcaagatttttcgtcaagagggtaagaacaaantttccacggcgtggaagggtatctgagcggntccctgctncccgcgtaccttgnccgctctagaactaagtggatcccncgggctgcaagganttngatatcaagcttatcgatacccgtcgacctctagggggggcccggncccaactttttgttcccttttagtgagggttaattgcncccttngcgtaatcatgggacaatagctntttccctgngtgaaaattngttnttccnctcacaaattccaccacantnatacgangnccggggngcattaaagtgtaaanggcctggggngccctnatgaagngagcctaacntaccttttaatttgcgntggngcctcacctggccccgctttttcaagngggggaaaaccctgttcgnngcccagnttgcntttaattgaantcngcccacccccccgggggagagggggggtttgnntttttggggccnttttccccttcctttncttn

SEQ ID NO: 5645 - DNA, 978 bp, Homo sapiens
  misc_feature 208, 211, 212, 216, 222, 223, 228, 235, 238, 241, 243, 249,251, 253, 254, 257, 261, 264, 266, 268, 269, 273, 279, 286,289, 295, 298, 306, 307, 313, 314, 320, 321, 323, 335, 339,344, 349, 351, 360, 361, 365, 372, 373, 374, 377, 378: n = A,T,C or G
  misc_feature 381, 387, 390, 391, 395, 396, 398, 405, 406, 410, 415, 416,419, 423, 427, 433, 437, 440, 441, 448, 449, 451, 454, 455,457, 458, 459, 463, 464, 468, 469, 472, 474, 478, 480, 482,483, 491, 492, 496, 499, 506, 509, 516, 523, 527, 528: n = A,T,C or G
  misc_feature 529, 536, 539, 544, 548, 551, 552, 559, 566, 572, 582, 590,592, 593, 599, 600, 601, 603, 604, 607, 611, 615, 620, 628,629, 637, 638, 639, 640, 644, 645, 648, 651, 652, 653, 655,659, 664, 665, 670, 674, 676, 679, 680, 682, 687, 691: n = A,T,C or G
  misc_feature 693, 694, 695, 703, 708, 711, 716, 718, 720, 721, 723, 727,729, 730, 733, 737, 742, 743, 744, 747, 750, 751, 754, 757,758, 764, 772, 779, 784, 791, 793, 800, 802, 805, 809, 816,817, 820, 822, 825, 826, 827, 839, 840, 843, 844, 845: n = A,T,C or G
  misc_feature 846, 852, 853, 861, 864, 866, 882, 884, 885, 890, 891, 895,896, 897, 898, 899, 902, 905, 907, 911, 912, 921, 922, 923,925, 928, 935, 940, 943, 944, 949, 954, 956, 958, 963, 965,967, 968, 970, 971, 978: n = A,T,C or G
tccccgcggtggcggccgaggtacacgctggtagcaaagctgctcattgtgggtgacggctcgagtgatcacaagcacttcttggaagaggaaaacatgcagtttctagaagaaaaaaatccacaagctttcattaagcaataatgtaatgagtggttgatatgtggacctctgtggataaagaggtccccaggtacctgcccgggtnatnntttntcccgnncggtnttaaacnagnggngncccttngngnngtnaagnttntncnnaacntatttnttccggncangatccnatnccaatttnnttgggnngtcccnngnccccccattttnttgnccccncttcnantggggtggnnattngcacccnnnccnnaanatttgntgnnatanntnaagggtnntttnccctnntgnaganaaantggggnaacnccnnccctaanngnccnncnnnttgnncttnntgntnacantngnntttcgttnntttnttngggacanggncttccgnggggagncccnnnttcgaanttngaacnctcnttnnaaatttnttttggngtcggnactggccatnctatatancnnatttannncnntantggnaaangaatntggttggnnccaccctnnnntttnnatngannncncccnccccnncaccncgcngnaannanggggnttcncnnnctgatttnggctnttnttttnantnngnagcngnnaantatnatttnnntgnggnnttngtnnagtganttttgggnatcgggncgcgngcggggntntcatccncnttncaangggcggnnttnanccnnnttctcccccccnntannnnggggcnntttctccnttnantataaaattgtttttnannactcnntctnnnnnaanctncncctnncctctaaannngntcngcttatncgtgngcnntatanttatngngntgacncntnntnngtcgttn

SEQ ID NO: 5646 - DNA, 838 bp, Homo sapiens
  misc_feature 390, 475, 575, 589, 604, 606, 617, 619, 634, 636, 644, 648,659, 661, 668, 679, 686, 688, 689, 691, 693, 695, 699, 710,717, 719, 728, 732, 735, 743, 746, 747, 750, 751, 763, 765,768, 774, 781, 783, 785, 794, 796, 799, 800, 808, 819: n = A,T,C or G
  misc_feature 826, 837: n = A,T,C or G
tccccgcggtggcggccgcccgggcaggtacctgactttgggtaagttgccagaataagatcatcaggcttggcttggaaattacatactttttcccaccattcttttgataatatcaacgtagggactccatctacttccatgatgttaaacagttctggccttttttccatcgtgggagcgtttttctcaatcttcgccattgggaatcagttgggcttttggcttctctctccctgtgtgagccagtaaaggggataataaggatcattgtttatattctctgtgaatttataattaatgaaaaaggatttttgttgatcttaagctgtagacaatttggtgtgctttgcatgtctttctgtatggttctggtatctcaggcagcanaaggaagcagcttgctgcctttagtcaaactgcttcctggaaacccagaccaggtccagctccaggacactgtgccaagcaagancccagcagggccccgcgtacctcggccgctctagaactaagtggatccccccggctgcaggaattccatatcaagcttatcgatcccgccgaccctccanggggggggccggtnccccaaccttttggntnccctttaatgnangggtaaaattgcgcncntgggcggnaatnatgggccatangntgttttncctgggggggnaaattgntnntncncntccncaattccccancaacatncnaacccgggngccntanaaggggtnaannccnngggggggccctnanggnggggancccaacncncnatttaattngnggnngggccccncttggccccgntttccanacggggaaaant

SEQ ID NO: 5647 - DNA, 858 bp, Homo sapiens
  misc_feature 437, 564, 569, 579, 582, 625, 628, 632, 635, 647, 650, 670,680, 682, 697, 700, 707, 711, 727, 740, 746, 750, 763, 772,775, 783, 785, 789, 796, 800, 809, 817, 818, 820, 825, 839,845, 851, 855: n = A,T,C or G
ctccccgcggtggcggccgaggtactctcccagtgacatgcttcttgaccacaatggatgaactgtgcccagcatgcccactttccaatgctccactgatccccatgttttgtttctgaaggacaaccagccttggaataatggcaaataccttcttaagttcctacaaagtatggtccctgggaagtttatgtctgtaagtcaaaccttgggaagtaactgagttttgatgcctcttccagcatcatcagcatcatgctattacaatcccaaaccatgggggtttctcacagctttacaccaaagggcatcactatccctcaaagagagaaacctggacacatgtaccaaaacgaagattacctgcagaacgggctgccaacagaaaccaccgttcttgggtttgggcattactggatccctctcaattatctctnggaaacaatcaactaaagcccttttgacctggagcagcttgaccctaaatgcagtggagttctggtactggcaggagcaagcctctttcctccttgctgacagcatgggtagccctgaaggactggnctttnaacaattggnggnttcaaaaaaagggattatttatttcctcattggccttattttnggnggtnctnttttttcccatnttntggaaatccaaaggattggncttcctggancnagtggtcaagttttnacnagggggngccnaaggggggggaaggcntattttttacctngggccngggngccctttttttangctgggtanaangttttggncntttnggggggnaaanaaggttttntttccaannanccctngggggttttttttnctttancccaanaacnaaa

SEQ ID NO: 5648 - DNA, 868 bp, Homo sapiens
  misc_feature 421, 439, 441, 454, 463, 519, 527, 538, 567, 613, 615, 619,628, 630, 634, 643, 652, 661, 662, 688, 700, 701, 704, 710,718, 724, 726, 731, 734, 741, 742, 744, 746, 755, 762, 777,784, 785, 786, 790, 795, 798, 800, 801, 807, 810, 815: n = A,T,C or G
  misc_feature 816, 821, 823, 825, 832, 840, 841, 854, 856: n = A,T,C or G
gcggtggcggccgaggtactgtgggttctgagtcaaggatcccagtgctgccaggaaccagcagtcagctgcgcctccttgttggatgtcaaatctgcttatatcatccaggatgaagtgaggaggaccccctggtagatcctgtggccgcttccatatcacattggagaggcgtttttcctggagcagcttctggcctatggaagaatctgctgcagggaatgtctcatccttaaacgtccggcccatgctcaggcagtgatcccgcaaggtggtaaagtcctggtctttgaacttgatgatggaggtctccactgaaggctcctggtaatacgccatgactctccttagaagacttccgaggtcccttcctgtttcctaggcaggtgtgtctgatggaggaggggagacgggcaggttncacaggctctcaagttananagtggtggagganactgggcanaggaggagaaccttggcccgcccgctctaaaactagtggatccccccgggcttgcnggaatttncaatatcaaanctttttcgaattccccggcgaccctcganggggggggcccccggtccccagctttttggttccccttttaattgnangggntttaatttngncccnccttgggcngttaaatcnttgggtcannaacctggttttccctgggtggaaaanttgttattcccnnttnacaaantttccccnccaacnantaccnagncccgggnngncntataaaggnggttaancccccgggggggccncattgannnggancttanctncnnatttanttncgttnnggctnantngccccgnttttcaannttggaaaaacccntncggggcccccct

SEQ ID NO: 5649 - DNA, 890 bp, Homo sapiens
  misc_feature 3, 4, 6, 8, 9, 10, 13, 14, 18, 20, 21, 24, 25, 26, 30, 32,33, 35, 37, 40, 41, 44, 49, 52, 60, 61, 66, 67, 69, 72,74, 75, 76, 78, 79, 80, 82, 83, 84, 86, 87, 88, 89, 90,91, 92, 95, 96, 97, 102, 103, 104, 105, 106, 108, 109, 110: n = A,T,C or G
  misc_feature 111, 114, 118, 120, 121, 122, 126, 149, 355, 482, 549, 559,583, 673, 751, 757, 775, 776, 811, 832, 842, 843, 863, 867,877, 883, 888, 889: n = A,T,C or G
ctnncncnnnttnntatncnnatnnnttancnnananttnnatntctantcntatttttnntcttnntnacnannntnnntnnncnnnnnnnttnnngtaannnnntnnnnttnacangnnnctcnaggtctaattggagctccaccgnggtggcggccgcccgggcaggtactcattgaacttgagctccgagtcctgattcacatccaagctcttcatcttctcatcaagagagcccacatcctgaggagacaccaaagggaagggtagagttagaaactggggttcttgagaaagtagggagggaagaactgtcagctgctattctctcaaggcccttccctcagagagcantggcacctgccccttctctaaagaagaaggctgcagccccaaaactgcaccgccacggggtgcctctccaaggagcaccaagcaggagaaaggtggggggggcctgaagtcctaagtgcttgcccgntgtgtaaaatacttccacgatgacccgcttacaaaccaccaaaacaggtttgtccgcttgaatacanaaagcctggnaaaagaaatccacacaatcttttnttttcacccagcacacccacttgccagcttgcctggtgggaatcgggccccaaagggaattgcccaggcaattcttcaagggaaggatgncttgccaaggggtttgggaacccccagttcaagaagccccttttcttgggggggcccacccccttcccttctttttcnttcaangaaaaaggccttgggaannaaaagccttccccagttacctttaagccttgcttncatttttggcaccaaaccccnttgggggtcnntttttcattttattcccagncttngggttcaacntaagantcaanng

SEQ ID NO: 5650 - DNA, 897 bp, Homo sapiens
  misc_feature 4, 6, 8, 12, 14, 15, 16, 20, 21, 24, 27, 31, 36, 40, 41,42, 43, 44, 45, 48, 49, 50, 51, 52, 54, 55, 56, 57, 65,66, 68, 70, 73, 76, 80, 83, 87, 88, 90, 91, 93, 94, 99,106, 108, 110, 112, 113, 116, 133, 204, 213, 236, 241, 279,284: n = A,T,C or G
  misc_feature 286, 313, 325, 331, 381, 383, 385, 396, 409, 412, 418, 433,461, 512, 523, 558, 626, 642, 643, 646, 662, 672, 679, 689,692, 701, 704, 705, 738, 747, 769, 772, 778, 794, 795, 801,814, 816, 817, 843, 876, 882, 890, 895: n = A,T,C or G
ctcncntncatngnnncggnntcngtngtangttanatcnnnnnnttnnnnngnnnntgttatgnngntngtnganattntcnttanntnntnnatgtnaaggtgngnananntcntttaaactatcactatngggcgaattggagctccaccgcggtggcggccgaggtactttttttttttttttttttttttttttttccngggcctcanactactgtttctataatgggatnttttnttacatgaggtctctgagggcatagttatttcattaanaaacncncttcataaaattgcatccatgtttggnaatctaaaaaanccaatntagatgacagaagcttctgactataaattataagtaatcttatccatacntncncagaagctagngatttattaagtnctntactgnacttccaaacacatntaagttttccaaaaagatttcaaaaaancaattcactggcagcaagccagaaaaagttcaggggataaactgctgaaanacaggtggtgnctggtaaggggctcctgggtagggacttttttgcntggaagcagctgccatggttataccctggggcccagccaattttaaacttttttatggggtttcgggnttttttttcttctttnntanaaaataaaatatttancttgggaccncttgganaatcctggangantttaccctnggnnggcctccttattggtcttttaatccccctcggnaaaaaaatnttgggggaacccccccgggggnttncccttnccccgggggccggggnnggtttnttaaaaaacctangnngggattcccccccggggccttgggcnagggaaatttcccaatattcaaaagcctttttnggaatncccggccngaccncg

SEQ ID NO: 5651 - DNA, 804 bp, Homo sapiens
  misc_feature 511, 560, 572, 600, 601, 611, 657, 671, 672, 680, 684, 691,692, 704, 708, 713, 716, 721, 733, 742, 744, 750, 752, 763,771, 774, 775, 781, 782, 785, 791, 793, 804: n = A,T,C or G
gcggtggcggccgcccgggcaggtacgcggggacctgctgtgctcttgcttgcacagtgtcctggagctggacctggctctgggtttccaggaagcagtttgactaaaggcagcaagctgcttcctctgctgcctgagataccagaaccatacagaaagacatgcaaagcacaccaaattgtctacagcttaagatcaacaaaaatcctttttcattaattataaattcacagagaatataaacaatgatccttattatcccctttactggctcacacagggagagagaagccaaaagcccaactgattcccaatggcgaagattgagaaaaacgctcccacgatggaaaaaaagccagaactgtttaacatcatggaagtagatggagtccctacgttgatattatcaaaagaatggtgggaaaaagtatgtaatttccaagccaagcctgatgatcttattctggcaacttacccaaagtcaggtacctcggcccgctctagaactagnggatcccccgggctgcagggaattcgatatcaaagcttatcgataccgncggaccctcganggggggggcccggttccccagcttttgnntcccttttantggagggttaaattgccccgctttggccgtaattcatggggcctangctgggttccctgnngtgaaaanttgntattccnnttcacaaatttncccnccacnatnccgangccggggagcantaaaagggntnaaaagncngggggggcccnaatggggnggnncttacnnccntttaantngcggtggggcn

SEQ ID NO: 5652 - DNA, 799 bp, Homo sapiens
  misc_feature 506, 535, 585, 591, 597, 652, 656, 660, 673, 679, 683, 716,731, 734, 738, 740, 741, 742, 749, 758, 760, 764, 768, 775,776, 783, 786, 787, 789, 798, 799: n = A,T,C or G
ggagctccaccgcggtggcggccgaggtacagatccacagcctgtcagttgcaccctccctgacaccaccaccgggacctgcacagactgggagttcatttccttgctcactggggcctgccttccccaggctggtgtcttctgatagccaaactgaggggtgggaggtattttgaaatgcagatttaattattcatgtgtggtgaggccaacagatcaggagataactgccactgaaatgatagtttgttacacacagttcccaatgggaggggacatgccacacacggtgggggtcacacagggaagcaccaaggtcagctgggaggtagagggagccagggagaaaagtgggcaagagcctttattgttttccatgggagggaacggacaaggatttgagtaagtaggtttaggattggctatttggaataacttcagcgagatctggagcacagaggctgtcctgagttatctggtattgtgtcctggattgattagggcangaacaggggcccagagtgtgagaacccanaaaaggaggtggggtatgggcttttggaacaattgttttgtgggtgaaangcgtgntcccanccagcaagcccaggctttttgcttgtctcccgggaattaacttagcccttttcangggncaantgaggccctaaanatgtcnaaancttcaaaaaatgccagaataaaaaagacatggntcagtaaagaaaccnaancaangnnncaggcanggtgaaccntnacancccnccaacannaggcagncannanttttgcccnn

SEQ ID NO: 5653 - DNA, 1139 bp, Homo sapiens
  misc_feature 2, 3, 4, 7, 8, 11, 12, 13, 14, 16, 17, 18, 21, 24, 27, 28,31, 33, 34, 37, 38, 40, 41, 42, 45, 46, 47, 48, 53, 56,61, 62, 63, 64, 67, 69, 70, 74, 75, 79, 80, 81, 83, 87,91, 92, 93, 94, 98, 99, 103, 105, 106, 109, 114, 115, 116,119: n = A,T,C or G
  misc_feature 123, 124, 129, 137, 141, 143, 151, 154, 157, 158, 159, 160,165, 194, 211, 371, 379, 409, 486, 509, 519, 552, 554, 567,665, 694, 750, 790, 882, 910, 924, 949, 962, 977, 1005,1007, 1013, 1044, 1055, 1091, 1093, 1098, 1139: n = A,T,C or G
cnnnacnnaannnnannngtnaanatnnaangnnatnncnnnaannnntaagntanaaatnnnnatngnnatannatannnanaagnaatnnnntagnnaggnannatnaatannnacncttnntatcngaatgaantgtnanctccaccnatngannnnggtcngccacgctgggttatgccaaggctcggancacccttgcccggctgngattgctgccaggcactgttcatctcagcttttctgtccctttgctcccggcaagcgcttctgctgaaagttcatatctggagcctgatgtcttaacgaataaaggtcccatgctccacccgcaaaaaaaaaaaaaaaaaaagtacctcggccgctctanaaactagngggatcccccgggctgcagggaattcgatnatcaaggctttatcgataccggtcgacctcgaaggggggggcccccggtgacccaagctttttgttccccttttagntgaaggggtttaaattgccgccnccttgggcgntaattcattgggtccataagcttgtttccctgngntgaaaattgtttnatcccgctcaccaaattccacaccaaccattaccgaagccccgggggaagccattaaaaggtggtaaaaagccctggggggtgcccttaaatgaaggnggagcctaaacttcacaattaaattggcngtttgccgcctcaactggccccgcttttccaagtccggggaaaacccttgtccgtngccaggcttgccattaaatggaaatccggccaaaccgccnccgggggaagaaggccggttttggcgttatttggggccgccttctttcccgcttttccttcgcttcaacttggaacttcgctttgcgccttngggtccgtttccgggcttgcgggccaancccgggtattcaanccttcaactttcaaaaaggccgggnaaaattacccggntttattcccaccagnaaattcaaggggggaataaaccgccaangnaaaaanaaaacattgttggagcccaaaaaagggcccnagccaaaaaangggcccaagggaaaccccggtaaaaaaaaggccccncngttcnccttgggccggtttttttcccattaaggccttcccgccccn

SEQ ID NO: 5654 - DNA, 1223 bp, Homo sapiens
  misc_feature 1, 2, 3, 5, 6, 8, 9, 14, 15, 16, 23, 25, 30, 31, 38, 45,46, 48, 52, 53, 54, 59, 62, 64, 68, 72, 87, 92, 93, 99,100, 101, 102, 103, 105, 110, 111, 112, 116, 124, 125, 131,134, 154, 156, 165, 176, 192, 225, 236, 250, 265, 267, 323: n = A,T,C or G
  misc_feature 367, 368, 380, 388, 420, 444, 457, 469, 479, 480, 497, 527,550, 581, 589, 602, 615, 616, 618, 633, 635, 642, 643, 646,650, 654, 657, 681, 706, 708, 752, 764, 765, 789, 798, 816,823, 833, 835, 837, 841, 846, 849, 855, 864, 867, 891: n = A,T,C or G
  misc_feature 893, 897, 899, 902, 910, 911, 913, 916, 928, 946, 949, 952,953, 968, 975, 977, 988, 991, 994, 999, 1007, 1015, 1041,1044, 1045, 1061, 1063, 1070, 1075, 1076, 1080, 1086, 1099,1100, 1102, 1104, 1107, 1108, 1114, 1122, 1123, 1137: n = A,T,C or G
  misc_feature 1140, 1141, 1143, 1152, 1158, 1159, 1166, 1172, 1174, 1176,1179, 1187, 1188, 1193, 1200, 1213, 1217, 1220, 1222: n = A,T,C or G
nnnanncnnatggnnngtatttntngccgnnttttttntattaanncnctannncaaanttnantatntgantttataatcatatantaganncagggnnnnngnaaaannntttnatataaannaattgntanctccaccgcggtggcggccnangtacacagnttaaccacggncacgatcaagaattcnagttaaacagaattgaaccactccaaccacaancactatgacanggaaacaggatcgnggaggatttccacangngaaccttttacattacaaagtttccaacacaagaagccaacaataccccagtgctncaccaagttactttcccactgtttcccaaggtacaactcaattnntaatcaagtagntccaagtnctaagaacatttcctggtaaaacaagggaccncacctcccgtggctcttatgcatnggcctgccactgnatggaatcaaantttctttaannaaaccttaccgaccggntctagattacccccttttggagggaagaanccaccccctttcataagaaaatnctttccaagccaattcaagtggccctcaagnttttttcncccattcctggtnaaaaaaggaacanncncattggccaaaaagntnggggaannatncccngctnaanggctttcccagaattcggaagttnccattccggggccttcccttcaatntngtgaccccttggccccccgggggccggggcgccggcttctttangaaaaccttaanntggggaatcccccccccgggggcnttggccaanggaaaattttccgaatantccaaangccttttatncngnaatnacccnggngccaancccttccgnaanggggggggggggccccccagggtnancccnanacntttttttnngnttnccccttttaaantggaaggggggttaaaanttnccnnccccttggggcggtnaaaatcnantggggccaatnaangcntggtntttccctngtggtggnaaaaatttggtttattcccccctttncannaattttcccccaaccnancaattangacannccgngggaancccttaaaaaagnngnanaannagcccntggggggnnggcccttaaattgnaanngnaagccttancctctnnctattanatttgncngnttncccccccnnccttngcccgcnttttttccaaatncggnganant

SEQ ID NO: 5655 - DNA, 1282 bp, Homo sapiens
  misc_feature 1, 2, 3, 4, 5, 6, 7, 8, 9, 10, 11, 12, 13, 14, 15, 16, 17,18, 19, 20, 21, 22, 23, 25, 26, 27, 28, 29, 30, 31, 32,33, 34, 35, 36, 37, 38, 39, 40, 41, 42, 43, 44, 45, 46,47, 48, 49, 50, 51, 52, 53, 54, 55, 56, 57, 58, 59, 60,61: n = A,T,C or G
  misc_feature 62, 63, 64, 65, 66, 69, 70, 71, 72, 73, 74, 75, 76, 77, 78,79, 80, 81, 82, 84, 85, 86, 87, 88, 89, 90, 91, 93, 94,96, 97, 98, 99, 100, 101, 102, 103, 104, 105, 106, 107,108, 109, 110, 111, 112, 113, 114, 117, 118, 119, 120, 121: n = A,T,C or G
  misc_feature 122, 126, 127, 128, 129, 130, 131, 132, 133, 134, 135, 137,138, 139, 141, 142, 143, 144, 145, 146, 147, 148, 149, 150,151, 152, 153, 154, 155, 156, 157, 158, 159, 161, 162, 163,164, 165, 166, 167, 328, 363, 382, 564, 649, 722, 755: n = A,T,C or G
  misc_feature 769, 793, 809, 829, 938, 941, 952, 976, 986, 987, 990, 998,1016, 1028, 1037, 1038, 1061, 1102, 1106, 1107, 1136, 1147,1149, 1156, 1157, 1159, 1163, 1171, 1180, 1182, 1185, 1192,1197, 1199, 1216, 1223, 1224, 1228, 1232, 1233, 1237: n = A,T,C or G
  misc_feature 1244, 1246, 1252, 1262, 1282: n = A,T,C or G
nnnnnnnnnnnnnnnnnnnnnnntnnnnnnnnnnnnnnnnnnnnnnnnnnnnnnnnnnnnnnnnnnatnnnnnnnnnnnnnnannnnnnnngnnannnnnnnnnnnnnnnnnnnagnnnnnnggannnnnnnnnngnnngnnnnnnnnnnnnnnnnnnntnnnnnnnaattggggagctccaccgcggtggggccggcccgaggtactgtgggttctgagtcaaggatcccagtgctgccaggaaccagcagtcagctgcgcctccttgttggatgtcaaatctgcttatatcatccagggatgaagtgaggaggaccccctggtagnatcctgtggcccgcttccatatcacattggggagnaggccgtttttccttgggnaagcaagcttctgggccttattgggaaaggaaatcttgctgccaaggggggaaattgtctcatcctttaaaaccgtcccgggcccatgctcaagggcaaggtggatccccgcaaaggggtggggttaaaaaaggtccttgggtcttttggaactttggattggaatggggaaggggtcttcncacttggaaaaggggctcccttgggttaaattaaccgcccaatggaccccttccttttaaggaaaagaactttcccggaaggggncccttttcccttggttttccttaagggccaagggtggttggtcttggaattgggaaggggaaggggggggggnaccgggggccaaggggtttcccaacaaggggcntcttcaaggtttangaagaaagttgggtgggggggggnaagaacctgggccaanaagggaagggaagaagccantgggccccgggcccggctcttaagaaaacttaagtggggaatccccccccgggggcttgccaagggaaatttccggaatattcaaaagcctttaattcggattaccccngtncgaacccttcnaaggggggggggggccccccgggnaaccccaagnnttntttggttncccctttttaaatggaanggggttttaaanttggccccnnctttggggcggtaaaatccattnggggccaataaagcctgggtttcccttgggggttggaaaanttgnnttatttcccgctttcaccaaaatttcccncccaccaaacnanttacccnnancccngggggagnccttaaaangnggnttaaaangcccntnggggggtgcccctaaantggaagnngggnagcnnaaanccccccntnttaaanttggcggttnggcgcctccacttggccccn

SEQ ID NO: 5656 - DNA, 869 bp, Homo sapiens
  misc_feature 2, 3, 4, 5, 9, 10, 13, 14, 15, 16, 17, 18, 19, 22, 23, 24,25, 26, 28, 566, 574, 609, 615, 624, 645, 688, 704, 706,708, 750, 751, 772, 778, 780, 794, 795, 804, 809, 843, 852: n = A,T,C or G
gnnnnaggnnttnnnnnnnttnnnnncnactcctatagggcgaattggagctccaccgcggtggcggccggccatgctctcctcctctgccagtctcctccaccactctctaacctgagagcctgtggaacctgcccgtctcccctcctccatcagacacacctgcctaggaaacaggaaaggacctcggaagtcttctaaggagggtcatggcgtattaccaggagccttcagtggagacctccatcatcaagttcaaagaccaggactttaccaccttgcgggatcactgcctgagcatgggccggaccgtttaaggatgagacattccctgcagcagattcttccataggccagaagctgctccaggaaaaacgcctctccaatgtgatatggaagcggccacaggatctaccagggggtcctcctcacttcatcctggatgatataagcagatttgacatccaacaaggaggcgcagctgactgctggttcctggcagcactgggatccttgactcaaaacccacagtacctcggccgctctagaactagtgggatcccccnggctgcanggaattcgatatcaaagcttatcgataccgtcganctcganggggggggncccggtacccaacttttggtncctttagtgagggttaattgcgccccttggcgtaaatcatggncatagctggttcctgngngnaaatggttattccgcttcacaatttccacaaaaaaataccannccggggagccataaaagtgtnaaaccncnggggggccccaaannggggggccnaaccncccaattaattgggggtgggctcacttggccccnttttcaaancggggaaaacctgtggg

SEQ ID NO: 5657 - DNA, 1060 bp, Homo sapiens
  misc_feature 3, 7, 9, 10, 11, 12, 13, 14, 15, 17, 18, 19, 20, 21, 22,23, 24, 26, 28, 29, 30, 31, 32, 33, 34, 35, 36, 37, 38,39, 41, 42, 43, 44, 45, 46, 47, 49, 50, 51, 52, 53, 54,55, 56, 57, 61, 62, 63, 64, 65, 66, 67, 68, 69, 70, 71,72, 73: n = A,T,C or G
  misc_feature 74, 75, 76, 77, 78, 79, 80, 81, 82, 83, 84, 85, 86, 87, 88,89, 90, 91, 92, 93, 94, 95, 96, 99, 100, 102, 104, 105,106, 107, 108, 110, 111, 112, 113, 114, 115, 117, 118, 119,120, 121, 123, 124, 126, 127, 501, 606, 626, 638, 758: n = A,T,C or G
  misc_feature 797, 803, 813, 818, 830, 838, 858, 880, 898, 905, 973, 980,984, 985, 989, 991, 999, 1000, 1002, 1047, 1051, 1054, 1056: n = A,T,C or G
ccncccncnnnnnnncnnnnnnnngnannnnnnnnnnnnannnnnnnannnnnnnnnatcnnnnnnnnnnnnnnnnnnnnnnnnnnnnnnnnnnnnagnnangnnnnntnnnnnntnnnnnanncnnctcactatagggcgaattggagctccaccgcggtggcggccgaggtactttgttttcatctttcaggttataaaacttttcagtttctaggggataaattaaaatagtaaatgaatatttgttgcattttttttctattttaactgcatttgctcattgtaattgctaaatagtaaaatttatccccactttctttaggcttcaacttttgtttatataatcagtttttcttttatactgttacaaaatgcctttcaagcttctcttatattttcaaaagctatgaaacccatcaaaaattataaggacttaaaatttatgtaatttttttatttttggggatacttaaatattctattaatttgctataagtncattggaaatgttaataaaataaatttgtctcataatctactctttgttcattttattttcaagccctttagaaaataaggaggggccattatggaccgtggcanatctaggggcttgctgtttngggctcttctgnaaagtggacgcccaagggcttgcgggggtccacccaactgcccgagccagcgccttctcccatgggagaaaactaagaaaaaacctgctttttgggaatttattctcttaccaggggaanaaaaccccttgggcccattcagaaaggggggaaggaagnatttgntcttttcaanctttnccaaaggaaaancccaagtngtggagggggctggaaaaanaaaatggcccccccaggtctcntggtcaagccacttcccnttctttnccctttttataaggttcattcagcccccccaaccaaaaaaattaaaacccttttggtggtgaattggnaaaaaanaccnnaccncngccggagnncnaattgggttcctttgccccggggcggggccgggtcgaacctcctngggnctnanaaaa

SEQ ID NO: 5658 - DNA, 795 bp, Homo sapiens
  misc_feature 25, 48, 93, 96, 99, 101, 289, 290, 293, 295, 310, 376, 565,599, 760, 762, 785, 786, 790: n = A,T,C or G
ggagctccaccgcggtggcggccgnccatgctctcctcctctgccagnctcctccaccactctctaacctgagagcctgtggaacctgcccgnctnccntnctccatcagacacacctgcctaggaaacaggaaaggacctcggaagtcttctaaggagagtcatggcgtattaccaggagccttcagtggagacctccatcatcaagttcaaagaccaggactttaccaccttgcgggatcactgcctgagcatgggccggacgtttaaggatgagacattccctgcnncanantcttccataggccanaagctgctccaggaaaaacgcctctccaatgtgatatggaagcggccacaggatctaccagggggncctcctcacttcatcctggatgatataagcagatttgacatccaacaaggaggcgcagctgactgctggttcctggcagcactgggatccttgactcaggacccacagtacctcggccgctctagaactagtggatcccccgggctgcaggaattcgatatcaagcttatcgataccgtcgacctcganggggggcccggtacccagcttttgtccctttagngaggggttaattgcgcgcttggcgtaatcatggtcatagctgtttcctgtgtgaaattgttatccgctcacaattcacacaacataccgaagcccgggagcataaaagtgtaaagcctggggtgcctaatgaggggaactacccccatttaattggcgttngngctcacttgcccgctttccagtnngggnaaact

SEQ ID NO: 5659 - DNA, 803 bp, Homo sapiens
  misc_feature 620, 658, 687, 703, 727, 754, 764, 765, 783, 792: n = A,T,C or G
tatagggcgaattggagctccaccgcggtggcggccgaggtacgcgggagaataaaggtgtctccataaaccatgacctgcagatttgacccacaatgaccagcatgtcccttatggacattttctaggtccagtggcactgcaggtcccggatgattgcgggtgccaatttctacattgtggggagggaccctgcaggaatgccccatcctgaaaccaagaaggatctgtatgaacccactcatgggggcaaggtcttgagcatggcccctggcctcacctctgtggaaatcattccattccgagtggctgcctacaacaaagccaaaaaagccatggacttctatgatccagcaaggtaggttttcagaggaaaattcttttatcaacatctgtataaaagaaatgatgaggcagaatttgggccctttgaaaaactctccagtgcattgccacatgctcccaagtggactgagtcccttgagagtcaagacgtggtcttataaattttatgtcccctaaaattgtacctgcccgggcggccgctcggctctagaactagtggatcccccgggctgcaggaattcgatatcaagcttatcgataccgtcgacctcganggggggcccggtcccagcttttggttccctttagtgangggtaattgccgcctggcgtaatcatggncatagctgtttcctgngggaaattggtatccctccaattncccacaaaataccaaacccggagcatnaaaggtaaannctggggggccttatgagnggctactcncattaaattgc

SEQ ID NO: 5660 - DNA, 875 bp, Homo sapiens
  misc_feature 16, 511, 525, 543, 555, 562, 594, 599, 616, 635, 648, 674,690, 696, 697, 700, 701, 703, 737, 741, 743, 753, 763, 772,786, 790, 791, 792, 809, 811, 818, 822, 825, 838, 839, 840,847, 855, 863, 865, 867, 868, 871: n = A,T,C or G
gaattggagctccacncgcggtggcggccgcccgggcaggtacctgactgtggctcagatctgcgtcgcagcagcgagagaagaaatcactccatatccgatgagaggaagggtggcacagagatggtgtctacaattagagacatttctgactccaccttagcctaagcaaactttatatactgagtaacatttgaaggttgtcttttaatggtggggggtgttttttcctttttaaactacagtgcttgcacaagagagggagggactcagaaaaggttagggcaggtgggggagacagtagatggcctgggatgacttgagtccatcatactattgcttggcaggtgtcctcccccatgtttgattcaaattccatgagtgacctacctttccccaggaatgggactgagagggtagtctccagcaactcagtctgcacagggctccccgttcaggctgcctttggtgggtgtgctttttgtaaagttttctttctctgccttcgacntacctctgaatcanaaaagcaagcccccacanggtggaattgangggatgnctgctttggcaattgccccaaatcttaaccanggggngggctgggcttgggccnccccccttgtcccgctttnaaggggggaaaanccttaccaaggttgtttggtttttgnaacctcagggaaattnaaaaannccnnanggcccttttttaaaataaccccagggggaaaaanaatncnatgaatgccntaccctgggnacccccctnaaaaaccccaagtngccnnnaaattcctaaaatcccngntttttgnttgnaanaaaaaaggtcccnnnttttttnccctttanaaaaaaancncnntcnaaat

SEQ ID NO: 5661 - DNA, 835 bp, Homo sapiens
  misc_feature 50, 463, 668, 722, 724, 734, 754, 757, 767, 768, 786, 790,801, 810, 812, 813, 815, 827, 828, 829, 832, 833: n = A,T,C or G
tatagggcgaattggagctccaccgcggtggcggccgacgtactgtgggntctgagtcaaggatcccagtgctgccaggaaccagcagtcagctgcgcctccttgttggatgtcaaatctgcttatatcatccaggatgaagtgaggaggaccccctggtagatcctgtggccgcttccatatcacattggagaggcgtttttcctggagcagcttctggcctatggaagaatctgctgcagggaatgtctcatccttaaacgtccggcccatgctcaggcagtgatcccgcaaggtggtaaagtcctggtctttgaacttgatgatggaggtctccactgaaggctcctggtaatacgccatgactctccttagaagacttccgaggtcctttcctgtttcctaggcaggtgtgtctgatggaggaggggagacgggcaggttccacaggctctcaggttanagagtggtggaggagactggcagaggaggagagcatggccggccgctctagaactagtggatcccccgggctgcaggaattcgatatcaagcttatcgataccgtcgacctcgagggggggcccggtacccaacttttgttcccttagtgagggttaaattgcgccgccttggcgtaaatcatgggtcaatagctggtttcctgngtgaaaattggtaatccgctcacaaattccacacaacaataccagcccggggancnataaaagggnaaaagccctggggtgccttnaangagtggagcnnaactcacatttaaattgngttncgcctcacttncccgctttncnntncaggaaaacccnnnctnncc

SEQ ID NO: 5662 - DNA, 816 bp, Homo sapiens
  misc_feature 70, 79, 122, 135, 147, 185, 207, 242, 271, 276, 319, 364,499, 513, 715, 723, 778, 796, 806: n = A,T,C or G
atagggcgaattggagctccccgcggtggcggccgaggtacttttttttttttttttttttttttttttngggctatgntctcctcttccaattttaagtaaatctgctttattctgatggngccttctgttcanaggctccagcanacttacctgagtcctaacactatcactgtgatgggggnggtagagagacaggaccagcanaacagactggggctgctcgtctttttccagctggngaagtttttatagggataaagcctcccanaatanaatggcccattgaacagcaaacacaaaatactggttttagganaacattgtcagctgttgctttggctttttaaattcttcattttanaaagaactcgcatatgaatttaatttgtttctgacttaatattttcccatttgaactttcactggatttttttcttcttgagcaagcaaattcaggaaaactccaatatttggctgtcttctttcccagtccttntaaactccccccanacccgcgtacctgcccgggcggccgctcgataatcatggtcatagctgtttcctgtgtgaaattgttatccgctcacaattccccacaacatacgagccgggagcataaaaggtaaagcctgggggcctaatgagtgagctaactcacattaattgcgttgcgctcactggccgctttccagtcgggaaacctgtcgggccnagctgcanttaatgaatcggcccacccccccgggagaaggcggtttgcgtattggggcgcctnttccgctttctcgcttanttgacttcgnttgggctcgg

SEQ ID NO: 5663 - DNA, 863 bp, Homo sapiens
  misc_feature 565, 574, 613, 614, 622, 649, 674, 676, 685, 695, 700, 723,731, 732, 740, 742, 761, 762, 767, 777, 781, 802, 807, 808,811, 819, 831, 838, 840, 846, 852, 856, 858, 860, 862: n = A,T,C or G
ctatagggcgaattggagctccaccgcggtggcggccgaggtactgtgggttctgagtcaaggatcccagtgctgccaggaaccagcagtcagctgcgcctccttgttggatgtcaaatctgcttatatcatccaggatgaagtgaggaggaccccctggtagatcctgtggccgcttccatatcacattggagaggcgtttttcctggagcagcttctggcctatggaagaatctgctgcagggaatgtctcatccttaaacgtccggcccatgctcaggcagtgatcccgcaaggtggtaaagtcctggtctttgaacttgatgatggaggtctccactgaaggctcctggtaatacgccaccgactctccttagaagacttccgaggtcctttcctgtttcctaggcaggtgtgtctgatggaggaggggagacgggcaggttccacaggctctcaggttagagagtggtggaggagactggcagaggaaggaaagcatggcccggccgtcttggaagaaagagcagtgctggtgtctcccgcgtacctgccccgggccggncggttctanaaactagtgggatccccccgggccttggcagggaattcnnttatcaanccttatcggatacccgtccgaccctcnaggggggggggccccggtaccccancntttttgttncccttttaantggangggttaaaattgcgccccttggncggtaaanncatgggcntnaacttgttttccttggggnngaaanttgtttatcncccntcaccaattttccccaacaanattanngancccggggngcttaaaagtgntaaaaancntggggngccccnaatngngngna

SEQ ID NO: 5664 - DNA, 826 bp, Homo sapiens
  misc_feature 457, 590, 598, 635, 677, 702, 710, 716, 721, 722, 733, 752,786, 788, 822: n = A,T,C or G
gaattggagctccacccgcggtggcggccgaggtactgtgggttctgagtcaaggatcccagtgctgccaggaaccagcagtcagctgcgcctccttgttggatgtcaaatctgcttatatcatccaggatgaagtgaggaggaccccctggtagatcctgtggccgcttccatatcacattggagaggcgtttttcctggagcagcttctggcctatggaagaatctgctgcagggaatgtctcatccttaaacgtccggcccatgctcaggcagtgatcccgcaaggtggtaaagtcctggtctttgaacttgatgatggaggtctccactgaagactcctggtaataccgccatgaccctccttagaagacttccgaggtcctttcctgtttcctaggcaggtgtgtctgatggaggaggggagacgggcaggttccacaggctctcaggttanagagtggtgggaggagactggcagagggaggagagcatggccggccgctctagaactagtgggatccccgggctgcaggaattcgatatcaagcttattcgatcccgtcgacctcgaggggggggccccggtncccaagcnttttgttccccttttagtgagggttaaatttgcgccncttggcgttaaattcatgggtcattagcctgttttcctgtgntgaaaaattgttttttcccctcacnaatttccncacaanatacnnagcccgggganccataaaagtggtaaaagncctgggggggcctaatgagtggagcctaacttcncnttattgcggttgcgcctcactggcccgcttttcnagtg

SEQ ID NO: 5665 - DNA, 825 bp, Homo sapiens
  misc_feature 465, 558, 638, 639, 650, 675, 720, 733, 751, 758, 765, 796,798, 803, 805, 807, 810, 820, 825: n = A,T,C or G
gtaatacgactcactatagggcgaattggagctccaccgcggtggcggccgaggtactttttttgttctttttttttttttttttgctgacctgtagtttgatttccagtgtctagacttaacagtctgaatttaaacacgaggcatatacacaaaatcatctggaactgatttttttcacactaaacacttctttctgatcctactttccaggaggctccttcctccaaacatacctccagatgaaaatcacttaattaaccaagaaagactcaaccgcccttaactgcttttctaaacagtcacacatactggatttacttattttgagacatgacaaaccagttgcaaaccacaaattcattctcatgggccctccacacggtctcttgttccttctgaagagggtcttgctgaggaccatttgtcccccttcctgcagcagctactcagtcggtgctgganagtgtggcctttcgaactatttgcggttttcctgccacatgatgctgacggacgtcagcctctcccggccttgggcacatacaacagcctgtnaaagctccactttctattccagattggctgttatgcgtctgcttctcattcaaaggaaataagaggagatgtaaaatcgnncgctggggcanttaccgtgtttaatgaaaatgatcntgcatgctaaattcacgtccaagaagccgagtcgcccttactggntggtatttgaacnccttttcctttgggaccnccccaangcttgtngggcttgtgggggggggcatttaatttgtgntngggcncncnctnttatttttgnacccn

SEQ ID NO: 5666 - DNA, 920 bp, Homo sapiens
  misc_feature 5, 93, 297, 346, 378, 393, 404, 405, 430, 469, 470, 471,472, 474, 483, 486, 494, 499, 505, 507, 508, 512, 524, 530,532, 568, 592, 593, 612, 614, 615, 619, 630, 631, 632, 634,651, 652, 660, 674, 679, 681, 683, 686, 687, 691, 699: n = A,T,C or G
  misc_feature 704, 716, 718, 722, 729, 731, 742, 743, 745, 752, 754, 758,760, 761, 762, 763, 765, 767, 768, 772, 777, 789, 793, 799,805, 810, 815, 818, 819, 824, 825, 830, 835, 840, 850, 852,856, 862, 873, 876, 881, 882, 883, 885, 887, 893, 899: n = A,T,C or G
  misc_feature 900, 904, 906, 911, 918: n = A,T,C or G
gaatnggagctccaccgcggtggcggccgaggtactgtgggttctgagtcaaggatcccagtgctgccaggaaccagcagtcagctgcgcctncttgttggatgtcaaatctgcttatatcatccaggatgaagtgaggaggaccccctggtagatcctgtggccgcttccatatcacattggagaggcgtttttcctggagcagcttctggcctatggaagaatctgctgcagggaatgtctcatccttaaacgtccggcccatgctcaggcagtgatcccgcaaggtggtaaagncctggtctttgaacttgatgatggaggtctccactgaaggctcctggtnatacgcccatgactttccttagaagactttcngaggtccttccctgntttcctaggcnngttgtgttctgatggaaagaggggnagacctgggcagggtttccacaagggctctcaagggttnnnnanaaggtgggntgngagggaanacctnggcaananngaanggaggagccttnggcccngntccggcttcttagaacctagtttggattcccccccnggccttgcaaggaaatttcgaatnnttaaaatcctttattccantnncccntccgacccttnnnangggggggggccccgggnncccccaanctttttggttttcnctttnananganngggnttaaaatnggcgnccgcctcgggcngnaaanaattggntnaataaacctgnnantccttgngngganannnngntnntccnggttntcaaattccccncagnacattnctagcnggggnggccntannagtannaaaantcttngggtntctaatgggngngtantcgacncccttttaatncgngttgnnntnanttgccnctttgnngagngnaaaantttttgntc

SEQ ID NO: 5667 - DNA, 845 bp, Homo sapiens
  misc_feature 456, 471, 556, 602, 612, 629, 653, 666, 670, 684, 688, 694,695, 704, 719, 728, 731, 735, 740, 741, 747, 750, 752, 754,755, 760, 777, 781, 782, 788, 793, 805, 808, 813, 819, 821,824, 825, 832, 834, 840, 842, 845: n = A,T,C or G
ggagctccaccgcggtggcggccgaggtactgtgggttctgagtcaaggatcccagtgctgccaggaaccagcagtcagctgcgcctccttgttggatgtcaaatctgcttatatcatccaggatgaagtgaggaggaccccctggtagatcctgtggccgcttccatatcacattggagaggcgtttttcctggagcagcttctggcctatggaagaatctgctgcagggaatgtctcatccttaaacgtccggcccatgctcaggcagtgatcccgcaaggtggtaaagtcctggtctttgaacttgatgatggaggtctccactgaaggctcctggtaatacgccatgactctccttagaagacttccgaggtcctttcctgtttcctaggcaggtgtgtcttgatggaaggaggggagacgggcaggttccacaggctcttcaggttaaaanagtggtgggaggagnactggccagaaggaggaaaagcatggcccggcccgctctagaactaagtggatccccccgggctgcaagaaattcgatatcaagncttatcgatacccgtccgacctcgaagggggggcccccgtacccanctttttgttnccttttaatgagggggntaaatgcccccttggcggtaatcntgggtccattaancttnttttcctgtggggnaaanttgttnntcccgcttnacaaatttccccacnaccataacnaancccnggganncatttnaantngnnaaagncttgggggggcccttantggnntggganctaantccccatttaanttngcggnttgggncnttnnctgcccngntttttncnaan

SEQ ID NO: 5668 - DNA, 848 bp, Homo sapiens
  misc_feature 694, 700, 705, 707, 718, 736, 754, 756, 761, 763, 774, 780,798, 801, 803, 820, 827, 830, 831, 841, 845, 846, 847: n = A,T,C or G
ggcgaattggagctccaccgcggtggcggccgaggtacgcgggattgtgaccccgttgcatgaagtcaggtgtggagttttccacttgtggtatcatgttgctgctgctcaagaagtttctgattttggaacattttggattttggattttcacattagggatacctaatgtgagagagactaggccgcacagctccctgcactgctgcctggtggtctgaactggggctctgattgttttctgaggggccttttgtgtgccttctgtgaaggggcctgcattgagtgagtctacactgttgggctcagtgtggagcatacctggttgagccaccagagtttgacagcttaagggcagcctgtcattttatctacagagtatattaatgataaagatctttggaaacttacttaaaaacaaaatgaaacatttcatgatggaggatttcaaacagaaaaatagaataatttagtgaactcccatcactttagctttacagttaattctaggctccccctacctcagatgaattttaaaagccaaaatcccaatttttcacttttattgggaaaaatgcctttcaatacataatctcttaacaagaataattggacctcttttattaaaccttattttttaaagttgaaagacttgacccacccagcctttcctaaattcctggaattttcatantttctnggggntngaaagcctgantttttttaaaaaattggnggggaataaattgatttntntttancnccaaaaacttnatttgnatttgacttgaaaaaaanggntntttgctttttggccccnaaaaatnggnnaatccccctncccnnng

SEQ ID NO: 5669 - DNA, 780 bp, Homo sapiens
  misc_feature 666, 668, 677, 683, 698, 704, 742, 757, 769, 774, 775, 780: n = A,T,C or G
ggagctccaccgcggtggcggccgaggtactgtgggttctgagtcaaggatcccagtgctgccaggaaccagcagtcagctgcgcctccttgttggatgtcaaatctgcttatatcatccaggatgaagtgaggaggaccccctggtagatcctgtggccgcttccatatcacattggagaggcgtttttcctggagcagcttctggcctatggaagaatctgctgcagggaatgtctcatccttaaacgtccggcccatgctcaggcagtgatcccgcaaggtggtaaagtcctggtctttgaacttgatgatggaggtctccactgaaggctcctggtaatacgccatgactctccttagaagacttccgaggtcctttcctgtttcctaggcaggtgtgtctgatggaggaggggagacgggcaggttccacaggctctcaggttagagagtggtggaggagactggcagaggaggagagcatggccggccgctctagaactagtggatcccccgggctgcaggaattcgatatcaagcttatcgataccgtcgacctcgagggggggcccggtaccccagcttttgttccctttaagtgagggttaattgcgcgcttggcgtaatcatgggtcatagctgtttcctgtggtgaaaatggttntncgctcacantttccncacaacattaccaanccgggnagcattaaagtgtaaaagcctgggggtgccttaatggngtgagcctaacttcncatttaattggnggttnngctcn

SEQ ID NO: 5670 - DNA, 789 bp, Homo sapiens
  misc_feature 627, 635, 728, 729, 736, 738, 742, 756, 757, 763, 786, 787: n = A,T,C or G
atagggcgaattggagctccaccgcggtggcggccgaggtactgtgggttctgagtcaaggatcccagtgctgccaggaaccagcagtcagctgcgcctccttgttggatgtcaaatctgcttatatcatccaggatgaagtgaggaggaccccctggtagatcctgtggccgcttccatatcacattggagaggcgtttttcctggagcagcttctggcctatggaagaatctgctgcagggaatgtctcatccttaaacgtccggcccatgctcaggcagtgatcccgcaaggtggtaaagtcctggtctttgaacttgatgatggaggtctccactgaaggctcctggtaatacgccatgactctccttagaagacttccgaggtcctttcctgtttcctaggcaggtgtgtctgatggaggaggggagacgggcaggttccacaggctctcaggttagagagtggtggaggagactggcagaggaggagagcatggccggccgtcttggagaaagagcagtgctggtgtctgctctccccgcgtacctgcccgggcggccgctctagaactagtggatcccccgggctgcaggaattcgatatcaagcttatcgataccgtcnacctcganggggggcccggtacccaacttttgttccctttagtgagggttaattgcgcccttgggcgtaattcaatggccatagcttgttttcctggggannaaattgntntccncttcacaatttccnnaacaancataaccgaacccggggaggagnnaa

SEQ ID NO: 5671 - DNA, 929 bp, Homo sapiens
  misc_feature 3, 7, 8, 9, 10, 11, 12, 13, 14, 15, 16, 17, 61, 76, 78, 94,219, 234, 259, 310, 338, 394, 413, 421, 428, 456, 459, 480,506, 512, 513, 521, 522, 536, 543, 563, 584, 587, 599, 607,612, 617, 621, 625, 626, 647, 666, 668, 676, 683, 685: n = A,T,C or G
  misc_feature 687, 699, 703, 713, 717, 720, 723, 732, 740, 750, 752, 756,769, 777, 785, 794, 795, 801, 815, 819, 820, 825, 826, 840,841, 844, 845, 847, 870, 877, 880, 889, 901, 907, 913, 919,920, 922, 923, 929: n = A,T,C or G
agnaggnnnnnnnnnnntactccttagggtaggttggattggagctccgcgcggtggcggncgtccgggcaggtcncngggagcagggaaccgntcagatacccttccacaccgtggaaactttgttcttaccctcttgacgaaaaatcttgctgctgcccactctttgggtccacaccacctttaagagctacaacgatcaccacgacagtctgcggnttcattcttgaagtnaagcgacaccacaaacccaccaganagggaggaactccagacacattttgaaggaacaaattccagacacaacatntttaacagcttgtaacacacacttgtgnaaggtccaccggctttattcttgaagccaggcggagaccacggaaccctttggaangggaaaccaacttttgganacaagcanggacgtngaagaactttcttaccttgctcaacttnaanaaattaatttttccgccaccnaaacccaattgggcccaccgtttttngggggnngccttaannaacctttgggggcncgggttnttaaaaaacttaaggtgggnattccccccccggggcttggnaanggaaattttccnattttttnaaagnttttnttcnaatnnccccgtccgaaacctttgganggggggggggggccccggnanccccaaanttttttngntncccttttaaagngganggggttaaanttgnccnccncctttgggncgaaaaancaatggggcnanatgncttgttttccctngggggggnaaattttnttttttccnncttcanaaaatttccccccnaaannattanncgaggcccgggggnncanntnaaaggggtaaaaagcctgggggnggccctnaanggggggggnggcctaaccccnaatttnaaattnggggtnngnnccctcn

SEQ ID NO: 5672 - DNA, 822 bp, Homo sapiens
  misc_feature 567, 580, 642, 655, 703, 720, 723, 732, 739, 756, 762, 783,803, 811, 813, 821: n = A,T,C or G
gaattggagctccacccgcggtggcggccgaggtacgcggggtccacagcggcttccttgatccttgccacccgcgactgaacaccgacagcagcagcctcaccatgaagttgctgatggtcctcatgctggcggccctctcccagcactgctacgcaggctctggctgccccttattggagaatgtgatttccaagacaatcaatctcgagcggccgcccgggcaggtactgagctccacaaacgtggccatggttggtgcggaaatgattctgagtgagcaggtagaagtctcacgtcctgctgtgtccagagttggttccttccagagggctcgtggtctcgctggcttcaagaatgaagtcgtggaccttcacagtgtgtgttacagctgttaaagatgttgtgtctggagttttgttccttcagatgtgtctggagtttctcccttctggtgggtttgtggtgtcgctgacttcaagaatgaagccgcagactgtcgtggtgatcgttgtagctcttaaaggtggtgtggacccaaaagagtgagcagcagcaagatttttngtcaaagagggtnagaacaaaagttttccacgggtgtggaaagggtatcttgagccggtttcccttgcttccccngcgttaccttggnccggttctagaactaagtggatcccccccgggcttgcagggaatttcnaatatcaaagctttatngantacccgtcnaccttcnagggggggggccccggnaccccnaactttttgtttccctttagntgaaggggttaatttgcgcnccttgggngntaattatng

SEQ ID NO: 5673 - DNA, 1011 bp, Homo sapiens
  misc_feature 2, 6, 7, 10, 11, 18, 20, 21, 292, 306, 328, 409, 439, 473,477, 494, 495, 502, 510, 511, 526, 533, 537, 541, 544, 557,566, 569, 575, 577, 584, 585, 588, 605, 607, 615, 620, 627,639, 641, 645, 649, 654, 659, 682, 687, 688, 699, 726: n = A,T,C or G
  misc_feature 729, 768, 773, 784, 788, 795, 813, 839, 844, 846, 890, 891,896, 910, 915, 919, 925, 934, 935, 946, 949, 950, 956, 968,978, 982, 983, 984, 986, 989, 1000, 1003, 1010: n = A,T,C or G
gntagnnaannatgttantnnactcctatagggcgaattggagctccaccgcggtggcggccgaggtactgtgggttctgagtcaaggatcccagtgctgccaggaaccagcagtcagctgcgcctccttgttggatgtcaaatctgcttatatcatccaggatgaagtgaggaggaccccctggtagatcctgtggccgcttccatatcacattggagaggcgtttttcctggagcagcttttggcctatggaagaatctgctgcagggaatgtctcatccttaaacgttncggcccatgctcangcaggtgatcccgcaaggtggnaaagtcctgggtctttgaaacttggatgatggaggtctcccactgcaaggctcctggttaatacgccatgactctccttanaagacttcccccagggtcccttcttcctgntatcctaagggccagggttgttgttcatgaatgngaangaagggggaagaccggnncaaggtntcccaacnnagggcttctttcaanggtttantaancaanttngtggggagggaanaactttggnccngtaagngnatgggannaanccaatgggggcccgggncnccgccttnttaanaaaaacnttagttggggantncccncccnggggncttgnaaagggaaaatttccgaaatatntaaanncccttttattnggattaccccgggccgtaacctttcgnaanggggggggggcccccgggttaccccccaaaacatttttnggttnccccttttaanttgnagggggntaaatattggcgcccgcntttgggccgttaaatttaaatggggncatanangcctgggtttaccttgtggggggaaaaaattggggaaattccgnnttcancaaattttcctcancaaancttncccaanacccggggnngcctaaaaaanggnntataanggccctgggggngggccttaantgannntnggngcttaactttnaanttttatnt

SEQ ID NO: 5674 - DNA, 848 bp, Homo sapiens
  misc_feature 562, 603, 657, 738, 740, 753, 760, 773, 783, 785, 798, 807,809, 826, 842, 843: n = A,T,C or G
gaattgggccctctagatgcatgctcgagcggccgccagtgtgatggatatctgcagaattcgcccttagcgtggtcgcggccgaggtacgcggggacctgctgtgctcttgcttgcacagtgtcctggagctggacctggctctgggtttccaggaagcagtttgactaaaggcagcaagctgcttcctctgctgtctgagataccagaaccatacagaaagacatgcaaagcacaccaaattgtctacagcttaagatcaacaaaaatcctttttcattaattataaattcacagagaatataaacaatgatccttattatcccctttactggctcacacagggagagagaagccaaaagcccaactgattcccaatggcgaagattgagaaaaacgctcccacgatggaaaaaaagccagaactgtttaacatcatggaagtagatggagtccctacgttgatattatcaaaagaatggtgggaaaaagtatgtaatttccaagccaagcctgatgatcttattctggcaacttacccaaagtcaggtacctgcccggncgggccgtcgaaagggccgaaattccagcacactggcgggncgttactagtgggatcccgagctcgggtaccaaagcttgggcgtaaatcatggncatagcttgttttcctgtggtgaaaattgttattccgcttcacaaattcccccacaaacataccgagcccggaaagccttnangtggtaaaagccntgggggngccctaatgagtngagcttaacncncttttattggcgntgcgcctcntngcccggttttttcaatncggggaaaacctgggnnggcct

SEQ ID NO: 5675 - DNA, 794 bp, Homo sapiens
  misc_feature 607, 632, 666, 686, 716, 772, 775, 793: n = A,T,C or G
tagggcgaattggagctccaccgcggtggcggccgaggtaccctttctgcagaaagtataaaaatggccttgctaaggaatttaaatttacattcaagtgctatttctttacagcaccggaaaacaagcatttcaaacaagacctactatacaatgacagtaattaagataatgtgatactggtggaggaataagcacgtagacaaatcgaacataatagagaacccagaaataaacccctacaaatatatacgcaactattttttaacaaagattcaaaagcaattcagtggagaaaaaatgaccttttcaacaaataatggtggagcagttgaacatctacagcaaaaacaaagctcaacttcaacctcacacctgatataaaacatgaataaaaaactatgaaacttttagaaaaataaataaataaaccttagggatctagggccaggcaacatgtttttatacttcacatcaagatccataaaataaaaattaatacattggacaataaattaaaaacctttgcactgcaaaagactgttaaaatcattcaaagttatagagcgagcgggagaaaatccaccacgtacctgcccgggcgggncgctctagaactagtggatcccccnggctggcaggaattcgatatcaagcttatcgatncgtcgacctcgagggggggncccggtacccagcttttggttcccttaagngagggggtaattgggccccttggcggtaatcatgggccaagctggtttcctggggnggnaaattggtaatcccctcnc

SEQ ID NO: 5676 - DNA, 851 bp, Homo sapiens
  misc_feature 3, 8, 13, 15, 19, 28, 42, 45, 48, 58, 62, 65, 70, 72, 73,74, 75, 76, 79, 81, 83, 89, 95, 97, 101, 104, 108, 112,114, 115, 118, 119, 121, 122, 123, 126, 127, 133, 136, 137,140, 141, 142, 146, 147, 149, 150, 152, 163, 167, 173, 179: n = A,T,C or G
  misc_feature 187, 194, 195, 196, 218, 226, 233, 243, 252, 385, 499, 508,520, 526, 540, 558, 559, 574, 576, 590, 601, 606, 645, 650,658, 664, 665, 671, 672, 674, 679, 691, 693, 702, 706, 716,727, 732, 734, 735, 736, 739, 744, 767, 770, 774, 775: n = A,T,C or G
  misc_feature 779, 781, 782, 783, 786, 789, 803, 808, 809, 819, 824, 840,846, 848: n = A,T,C or G
ttngtttngctantngganctccaccgnggtggcggccgacnggncangtttcttatncccntcntaagnannnnngcngncnttgtgntcaacngnggcnccnaagngacnannaanngnnncannccctancannctnnnagcnntnnanttttgaaacancaanggcttntaccanccccttanaccaccnnntgcctgcatgacctcccaggcnttacaaanaacgctnctttttcacngatcatatnacctttatcatctttggggaaaaagtcatccccagtcttgaatccctgtggccagtgaataagatagacgtccagatagctcagcttcaggtccttgagggtcttctcaaaggctttcctcacaaggggtctntcaaagaaagtgggccacaccttgctgacgatgaacaggtcctcccgcatcacagccttctcttggatcttctcttggatggcttctcccacctcatgttgattctcataaaantaggcacantccatgtggccnatattntgcatcaatggccnccttaaccggcttctttnnactttgccgagaaananaccttcaaaatgtncaaggcccaanaatgnggcatcttttgggcttttttgtacccccgcccggacaanatttncccttaanaccaanngggtgnntnagccngcgcccccaatncnttggggttncccnatgggggcgnggaagggtttnctccntnnnggntgccngagggcccgtgttcccattgganttnggtnnaacnannntgnggncacaaacaaacggnaaaanngcactttttntttgnaatttttggggggatncccccncntgg

SEQ ID NO: 5677 - DNA, 805 bp, Homo sapiens
  misc_feature 4, 512, 541, 578, 591, 605, 607, 612, 625, 644, 662, 675,678, 708, 717, 718, 722, 724, 729, 730, 744, 748, 756, 766,767, 779, 796, 798, 801, 804, 805: n = A,T,C or G
tatngggcgaattggagctccaccgcggtggcggccgaggtacccaagcatcatgtgaacactgtgcaaatgctatacagagagtcacggcagcttaaccagatggagaacaaaaacacagcagcgcacaacgaatgagtaagtaaaatccctatgaatcaattcactcaggcataatactctaaatccttaaaaaggggggaaaaaaagaatgtaacagaaatctatttccacaatacacccaagggtaactaatgtaactaactggctaatgacaatacaagattaaaataaacaccaaaacccactatacctggattcatattacttagtcgagcggccgcccgggcaggtacaacgacccaacccaagaatctatcattttgaagccaaagatggccttagaggtgggtgactacaaaatcaatctcaagctcatggataaccagaataaagaccaagtgaccaccttaaaggtcagcgtgtgtgactgtgaaggggccgccggcgtntgtaggaaggcacagcctgtcgaaagcangattgcaaattcctgccctttttggggattcttgganggaaatcttgctntgctaaatctgaancngctgntcttgctgtttantcgggaggatagcggtggncaaaaagccctttactgnccccaaagggttnacncccggggacaacgttttattacttttgganaaccaaggnngggngnggaannaggacccaaggacntttntctttgancccagcttgnnccaagggggggnggacggttccgcccttntnatngcnn

SEQ ID NO: 5678 - DNA, 862 bp, Homo sapiens
  misc_feature 450, 557, 627, 642, 655, 664, 674, 678, 694, 707, 714, 723,727, 740, 745, 749, 754, 765, 777, 779, 781, 785, 787, 788,790, 794, 795, 806, 815, 821, 826, 852, 856: n = A,T,C or G
tccaccgcggtggcggccggccatgctctcctcctctgccagtctcctccaccactctctaacctgagagcctgtggaacctgcccgtctcccctcctccatcagacacacctgcctaggaaacaggaaaggacctcggaagtcttctaaggagggtcatggcgtattaccaggagccttcagtggagacctccatcatcaagttcaaagaccaggactttaccaccttgcgggatcactgcctgagcatgggccggacgtttaaggatgagacattccctgcagcagattcttccataggccagaagctgctccaggaaaaacgcctctccaatgtgatatggaagcggccacaggatctaccagggggtcctcctcacttcatcctggatgatataagcagatttgacatccaacaaggaggcgcagctgactgctggttcctggcancactggggatccttgactcagaacccacagtacctcggcccgctctaagaactagtggatccccccgggctggcaggaattcgatatcaaagctttatcgataccgntcgaccctcggagggggggcccggtacccaagcttttgttccctttagtgaggggttaattgcgcgcttnggcgtaatcatgggncatagctggtttncttgtgtgnaaatttgttnttcngcttcacaattccacnccaacattacgancccgggngcattaaanttgnaaagcctgggggngcctnatgnggggngctaacttccntttaaattgggntngngctnanntngccnnttttccagacngggaaaacntgttcntgccngcttgattaaattgaaattcgcccancccncggggg

SEQ ID NO: 5679 - DNA, 852 bp, Homo sapiens
  misc_feature 610, 645, 665, 697, 703, 705, 721, 725, 732, 733, 738, 753,762, 767, 791, 793, 795, 798, 813, 836, 840, 845: n = A,T,C or G
tccaccgcggtggcggccgcccgggcaggtactgaagggctgcatagcacagtttagaaattaggctttggtgccagacactgcaggttcaaatctcagcacatccattaaactagctacatgacttatttctgtgctgtttcctcatctgtaaaatgagaaaaactgctacttcatgggcttactgtgaagggtaaatgagtaaaaacacaaacaacatactgaacattgatggatctatcctggtaataaaaacaaatgctaatcattattattataattgttaatagtgatattattttaggctttgtataaatttctgaggatataaagtccaacaggccgggcatggtggctctcttttaacttgagggtcgcttttaactactagagctccatttctcctcttaaatgagaaaggatttcatttcttttcttttaaatctcctatttcttcacacagttcaatgtaaagagcaataaatgttttaatgcctaacctggagggaggccgtggtttctgttaatcatactttccttgttccttttcatttcccaggtatcacccatcttttacctaggagagtagcatggagctgggataaagccntagggggtcataaagccgcctcagacctcataatnatcagccgggataagacatnggctgcctttgcttggcgagccaccgcccggnccccgngntaccttgggcccggtnttanaactaannggatnccccccgggcttgcnaggaattcngaatncaagccttattgatacccgccgancntngangggggggccccggtncccacccttttgttcccctttantggnggggntaaatgg

SEQ ID NO: 5680 - DNA, 848 bp, Homo sapiens
  misc_feature 651, 656, 666, 669, 703, 732, 740, 749, 759, 788, 795, 798,814, 822, 830, 834, 839, 842, 843, 846: n = A,T,C or G
ggagctccaccgcggtggcggccgaggtactgattggggaagtgataaatgttcatgaaatcttcacaatttatgttcagagattgcagtaaagacaggcgtaagaaattataaaaatattaatgtggggaattaagaaatgtccatgaaatcttcacaatttatgttcttctgccatggcttcagccagtctctctgttgggggtccctgaattcctgcaacagctcagaaactagaggctgagaaagggagtcactcaaaccttgaatccctgtggccagtgaataagatagacgtccagatagctcagcctcaggtccttgagggtcttctcaaaggctttcctcacaaggggtctctcaaagaaagtgggccacaccttgctgacgatgaacaggtcctcccgcatcacagccttctcttggatcttctcttggatggcttctcccacctcatgttgattctcatagaaataggcacagtcaatgtggcgatattctgcatcaatggccaccttcaccgcttcttccactttgccgagaaagagaccttcaagtgcccaggcccacaatgggcatcttggcttttgtccttgcccgggcggcccgctcttagaactagtggatccccccggctgcaggaattcgatntcaancttatcgatnccntccacccttcgagggggggggccccggtacccanctttttgttcccttaatggaggggttaanttggcgcncttggcgtnaatcatgggncaaagcctggtttcctgtgtgaaaaattnttatccnctnacaatttcccaccaanattccaanccgggganccanaaaangtnnaancc

SEQ ID NO: 5681 - DNA, 1162 bp, Homo sapiens
  misc_feature 8, 11, 13, 14, 15, 16, 17, 18, 20, 22, 23, 24, 25, 27, 28,31, 32, 35, 36, 37, 38, 44, 48, 52, 53, 54, 55, 57, 59,61, 62, 63, 64, 66, 70, 71, 73, 74, 75, 78, 79, 81, 84,92, 95, 97, 98, 100, 101, 102, 105, 107, 108, 111, 117,119: n = A,T,C or G
  misc_feature 120, 126, 129, 152, 154, 156, 318, 355, 418, 447, 549, 560,638, 656, 670, 672, 702, 703, 707, 709, 712, 738, 739, 775,802, 816, 821, 828, 854, 863, 876, 903, 905, 907, 916, 923,925, 936, 941, 948, 971, 975, 988, 995, 1014, 1032: n = A,T,C or G
  misc_feature 1036, 1037, 1042, 1050, 1052, 1053, 1056, 1057, 1058, 1063,1064, 1078, 1093, 1105, 1108, 1121, 1123, 1141, 1142, 1143,1146, 1157, 1158, 1162: n = A,T,C or G
ccccgccngtnannnnnnantnnnntnnatnnttnnnnttattnatanatgnnnncntncnnnnantatnntnnntanntnagnagagttanatntnngnnnggngnnctntcagcnanntggaantgnagctccaccgcggtggcggccgnangnactgagctccacaaacgtggccatggttggtgcggaaatgattttgagtgagcaggtagaagtctcacgtcctgctgtgtccagagttggttccttccagagggttcgtggtctcgctggcttcaagaatgaagccgtggaccttcacagtgtgtgttacanctgttaaagatgttgtgtctggagtttgttccttcanatgtgtctggagtttctcccttctggtgggttgtgtggtgtccgctgacttcaagtaatgaancccccagactgtccgtggttgatccgttngtatgcctcttaaaggtgggtgtgggaccccaacaggagttgagccaagccggcaaagaattttttccgttcaaggaggggtaaagaaccaaaagtttccancgggttgtggnaaggggtattttgagccggttccccttgcttccccgcgtacccttgccccggggccggcccgcttcttagaaacctanttgggatcccccccgggncttgcaagggaaantnccgaatattcaaaagccttaatttcggaanncccngnacnaaccctcccagggggggggggccccnngttacccccaaacctttttttgtttccccttttaangaggagggggtttaaatttggcgcccnctttgggccggtanattcnatgtgancaataagcctgggtgtccctgttggngaaaaaatnggcttatttccgnctccccaaatttcccaccaccaaccantntncgaagcccnggggagncnattaaaaggtngtaanaagcccntggggggtgccctaaattggagntganccttaaccttcancattaantttggcgattggcgccttnacatggccccgctttttncaanntccgngaaaaccntnntcnnnggccnncctgcattttaatngaaaattcggcccancccccggggganaangccgatttgcccnantttggtgccctctttccnnnttncctgggataanntgan

SEQ ID NO: 5682 - DNA, 845 bp, Homo sapiens
  misc_feature 642, 688, 718, 739, 757, 774, 783, 794, 797, 814, 824, 830,843, 844: n = A,T,C or G
gggcgaattggagctccaccgcggtggcggccgcccgggcaggtactagcacttgtgaccaacagctagtcttgctttcaacagctagtcttgctttccctgatcgtagatccctactaaaagctcttgaaagtgtgcatatgcaggctacctaatgatttaacggaggatcaagatggttacactgcagagaaacaggagggatagggcatatgccctttgtccagcaagacagacaaaaactaggaacttgaattctcttctctggattcctgtatctggagccaaggccaaggatcagttcttctagaaagttccctcctgtgtgtgtgtgtgtaaatgtgtgtgaatgcagtcataacttccctgccaaaattcattgccaaaaattttgtgatttgaagcaggccttacctgttaatgcaaatttgattctcaaatcctaagagtttccaaaggttgagtgaagtgagatgagactcttagttgaagatccagatgcttcctgttgctatctagatgctaccaaaactcccagcacaacaaaagtatatgaaagagaggctctaggttcatgaaatgttagagttggaaaaaatgggccctttgggggtcttcttattctacctcctcattttaaangaaatgcaagtggggaaatggatgctcaaaactgactttgcctganaaggtgaaagggctagtggagaacccaaancccctgattcctaagtctagngcttttccttcccggggnggacccctctttgtttnttccccctnttttgggcctnggncccgggattggggggtnggagttccancagggnggtctgggttcannt

SEQ ID NO: 5683 - DNA, 859 bp, Homo sapiens
  misc_feature 547, 556, 633, 676, 695, 709, 717, 728, 733, 739, 747, 749,762, 776, 785, 792, 798, 803, 807, 813, 816, 832, 836, 846,848: n = A,T,C or G
ggagctccaccgcggtggcggccgaggtactgattggggaagtgataaatgttcatgaaatcttcacaatttatgttcagagattgcagtaaagacaggcgtaagaaattataaaaatattaatgtggggaattaagaaatgtccatgaaatcttcacaatttatgttcttctgccatggcttcagccagtctctctgttgggggtccctgaattcctgcaacagctcagaaactagaggctgagaaagagagtcactcaaaccttgaatccctgtggccagtgaataagatagacgtccagatagctcagcttcaggtccttgagggtcttctcaaaggctttcctcacaaggggtccctcaaagaaagtgggccacaccttgctgacgatgaacaggtcctcccgcatcacagccttctcttggatcttctcttggatggcttctcccacctcatgttgattctcatagaaataggcacagtcaatgtggccgatattctgcatcaatggccaccttcaccgcttcttttactttgccgaagaangagaccttncaagtgcccaggcccacaatgggcatcttggcttttgtcctgcccgggcgggccgtctaaaactagtggatcccccnggctgcaaggaattcgatattcaagcttaatcgataccggccnaaccctcgagggggggggncccgggtaccccanccttttgnttcccttttantggangggttnaattggcncncttgggcggtaanccatggggcattancctggtttnctggggngaaaantgttntccnccttcncantttccccacaacaatnccancccgggagcntnaaaagggttaa

SEQ ID NO: 5684 - DNA, 1077 bp, Homo sapiens
  misc_feature 3, 5, 6, 7, 10, 12, 13, 14, 16, 17, 18, 20, 22, 23, 26, 28,29, 30, 31, 33, 34, 37, 38, 39, 44, 47, 50, 54, 57, 58,59, 62, 63, 64, 67, 69, 70, 72, 73, 75, 76, 77, 81, 83,93, 97, 491, 561, 714, 758, 761, 797, 809, 812, 814, 818,840: n = A,T,C or G
  misc_feature 842, 858, 889, 891, 897, 900, 927, 937, 943, 952, 955, 966,983, 984, 986, 992, 999, 1012, 1013, 1019, 1020, 1022, 1023,1031, 1032, 1033, 1052, 1053, 1064, 1068: n = A,T,C or G
gcncnnnctnannntnnntntnnatntnnnnanntannnatatntantgnttgnacnnntannnttntnntnnannntatngntgggggattntagngggggggtggttaggcgaattggactccaccgcggtggcggccgaggtacgcgggggagcagggaaccgctcagatacccttccacaccgtggaaactttgttcttaccctcttgacgaaaaatcttgctgctgctcactctttgggtccacaccacctttaagagctacaacgatcaccacgacagtctgcggcttcattcttgaagtcagcgacaccacaaacccaccagaagggagaaactccagacacatctgaaggaacaaactccagacacaacatctttaacagctgtaacacacactgtgaaggtccacggcttcattcttgaagccagcgagaccaacgaaaccctctgggaagggaaccaactctgggacacagcaggacgtgnagacttctacccgctcacttcagagttcattttccgcaccaaccatggcccacgtttgttgggagctcantacaaaagcccaagatgcccattggtggggccctgggcacttgggaggtctcttctcgggccaaaagtggaaagaaagccggtgaaaggtggccatttgattgcagaaatatcggccaccattgactggtgcctatttttctatggagaaatnaacagcttcttagaaactaagtggggatcccccccggggcctgncanggaaatttcccaattattcaaagcctttattcgaantacccggtccgnacncnttcnaagggggggggggccccggggnanccccaagcttttttgnttccctttttaagtggaaggggtttaaattngngccgcnttngccgttaaatcattgggtccataagcntgtttttccntggggngggaaaaantgnttaattcccgntttaacaaatttccccnncnaacatnaccgaancccgggggggccnnttaaanngnnaaaagccnnngggggtgccctaattgagnngagcttaaccntccnattttattg

SEQ ID NO: 5685 - DNA, 1126 bp, Homo sapiens
  misc_feature 3, 7, 11, 14, 15, 16, 17, 19, 21, 24, 27, 28, 32, 34, 36,37, 38, 41, 42, 44, 45, 46, 48, 49, 50, 51, 52, 54, 55,57, 58, 60, 61, 63, 64, 65, 66, 67, 68, 69, 71, 78, 89,91, 92, 98, 100, 555, 570, 590, 602, 638, 650, 672, 679,701: n = A,T,C or G
  misc_feature 726, 736, 739, 740, 757, 768, 770, 774, 788, 795, 808, 812,835, 836, 853, 857, 863, 866, 881, 890, 892, 909, 925, 931,932, 950, 957, 959, 994, 999, 1001, 1008, 1009, 1013, 1027,1037, 1038, 1043, 1062, 1069, 1070, 1083, 1086, 1096: n = A,T,C or G
  misc_feature 1097, 1098, 1099, 1121, 1124: n = A,T,C or G
tanatanatgnatnnnnananatnttnntatntntnnntanntnnnannnnntnnannanntnnnnnnntnttattgnggggagtattntnngggggngntggtatatggcgaattggagctccaccgcggtggcggccgaggtactgtgggttctgagtcaaggatcccagtgctgccaggaaccagcagtcagctgcgcctccttgttggatgtcaaatctgcttatatcatccaggatgaagtgaggaggaccccctggtagatcctgtggccgcttccatatcacattggagaggcgtttttcctggagcagcttctggcctatggaagaatctgctgcagggaatgtctcatccttaaacgtccggcccatgctcaggcagtgatccccgcaaggtggtaaagtcctggtcttttgaacttgatgatggagggtctccacctggaaggctcctggtaataccgcccatgactctcctttagaagacttccgaggtccttttcctgtttcctaggcaggtgttgtcctgatgggagggaagggggaagacnggccaggtttccacnaggctctcaaggtttaaaanaagtggtggganggagaactgggcaagaaggaagggagaagccatggncccggcccggantctaagaaacctaagttggganccccccncggggcttggcaaaggaaattncggataattcaaagcctttattcgnattaccccgnccnnacccttcaaaggggggnggggccccccngnatanccccaacccttttntgttttnccctttttaagtngaanggggttttaaaatttggccgccnncctttggccggttaaantcanttgggngcnattaggcctggtttnccctggggntngaaaaaaattggtttanttcccgcttcacaaantttccnncaccaaacaataccgaancccgggnangccataaaaaggtgttaaaaggccctgggggggtngcccntnaatgganntggnccttaaccttcacntttaaattgnngtttnggccttcactgggcccgcntttcccnntccgggaaaaacnctnttggtgcccnnnntgcatttaaatgaaattcggcncancg

SEQ ID NO: 5686 - DNA, 886 bp, Homo sapiens
  misc_feature 464, 497, 554, 566, 578, 582, 591, 596, 606, 622, 627, 633,639, 648, 655, 657, 683, 689, 694, 707, 717, 728, 732, 739,758, 759, 777, 787, 788, 789, 791, 796, 804, 805, 806, 819,840, 882: n = A,T,C or G
gaattggagctccaccgcggtggcggccgcccgggcaggtactgttgattacctgctacatccttcaaaatcatctccttttgcttcttgacatgaccactctcctacatctgtcatctgatagtgtctttgctgtagcacccctgcttttttttcttcccccatgccactttaagattatattctaaatgccctctagaggatcagaatctctgggcctaatctctctctctaggctctgtatctaaatgcctgtgatattcccaattcagtgtgtcgggacatctgggacttcacaaactcatccaatttccccgagagtctttttctctcttaaatgttttttttttttttgagacagagtctcactctgtttcccaggctggagtgcagtgacatgatctcggcttactgcaacctccgcctactgggttcaagcaattctctgcctcaagtggtcccangtaagctgggaattacaggcacccggccaccanacctgggctaatttttgggatttttaaagaaaaaaacagggttttaacccgggttancccaggaaaggnttttaaacctcntganccttggggnaatgncccccccctnggggtcccccaaaaanggggnggggantaaccnggggggggngcccccnantgcccgggcccaaaaatttttttttntttccnggggnggggtttaacccnaaacctggantaaaaaggggnaaanaaagggntaaaaatttttttttattnnacggtttttttattttanaaaattttcnnnanccccngggtgggnnntttccctttttgnaaggggaaaaaaaaggccaanttggtttaattggccccaaaaaaaaaaaaaaaaaaaaaagtncccc

SEQ ID NO: 5687 - DNA, 833 bp, Homo sapiens
  misc_feature 154, 158, 163, 235, 335, 478, 559, 570, 591, 679, 725, 729,739, 740, 743, 748, 750, 752, 765, 774, 785, 789, 806, 833: n = A,T,C or G
gaattggagctccacccgcggtggcggccgaggtactttttttttttttttttttttttggacttgattcaaaatttatttataaaggaccatttcgggcgaacttcccggaacaaagagggactgatccaaggtgaccccgtgttcccacctnttanaacanaccctgttgcccatgtcaggagaggtgagaaaggtagtacattagtgccccagcaccttttggattcctganaaaatggacatttgtgtcgtggagtctgtgattttccatctggctttgacttgcttctgctgacttctttggctccacccttgactggaaggatggcctngtgggacacacagatcagagttatgctaacgaggctgccgagtgccagtttgcctgctggggacaccacactctaaaaatcctgccgggcaaattgtcaaaatccggttcccatccagtcccttgagagtttccctgtaaggnggttcagctttttttgaactccaaggacaatgccattcaagagcttgacaaagcagtgggcaaactccttgtgcacttttnccgtgactctntttttccttccctgggataangcatggtttatctggctgcttgggatgggaaaagaacgatcattgccatccatcatgctcaaaacctttgggattctttcctttaaangccaccttgcccacttggcctccttttatccctttttcctttacanaaangttcaccaannggncccgngntnccttgcccgggcnggccggttnttaaaaactangggntcccccggggctggcanggaatttcgattttcaaagctttttcn

SEQ ID NO: 5688 - DNA, 829 bp, Homo sapiens
  misc_feature 652, 676, 768, 781, 785, 794, 795, 800, 801, 804, 808, 811,820, 822, 823, 828, 829: n = A,T,C or G
gaattggagctccaccgcggtggcggccgcccgggcaggtacgcgggggaaagtgtgtagcacctccaccttctctctctctctccctctccctctcctgccagccaagtgaagacatgcttacttccccttcaccttccttcatgatgttaccattggaatgacatactgcatcctatagttataccatccactctgaaatcaatgtgaatttaacttcagttccatacagaaactttttttccacaggagtttaagcccaagctggagtgcgatggtgcaatcccaactcactgcaacctctgcctcccaggttcaagctattttcctggcttagcctccggagtagctggaattacagatgtgcgcccccatgaccagtaagaaacggttgaactggatgcaatttttatcacaagcttgtgtaagactgcctctgtccctcctctcacatgccattggttaaccagcagacagtgtgctcaggggcgttgccagctcattgctcttatagcctgtgagggaggaagaaacatttgctaaccaggccagtgacagaaatggattcgaaataccagtgtgtgaagctgaatggatggtcactttcatgcctgtcctggggatttgggcaccctatgcgccctgcagaggnttcctaaaaagtaaaagctcttanagggccgccaaaattggcaatagaagccgggttccacccatattggattcttgcccatgttttaccaataatgaaggagcaaggttggactnggccatccccaanccangaattgcanntggcnngtngtgnaanaaaagaaanannttttnn

SEQ ID NO: 5689 - DNA, 833 bp, Homo sapiens
  misc_feature 497, 564, 604, 635, 655, 675, 680, 688, 692, 704, 713, 746,752, 755, 769, 781, 789, 792, 813, 814, 828, 829, 830, 832: n = A,T,C or G
tccccgcggtggcggccgaggtactgtgggttctgagtcaaggatcccagtgctgccaggaaccagcagtcagctgcgcctccttgttggatgtcaaatctgcttatatcatccaggatgaagtgaggaggaccccctggtagatcctgtggccgcttccatatcacattggagaggcgtttttcctggagcagcttctggcctatggaagaatctgctgcagggaatgtctcatccttaaacgtccggcccatgctcaggcagtgatcccgcaaggtggtaaagtcctggtctttgaacttgatgatggaggtctccactgaaggctcctggtaatacgccatgactctccttagaagacttccgaggtcctttcctgtttcctaggcaggtgtgtctgatggaggaggggagacgggcaggttccacaggctctcaggttagagagtggtggaggagactggcagaggaggagagcattggccggccgcttctanaactagttggatcccccgggctgcagggaattcgatatcaaaccttatcgatccgtcgaccttgaanggggggcccggttcccagcttttttgttccctttagtgangggttaattgcgccccttggccgtaatcatnggtcatagcttgtttctggngtgaaaatttggtattcccnctcancaattccncacnaaaaataccaancccgggggngccattaaagttgttaaagccctgggggtgccntaatgnagnggagcttaacttcnccatttaaattnggggttgnggnctcacttgccccccttttccnntcggggaaaacctnnncnt

SEQ ID NO: 5690 - DNA, 847 bp, Homo sapiens
  misc_feature 585, 677, 706, 721, 725, 727, 732, 733, 739, 749, 762, 766,771, 776, 777, 779, 801, 821, 832, 833, 836, 845: n = A,T,C or G
gaattggagctccaccgcggtggcggccggccatgctctcctcctctgccagtctcctccaccactctctaacctgagagcctgtggaacctgcccgtctcccctcctccatcagacacacctgcctaggaaacaggaaaggacctcggaagtcttctaaggagggtcatggcgtattaccaggagccttcagtggagacctccatcatcaagttcaaagaccaggactttaccaccttgcgggatcactgcctgagcatgggccggacgtttaaggatgagacattccctgcagcagattcttccataggccagaagctgctccaggaaaaacgcctctccaatgtgatatggaagcggccacaggatctaccagggggtcctcctcacttcatcctggatgatataagcagatttgacatccaacaaggaggcgcagctgactgctggttcctggcagcactgggatccttgactcagaacccacagtacctcggccgctctagaactagtggatcccccgggctgcaggaatttcgatatcaagcttatcgatacccgtcgacctcgagggggggcccggtnccaacttttggtccctttagtgaggggttaaatgcgcgcttggcgtaaatcaatggtcattagcttgttttcttgtggtgaaaattgggtantccggttcacaaattcccacaacaacatnaccgaagccgggggnccantnaaatnntaaaanccctgggggnggcctaaatggangtgngcctnacttnncnttaatttgcgtttccgcttaantggcccggttttcaagttcngggaaaacctnntcntgcccaccngt

SEQ ID NO: 5691 - DNA, 842 bp, Homo sapiens
  misc_feature 534, 696, 707, 716, 732, 747, 752, 757, 760, 767, 772, 780,788, 795, 800, 810, 815, 829, 834, 840, 841: n = A,T,C or G
gaattggagctccaccgcggtggcggccgcccgggcaggtacaggacacaatccctgcttcattcttggctgacacagtataccacccagcatcttcttttgtggctccctgaatgagcaggcagatgtagccgtggttgtcctggtgcatgctggagaaaaggataaagtcattagggttctaaattttttaaaagtggctttggacatgaagcatcatttttaattagatcattagaaacagaattgtgcaagtagctgataatagggtcatacttattctgtagagattactagctccattaaagttaatgggagaaagaacagacgtcaagagttgaatacatctgtgtgcttaattcctagttgaggatctgcctttacaaaaaccactgaatagtcttttatcactaaagcaaatgaattcatcttttcttttagatagaatgataaacacttttaagaaatcaccattagatcaaacacccatagcttccttctaaaagcttaatcctacattgggtaacgcatggnttttgtctttgattgatttcatcaaaaatcaaaacatctatgtggcttttacacatagatttccatgcttataaaaatgtatcttttgatacatcattagggacctgaacaggttaagaaatcaaggttctcattggggcagtcctttaccctcacttcggncaagtgcctgnggaggtggngtgaattcattttttnttttctttcccaaantattntgganggnggggggnccttnccaatacnacgaacantttccancccgnactgggggtnccttnggcccggttttaanaactnaggggnnt

SEQ ID NO: 5692 - DNA, 1079 bp, Homo sapiens
  misc_feature 2, 6, 7, 11, 13, 14, 17, 19, 20, 21, 23, 26, 27, 28, 29,34, 35, 39, 41, 43, 46, 50, 53, 55, 57, 63, 68, 75, 78,84, 85, 88, 91, 93, 94, 97, 98, 99, 102, 103, 105, 106,113, 458, 487, 552, 625, 698, 741, 746, 809, 840, 858, 893,895: n = A,T,C or G
  misc_feature 908, 915, 925, 937, 950, 965, 969, 974, 983, 995, 1002, 1025,1029, 1035, 1043, 1044, 1055, 1065, 1066, 1067: n = A,T,C or G
tncccnntaangnntanannntnatnnnnaatcnnaatnananatncttntantntnataaanaattnttaaaanttntacatnnagnttngnngtnnnganngnngcgactnactatagggcgaattggagctccaccgcggtggcggccgcccgggcaggtactgttgctttcagccagcagaatccaggagctcactggggacccatcccaattcttaaagcatgggtaattcagccaggcctcagcctcttgtgccagctgcctccaaccctttgggtctccaccacccaagtttcctgtagggtccgccgggtccaggatcacaggcctgggtttcgtgagctgccttctcaggtacctcggccgctctagaactagtggatcccccgggcttgcaggaaattccgatatcaaagcttatcggataccgtccgacctcgagggggggggcccnggtacccaagcttttttgttccctttagntggaagggttaaattgccgcgctttggccgttaatcaatggtcaattaggctgtttcctgtgtgnaaaattgttaatccgcttcacaattcccacaccaacataccgaagcccggggagccataaaagtgttaaaaancctggggggttgccctaatggaggtggagcctaaactcacatttaatttgccgtttggcggcttcaacttgcncccgcttttttcccaagttccgggggaaaaaccttggtccgtngcccnaggccttggcaatttaaatggaaaattcgggccccaaacggccgccgggggggaagaagggcnggttttttgccgttatttgggggccgccttnttttccggctttccttcngattcaatttgaaattcgcattgcggcttccgggncngtttccgggcttnccggccnaaccggttantcaaacttaacnttcaaaaagggcnggtaaattaacgggnttantcccncaagaaatntaagggggggantaaccgncaagggaaaagaaaccattttgnagcncaaaanggccagcnnaaaagggcccnagggaaaccnnnaaaaaagggccg

SEQ ID NO: 5693 - DNA, 1131 bp, Homo sapiens
  misc_feature 1, 2, 4, 7, 8, 10, 11, 12, 14, 18, 20, 24, 25, 27, 28, 29,35, 37, 42, 44, 45, 47, 48, 50, 52, 58, 59, 63, 64, 66,69, 70, 71, 72, 74, 75, 77, 80, 83, 84, 89, 91, 99, 100,105, 110, 112, 113, 114, 118, 125, 127, 128, 132, 135, 136: n = A,T,C or G
  misc_feature 146, 152, 174, 175, 177, 191, 196, 393, 399, 440, 475, 478,605, 606, 632, 645, 691, 709, 713, 717, 718, 758, 791, 853,870, 885, 887, 889, 905, 910, 920, 925, 939, 942, 965, 968,976, 982, 987, 1014, 1021, 1039, 1042, 1049, 1050: n = A,T,C or G
  misc_feature 1055, 1061, 1062, 1066, 1067, 1068, 1072, 1077, 1085, 1102,1106, 1114, 1126, 1129: n = A,T,C or G
nncnctnntnnntnattncncacnntnnnaccccncnttttntnntnnanancgtccnntttnntnccnnnntnntnttnttnnttagntnaggggggnntttcnggggngnnnggcngtggggngnnttanttnnccctccaccncgctgncggccgacgtacctgactttgnntnagttgccagaatangatcntcaggcttggcttggaaattacatactttttcccaccattcttttgataatatcaacgtagggactccatctacttccatgatgttaaacagttctggctttttttccatcgtgggagcgtttttctcaatcttcgccattgggaatcagttgggctttatggcttctctctccctgtgtgagccagtaaagggganaataangatcattgtttatattcctctgtgaatttataatttaatgnaaaaaagggatttttgttggatctttaaggctgtnatnacaattttgggttgtgctatgcaatgtctttctgctatgggttctggtatctcaaggccagcagaagggaagccagccttgcttgcctttaagttcaaaactggcttttccctgggaaaacccccannagcccagggttccccaggcttcccanggaacacctggtngccaaggccaaagaagccaccaagccaagggttcccccgcccgtanccctggcccccggggccngggnccgnnttccttaggaaacctaagttgggaatccccccccggggcnttgccaaggggaaatttcctaattattcaaaangcctttaattccgaataccccggtccgaacccttcgaagggggggggggccccccgggttanccccaagccttttttgnttcccccttttaaantngnggggggttaaaatttngccgncccctttggnccgtnaattccattgggtncantaagcctggtttttccctggtgntgnaaaaattnggtttntcccnctttaccaaattttccccccacaaacnattaccnagccccggggaagccttnaanagtggtnnaaagnccctgnngggnnncccntaaantgaaggtngagcttaacctttacantttnaaattgcntttggcccctcnccncg

SEQ ID NO: 5694 - DNA, 807 bp, Homo sapiens
  misc_feature 652, 693, 721, 728, 744, 746, 762, 763, 802, 806: n = A,T,C or G
gcgaattggagctccaccgcggtggcggccgaggtaccatggtgctgcacagaccatcaggaagaactgaaaagttcaggcaacttgagaaaataaagtcaccaccagcaagaagctgtctaaaataaccggaagattataacccaagcacgtggaggagtgtgctagtgagtagaatgttatgaaagctactagaggtcctccatagatgcatgtgctagtcctaaggagaaggaagaggagaaggattgccacggaggaacacctgaagtttcagttgagcactttgtttggaaagttgtccaaggctggagttgtgagagctgggaaagacctcacaagcttctctaattcaagtccttgtttcacatatgagaatgcagaggccctgagaagttgattcccaggcctgcatgctggcctggaactagagcctgggtctcctcttgctttttccagctgtctgcccaggtagctccccaaggcaggcatggaggcagagctgctttgggttccaggtaaggagagatgtgtccaggtggcctttgttgtattgtggggcacagacactgagggagacagggaaagggtctgggagaccaagatggtacctaccccgggccggccgttttagaactagtgggatcccccnggctgcaaggaatttcgatatcaagctttatcgattccgtncgaccttcgagggggggggccccggtancccagcnttttggttccctttangngaggggttaattgcgnnccttggccgtaattcaatgggtccatagctgtttcctgnggtng

SEQ ID NO: 5695 - DNA, 810 bp, Homo sapiens
  misc_feature 631, 645, 678, 679, 693, 698, 702, 704, 707, 720, 732, 742,749, 750, 755, 758, 759, 778, 786: n = A,T,C or G
gaattggagctccaccgcggtggcggccgaggtacaggtttgtagccaaaaagcaataggctataccataatagtgcaggtgcgtagaaggcttttacataaaggttttatgacctgtatgatgttcacacaacaacaaaattgcctagtggtgcatttactataacatatcccatccttaagggacacgtgaatgtatatacacacacacacatatacacatattaccaaatggatacatacgtggttacctacagaaaaatttaaactttgaaataatactcttagggaatgttacctttttaaaagatattctttaaatttatatttgctattatgttgccttaccaatattcacatgtaacattgcacatttcactaagggattttttatattagcattttagtcagcacatttgttgtctgtttaccctgtgttatgagttaggtaaaaagagatcttgttcctgctttaaagagatctcagtttagtgacagataagtaaaccaaccaaagagggtgcattgaaccccggtagcctgggtaggaagaagctttcactctcagtagttaaggtgatgatgggatggagggactgttcaaggaaagactgggtcagaaaaagctcanacttggtctaaatntgggaaaggggtgggaggaatgaagtttagggnnggggaaaaggggcnttttnaaananaanaaccgggaagcgncgtggccaaagngctgaaaacnagcattnnccctngcnntgaaggagggaccttgccngggcgggncggttttaaaactagagggtttcc

SEQ ID NO: 5696 - DNA, 641 bp, Homo sapiens
  misc_feature 560, 612, 629: n = A,T,C or G
gaattggagctccaccgcggtggcggccgaggtacaaggaggaggaaaaacacaggattccataccaatctccttagccatggctagaccctgcggataggtgatgggagtcagcttcttctccttcagtttctcgatcgtgtctttatcatccctaagatcaagtttagttcccactaggatgatgggagtgttgggacagtggtgccgcacctcaggataccactagatgtgaagaaggaacagaggttgtgacacgctcctttacagatgtccttcacctaaatcacacccagccggcggcactcatgccagacacctaacctcaggcaaggcctccccacggaggcttcaggtggttcccaccttcaattcaagccttgagccataaggaacatctcaggtgttccattagcaagctaggactcccggatcatggctggacagaaccacgaccggacagaacgggctctacaaccgcaggggaaggggggaagggaagagaaacaaaaggaagggagttccttccaaagcaaatagatcacttttgttttttggtnaaacaatttctttaagggtcatcttgagaaaaattcatcatcttgttcaganatgagaaataaaactanctaaccccaagg

SEQ ID NO: 5697 - DNA, 823 bp, Homo sapiens
  misc_feature 7, 8, 9, 12, 16, 17, 18, 19, 20, 21, 22, 24, 25, 29, 30,32, 33, 34, 35, 37, 38, 41, 42, 44, 46, 50, 51, 53, 55,56, 57, 58, 59, 61, 63, 64, 66, 67, 75, 76, 79, 80, 81,83, 84, 89, 90, 94, 95, 98, 101, 106, 415, 457, 492, 553,575: n = A,T,C or G
  misc_feature 586, 622, 637, 698, 712, 735, 765, 770, 808, 810: n = A,T,C or G
ccccccnnntanttgnnnnnnntnntctnntnnnnanntgnnanantttnntnannnnnanannannaatttttnntcnnntnnggganngtgnnacnctnactantcctatagggcgaattggagctccaccgcggtggcggccgaggtactgagctccacaaacgtggccatggttggtgcggaaatgattctgagtgagcaggtagaagtctcacgtcctgctgtgtccagagttggttccttccagagggttcgtggtctcgctggcttcaagaatgaagccgtggaccttcacagtgtgtgttacagctgttaaagatgttgtgtctggagtttgttccttcagatgtgtctggagtttctcccttctggtgggtttgtggtgtcgctgacttcaagaatgaagccgcanactgtcgtgggtgatccgttgtagctcttaaaggtggtgtgngacccaaagagttgagcagcaaccaagatttttcntcaagaagggtaagaacaaaagtttccacggttgttggaaagggtattcttgagccggttnccctccccgcgtaccttgcccngggcggcccgnttctaaaaactagtgggattcccccccgggctgcangaaatttccattatnaaagctttaatcgaataacccgttgaacccttccgaagggggggggccccggtacccccanctttttggttcccntttaagtgaaggggttaaatttncgccgcctttggcgttaaattcattgggtnaattngcctggttttcctgttggtggaaaatttgtttatcccncntcaccaatttccg

SEQ ID NO: 5698 - DNA, 796 bp, Homo sapiens
  misc_feature 1, 7, 9, 10, 13, 20, 21, 26, 28, 30, 32, 33, 34, 40, 41,51, 58, 65, 69, 70, 71, 75, 76, 81, 82, 85, 87, 88, 90,91, 92, 94, 106, 375, 439, 449, 514, 517, 595, 647, 648,666, 723, 732, 733, 754, 761, 763, 767, 771, 792, 796: n = A,T,C or G
ncttctngnnganataattnntgttntntncnnntatttnntttttttatnttttcantttgttnactnnnaatnnttttnnggngnnannnantctcatatacgncgaatggactccaccgcggtggcggccgatgtactgttggcagtaataagttgcaaaatcatcaggctgcaggctgctgatggtgagagtgaattctgtgccagctccactgccactgaaccttgatgggaccccactttttaaactagacgccttatagatcaggaccttaggggctctccctggtttctgctgaaaccaggccaaccaggtattaatattctgactggcccggcaagtgatagtgactctgtctcctacagacgcanacagggtggaaggagactgggtcatctggatgtcacatttggcacctgggagccagagcagcangaagccccangagctgagcggggaccctcatgtccatgtttgtgtcctgactgggtctgactccccgcgtacctnccngggcggcccgctcttagaactagtggaatcccccgggcctgcagggaattcgatatcaagcttatcgaatacccgtcngacctttgagggggggggccccgggtacccaagctttttgtttcccctttanntgaggggttaaatttgcnccgccttgggcgtaaatcaatgggtcaataagcttgttttcctgtgttgaaaattgnttatttccnnttcacaaatttccaccacaancattacnangccngggnagccattaaaagttgttaaancccn

SEQ ID NO: 5699 - DNA, 642 bp, Homo sapiens
  misc_feature 319, 511, 519, 593, 603, 636: n = A,T,C or G
ggagctccaccgcggtggcggccgaggtacgcgggaatctcagtcatgtaagaaatgtcacattttatttaattcaaatcctactctggaccctattcttgctttggtgggaaatgtggcctaagtaattattggaggaccctctgcttctttggaatctctgaagtattaggaggccaatctggtatggggaaaatgaaggaggccctctctccttcagttcatcacggctgctgctaacccattcctgtcccagctgatagggtatctgagaagatgggtgattcttctccctccaagccaagcttgacaagactangaagctgtgaggtatctgatctggcctctgtagatgaacaattgagccacaccctgaagttttctcacctccccaatgtattgccatgaggataaggacaggtccctattggtcatgacatcccttgctgcctcacccctgaacagagagagcctaaagtcctagctactttcttgaaaaaaaaaaagggtngaaaaatncacagagagcaaacaaacacaaattaataactgaataaagaggttgaactagcctgggcaaacgtaattttganaacccctgtntaccaaaccaacaaccaccaacaaccaccaaanaaaaat

SEQ ID NO: 5700 - DNA, 636 bp, Homo sapiens
ggagctccaccgcggtggcggccgaggtacgcggggccccttttccaagcggctgccgaagatggcggaggtgcaggtcctggtgcttgatggtcgaggccatctcctgggccgcctggcggccatcgtggctaaacaggtactgcagctgatgaattggcaatttgaagaacaaatgtaaaaaataataataataaataaatagaaacaaaaatatagaaatgcaactgacggcaagatgaagcaacagatatataaaaacaaaagacaacataacaatgggtgtcaaaacgatcacatgtttttaaactattttctatacctgacactcactcattcttctaagtcaatgaactcatcactgggggaggcacagaaacaaatatggtacctgcccgggcggccgctctagaactagtggatcccccgggctgcaggaattcgatatcaagcttatcgataccgtcgacctcgagggggggcccggtacccagcttttgttccctttagtgagggttaattgcgcgcttggcgtaatcatggtcatagctgtttcctgtgtgaaattgttatccgctcacaattccacacaacatacgagcccgggagcataaagtgtaaaagcctggggtgcct

SEQ ID NO: 5701 - DNA, 649 bp, Homo sapiens
  misc_feature 185, 213, 324, 417, 435, 450, 478, 538, 543, 550, 567, 587,595, 645, 648: n = A,T,C or G
ggccgcccgggcaggtacctgactttgggtaagtggccagaataagatcatcaggcttggcttggaaattacagactttttcccaccattcttttgataatatcaacgtagggactccatctacttccatgatgttaaacagttctggctttttttccatcgtgggagcgtttttctcaatcttngccattgggaatctggtatttcaggcancacaggaagcagcttgctgcctttagtcaaactgcttcctggaaacccagagccaggtccagctccaggacactgtgcaagcaagagcacagcaggtgaggtccccgcgtncctcggcccgctctagaactagtggatcccccgggctgcaggaaattcgatatcaagcttatcgataccgccgacctccaagggggggccccngtacccagctttttgttncctttaagtgagggntaattgcgcgcttggcgtaatcatgggncatagctgtttcctgtgtggaaattgttatccgcttacaatttccacacaaacaatacgnagccnggagcantaaagtgtaaaggcctnggggggcctaatgaagtgancctaaccntcaccattaattggggttggggctcaactggccgcttttccaattcgggnaant

SEQ ID NO: 5702 - DNA, 660 bp, Homo sapiens
  misc_feature 607, 611, 622: n = A,T,C or G
ggagctccaccgcggtggcggccgaggtaccgacctctctttgtaaatgaaaattactctgattattaagatgtttaagtatatccaaccgtcccagaccacattggcctatttcctcctcttggcaacactgctcgggttttcccctcgcatcatccttatgctatgacactggactaaattgtaataatacattttcttgttaatctcctcattatactatgagctccttgaggacaggtacgcggggggcggccatggcgggacaggaggatccggtgcagcgggagattcaccaggactgggctaaccgggagtacctgcccgggcggccgctctagaactagtggatcccccgggctgcaggaattcgatatcaagcttatcgataccgtcgacctcgagggggggcccggtacccagcttttgttccctttagtgaggggttaattgcgcgcttggcgtaatcatggtcatagctgtttcctgtgtgaaattgttatccgctcacaaattccacacaacatacgagccgggagcataaagtgtaaagcctggggtgcctaatgagtgagctaactcacattaattgcgttgcgctcactgnccgnttttccagtcnggaaacctggtcgtgcccagctgcattaatgaatccgg

SEQ ID NO: 5703 - DNA, 656 bp, Homo sapiens
  misc_feature 484, 505, 535, 561, 574, 602, 622, 656: n = A,T,C or G
ttggcgaattggagctccaccgcggtggcggccgaggtactgtgggttctgagtcaaggatcccagtgctgccaggaaccagcagtcagctgcgcctccttgttggatgtcaaatctgcttatatcatccaggatgaagtgaggaggaccccctggtagatcctgtggccgcttccatatcacattggagaggcgtttttcctggagcagcttctggcctatggaagaatctgctgcagggaatgtctcatccttaaacgtccggcccatgctcaggcagtgatcccgcaaggtggtaaagtcctggtctttgaacttgatgatggaggtctccactgaaggctcctggtaatacgccatgactctccttagaagacttccgaggtcctttcctgtttcctaggcaggtgtgtctgatggaggaggggagaccggcaggttccacaggctctcaggttaaagagtggtggaggagactggcaanaggaggagagcatggcccggnccctctagaactagtggatcccccggctgnaggaatttcgatatcaagcttatcgnatccgtcaccctngaaggggggcccggttccccagcttttnttcccttttagtgagggttnaattgccccccttggcgtaatcattgggcaatan

SEQ ID NO: 5704 - DNA, 962 bp, Homo sapiens
  misc_feature 4, 8, 18, 85, 129, 133, 138, 176, 222, 259, 277, 297, 320,340, 345, 351, 355, 377, 383, 399, 409, 415, 417, 420, 436,437, 448, 455, 456, 458, 459, 460, 465, 470, 484, 489, 492,499, 500, 510, 515, 517, 519, 520, 521, 523, 524, 527: n = A,T,C or G
  misc_feature 528, 530, 535, 543, 544, 545, 546, 551, 568, 569, 574, 583,589, 590, 631, 632, 633, 641, 644, 674, 684, 689, 718, 719,723, 738, 739, 740, 751, 752, 759, 760, 767, 779, 783, 790,800, 811, 827, 831, 846, 855, 857, 865, 877, 878, 879: n = A,T,C or G
  misc_feature 886, 887, 890, 895, 896, 913, 914, 918, 920, 921, 928, 929,930, 932, 939, 948, 958, 959, 960, 961, 962: n = A,T,C or G
ggtngttncgcgcattcnactactatagggcttattggagctccaccgcggtggcggccgcccgggcaggtacgcggggcgcatnatctgtcttgctggaagctttttcctagaggttgagcggtttgnacantgtcngaaatggctgagttgtccgagctgtatgaagagagcantgacctgcagatggatgtgatgcctggcgagggtgaccttccccanatggaggtaggcaagcgggaagcccggagctatcccntgcgttccttcccgaagnggggccccaacaagtttcgnaggaaggaaaggcccaattggangaaggaaggagggccccaanccaantggccnggcncccaagagggggaaaacggganccttgntaacggggccccaacntttggggaancacccnanccnaggtgggcggccctcnntttttttaaanaccaaannannnggggnaaaantttttttttttggnggggnganaaaaaanntttttttttnttttnanannnannatnngncatanttgggggnnnnccccnccaaaaaaaaaaaaacnnccccnttttttatnaaaaanncccccttttttttttttttttaaaaaaaaaaaaaaaaaaannnaccccctnggngggggggggggtgttttatttttttttttntaaaaaaaanccccnccccttaaataaaaattttttttttatannaaanttttttttttttttnnnggggggggggnntatttcnnccaaaanaaaaaaaaaagngggnggggggntttttttttntttaaaaaagnatggggtgtttttttntaanaaaaagaaaaaattnttttttttntngggggccncccccccccccnnnttttttnntgnggccnncaaaaaaaaaagttggnntttngnnaaaatannncnccccttnaaaaaaaantttttttttnnnnn

SEQ ID NO: 5705 - DNA, 842 bp, Homo sapiens
  misc_feature 3, 9, 19, 22, 34, 50, 61, 63, 105, 612, 624, 635, 663, 664,673, 685, 705, 723, 741, 748, 778, 780, 791, 798, 810, 811,814, 821, 825, 828, 841: n = A,T,C or G
gtncccttnacctccaacnatntgtaaaggtccnattggagctccccgtngtggcggccgntnatgctcttttcctctgccagtctcctccaccactctttaacntgagagcctgtggaacctgcccgtcacccctcctccatcagacacacctgcctaggaaacaggaaaggacctcggaagtcttctaaggagagtcatggcgtattaccaggagccttcagtggagacctccatcatcaagttcaaagaccaggactttaccaccttgcgggatcactgcctgagcatgggccggacgtttaaggatgagacattccctgcagcagactcttccataggccagaagctgctccaggaaaaacgcctctccaatgtgatatggaagcggccacaggatctaccagggggtcctcctcacttcatcctggatgatataagcagatttgacatccaacaaggaggcgcagctgactgctggttcctggcagcactgggatccttgactcagaacccacagtacctcggccgctctagaactagtggatcccccgggctggcaggaattcgatatcaaagcttatcgataccggccgacctcgaagggggggncccgtaccccangctttttgttnccctttaagtgagggggtaaattgcgcnncttgggcgnaaatcaattggncataagctggttttcctggnggggaaaaattggtaatnccgttcaccaatttcccncaccaanaataacgaaacccggggagccataaaaggngntaaaagccctnggggggngccctaaatggnnggnggggctnaccnccncaatttaaattgng

SEQ ID NO: 5706 - DNA, 878 bp, Homo sapiens
  misc_feature 4, 31, 364, 367, 377, 383, 407, 408, 419, 433, 469, 472,473, 482, 483, 488, 493, 498, 503, 524, 526, 527, 528, 534,540, 557, 558, 568, 569, 570, 571, 572, 573, 579, 580, 581,596, 597, 614, 615, 621, 624, 626, 628, 631, 633, 634: n = A,T,C or G
  misc_feature 649, 650, 664, 665, 672, 673, 676, 677, 678, 699, 700, 705,707, 725, 726, 731, 732, 735, 736, 744, 745, 747, 748, 749,751, 752, 753, 754, 755, 756, 757, 759, 762, 774, 775, 776,777, 778, 780, 781, 783, 785, 789, 790, 791, 792, 793: n = A,T,C or G
  misc_feature 794, 795, 796, 797, 798, 799, 800, 801, 804, 815, 820, 822,824, 825, 829, 832, 834, 835, 836, 837, 841, 843, 844, 845,846, 848, 849, 852, 853, 854, 855, 856, 857, 860, 865, 868,876: n = A,T,C or G
ggtngtcgccgtaatcgactactatagggcnaattggagctccaccgcggtggcggccggcaaggccatcgacctgaccgtgggcccatcggccgacggcaagggcgcgcgcacgatcaccgtggtgcccgtgccgaccgaggatgccctgcgcaaccgcgactggatcgagggcaatatgcgcaaggtcaatgcggccaccaatggcaaggtggcgtacgtgtacgtgcccaatacggcgggcctgggtcacacttacttcaagcgctatttcttcccgcaggcggacaagcaggccatcatcgtcgacgagcgtttcaatggcggcggcagcgtggccgattactacatcgagatcctgcanaanaaggaaatcncctggnggaccttgccttttggcccccaannaaaaaaccccnccccttttaaaaangggggcccccccctttttttttaaaaaaaaaaaaanccnnttttggggnnaaaanttttnggggnggggnttttttaaaaaaaaaaaaaanannngccccntttttnaaaaaaaaaaaaaaaanngggggggggnnnnnngggggnnnttttttttttttttnnggggggggggggggggnngggggnccncncnccncnnttttttttttttttnnaaaaaaaaaaaaannggggggnnggnnnaaaaaaaaaaaaacccccctnnctttnanaaaaaaaaaaaaaaaaannccccnnttnntttttttnntnnncnnnnnnntnaanaaaaaaaaaaannnnntnntntntttnnnnnnnnnnnnnaanccccccccggnggggntntnntttnttntnnnntaanannnngnnggnnnnnnttnaaaanacntccccccnct

SEQ ID NO: 5707 - DNA, 923 bp, Homo sapiens
  misc_feature 6, 10, 55, 57, 97, 106, 108, 242, 262, 265, 276, 295, 302,326, 366, 389, 394, 398, 403, 412, 413, 414, 423, 424, 429,437, 444, 454, 457, 459, 460, 461, 478, 480, 484, 485, 492,493, 498, 503, 505, 514, 520, 532, 533, 538, 540, 552: n = A,T,C or G
  misc_feature 566, 567, 573, 574, 576, 577, 579, 580, 581, 585, 587, 593,612, 613, 615, 620, 634, 636, 637, 641, 661, 672, 673, 674,675, 676, 677, 678, 682, 683, 686, 713, 714, 715, 716, 719,723, 729, 731, 733, 737, 742, 750, 753, 756, 757, 777: n = A,T,C or G
  misc_feature 790, 803, 817, 818, 821, 822, 830, 840, 841, 843, 844, 848,853, 858, 859, 864, 871, 875, 876, 878, 881, 883, 901, 902,906, 908, 909: n = A,T,C or G
cttttnggcnaattgcagctccaccgcggtggcggccgcccgggcaggtacgcgntngcaggagtcagtcccaaccaggacacagcatggacatganggtccctgntnagctcctggggctcctgctgctctggctctcaggtgccagatgtgacatccagatgacccagtctccatcctccctgtctgcatctgtaggagacaagagtcacccatcacttgccaggcgagtcaggacattnccaacttttttaaaattgtnttnaccaaaaaccnaggggaatgcccccttaangctcctngatcctaccgatgcatccaaattngggaaaacagggggtcccatcaaggttcagtggaagtggntcttggagcaaattttactttcnccatnaaanagccntgaagcctnnnaaaattttnncaaanaatttttnttggccncccgggtttnccngnnncttttttttttttttgngncccnnggggccnnaaaanggggntntttaaaaancaaaanggggggggggcnnccccncntttttttttttntttttttccccccnntttttnngnnannncccntntaaaancccgggccccccctttttnntnggggncgcctttaaaaaananntttntccggggggggggggggggngaatttttccnnnnnnntttnnaanaaaaaaaaaaaaaaccccccccccccnnnncgngaanaataantnantttnttttnttttcttntcnccnngggggggggggggggggggngcccccccccttnttttttttttttntataataaaaaaanncanncccccccncccccccctnntnnaaanacccnctccnntttcntggtgtntggnntnttncncccccccccccccaaaannaaangnngggggggggggtgg

SEQ ID NO: 5708 - DNA, 920 bp, Homo sapiens
  misc_feature 13, 15, 31, 44, 68, 70, 72, 78, 83, 86, 107, 108, 111, 327,390, 407, 414, 421, 438, 439, 440, 443, 453, 454, 458, 460,472, 474, 478, 480, 481, 486, 487, 492, 496, 497, 498, 499,501, 504, 510, 511, 514, 525, 526, 529, 530, 537, 543: n = A,T,C or G
  misc_feature 548, 556, 557, 591, 600, 602, 603, 608, 616, 617, 619, 623,624, 625, 626, 627, 632, 635, 642, 644, 675, 677, 701, 704,705, 712, 713, 722, 725, 728, 741, 765, 766, 769, 773, 778,779, 784, 792, 795, 804, 805, 808, 809, 821, 826, 829: n = A,T,C or G
  misc_feature 833, 834, 835, 837, 842, 845, 857, 865, 868, 883, 888, 890,892, 893, 894, 897, 900, 902, 907, 909, 912, 913: n = A,T,C or G
agttacccctttnanccccccacgatattgnaaaaggtcccatnggagctccccgttgtggcggccgntntnctgtgntttcngantcaaggatcccagtgctgccnnganccagcagtcagctgcgcctccttgttggatgtcaaatctgcttatatcatccaggatgaagtgaggaggaccccctggtagatcctgtggccgcttccatatcacattggagaggcgtttttcctggagcagcttctggcctatggaagaatctgctgcagggaatgtctcatccttaaacgtccggcccatgctcaggcagtgatcccgcaaggnggtaaagtcctggtctttgaacttgatgatggaggtctccactgaaggctccctggtaatacnccatgacttttccttanaaaattnccggggnctttcctttttccttannnaanggtgtttttnngggngngggggggaaacncngccngnntcccnnagggncccnnnngnttnaaaaannggngggggggggannaannccccccnaaaaanaaaanaaaaaaanntgcccccccccccttttaaaaaaaaaaggggggngcccccccncnnggggnggggggannanattnnnnnaaaanccnttttttntncccccccccccccccccccgggggggggggngncccccccccccccccccttttttnttnnttttttnnggggggggnaanaanccccccccccccnaaaaaaaaaaaaaaaaaaaaaaannttncctnggggnnaaaanaaaaaaanttngtttaaaannttnnacaaaaaaaaanaaaanaanaacnnngnggganaanaaaaaaaaaaanaagggggngcncccgggggggggccntaaanancnnnacncancncccantngannccccccg

SEQ ID NO: 5709 - DNA, 1253 bp, Homo sapiens
  misc_feature 6, 7, 8, 11, 16, 17, 18, 21, 24, 25, 26, 28, 30, 31, 33,34, 36, 38, 40, 41, 44, 45, 47, 52, 53, 54, 55, 57, 60,63, 65, 66, 68, 72, 77, 78, 79, 80, 82, 85, 89, 93, 96,99, 102, 105, 191, 375, 426, 450, 462, 478, 499, 507, 514,519: n = A,T,C or G
  misc_feature 524, 550, 551, 567, 576, 585, 629, 646, 675, 679, 680, 687,688, 692, 713, 715, 732, 733, 737, 749, 751, 752, 759, 761,767, 780, 786, 795, 805, 807, 808, 813, 815, 816, 817, 818,820, 822, 832, 836, 837, 843, 844, 845, 847, 850, 859: n = A,T,C or G
  misc_feature 862, 864, 866, 868, 882, 887, 888, 892, 895, 913, 924, 926,933, 937, 945, 947, 952, 957, 960, 961, 966, 967, 970, 981,996, 1003, 1011, 1015, 1029, 1031, 1033, 1034, 1035, 1039,1048, 1050, 1055, 1063, 1066, 1070, 1071, 1078, 1079: n = A,T,C or G
  misc_feature 1080, 1085, 1091, 1096, 1100, 1106, 1109, 1110, 1118, 1124,1126, 1128, 1131, 1151, 1155, 1156, 1160, 1161, 1163, 1170,1179, 1188, 1193, 1195, 1197, 1207, 1209, 1212, 1213, 1215,1217, 1220, 1221, 1232, 1233, 1234, 1237, 1240, 1241: n = A,T,C or G
  misc_feature 1243, 1245, 1248: n = A,T,C or G
acgttnnntantaacnnnttnatnnntnanngnntntntnnttnncnttttnnnngnaantantnntntctnctgannnntnatnaganttanggnacnaanttnaagacccttgtaatacgactcactatagggcgaattggagctccaccgcggtggcggccgaggtgagaggatttcttgaggccaanagtttgagactagcctgggttagtataacaagaccccatatctagtaaaaataaaaataaaattacaggctttttaaaaagttacgattcttttaacctctctggcagacccaaattaaatattctaggacaggagtgtccagtcttttggcttccctgggccacattggaaagaggaattgtnttgggcccacacatgaaatacactaaccaaatagctggattgaactaaaanaaatcacccaaaaaaattttcatnaaatggtttttnaaggaaagtttgtggnaattttgttgttggggccctnattgccanccccgtngggcncatgnggttttggtaccaaaattttgccctnngaaaacaaagttttgnttacccttntggcgccgnttcttagaaaacctaagttgggatcccccccggggcttggtaantgaaaattttccgaatnttcaaaggcctttaatttgaataacccgnttcnnaaccttnngatngggggggggggccccccgggntnccccaaaacattttttnngttncccctttttaantnngaagggngnttaaanttggcgcccgccnttgggnccgttaaanaaaatggggncnnattancnnnngngnttcccttgtntggnnaaaaannntngtntatataccnttntntnancattttgtcccccncaatnnttanccngatcccggtggaggctcntaaaaaattgntnaaaaagncccngggggggngnccctntaatngtnnggggnnccntatacctacancaatttaaaattggnggatggngggcctcnaacntggcccggtatttncnannntagngggaaaaanancatcntttccccnacnttgnntattaannnaaatntggcgncaacnctcnccgggngtnnaagggggngattgngntntanttaatgatgcgccattttcntcgnntacnntngttaacntgaactatngatgtagcntcaancnangatttacggntnttnngnanganngttgttttatnnntcntcnntnanatngggcg

SEQ ID NO: 5710 - DNA, 942 bp, Homo sapiens
  misc_feature 245, 267, 348, 351, 360, 361, 362, 363, 368, 369, 371, 386,392, 399, 402, 461, 475, 491, 492, 494, 508, 528, 542, 543,563, 571, 581, 583, 586, 615, 624, 662, 665, 671, 677, 683,695, 698, 703, 704, 709, 722, 725, 749, 757, 760, 767: n = A,T,C or G
  misc_feature 772, 778, 780, 782, 787, 800, 801, 807, 809, 814, 815, 818,827, 832, 852, 856, 860, 862, 866, 867, 868, 870, 874, 877,881, 891, 897, 898, 899, 900, 902, 903, 906, 910, 911, 915,919, 920, 923, 928, 932, 939, 940, 942: n = A,T,C or G
ggcgaattggagctccaccgcggtggcggccgaggtacaccgcttgttaatggcaaccatttcaaaagataaagaaaatggaaattaagggaaatctgttcagcaacaaagatcttgaggaattatgcagacatatcaacaacagaaaccaagcagcacagcattctcagaagcagtctactgagctcttccagtgcatgtacgcggggaccacttctctgggacacattgccttctgttttctncagcatgcgcttgctccagctnctgttcagggccagccctgccaccctgctcctggttctttgcctgccagttgggggccaacaaagctcagcgacaacactnggnagatcatannnnagaanngntgacattcccaagtnaggcancttgccncgntgcggccgtttctagaactagttggatccccccgggcctgcagggaaatttcgattatnaaagctttatcggntacccggccgaacctnnangggggggggccccnggataccccaagcctttttngttcccctttttanntgagggggtttaaattggcnccgctttnggccgaaaantncanggggtccataagcctggatttccctgggngtgaaaaanttgttattcccccttcacaattttccccccaaataatnccnaagccngggganggcatnaaagtggttaanagnccttnngggtnggcctaaaatggnggngagctaaacttaacatttaaattngctgtgangcnccaatgnccgcntttttncnantgcgnggaaaaccttgtnntggccnancttcnnttnaatggaaanccggncaacccctctgggtttcggntggnaggnantggnnnantttnatncctnttcccccttnccctgnnnntnnttnaaannttgnggannttnggtcnttcnggtttanngn

SEQ ID NO: 5711 - DNA, 1035 bp, Homo sapiens
  misc_feature 1, 20, 32, 36, 40, 59, 71, 72, 80, 118, 258, 265, 396, 398,412, 421, 422, 425, 436, 439, 441, 445, 448, 450, 459, 472,485, 489, 496, 502, 503, 506, 527, 528, 536, 537, 562, 563,571, 572, 580, 582, 588, 595, 603, 608, 622, 623, 624: n = A,T,C or G
  misc_feature 627, 637, 641, 642, 646, 647, 656, 659, 663, 667, 671, 691,694, 696, 699, 707, 718, 719, 721, 742, 743, 745, 751, 752,753, 754, 758, 762, 764, 767, 770, 771, 772, 775, 776, 786,790, 791, 793, 799, 800, 805, 806, 819, 830, 831, 835: n = A,T,C or G
  misc_feature 847, 852, 854, 856, 861, 863, 866, 870, 875, 876, 878, 883,890, 891, 907, 909, 912, 915, 925, 930, 931, 945, 951, 953,956, 964, 965, 967, 971, 972, 974, 980, 987, 991, 993, 996,1002, 1007, 1013, 1021, 1022, 1023, 1024, 1028, 1031: n = A,T,C or G
  misc_feature 1033, 1034: n = A,T,C or G
ngtttagttctttcatttgnaaacccctttgntttnggcnaattgcagctccaccgttngtggccgagcgnncgcccggnttggttctccagcctgggcgacagagcgagactgtgtnaaaacaacaccacaagctagctgagtagggattcttgggccgaagtggaggacattataagcaaatagggtagtatgggcatggaaacgaactacatgattaaagattagtattatctggcgagggaggaaaagtgccanagcaagngccgaaactggaaggttacatttagttcaggatatgaagatcatataaggcctgcacggtggctcacacctgtaatcccagcacttttgggaagccaatgtgggggaggattcgctttgagctcaaggagntntgagacccagcctnggcaacatnnttnggaccccaatnttntnatanttntnactcatgtnttatgatatgatntttccctttgggnccgnttcctanaacctnngtnggattccccccggggcttgcnnggaatttnnaaattattaaaaggctttaaattcnnataacccnnttctaacncnttgaanggggggngggccccntgttnccccaaactttttnnnttncccttttaantagnngggnnttaaaattngangccncctntggncagttaattatatgggggcnatnantcntgttttanccctgtggggnnanaaattgtgtttttcccgcttnnanaaattnnnntacncaantnaantannntanncccgggggtngcannanaagttnntaaannaccctgggggggngccctacaaannaggnggaacctacacnttcanantnaaatntnggngttnggggnntnaaacnggccctnnttttaccattcgtggnanaanctntaccttgccnaaatnncattataaataaantatcancnaancccccctnngnaaanncnagtttnttgaatntggncnctntttatngattntatatntataatannnntatntantnnc

SEQ ID NO: 5712 - DNA, 950 bp, Homo sapiens
  misc_feature 391, 406, 422, 435, 438, 453, 457, 460, 463, 473, 478, 483,487, 500, 501, 507, 514, 515, 516, 522, 527, 537, 541, 543,544, 550, 553, 556, 563, 574, 588, 594, 600, 602, 623, 624,629, 637, 644, 646, 647, 656, 657, 667, 668, 676, 679: n = A,T,C or G
  misc_feature 703, 704, 712, 722, 726, 739, 743, 749, 754, 760, 762, 763,764, 766, 771, 773, 774, 776, 780, 782, 784, 792, 798, 801,809, 810, 811, 814, 815, 818, 823, 824, 826, 840, 849, 851,853, 854, 855, 856, 858, 859, 886, 898, 914, 915, 919: n = A,T,C or G
  misc_feature 930, 938, 939, 940, 950: n = A,T,C or G
tactatagggcgaattggagctccccgcggtggcggccgaggtactctcccagtgacatgcttcttgaccacaatggatgaactgtgcccagcatgcccactttccaatgctccactgatccccatgttttgtttctgaaggacaaccagccttggaataatggcaaataccttcttaagttcctacaaagtatggtccctgggaagtttatgtctgtaagtcaaaccttgggaagtaactgagttttgatgccttttccagcatcatcagcatcatgctattacaatcccaaaccatgggggtttctcacagctttacaccaaagggcatcactatccctcaaagagagaaacctggacacatgttcccaaaaacgaaaattacctgcanaacgggcttgccaanaaaaaaccacccgttntttggggtttggncanttactgggatccccntttnaanttnttttttgggnaaaanaattnaaanttaaccccttttnnaccttngaaccannntttggnccctnaaaaatggcnaggngnnggtttnttnttntctttgnaagggaacaanggcctttttttttnctttgntttaananacaattggggtaaccccttgnnggganttggcctntttaaancnnttggggggnnttaaaaaaanngggatttnttnttttccccaattggcctttttttnngggggggncttttttttncccnttttttttgaaantccnaaaggnttttntttttntnnncnccggntnnantttnancnaggggggntccctnaangggggggnnnccnnaantttcnntngggggggggggctntttttttangncnnnncnnaaattttgtttttttggggggaaaaanattttttttttncaaaaaccccgggggnngttntttttttcctnccccccannnaaaaaatttn

SEQ ID NO: 5713 - DNA, 1018 bp, Homo sapiens
  misc_feature 1, 5, 9, 32, 84, 333, 409, 427, 448, 453, 454, 460, 464,465, 467, 491, 513, 514, 521, 527, 528, 532, 540, 542, 543,548, 550, 551, 562, 565, 576, 582, 586, 598, 610, 611, 613,617, 623, 627, 628, 632, 635, 640, 642, 644, 646, 648: n = A,T,C or G
  misc_feature 683, 690, 692, 699, 700, 705, 708, 711, 712, 715, 716, 719,724, 725, 727, 729, 736, 740, 746, 751, 753, 754, 756, 758,766, 767, 772, 775, 776, 780, 781, 782, 795, 802, 804, 815,818, 828, 830, 833, 834, 842, 843, 844, 847, 851, 855: n = A,T,C or G
  misc_feature 857, 869, 879, 887, 888, 891, 892, 908, 913, 916, 919, 920,925, 928, 934, 940, 941, 946, 955, 958, 959, 976, 993, 997,999, 1008, 1009, 1011, 1015: n = A,T,C or G
nggangttncgcgcattcgactcctatagggnttattggagctccccgcggtggcggccgaggtactgtgggttctgagtcatngatcccagtgctgccaggaaccagcagtcagctgcgcctccttgttggatgtcaaatctgcttatatcatccaggatgaagtgaggaggaccccctggtagatcctgtggccgcttccatatcacattggagaggcgtttttcctggagcagcttctggcctatggaagaatctgctgcagggaatgtctcatccttaaacgtccggcccatgctcaggcagtgatcccgcaaggtggtaaagtcctgnttctttgaacttgatgatggaggtctccactgaaggctcctggtaatactccatgactctccttagaaagaacttncgagggtcctttcctgtnttactaggcagggttgtttcntgatnngaaganggtnnanactaggtccatgattacacaatgncttctttaatgtattataatannttgtgtntggaanntaanaccatgtncnntattntnnggataagccantgntaccgttatcntctatntttnaacatattttgngaatttttaccnngntganttcgcntcgnnaatnttnttttntntnantnctataatttttaataccatgatcgttaaccatctnaagtggngngtccccnnttacnccncgnnatnnttntttcnntntnagatganggtngtttanttttncnntnantttgtcannatacntanngttnnnattaccatttttncctttgntnaacaatattgntanttccgctttntntannatttcaannnctncatnctcntnatctttgttgcnatttattatntattattnnctnngagtctgtcgatactncgtgnttnatnntcatntanattatntatacnnttttnattattttnttnncattatctaataacacnttaactatccttacgtncttntnatatttatnntnattnttc

SEQ ID NO: 5714 - DNA, 927 bp, Homo sapiens
  misc_feature 2, 3, 4, 5, 6, 7, 8, 9, 10, 111, 132, 186, 223, 243, 340,353, 393, 423, 431, 527, 531, 545, 585, 646, 655, 680, 686,696, 699, 700, 711, 718, 720, 724, 737, 740, 745, 746, 747,750, 765, 766, 780, 789, 793, 799, 803, 804, 806, 813: n = A,T,C or G
  misc_feature 818, 820, 828, 833, 837, 841, 845, 852, 853, 854, 855, 859,864, 866, 868, 872, 875, 877, 879, 883, 898, 900, 901, 918,924: n = A,T,C or G
gnnnnnnnnngagcgcgcgtaatacgactcactatagggcgaattggagctccaccgcggtggcggccgcccgggcaggtactttttttttttttttttttttttttcttngggtttctttaataatgcctntccaacacagccagtgagaaattccgtgcagagccaattatccagctaattganaacaaggatactctaatactcttcacctgctccgaanagggtatcatcagatgcctnttgagaagggatttgtccatcaaggatccaggcagaggggagtgtcagccactacccgggaggtggaccaggtggcaggaacaaaatggaaccagtntgatggtaaccanactgcagggacctgcacccaaaccacaggcagtctccatnagtcagcccagagagcaagacccagttatntggctaanaaaggaaaaaattagtaaaaatggatctaatgaaacttcacagggtgggtgtcaggatttatcaaattaatgcatgggttctcaaccttggcaatnccgngtacctttggccgntttagaactagtggatccccccgggcttgcaggaatttcnatattcaagcttatcgatacccgtcgaccctcgaaggggggggggccccggtaccccaacntttttgttnccttttaagtgagggggttaaattngccccnctttggcgtnaanncattgggccanaagcctngntttnctggggtgaaaanttngtttnnnccnctttacaaatttccnnaaaaaaaattaccnaaccccggnggancctatnaaanntnttaaaanccctngnggggggcnttaantgangggnagcntaaactnnnnattnaattngngntttnggncntnactngcccctttttcaaantnnggggaaacccttttttngcccanttt

SEQ ID NO: 5715 - DNA, 900 bp, Homo sapiens
  misc_feature 37, 87, 88, 451, 457, 468, 496, 511, 520, 525, 528, 547,580, 588, 598, 603, 605, 610, 611, 628, 633, 640, 643, 650,667, 681, 686, 689, 695, 707, 710, 728, 734, 737, 744, 747,757, 760, 764, 768, 772, 779, 784, 788, 789, 799, 800: n = A,T,C or G
  misc_feature 802, 804, 806, 813, 821, 825, 829, 836, 839, 840, 841, 842,844, 845, 846, 847, 849, 857, 862, 868, 872, 873, 874, 875,876, 878, 882, 883, 884, 885, 886, 887, 888, 894, 897, 899,900: n = A,T,C or G
ccccccctttagacctttgtaataccactcactattnggcgaattggagctccaccgcggtggcggccgaggtactgtgggttctgnntcaaggatcccagtgctgccaggaaccagcagtcagctgcgcctccttgttggatgtcaaatctgcttatatcatccaggatgaagtgaggaggaccccctggtagatcctgtggccgcttccatatcacattggagaggcgtttttcctggagcagcttctggcctatggaagaatctgctgcagggaatgtctcatccttaaacgtccggcccatgctcaggcagtgatcccgcaaggtggtaaagtcctggtctttgaacttgatgatggaggtctccactgaaggctcctggtaatacgccatgactctccttagaagacttccgaggtcctttcctgtttcctaggcaggtgtgtctnatggangaggggagacnggcaggttccacaggctcttaagttaanaaagtggtggagganactggccanagganganagcatggcccgcccctctnaaactagtggatccccccggctgcaggaattcnatatcaancttatcgatncccgncnacctnnaggggggggccccggtncccanctttttnttncctttantgaggggttaatttgcnccctttggcgtaantcatnggncaatancttgttttctgnggngaaaaattgtttattccnttcacnaantttcccnacnaacaattacnaancccngggnagcntaaaaanttttnaaannccttgggggnngncntnaataagnggaacctnaccncccnatttaanttnnnntnnnncnttacttgnccccntttttncaannnnngnaaannnnnnnttgccnccntnn

SEQ ID NO: 5716 - DNA, 874 bp, Homo sapiens
  misc_feature 3, 4, 5, 6, 9, 12, 29, 33, 85, 606, 633, 658, 693, 717, 739,767, 789, 791, 803, 805, 806, 832, 841, 849, 851, 862, 864,866, 868, 869, 874: n = A,T,C or G
ggnnnngtncgngcgctcgactactatanggcntattggagctccaccgcggtggcggccgaggtacctgactttgggtaagttnccagaataagatcatcaggcttggcttggaaattacatactttttcccaccattcttttgataatatcaacgtagggactccatctacttccatgatgttaaacagttctggcttttttccatcgtgggagcgtttttctcaatcttcgccattgggaatcagttgggcttttggcttctctctccctgtgtgagccagtaaaggggataataaggatcattgtttatattctctgtgaatttataattaatgaaaaaggatttttgttgatcttaagctgtagacaatttggtgtgctttgcatgtctttctgtatggttctggtatctcaggcagcagaggaagcagcttgctgcctttagtcaaactgcttcctggaaacccagagccaggtccagctccaggacactgtgcaagcaagagcacagcaggtccccgcgtacctgcccgggcggccgctctagaactagtggatcccccgggctgcaggaattcgatatcaagcttatcgataccgtcnacctcgagggggggccccggtacccanctttgttccctttaatgaggggttnatttgcgcccttgggcgtaatcatgggcatagctngtttcctgtgtgaaaatggttatnccgctcacaaatttcacacaanataccaacccgggagccataaaagtgtnaagcccctgggggtgcctaatnangtggacttaacntnncattaaattgcgttggcgcctcaacntggcccccnttttcaantncgggaaaaacntntncnnggccn

SEQ ID NO: 5717 - DNA, 886 bp, Homo sapiens
  misc_feature 2, 3, 4, 5, 6, 9, 16, 596, 620, 638, 666, 676, 712, 728,739, 777, 782, 783, 792, 808, 830, 837, 838, 839, 849, 854,863, 864, 866, 880, 882, 886: n = A,T,C or G
gnnnnngtngcgcgtnatcgactcactatagggcttattggagctccacccgcggtggcggccgaggtacgcggggacctgctgtgctcttgcttgcacagtgtcctggagctggacctggttctgggtttccaggaagcagtttgactaaaggcagcaagctgcttcctctgctgtctgagataccagaaccatacagaaagacatgcaaagcacaccaaattgtctacagcttaagatcaacaaaaatcctttttcattaattataaattcacagagaatataaacaatgatccttattatcccctttactggctcacacagggagagagaagccaaaagcccaactgattcccaatggcgaagattgagaaaaacgctcccacgatggaaaaaaagccagaactgtttaacatcatggaagtagatggagtccctacgttgatattatcaaaagaatggtgggaaaaagtatgtaatttccaagccaagcctgatgatcttattctggcaacttacccaaagtcaggtaccttgcccgggcgggcgctctagaactagtggatcccccgggctgcaggaattcgatatcaaancttatcgataccgtcgacctcganggggggcccggtacccancttttgttccctttagtgagggtaattncgcgcctttngcggtaatcattgggcatagcttgtttccctttggngaaattggttttcccnctcccaatttnccacaccaacataccaacccgggagcattaaaagttgnaaaanncctgggggngccttaaatgaggggngcctaacctcacatttaaattngggttgnnncttaacttgncccgnttttccaanncnggggaaaacctgtntnccan

SEQ ID NO: 5718 - DNA, 1009 bp, Homo sapiens
  misc_feature 2, 3, 4, 5, 11, 14, 24, 42, 66, 281, 315, 328, 334, 361,370, 381, 390, 403, 408, 413, 417, 426, 436, 437, 439, 441,444, 450, 452, 456, 460, 485, 494, 497, 504, 520, 534, 542,547, 549, 551, 563, 564, 567, 572, 574, 586, 588, 591: n = A,T,C or G
  misc_feature 600, 610, 614, 615, 617, 625, 641, 646, 647, 648, 650, 652,658, 660, 661, 665, 668, 669, 686, 688, 691, 697, 698, 702,706, 707, 718, 726, 728, 731, 733, 737, 738, 741, 751, 755,760, 761, 762, 767, 770, 772, 776, 777, 780, 784, 786: n = A,T,C or G
  misc_feature 790, 791, 792, 794, 795, 797, 798, 804, 807, 808, 811, 824,831, 844, 847, 848, 858, 862, 864, 870, 871, 875, 882, 886,887, 888, 892, 893, 894, 898, 900, 902, 903, 910, 911, 912,913, 914, 915, 917, 918, 919, 920, 922, 923, 926, 927: n = A,T,C or G
  misc_feature 933, 934, 938, 942, 945, 960, 971, 974, 975, 976, 978, 980,983, 987, 994, 995, 998, 999, 1003, 1006, 1008: n = A,T,C or G
gnnnnacggtngtncgcgcatttngactactatagggttttntgaagctccccgcggtggcggccntggtacctgactttgggtaagttgccagaataagatcatcaggcttggcttggaaattacatactttttcccaccattcttttgataatatcaacgtagggactccatctacttccatgatgttaaacagttctggctttttttccatcgtgggagcgtttttctcaatcttcgccattgggaatcagttgggcttttggcttctctctccctgngtgagccagtaaaggggataataaggatcattgnttataatctctgngaattnataattaatgaaaaaggatttttgatngatcttaanctgtagacaantttgggtgngctttgaatgtcnttttntgtantggntctggtatntcaggcatgnnananganagccancnttgntgcntttaggtcaaaactgctttactggnaaaacccanagnccatggnccagattccagggacnacttgtgccacgcnaatgagcnaccancnangggttccccagnngtnccttngncgcggggcgggngncgnttatttagnaaaccaatgntggnnancccacctnggcctggcaaggaaantttgnnnantntaagcntnnttcnaanncccgttactaacctttnanggngggggnncccncgtnnaccacaacatntttggggncnccntnatgnnggnggggaataanaagncaacnnnttgancgntnactnncanggtnantatnnncnngnntaatcntgnngangaaaaatatcaantatcagnatcaccattatantannataataaatnaccntnactganngggntgattangggnnngaannnctgntngnnccaaacnnnnnncnnnntnntgnntgaacnntaanaatntgntatgatcaacgatgntgacgattgtnctnnntnanganaatnactttcnncanncacnatnanc

SEQ ID NO: 5719 - DNA, 934 bp, Homo sapiens
  misc_feature 3, 6, 16, 19, 37, 39, 65, 88, 371, 541, 596, 613, 614, 617,627, 658, 661, 690, 691, 693, 704, 716, 719, 721, 722, 724,726, 727, 729, 730, 767, 776, 786, 790, 791, 792, 793, 797,799, 808, 812, 817, 824, 829, 833, 836, 839, 840, 842: n = A,T,C or G
  misc_feature 845, 848, 863, 864, 865, 872, 875, 878, 880, 885, 889, 891,893, 907, 909, 910, 912, 913, 916, 923, 928, 930: n = A,T,C or G
ggnttngttgcgcgcnttngactcactatagggcttntnggagctcccgcgcggtggcggccgangtacctgactttgggtaagtttncagaataagatcatcaggcttggcttggaaattacatactttttcccaccattcttttgataatatcaacgtagggactccatctacttccatgatgttaaacagttctggcttttttccatcgtgggagcgtttttctcaatcttcgccattgggaatcagttgggcttttggcttctctctccctgtgtgagccagtaaaggggataataaggatcattgtttatattctctgtgaatttataattaatgaaaaaggatttttgttgatcttaagctgtanacaatttggtgtgctttgcatgtctttctgtatggttctggtatctcaggcagcagaggaagcagcttgctgcctttagtcaaactgcttcctggaaacccagagccaggtccagctccaggacactgtgcaagcaaagagcacagcaggtccccgcgtacctgcccggncggccgcttctagaactagtggatccccccgggctgcaaggaattccatattaangctttattcgatacccnncgnacccctcganggggggggccccggtaccccaaacttttttnttnccctttttagtggagggggttaatttgcnncncctttggggtnaaatcattgggncantnngncnngnntttccttgggggggaaaaaattgtttttcccgtttcnccaaatttnccccaccaanaatnnnnagcncnggggagccntcanatttntcaaaanccctngggntgnccnnanatngantgtaggcttaaaccnnnttttaanttnggntngccgncttncntngccccctttttccnanntnnggnaaaaccntgggngntccg

SEQ ID NO: 5720 - DNA, 942 bp, Homo sapiens
  misc_feature 45, 86, 88, 107, 121, 153, 155, 161, 169, 204, 209, 273,316, 323, 338, 360, 407, 466, 468, 469, 478, 482, 489, 496,506, 508, 511, 515, 534, 540, 550, 560, 563, 566, 570, 572,583, 594, 601, 604, 624, 630, 637, 648, 660, 663, 671: n = A,T,C or G
  misc_feature 685, 687, 698, 700, 703, 708, 709, 711, 717, 719, 724, 729,735, 741, 745, 747, 755, 757, 759, 765, 768, 770, 775, 783,786, 801, 806, 817, 820, 828, 829, 842, 848, 882, 901, 913,917, 920, 929, 932, 935, 939, 940: n = A,T,C or G
tagggcgaattggagctccacccgcggtggcggccgaggtacttntttttttttttttttttttttttttttttttccaaagaatngnaaaatttattgtataagtnttgcagcttttcanaatgtcatcattgccactaatgattactgatncncaacangcagtttnttcaggcctgtggattggcatccaaatacagagtnttacncagcggggacgtgggtgccccccccgcatgccacggaaagcttacataagtttaacttgaacanagctttgggaaatggggcttgcaaaggagaagcagttcccacnccagganccaacgtgaaaagcntttggaatcagcacaacagccntggaatcaggcaggcaggggaggacgggctgtgtccttctggagctnttattagtacctgccccgggcggccgtttttaaaaactagggggatcccccggggctgngnnggaatttcnattntcaaaancttattngataccggcnanccntcanagggggggggccccgggcnccccanccttttttgngccccctttnggnggngggntntaaattgggcncccctttgggnggtaaanacnatgggccaatagcctggttntccctnggggggnaaaaattggtntttcccgttccnaanttcccccnacaaacaatatagnangcccggggggncntanaaaanngngtaaangnccctnggggnggcccnaatggngggnancccaaccncncnttttanttngngggtngggcttcnctnggccccggttttccngtggngggaaaaaccntgntggggccnngtttttttaaatntaattntggccccccccccccccccccccccccctttttntttttggggcccctttccnttttttttgggnaatnttnttcaatgtnccnttngttnntt

SEQ ID NO: 5721 - DNA, 878 bp, Homo sapiens
  misc_feature 545, 611, 674, 676, 678, 721, 724, 725, 733, 773, 788, 789,805, 811, 821, 822, 824, 831, 832, 833, 851, 857, 858, 862,864, 865, 870, 872: n = A,T,C or G
actactatagggcgaattggagctccaccgcggtggcggccggccatgctctcctcctctgccagtctcctccaccactctctaacctgagagcctgtggaacctgcccgtctcccctcctccatcagacacacctgcctaggaaacaggaaaggacctcggaagtcttctaaggagggtcatggcgtattaccaggagccttcagtggagacctccatcatcaagttcaaagaccaggactttaccaccttgcgggatcactgcctgagcatgggccggacgtttaaggatgagacattccctgcagcagattcttccataggccagaagctgctccaggaaaaacgcctctccaatgtgatatggaagcggccacaggatctaccagggggtcctcctcacttcatcctggatgatataagcagatttgacatccaacaaggaggcgcagctgactgctggttcctggcagcactgggatccttgacttcagaacccacagtacctcggccgctctagaactagtggatcccccgggctgcangaattcgatatcaagctttatcgatccgtcgaccttcgagggggggcccggtacccaactttttgntccctttagtgagggttaatttgcgcgcttggcgtaattaatggtcatagctggttttcctgngngnaaattgttttttcccgcttacaatttccacaacaacaattacngannccggggangcattaaaagtgttaaaagcctgggggtggccttaatgangtggagcctaacctnnaaattaaattggggtngggggnttaattggtnngnttttttnnngggggggaaaccccgganggcccnnctcnannaaacncnacccct

SEQ ID NO: 5722 - DNA, 884 bp, Homo sapiens
  misc_feature 127, 132, 183, 230, 307, 315, 343, 353, 408, 445, 459, 508,533, 551, 566, 617, 622, 648, 659, 672, 712, 728, 732, 738,739, 740, 744, 756, 757, 766, 775, 785, 791, 800, 816, 824,825, 829, 836, 837, 844, 845, 847, 878, 879: n = A,T,C or G
gactcactatagggcgaattggagctccaccgcggtggcggccgaggtactttttttttttttttttttttttttttcctttattctcagcaaacagcaattccactgccagagaggtagtttcctnttttntgcaccatgcagctccctgtcaacagcttatatacagcggtttccacttgngtctcctgtgttaagctctaagcaacttgaggacggggctcacactntagtcagtgctgtctgaaagcagcataatatgagtcaccagtgtaacacagccacataattaaagattttttaacanccacattntaaatgtaaagaaaaaagtcggccgctntaaaactagnggatcccccgggctgcaggaattcgatatcaagcttatcgataccgtcgacctcnagggggggcccggtacccagcttttgttccctttagngagggttaattgcncgcttggcgtaatcatggtcatagctgtttcctgtgtgaaattgttatnccgctcacaattcccacaacatacnagccgggagcataaagtngtaaaagcctggggngccttaatgagtggagctaactcacatttaattgcgttggcgcctcactgnccggnttttccagtcggggaaaacctgtcgngccagctgcantaaatgaaattcngccaaccccccggggggaaaaggcgggtttgccgttattngggcgccttttccgcntttncttggnnnaatngacttcgcttgnncttcgggcngtttcgggntggggggggnagcggntttttaagntttaaattaaaaaggnggggaaanncggnttttccnnaaaaaannangggggataaccccaggaaaaaaaaaattttnnacaat

SEQ ID NO: 5723 - DNA, 883 bp, Homo sapiens
  misc_feature 388, 453, 460, 468, 494, 503, 510, 517, 524, 537, 577, 597,605, 610, 628, 643, 648, 669, 670, 672, 680, 682, 697, 698,707, 714, 717, 727, 730, 736, 746, 747, 753, 767, 773, 774,783, 796, 808, 812, 820, 827, 828, 835, 837, 848, 852: n = A,T,C or G
  misc_feature 854, 867, 871: n = A,T,C or G
ggcgaattggagctccaccgcggtggcggccgaggtacttatgaagcccatctaagtaagatcatttcttctaattcaattttctaaaatcatttgtgttttagaaatctcatgattcccaggaaaaaaattttaaattgtgatacaggtttgacagccttttagtcaaataagttaaaacacacacgcaaactcatttactcactttgccattataattcaatcacaaagaaattttggccaggcgtggtggcttacgcctgtaatcccagcactttgggaggccgaggcaggtggatcacgaggtcaggggatcaaagatcattctggctaacatgtgaaaccccgtctctattaaaaataaaaaaattaacctggtgtggtggcnggtgccttgtagtcccagctacttcggggaggcttgaggcaccaaaatggcgtgaactcaagganggcgganctttggcnttgagcccgagatcgcgcccacttgnaccttcaanccttggnttgaccnaagcgangacctcccgtttntaaaaaaaaaaaaaaaaaaaaaaaaaagtaccttggcccngggcggggcccgttttttanaactaagnggggntcccccccggggcctggnaggggaaatttcganttttnaaagctttatttgaatccccnncnaacctctnanggggggggccccggnncccccaccnttttttnttncccttttagnggngggggngtaaattggnncccctnggggggaaaaaaanggggcnnaaggctggnttccccggggggnaaaattgttttncccnttccaaantttcccnncaaaatnanccaacccgggngggntnaaaaggtgaaaancccngggggggcctaa

SEQ ID NO: 5724 - DNA, 970 bp, Homo sapiens
  misc_feature 237, 252, 265, 287, 293, 295, 341, 353, 367, 374, 375, 388,425, 428, 429, 439, 454, 457, 458, 463, 469, 489, 490, 504,508, 512, 515, 516, 518, 522, 527, 542, 546, 547, 553, 556,558, 559, 565, 569, 574, 578, 581, 591, 605, 609, 615: n = A,T,C or G
  misc_feature 616, 624, 629, 632, 641, 644, 660, 662, 666, 667, 690, 691,697, 705, 713, 716, 717, 726, 729, 730, 741, 756, 759, 762,770, 772, 777, 778, 779, 783, 785, 788, 791, 792, 793, 799,812, 813, 814, 820, 822, 823, 829, 833, 834, 838, 839: n = A,T,C or G
  misc_feature 841, 844, 846, 865, 880, 883, 892, 894, 899, 900, 901, 909,910, 912, 914, 918, 919, 922, 926, 927, 929, 930, 934, 937,941, 945, 958: n = A,T,C or G
tatagggcgaattggagctccaccgcggtggcggccgaggtacgcgggtagagatggaaaatatcagaccaattggaaattttcctttgactctcacctggtctgagcatcttctgtctttttggtacaaaagccaagatgcccattgtgggcctgggcacttggaggtctcttctcggcaaagtgaaagaagcggtgaaggtggccattgatgcagaatatcgccacattgactgngcctatttctatganaatcaacattgangtgggagaagcccttccaaganaagatncnaagaagaaggctggtgatgccgggagggaccctggttcattcggtnagcaaaggtgtngggccccacttttnttttggnnagaaccccctttntgaaagaaaaggccttttgaagaaaaaacccctcaanggnnccctgaaaanctgggactttttttnggnnccgtnttatcntttatttcccctgggccccnngggggaattcaaanaacngggnggnnanaaanttttnttcccccaaaaaaanggannaaaagnggngnnttttgntttncgggngggnaanacgggggagncttttttttgggantggncttggnngagggccnttttnganggaaccttnggngggacccaaaaggggncntggnngaaaaaaccccctggggggggcnnaaaaanttttaaancccctttncgnnaacgggganggnntttttgaaacncccctttttccttgnaanttnaaaacccncntggcnnnaacncnacnggnnngggggncccccccttcccnnnccccgngnnaaaaantttnntttnntntcntntcccggggggggggggggnttaaaaaaaaaaagnaanccccccggngnttttnnnaaaggggnnanangggnnttntttnngnncccntanaccnttangggggggcccccngcccaaaatttt

SEQ ID NO: 5725 - DNA, 972 bp, Homo sapiens
  misc_feature 2, 3, 408, 424, 453, 501, 511, 515, 521, 542, 555, 565, 578,586, 594, 612, 615, 625, 633, 664, 672, 673, 697, 709, 712,730, 736, 748, 790, 794, 799, 802, 804, 827, 832, 836, 842,863, 871, 872, 877, 881, 883, 886, 888, 893, 898: n = A,T,C or G
  misc_feature 933, 940, 952, 964, 966: n = A,T,C or G
gnngccgcactcgactcctatagggcgaattggagctccccgcggtggcggccgcccgggcaggtacagctgtctgcattgaaaattcatgcatggagaaagggagtaagcaagggagaaacggtgcgattcacatattccgcgagatcatcaagccagcagagaaatccctccatgaaaagttaaaacaagataagcgctttagcaccttcctcagcctacttgaagctgcagacttgaaagagctcctgacacaacctggagactggacattatttgtgccaaccaatgatgcttttaagggaatgactagtggaagaaaaagaaattctgataccgggacaaaaatgctcttcaaaacatcattctttatcacctgacacccaggagtttttatttgggaaaaanggatttgaaccctggnggttactaacatttttaaaaggacccccncaaggggaagccaaaattcttttcttgaaaagaaagttaaattgattncccctttctngggngaaatnggaatttggaaatcaaaaagnaattttgaccttnattggacaanccaaatggggggnaaatttcnatggttgnaagaataaaaacttcctnttnttccaggcanaacaccancctttttgggaaaatgaatccaacctggctnggaaaatnncctttaataaaatttaatcaaaantcccttcccaanttnaagttttggttcgggggntagccncccttttaaaanaaaaatcccccggggacttgggtttttaggaccccccccttnaccnaaaangtncnaaaatttggaagggggggaaccnctgantttnccaacntggttttaaagaaaggggggnaaaacaannaaccnggangnggntncccgnggggnggcccctttttttaaaaaaaacccccccaaatttntttggtngggggggcccgngggaaaaaaacngnaaaaat

SEQ ID NO: 5726 - DNA, 915 bp, Homo sapiens
  misc_feature 3, 4, 6, 77, 113, 119, 126, 151, 158, 167, 174, 184, 339,460, 465, 481, 510, 526, 533, 556, 565, 566, 571, 575, 601,602, 603, 609, 616, 637, 651, 657, 660, 675, 676, 689, 700,703, 706, 709, 728, 746, 761, 764, 792, 796, 818, 839: n = A,T,C or G
  misc_feature 848, 858, 864, 871, 893, 899, 906: n = A,T,C or G
ggnngnccgcgtaatacgactcactataggggcgaaattgggagctccaccgcgggtgggcgggcccgcccgggcanggtacaggtgggcacgaatctttggcttcacttggnaacctncgccttnccggggttcaaaagccgaattcttnctggccntcaagcctncttgcantaagcttggnaactacaaggccacgttgccacccacaacccaagttaaaattttttgtattttttaagtaagaagaaccgggggttttcaccattgtttgggccaaggatgggtcctttggatcctctttggaccctcgtggaatcttgcccacttttggccctncccgaaagtggcctggggaatttaccaaggcattgaagccacccggtgccttggcttgaagaaaaaaccggaatttctttttttaaagaaaaaaaatggaaaaaaggcttctttctttttnctttnaaaaaaagtcaacaanggttggggtaccctttggggcccgctttnttaagaaacttaagtngggattncccccccggggcttggcaagggnaaattttcnnaatantttnaaagcctttaattcggaataacccgnnncgaaanccttttnaaaggggggggggggcccccnggtacccccaaacntttttnggnttcccctttttaaannggaaggggggttnaaattttggcnccnccnttngggggggtaaaatcaaatnggggcaataagcctgggntttcccctggggggnggnaaaaatttgtttatttcccctttcaacnaaantttccccaaccaaaaaattaancaaaaccccggggggggccanttaaaaagngttaaaaaancccctnggggggnggcccttaaattggaggggggnggcctnaaccttncaattttaa

SEQ ID NO: 5727 - DNA, 843 bp, Homo sapiens
  misc_feature 544, 569, 646, 670, 694, 702, 715, 719, 746, 760, 774, 789,801, 804, 806, 810, 811, 814, 817, 840, 841, 842: n = A,T,C or G
gcgcgtaatacgactcactatagggcgaattggagctccaccgcggtggcggccgaggtacgcgggggaaagtgtgtagcacctccaccttctctctctctctccccctccctctcctgccagccaagtgaagacatgcttacttccccttcaccttccttcatgatgttaccattggaatgacatactgcatcctatagttataccatccactctgaaatcaatgtgaatttaacttcagttccatacagaaacttcttttccacagatggagtttaagcccaagctggagtgcgatggtgcaatcccaactcactgcaacctctgcctcccaggttcaagctattttcctggcttagcctccggagtagctggaattacagatgtgcgcccccatgaccagtaagaaacggttgaactggatgcaatttttatcacagcttgtgtaagactgcctctgtccctcctctcacatgccattggttaaccagcagacagtgtgctcaggggcgttgtcagctcattggctcttatagcctgtganggaggaagaaacatttgctaaccangccaagtgacagaaatggggttcgaaataccaagtgtgtgaagctgaatgatggtcacttcatgcctgtcctggganttggcacctatgccccctgcagangttcctaaaaagtaaagcttttanaggccccnaaattggcaatanaaanccgggttcccccattttggatttttgnccatgtttacaaanattaaagaacacgntttgactgggccctncccaaaaaaaanttncnaaannggntgntgaaaaaaaaaaaaaactttttnnnt

SEQ ID NO: 5728 - DNA, 857 bp, Homo sapiens
  misc_feature 20, 548, 601, 661, 682, 693, 694, 704, 712, 725, 728, 737,760, 765, 766, 785, 793, 794, 805, 807, 809, 817, 818, 823,832, 836, 837, 838, 852, 854, 855: n = A,T,C or G
gactcactatagggcgaatnggagctccaccgcggtggcggccggccatgctctcctcctctgccagtctcctccaccactctctaacctgagagcctgtggaacctgcccgtctcccctcctccatcagacacacctgcctaggaaacaggaaaggacctcggaagtcttctaaggagagtcatggcgtattaccaggagccttcagtggagacctccatcatcaagttcaaagaccaggactttaccaccttgcgggatcactgcctgagcatgggccggacgtttaaggatgagacattccctgcagcagattcttccataggccagaagctgctccaggaaaaacgcctctccaatgtgatatggaagcggccacaggatctaccagggggtcctcctcacttcatcctggatgatataagcagatttgacatccaacaaggaggcgcagctgactgctggttcctggcagcactgggatccttgactcagaacccacaagtacctcggccgctctagaactagtggatccccccgggctgcangaattcgatatcaaagcttatcgataccgtcgacctcgaggggggggcccggnacccaagctttttgttcctttaggtgagggttaattggcccgcttgggcgtaatcatggncataagcttgtttcctggggngaaaatggttnntcccgttacnattttccncaaaaaaaatacnganccccgggancctaaaagggggaaaaagccctnggggnngccctaatggaggggagcntaactcannattaaatttgngntngggcttannatggncccggtttnccannnggggaaaaaccttngnngg

SEQ ID NO: 5729 - DNA, 864 bp, Homo sapiens
  misc_feature 606, 654, 698, 710, 751, 763, 774, 786, 787, 790, 831, 835,836, 850, 851, 852, 857: n = A,T,C or G
gtaatacgactcactatagggcgaattggagctccaccgcggtggcggccgcccgggcaggtacgcgggaaatggagaaggcttccatttacttcagaaagctacactgactctactaaaaggcccctttcctgctggcttttaggaaaagagagaattccctcatcagtctcaaaatcacaagcaacagaaatgggaaatcgttttactaagaatgaaatgtgtcgattcagtaatactcttcatcttccccttagccaagaacccactagctctcagaatattctgagtagctgtagaggtgtccttacagacagcaaattgctaataacatttgttgaatatttactaagcgccaggcactgggctaagggctccttgtgaatttttcacttgatcctcaccacagccctcgtcacctccatttgacagatgagaaaactgagactcactaaggcagagctcacacagctagtgacaggcaaagccagacttgggacctggctccagtctgctgagcagtctgcctcagaacctatactcttaaatcccgaaaacagagctatagatgctttttcctgcctccttaactttccttttccttanaaaggtcggtttaccttctcttcatacatttagtggccctcttcagangaaaaatgccaaaacaaggtgccaaaaaacttttattcaggttnaaccactttttntgcccaaaaacaaagggaaatgtggaatttacctttatttnaaagaacttggnaaatttcaatngttaaaatttcnnggnatgcctttattttttttacaaaaaattttttcggcccccangganncctaaattttttgnnngcctnggggaag

SEQ ID NO: 5730 - DNA, 906 bp, Homo sapiens
  misc_feature 257, 390, 500, 513, 562, 566, 567, 574, 575, 609, 636, 660,662, 681, 695, 703, 733, 748, 756, 758, 759, 764, 765, 780,794, 799, 805, 813, 817, 819, 826, 841, 856, 858, 862, 870,880, 881, 898, 899, 901: n = A,T,C or G
gtaatacgactcactatagggcgaattggagctccaccgcggtggcggccgaggtacgccggggtcataatagaattctcatgagatctggttgtttgaaagtgtgtagcacctccaccttctctctctctctccctctccctctcctgccagccaagtgaagacatgcttacttccccttcaccttccttcatgatgttaccattggaatgacatactgcatcctatagttataccatccactctgaaatcaatgngaatttaacttcagttccatacagaaacttcttttccacagatggagtttaagcccaagctggagtgcgatggtgcaatcccaactcactgcaacctctgcctcccaggtttcaagctattttcctggcttancctccggagtaggctggaattacagatactcaggaatttcaagtgtgctatccctatgtgtattgattatatcttcatcctgctcaaatttgctattgaaacactctctngtaagaaaacggnttgaactgggatggcaaatttttatcacagcttggggtaagactgcctntggnncctcctnntaacatgccattgggtaacccagcagacaggtgnggcttcaaggggccgtttgccaagttncaattgctcttaataacccttgtngnggggaaggaaagaaaacantttgctaaccccangcccaggngacaaaaaaatgggattcccaaaataaccnagtggggggggaaancctggaangnntgggnnacctttattgcctgnttcctggggaattnggccnccctantgcccccntgcnanagggttncttaaaaaattaaanccttttaaaggcccncnaaanggggcaanataaaagccnnggtttcccccattttgnntnttgct

SEQ ID NO: 5731 - DNA, 921 bp, Homo sapiens
  misc_feature 5, 331, 548, 575, 608, 609, 692, 723, 735, 741, 751, 774,799, 803, 807, 816, 830, 835, 843, 845, 856, 862, 864, 868,880, 888, 889, 904, 907, 918: n = A,T,C or G
atagnagattcacgtaatacgactcactatagggcgaattggagctccaccgcggtggcggccgaggtacagatccacagcctgtcagttgcaccctccctgacaccaccaccgggacctgcacagactgggagttcatttccttgctcactggggcctgccttccccaggctggtgtcttctgatagccaaactgaggggtgggaggtattttgaaatgcagatttaattattcatgtgtggtgaggccaacagatcaggagataactgccactgaaatgatagtttgttacacacagttcccaatgggaggggacatgccacacacggngggggtcacacagggaagcaccaaggtcagctgggaggtagagggagccagggagaaaagtgggcaagagcctttattgttttccatgggagggaacggacaaggatttgagtaagtaggtttaggattggctatttggaataacttcagcgagatctggagcacagaggctgtcctgagttatctggtatgtgtcctggattgattagggcagganacaggggcccagagtgtgagagcccanaaaaggaagtgggggtatgggcctttggagcannttttttgtggggtgaaaaggccgtgttcccaagcaagcaagcccaaggctttttgcttgtcttcccggggaatttaacttagnccttttcaagggttcagtggagggcccctanagaatgtcaaangctttnaaaaattgcnagaattaaaaaaaagacattganccagttaaaagaagcccgaaccaangganccanggccaggtngaaccattaaacangcctncaagcaanangccaggcccanaagttntncccnaacccccggcanggatgctnnaagcttgggggaaanacnagaactttttnttt

SEQ ID NO: 5732 - DNA, 1167 bp, Homo sapiens
  misc_feature 1, 2, 5, 6, 8, 9, 10, 12, 14, 15, 18, 20, 21, 25, 27, 28,29, 31, 32, 34, 35, 36, 37, 38, 39, 40, 41, 43, 45, 47,48, 49, 52, 56, 60, 62, 63, 64, 67, 70, 75, 76, 77, 78,79, 82, 83, 91, 92, 94, 105, 150, 159, 163, 256, 291, 400,428: n = A,T,C or G
  misc_feature 472, 473, 476, 480, 488, 518, 523, 535, 542, 546, 557, 560,566, 571, 584, 588, 589, 602, 608, 626, 631, 638, 644, 655,660, 664, 665, 672, 686, 692, 693, 702, 712, 713, 734, 745,749, 757, 772, 785, 788, 789, 793, 798, 802, 805, 807: n = A,T,C or G
  misc_feature 817, 818, 822, 823, 828, 830, 842, 846, 848, 851, 852, 853,862, 867, 868, 870, 872, 873, 876, 879, 885, 886, 891, 914,915, 916, 921, 925, 934, 937, 951, 955, 957, 962, 979, 982,989, 991, 1002, 1003, 1009, 1014, 1017, 1018, 1019: n = A,T,C or G
  misc_feature 1029, 1032, 1044, 1046, 1047, 1051, 1055, 1056, 1058, 1067,1077, 1078, 1089, 1096, 1101, 1103, 1115, 1118, 1120, 1126,1130, 1131, 1133, 1143, 1150, 1153, 1158, 1161: n = A,T,C or G
nnctnngnnntntnnttntnnactnannntnngnnnnnnnngntncnnntanatantttntnnnccnttnttttnnnnnganngtcttgcnntngtcaatcactntaggctaattggactccaccgcggtggcggccgaggtactttatnttttttttntttnttgctttttgccagtttttaagttttttaattggattaccagctttagggtggagccgcttggaagaacagggccagcaaagggttctctggngcctcctgtttttcccagggagtccaggctgttanagcttgaatatcccacttttaattgaactgattttaaccataagcactctttaatattaaagtccttccgtgtccggaattggtgggttcttgggtcctgacttcaaanaaatgaaagccgcggaccctcgcaagtngagtgttaacaagcttttttaagggtgggccgcatttttggaanntcntgtncccctttncccaatgtttccgggaattgtttgtttccnggagnttttctttttcnatttctngggngggggttttgnggntggggntcttncgccttgggcctntaannggaggtggaaaanccttgncaaaaaaccctttttacnggggngggaagntgtttnaccaagccttnttttnaaannggccggnccccccctctcttngggaannttttgttcncgtttccctnnccttggggggggggcctctcngtggggtcctncccnttggggcnttttaagggaaggtnggaaaaacctttngcnnaaanctttncccnttntngaaggatggnngaannacgcntntattaaaaaaancagntnggnnnggacccccncaaannantnnggngcnaatttnncccanaggaatttttttttgtcaaaaannnaaccnaaanggaaacccnaangcctttccaccaanattntngggtnaaaggggggaacccccnccngggggtntngtccccccccnnggttanccttnccnnngggggggggncgnttttttaaaaanannatgngggnnanccccccccnggcctcgtcnngggaaatttcntattttnaaacntntttttcgattanccntngtcccncctnnangggggggggncccccgntanccccnacntttttt

SEQ ID NO: 5733 - DNA, 1285 bp, Homo sapiens
  misc_feature 1, 6, 7, 9, 10, 11, 12, 14, 15, 18, 20, 21, 24, 26, 28, 29,30, 31, 32, 33, 34, 35, 39, 40, 41, 42, 44, 45, 47, 49,50, 51, 54, 60, 64, 66, 67, 71, 72, 73, 75, 80, 81, 83,85, 86, 87, 96, 97, 102, 107, 119, 387, 390, 394, 411, 430: n = A,T,C or G
  misc_feature 467, 468, 487, 488, 489, 517, 538, 552, 555, 559, 581, 582,585, 591, 595, 601, 606, 613, 620, 630, 661, 662, 665, 675,679, 701, 717, 725, 736, 740, 741, 749, 750, 752, 754, 778,781, 783, 792, 793, 799, 807, 814, 826, 834, 835, 842: n = A,T,C or G
  misc_feature 849, 854, 855, 860, 863, 867, 903, 904, 907, 908, 910, 918,920, 935, 938, 948, 953, 976, 977, 984, 993, 997, 1001,1010, 1012, 1019, 1021, 1024, 1030, 1050, 1051, 1057, 1060,1063, 1072, 1087, 1089, 1096, 1099, 1100, 1112, 1113, 1115: n = A,T,C or G
  misc_feature 1121, 1133, 1139, 1143, 1145, 1152, 1155, 1158, 1162, 1173,1174, 1184, 1186, 1201, 1206, 1209, 1213, 1214, 1246, 1248,1249, 1271, 1282, 1283, 1284, 1285: n = A,T,C or G
nttctnnannnnannttncnnatnanannnnnnnnggannnnanntntnnnttnatttanagtngnnttannntngaccnncntnnnagagtgacnntttgnccttnattactactcantatagggcgaattggagctccaccgcggtggcggccgcccgggcaggtacgccgggggagtcaagaccctgtcaggacacagcatggacatgagggtccccgctcaagctcctggggctcctgctgctctggctcccaaggttccagatgccgacatccagatgaccgcagtctccatctttccgtgttctgcatctgtagggagacaagccgtcaccatcactttgtcgggcgaagtcgggggttctttaagtacccttcggcccgntcntaanaaacttaggtgggattncccccgggggcctggcaanggaaatttccgaattattcaaagcccttaattcggannaccccggtcggaacccttnnnaaaggggggggggggccccccgggttancccccaaaacctttttttggntttccccctttttnagntggnaggggggtttaaaattttggcnnccncctttngggncggttnaattncaattgnggggccnaattaaggcnttgggtttttcccttgggggtgggaaaaaannttngtttatttcnccgnctttccacaaaaattttccccnccaccaaacccaattnacccaaancccggggggangccnnttaaaaanntngnttaaaaaaggccctgggggggggnggncntaaatgggnngtgggnagcccttnaaccttncaacaatttttnaatttggnngggtttngcgggcnttcannctttnggncccnctttttttcccaagtttcggggggaaaaaacccttnntcnntnggcccccncnttggccattttaaantgnaaatttgggnccccnaacccccccccggggaaaaaaanngcccctnttttatccntttntttngggggcggncnttttttncnccnttttcntcggtttaaaattagacttnngatttncgnccntcgggggcncttttatggggtttngnggggganaannggggtgtttaannantttccntctcaaaagggngggggnaganancccgggnttnttncccncacacaaaaannagggggagtnancccccccgggaaaanaaaanatnttgnnacaaaaaaaagggccccccaaaaaaggggccncnnaaacccccttaaaaaggggccncgttttttttnnnn

SEQ ID NO: 5734 - DNA, 885 bp, Homo sapiens
  misc_feature 374, 417, 425, 440, 475, 480, 492, 503, 506, 514, 516, 544,551, 555, 556, 574, 579, 593, 595, 597, 615, 617, 619, 625,626, 628, 637, 665, 676, 689, 696, 697, 698, 699, 701, 702,703, 704, 705, 706, 707, 708, 709, 710, 711, 712, 713: n = A,T,C or G
  misc_feature 715, 716, 717, 719, 721, 723, 724, 725, 726, 730, 731, 732,733, 734, 735, 736, 737, 738, 739, 740, 741, 743, 744, 745,746, 747, 748, 751, 753, 754, 755, 756, 758, 760, 761, 762,763, 764, 765, 766, 767, 768, 769, 770, 771, 775, 776: n = A,T,C or G
  misc_feature 777, 778, 780, 782, 784, 786, 787, 789, 790, 791, 792, 793,794, 795, 796, 797, 798, 800, 802, 803, 805, 806, 808, 809,810, 811, 812, 813, 815, 817, 818, 823, 824, 826, 827, 828,830, 831, 832, 833, 834, 836, 837, 838, 839, 841, 843: n = A,T,C or G
  misc_feature 844, 846, 848, 849, 850, 851, 852, 854, 856, 858, 859, 860,861, 862, 863, 865, 866, 867, 868, 869, 870, 871, 872, 874,875, 876, 877, 878, 879, 880, 882, 883, 884: n = A,T,C or G
ggcgaattggagctccccgcggtggcggccgaggtaccaggctatgtgctaagtatgttattccacttaaccagccctcagtctaacagagcagatgctattattatcccctttaaacagtgaagaagcgaggcttagggggaactgtgtcatgccccagggccacatggccgggtaaggggtccagcagctttaagccagggaggtgggcccaacgtccataccctcagccatcttcatcctacttcgtcacagggtcggggaagatacaagtgatgaaggcattgtggtcagactcttgtgattggcccaaggatgagtgaggccttgaaggtgccttcattaactgtggagtacatgccaaatgctctaangagacatacacccttaacccactcgatttaacaaaaaggaggncttttttngtgggaagccaggcncccacaattgccagcaagattaagggagtccagangaatncccccaaagttngctttcttaanttnttccccancnccttaaagggggaaaaaagaaaaagggngaagccncccnnctttaaagggaaaaaatngaaanccttgaaagggagnangnattttttttttttttttnantngttaannanaattttggnggggaagttttaaaaaaggggggacttnaaaaattcccnggggttccccttncccgggnnnntnnnnnnnnnnnnntnnntntntnnnncttnnnnnnnnnnnntnnnnnntantnnnngntnnnnnnnnnnnnttannnnantnantnnannnnnnnnnngntnntnngnnnnnntntnntgtanntnnntnnnnnannnntntnnantnnnnntnantnnnnnngnnnnnnnntnnnnnnngnnnt

SEQ ID NO: 5735 - DNA, 918 bp, Homo sapiens
  misc_feature 2, 27, 48, 481, 605, 634, 678, 734, 741, 749, 751, 753, 755,807, 812, 822, 824, 833, 834, 847, 856, 874, 889, 901: n = A,T,C or G
angctactatagggcgaattggccctntagatgcatgctcgagcggcncgccagtgtgatgggatatctgcagaattcgccctttcgagcggccgcccgggcaggtaccacacacacacaggcacacgcaggcacacgcaggcacacacgcagacacacacacacataaacacacagagttcactagtccgagttactgattttcttaggattctcaaagtgacaacaccggaaacaaggtaattcatgttaaaacacaagggttatatcagtaagagatgggatccccgaagtaaaccgtggaatttgaatcaagcttcgaagagctaaaaaaagaaattggagtttcaacattcaccttcttgaatccttaagaaatacagaagttcaaaatagaaaacattacagtttcaggatacaaaagtagaaacatctgagattaagcctacatttttaaaaaaagatattgaaaaattactgngcttgtaataccagcttttcaaacatcaataccagttattggcattacctagatcaaatctttttcattcaaggttgaaaaaaataaagcattggggaatagaagggaccattcaaaaatggtnccaataattgaaaataattggtcttttgnataggttccttaaaaaaatttacctgcttctcaatgtttggtcnattcttcaaatttcaaggcttttttttgggaacagactttttgcattttaaatggnaggctcnaaaggcanantngnttttttgggaggcttttaaaaagcaaaattgatttattttcaatcataagtnaattntgcaagggcngncccaaaatnnatggccggggaangattttaantggactcctttttggtcnaattggggaaggatnccttttgaattnggaaggtttttttttgg

SEQ ID NO: 5736 - DNA, 982 bp, Homo sapiens
  misc_feature 1, 3, 148, 213, 225, 227, 241, 298, 301, 309, 329, 347, 354,356, 363, 378, 396, 402, 411, 421, 433, 435, 445, 453, 470,474, 483, 491, 493, 494, 497, 515, 525, 527, 531, 537, 542,546, 547, 548, 559, 562, 573, 582, 584, 590, 591: n = A,T,C or G
  misc_feature 592, 595, 604, 605, 608, 612, 613, 615, 617, 623, 624, 630,632, 636, 641, 646, 648, 662, 665, 670, 673, 675, 679, 680,690, 692, 694, 697, 702, 705, 706, 708, 710, 715, 717, 719,724, 725, 728, 729, 736, 754, 770, 776, 778, 783, 794: n = A,T,C or G
  misc_feature 802, 804, 806, 807, 810, 814, 817, 824, 826, 828, 830, 831,832, 843, 845, 848, 852, 855, 856, 859, 863, 867, 869, 873,874, 883, 889, 892, 894, 898, 900, 904, 912, 916, 918, 927,928, 929, 931, 933, 937, 940, 941, 943, 952, 960, 966: n = A,T,C or G
  misc_feature 973, 975, 976: n = A,T,C or G
ncnctactatagggcgaaattgggccctctagatgcatgctcgagcggcccgccagtgtgatgggatatctgcagaattcgcccttagcgtggtcgcggccgaggtactttttaaacctcaatgccacactcataatgaataaccagnctactatctcttatgaattcctgataattttctctcatttttactcaaaaactgccaaatgaatncaggaccgtctntncaagacttaaactntattttattttgaatactatgagctctaaaatatctagattttgtcaagataaaatncanggtgttgngaatctttgtgttaatattntggaattaataaatggantgaaacncngattttnatataattgaaaganctagagtctggcttgaangtgggntaggatttngggccttcangaccttttgggnanacttatcatnactacttnaaaccttggttttcttnatcnaaaaaactnggaaagantnnttnttgggcagttgttttaangaattaaatnancatntgtagncaccnaccnnnattcttggacnttnaaacaagtgancctgtcccngncggccnnntangaaaagggnnganattnnangntacaanngccggncnggtntctangaggnancccgttgcgttcgntanctagnctntngctnntattcaacgngncnatnggcgngtnntncnggggngnanaattnnatnntctgctntcataatatccaaaacancattctataaccggtntttcancnaaatnggaacggctcntggggggncncnnatnatgngtncgtgaantnanannntatgtgggttntncgnttancannccngcantttnantacnngaaatcttnctagcnacncnttanantaanagaacgcnctanantccctcggnnncnangtgnttnntngttttgtgnattcttcntctcgnttcctancnnacttgg

SEQ ID NO: 5737 - DNA, 929 bp, Homo sapiens
  misc_feature 2, 357, 373, 383, 399, 403, 535, 555, 614, 621, 628, 648,651, 664, 676, 678, 684, 692, 694, 696, 710, 711, 718, 721,726, 747, 756, 761, 767, 770, 772, 774, 777, 779, 780, 783,785, 802, 803, 804, 811, 819, 824, 826, 829, 836, 837: n = A,T,C or G
  misc_feature 838, 841, 843, 855, 857, 863, 870, 874, 876, 891, 892, 899,902, 904, 906, 907, 917, 923, 926, 928: n = A,T,C or G
ancactactatagggcgaattgggccctctagatgcatgctcgagcggccgccagtgtgatggatatctgcagaattcgcccttagcgtggtcgcggccgaggtacgcggggactttaccttgatttggaagatcatggaatatctatttgaatcctggatgtatttttctcacagtctccttgcttcctgaaatttcctctggtaagttattctctttatctgttactaagaaacttaactattgctatttttaataagctctgttttgttgaagtatttcatttttcacatttttgttactttcagaactgaaagatccatatggccatatttattaattagtatggtaggtggnaactgcactgctaaancataaccatngtaatgtattaccccnatantcccatgtattaccccaatatcttttaccttcctttatttttaaaatatttgtcctcatttatatttatggggttacaacggacattaattcgccccccacccccattaacccttcttggcacacaattccntgtaccctgcccggggcggncggttctgaaaagggggcgaatttccagcacacctgggcgggccggtactaagtgggancccgagnctctgtnacccaagctttgggggaaancangggccataagctntttccctggggngnaaaatngggtatancngntcacaaatttctcnnccaaacntanccaancccggaagcataaaagtggtnaaaggccgnggggngccctnatnangngangnnaancncaccattaaatggcgtnnngcttcanttgcccgntttcnanatngggaaannnttngnaggccacgtggnantaaagnaatcggnccananccccgggggggaggnnggatgcnaantngnncccttttccnctttcntantna

SEQ ID NO: 5738 - DNA, 860 bp, Homo sapiens
  misc_feature 123, 272, 294, 518, 579, 583, 614, 617, 623, 642, 648, 661,677, 721, 733, 738, 739, 746, 758, 769, 780, 782, 821, 846,859: n = A,T,C or G
gtaatacgactcactatagggcgaattgggccctctagatgcatgctcgagcggccgccagtgtgatggatatctgcagaattcgcccttagcgtggtcgcggccgaggtactggaggaaganaatgggccataaaaataatactcccatttatataatgctacacagtttacaaagtgcttccctacacactctgtgttccaaggcttgcagtgacccagtaaggttggaaggtcgaaccccatctggaggactaggaaactgaagctcanaagagggaaatgcccttcccanagtctaaatcaagcaacaagggcaggatgtggacccctttccttcctctctgttcagcactctggtcacagctgcctgaaccgggagctttgggttggatgggtgatgaaagaagagagaacttgtcaagacccatcactgcatccaggtggggttttattctaatgctgcttccctagcaccgagcacagccctgcagtgagctctgtcatgagaagaaagtnactggccctgccccatgcgcttacagtctaaagtcaatcaacagatcaacagcaaaaccangcanggaacatggggagcaggaaggtggaaaagtnaanagagcngggatttgcttttcttcanttcttncttaaaaaatgtngggctgtcttctgagnttcttcataaagggcttgcctcaacctggattcaacctagggangagcctccccangggcnncatttantgattctttttncaagccaaggnaaactttcccncntttcaaccaaggtggaggacccaaggggttagtgcgggnggccattcttttgggaccatacttnttttcaccaaggng

SEQ ID NO: 5739 - DNA, 899 bp, Homo sapiens
  misc_feature 8, 23, 35, 38, 44, 61, 84, 109, 634, 650, 698, 719, 748,761, 766, 776, 777, 784, 796, 799, 826, 841, 859, 862, 865,868, 869, 874, 875, 878, 890, 892: n = A,T,C or G
gaaaattnaaacctttgaatacnctagggcttttnggnccctcnagatgcatgctcgagcngccgccagtgtgatggatatttncagaattcgccctttgagcggccgnccgggcaggtacttgattgttctgaaattccttatgcatgattagagaaagagtaaatgacgtattttaggattgtgtttaacaaaagtgagatgctaattcttgaaaattaggcctctctatggggactgcacgtaatcacattaccctagatcttgagttagccgagagaatattcactgtcaggtgattcactgaccttgcctataacttgaaaccaataagcaaatccagatgtagtttcactggcctttgaagtccagggcaaaaagacaaagcgtgactccctgtctccccattgcatcctgattgtctccctgtccagggacagaataaatatcctcaagacattgactcttttcacagtgaagaagctgaggttggagctttggcctcatctcctataggttcatgctgcatctctgatctctacaggtagggagaaggtcttttctgctccccttcctcctggcacatgacaaaatcctagtgccttaagggtctgcagggaggagagagtttatnttagtggtttttccanttcaaggtccttatcaatataattcaattactcccccccaactgcatnttcccttttggttacactggngccccattatttaaaaccattcacaaatnaaaagttcccttnggccnccgaaccacnnccttaangggggaaatttncancacaactgggcggggccgtttcctagngggatccgaaccttngggtacccaagctttggnggnaanaanngggcnnaancttggttccctngnggggaag

SEQ ID NO: 5740 - DNA, 848 bp, Homo sapiens
  misc_feature 152, 242, 312, 324, 336, 369, 379, 399, 419, 435, 445, 447,478, 490, 562, 569, 598, 600, 639, 648, 671, 673, 684, 699,706, 727, 747, 758, 776, 782, 823, 830, 836: n = A,T,C or G
actactatagggcgaattgggccctctagatgcatgctcgagcggccgccagtgtgatggatatctgcagaattcgcccttagcgtggtcgcggccgaggtactttttttttttttttttttttttcaaaactagtgactcctgtcactctnttccactctaaaagggcaggatgcaatggcaaaagggcacataattctgtttccttgagtgtctcttagtattaaagtaggctcagtttntaaatattaaaatgacccacaataagagctgcaatgattaagtttgtgacttgttataccaatcaatgtntgacaaacttanaaaaactgtttntaatttacaatgacaagagaggaaagaggagcncaggaaacanaaactccaagaataattaanaagacattgcaagtttccanaaaggaaagccacaanaaattttacncnctggcctaggaatttaatagagacagagtangtctctccttancagtagaaattataacttaaaactaaaaatggaacttattaccaaattttaatgtttcaaataagaagaatngagatanttttttaaatccaagccataacaattttntntgaaacagtgcaaggcatgtcactccctcaaaaatcaanattactcanttttcttttgctttgaaaaactntngggccaggganaaagtgaaaaatttncaatgtnttttttcaaaatgtgggaatntttctggcagaaaataaatnttaaaaatagntaatttaaatggaagtcnttttanaataccttttaaagggcccacttccttttcaaaaccaattngtaatgncctttntgttttgtttaa

SEQ ID NO: 5741 - DNA, 847 bp, Homo sapiens
  misc_feature 661, 686, 701, 721, 724, 727, 728, 752, 754, 772, 783, 788,802, 816, 838: n = A,T,C or G
gactactatagggcgaattgggccctctagatgcatgctcgagcggccgccagtgtgatggatatctgcagaattcgcccttagcgtggtcgcggccgaggtaccattgtccagggagctctgaaaagcatcctatgtcgcaccccgggagagttttaccacaacactctgagcttcctcaaggtaagggcagctcctgccctccactttgggagtttgggagtcagagaatgccgcccgtggaattaggaataattggttctcctttctggagtcatgttccaatattaggagacggcatcggtgtaagcatccacacacacgtttctcacttccggccattctctctgcccctggtgaaaagcttcaagtaatagagctttttctttttcactccttatgccaagaacatcacacctacgttcccactcttcaatgagggggctatttttaatgacttggcttttcttttacttaaattttgatccttgatttctccttgcctcttcttgtagtccaatgctgatctctgttatggggcgttggctgccatccctggaactccggccagtccgcccttctggggctatgtacctgcccgggcggccgctcgaaagggcgaattccagcacactggcgggcgttactaggggatccgaanctccggtaccaagcttggcgtaaancatgggcatagctgntttcctgtgtgaaaatggtnttncgnntcacaatttccacacaaacatacnancccggaagcataaaagtntaaaaagcctnggggngccctaaatggagnggagcttaactcanatttaatttgggttgcgcccanctggccccg

SEQ ID NO: 5742 - DNA, 797 bp, Homo sapiens
  misc_feature 604, 622, 628, 629, 634, 661, 682, 701, 710, 717, 719, 723,736, 738, 748, 753, 757, 758, 762, 763, 764, 766, 770, 773,778, 782, 787, 790: n = A,T,C or G
gtaatacgactcctatagggcgaattgggccctctagatgcatgctcgagcggccgccagtgtgatggatatctgcagaattcgccctttcgagcggccgcccgggcaggtactgaaaaatctcatgtcctgggaaacccctcagtcctgggcaaactgagaccggtggttatcatacaaagagaaaaccaaataagactaaaattatgtccaaacactttcattgtggctaggaacacaagttgaacaccctaataaggaacacgaataataaaagcttgcattattgagtgcttatatgaggtaagtattatactattatctccattttaaagataagcaaactgagacatagtaagggtaaataagttagttagtgaaggcaccagaatttaaacccagaaagtttggttttagagcatacactacaatcagcactgtatggaaagatatctaagagcagagacaggcagagatgggagcactggggaagacatcatggaggggctagatggctacatcttggctttaaaaagtgagcaaaagtaagagttagaaaggagatgaaaggtatcatttattaatggggaaaatcacccaagcngtggtctgtagtggatcncacaanncagtnggactggagtgaaaaatgggctggaancttttttttttccaaagccanaaaaggagtagttttttanggggaaaanggttggngncccnttttccccttaantnaggggggggnccctngggnngggnnncncccnttnggggngaanttccnccncccttgg

SEQ ID NO: 5743 - DNA, 880 bp, Homo sapiens
  misc_feature 141, 186, 217, 225, 251, 270, 308, 348, 352, 354, 364, 374,379, 407, 417, 426, 435, 437, 443, 476, 481, 487, 498, 514,519, 542, 573, 576, 577, 603, 607, 618, 627, 630, 632, 634,661, 675, 676, 677, 680, 691, 703, 705, 706, 707, 708: n = A,T,C or G
  misc_feature 709, 721, 722, 723, 724, 725, 733, 736, 748, 749, 753, 754,756, 757, 758, 773, 774, 775, 777, 778, 783, 785, 787, 791,795, 803, 816, 829, 831, 833, 835, 837, 841, 847, 848, 852,853, 854, 855, 856, 859, 868, 879, 880: n = A,T,C or G
gactcactatagggccgaattgggccctctagatgcatgctcgagcggccgccagtgtgatggatatctgcagaattcgcccttagcgtggtcgcggccgaggtactttatttttttttttttttttttttttttccaaancaggaatgatctgagtatttgccagcacccaaataatcccaacanactacaatttttttgagtaactgatactatntttaaaanaaattatggcctattttattgtcatnaaacttttgaacaaacctnttaataattactaaatgtcctacaaaaattatgttgtntacatgggagtcaaatggatgacatggatgcggaaagcanaaananactggaaatnaacattttanttcanccttccaaaaagtaaaacccaccacttntttccccttnatcattttnaaaagcccntngcaatnaaccccaaacttgaggcctgaggggcggatgcnccaanactttntttccaggctntcatgggatttatctnttttngggaaaaatggtaaagttcttgngggaaaaaggctaaaaaaaaaaaaaaccaanaannccgccgggtttacctttgggccttancttnccttttccccncttggaaantanangnggttgtttaacgaaaaaaaaaacccantttttttaaaattnnntgntccaaggggtnttccccccccgngnnnnntggtttaaaaannnnntttttttnaantccccccccacnngagnntnnnctctttttttttttnnncnnatttnancntttnttgncttttttntttttatgggganaaaatttttttcncngngntntaanaaacanncgtnnnnnttnaaaaaaaangggggggggcnn

SEQ ID NO: 5744 - DNA, 1193 bp, Homo sapiens
  misc_feature 2, 5, 6, 7, 8, 11, 16, 17, 18, 20, 21, 22, 24, 25, 27, 28,30, 31, 33, 38, 39, 45, 52, 57, 59, 65, 67, 68, 73, 75,77, 78, 79, 80, 81, 83, 84, 87, 88, 90, 91, 112, 113, 119,202, 325, 353, 409, 444, 450, 468, 487, 504, 506, 511, 523: n = A,T,C or G
  misc_feature 533, 580, 618, 636, 641, 643, 651, 680, 686, 700, 712, 718,722, 738, 743, 764, 780, 793, 797, 817, 820, 826, 827, 830,832, 834, 844, 847, 849, 851, 853, 865, 875, 877, 878, 881,902, 904, 919, 928, 931, 941, 943, 948, 952, 959, 972: n = A,T,C or G
  misc_feature 977, 978, 982, 989, 991, 992, 994, 996, 998, 1008, 1017,1020, 1023, 1027, 1029, 1031, 1034, 1039, 1056, 1059, 1064,1073, 1079, 1080, 1090, 1092, 1105, 1112, 1114, 1126, 1127,1138, 1142, 1143, 1160, 1161, 1164, 1166, 1170, 1171: n = A,T,C or G
  misc_feature 1176, 1179, 1183, 1184, 1191, 1192: n = A,T,C or G
cnccnnnnttntatgnnntnnnanntnnanntntgttnntttatntattgtnattcntnttgggnanntttantntnnnnntnnttnngnngggaggggatcgatcctattnngtatanggcgaattgggccctctagatgcatgctcgagcggccgccagtgtgatggatatctgcagaattcgccctttcgagcggccgnccggctcaggtaccatggtgctgcacagaccatcaggaagaactgaaaagttcaggcaacttgagaaaataaagtcaccaccagcaagaagctgtctaaaataaccggaagattataacccangcacgtggaggagtgtgctagtgagtanaatgttatgaaagctactataggtcctccattagcatgcatgtgctaggtcctaangcattaagggaaagaggtagaaggattttgccacngtaggnaacaccttgaagtttcangttttgaagccaccttttntttttgggaaaggttgncncaaanggcttggtaaantttgttggangaaagcctggggggaaaaaggacccttcaacaaaagccttttcttcntaaattttcaaaggttccctttggttttccaccaattnttggaaggaaatttgcanttaangncccccttntatggaaaggttttggattttccccccanggggcnccttggccattggnctttgggcctcntgtggnaaancaaaagaattcccctnggggnttctttcccttcctttgggcntttttttttccccaanccttggttcttgncccncaatggggttaagacctttnccnccaaannggncntntggccatttntgnangngnccaaaaaagagntttgtttttntnnggntttcccccaggggcttaaagngnaagaaggaattgttnttccccaangangggccccctntnggttngtanttttggnggggggcaaccantaccnncttngaggggnannancnangggggaaaanggtatcttnggngangggncncnaantattngttttcccctttctggntcntgggnacccaaccncttaanntggtttgttnanttggggggggaanaaaattncntttttgggcccnntttttttttcntggnnccccaaaattatggaannccntngggnnccccntcngaannattgggnnt

SEQ ID NO: 5745 - DNA, 816 bp, Homo sapiens
  misc_feature 606, 630, 643, 648, 652, 655, 659, 660, 671, 678, 687, 688,692, 693, 697, 701, 709, 710, 712, 721, 722, 726, 727, 738,751, 758, 766, 782, 789, 802, 805, 814, 816: n = A,T,C or G
gggcgaattgggccctctagatgcatgctcgagcggccgccagtgtgatggatatctgcagaattcgcccttagcgtggtcgcggccgaggtacacatatcctgagctatccacagtccccgaactctgcaacattgctttcaggtgatagagacaagatggtccatgcaaatgagctgacacaagtcatgtcgtgtgcaatcaagataggatcccagacatcttcagaatggtttacagtcacaagaaataaagttccaatgaagtggttggcatttggaagcacactgttttaaatatatctccctgaaggtatgtttatatattagtgcactggtcaatatctgacactatctgtcattttattgcaaaaggatatcagggcaattaataggagggatcttagcactactttagacaatctttaaagcctgggtaagattcattagctacccaagtggcatttctgacttcaaattgtagtatcatgcaagatttatactggattaatggagcctggagtaactctacatttaattatttccattatggggtaaacagcacttgaattaatacaatttaacccgactgatgcagtttggttgnttttggtttacaaagaatagaatnggggatggggaanatccnagancgncctnnagaagggaccnaaggganaagttgttnngggnngatntttncctgggannanaagcccttnnaaanntttgccctgcnaaaaccccccttnttgtttntttttaanccttcgggggaattanattaaanattcccttttccntgntgccctccnan

SEQ ID NO: 5746 - DNA, 600 bp, Homo sapiens
  misc_feature 107, 108, 141, 143, 208, 259, 297, 334, 346, 449, 460, 473,532, 537, 552, 569, 578, 579, 591, 597, 600: n = A,T,C or G
gactactatagggcgaattgggccctctagatgcatgctcgagcggccgccagtgtgatggatatctgcagaattcgcccttagcgtggtcgcggccgaggtacttnnttttttttttttttttttttctggatttttagnanagacggggtttcgccgttttagccgggatggtctcgatctcctgacctcgcgatccgcccgcctnggcctcccaaagtgctgggactacaggcgtgagccaccgcgcccggcctanaagagttcctaatacaaagtaagcattcaataaatatntgttgaatgaacaaatgaatgaatgaactttctaggngtaaagggctgnttataacaatcaaaatgttttccttacctaaaaagcgtgattataaatcagcttaatagttagaagacaagtttgaattaaaaaggtttatgaaaggaaagtntgcaaatgctnatttttaaagatngcaaatttccctatttttcaaaaggtagagaaatgttaatttatggatatttgaaaacngtttntacatccccccactntttcattattaacaaangaggattgnnggaactcttcantggaanacn

SEQ ID NO: 5747 - DNA, 813 bp, Homo sapiens
  misc_feature 1, 506, 515, 517, 534, 544, 551, 645, 654, 657, 687, 690,694, 700, 711, 721, 725, 735, 741, 763, 778, 780, 793, 799,803: n = A,T,C or G
nactactatagggcgaattgggccctctagatgcatgctcgagcggccgccagtgtgatggatatctgcagaattcgccctttcgagcggccgcccgggcaggtacagttacattctgtggttttaaaatcttttttaatgggcttggtatttcttgccgttttttccttcaattatttttcttattatttgattttatgaccattttaaagctacctttatttagctttctgattacaataatgaaatgaccagtgttctctttttttaatgtatagtaagcaagaagagtgcaccacaacatcaacagccccagtccctacaacagaaattccgaccacaatgagcaccatggctgctgccgaagcagcagctgctgttgttgcagcagcagcagcggcagcagcagtagcagctgcagccaatgctaatgcttccacttctgcttctaatactgtcagtggaactgttccagttgttcctgagcctgaagttacttccattgntgctactgngnagataatgagaatacantaactatttnaactgangaacaagcacaacttactagtacctaagccgcgaccccccttaagggcgaattccagcaccactgggcgggccgtttactagtgggatcccggngcttcggtnccnaagcttgggcgtaatcaatggtcaataagntgntttncctgtnttggaaaattntttttccggngggnaaaaatttgncccccnccattcggaattcgggaaaaanttaaacttttccccncngggggggggcccntaaagnaatnggggcccccc

SEQ ID NO: 5748 - DNA, 876 bp, Homo sapiens
  misc_feature 61, 75, 84, 91, 94, 151, 180, 197, 246, 318, 385, 386, 400,408, 411, 436, 438, 441, 468, 469, 476, 513, 514, 516, 522,528, 567, 569, 570, 571, 572, 585, 586, 600, 601, 602, 622,629, 636, 642, 643, 667, 674, 682, 684, 697, 698, 704: n = A,T,C or G
  misc_feature 707, 709, 724, 734, 736, 747, 771, 776, 784, 789, 791, 800,801, 803, 809, 813, 814, 815, 816, 827, 846, 850, 857, 860,866, 867, 873, 876: n = A,T,C or G
gggcgaattgggccctctagatgcatgctcgagcggccgccagtgtgatggatatctgcanaattcgccctttcnagcggccgnccgggcnggnacagttacattctgtggttttaaaatcttttttaatgggcttggtatttcttgccgntttttccttcaattatttttcttattatntgattttatgaccattntaaagctacctttatttagctttctgattacaataatgaaatgaccagngttctctttttttaatgtatagtaagcaagaagagtgcaccacaacatcaacagccccagtccctacaacanaaattcccgaccacaatgagcaccatggctgctgccgaaacagcagctgctgttgttgcagcagcanncagcggcagcagcnagtagcanctncagccaaatgcttaatgcttccacntntgnttcttaaaaactgtcaagtgggaactnngtcccanttggtcctgagcctgaaagtttactttcccattgggnngntactgngtggtnggataattgaggaattaccaggtgaactatttttcaacntnnnnggaaaccaaagcnncaacttttacttannnaacccttggggcccgccggnaccaccnccttaanggggcnnaatttccaaaccccacttgggccngggcggnttctttanantgggatacccganncctttngtnancaaaagctttggggngtaaatcaantngggccataagntgggtttccctggggggggaaaanttggntaattccnctttncnaatttcccnnanaaaacnattnnnnagcccggaaancattaaaagtggtttaaancctnggggggnggncctaannaaaatnaan

SEQ ID NO: 5749 - DNA, 896 bp, Homo sapiens
  misc_feature 311, 323, 398, 422, 473, 485, 486, 521, 564, 565, 584, 589,593, 600, 604, 624, 628, 630, 655, 691, 697, 716, 718, 719,729, 738, 744, 745, 747, 750, 759, 772, 778, 784, 786, 788,794, 799, 806, 818, 830, 847, 849, 851, 856, 862, 866: n = A,T,C or G
  misc_feature 885, 892, 894, 895: n = A,T,C or G
tcactatagggcgaattgggccctctagatgcatgctcgagcggccgccagtgtgatggatatctgcagaattcgcccttagcgtggtcgcggccgaggtacaccaaacacttatttctacataaataccatgattacactgcaagattctttgaccaaataaagaaagtagaactttgttctgtttttaaaaactagacagactatgaattctcacctgtaagacatgttattattgctgttgacatcatttacagtttttcctggtgatactggtgggttgggtggatgctgggggagaaaaaaaaatnaaggtaaaaatnaaactcaacacacagggaatctttaaaaaaaaaattagacctgtagatgcctgtcaatatattatctgtcactgntctaatataatgggaaaacatttnccagctgagacaataatttgaatcttgggcattatcacttggtcatttggntcttaagcaaanncattttacttttgctgaaagacaacctgcttattnattttgggagatttaatataattatttcctggcattttttaanngttctttttgaaggaaatnaaaantttnaaaaacncccnaaaatggggctcaacaatgncttntnaagaaattttaaaaaaaaccctttnccaattttaaatctttaaaagaattaacccagactnccctcnttttaaccaaaaaagcctngnngaaatgcctnctattgtancaggcnntnttnttttttcanccccccattttcnaaaaantaaggngntnttccantggtncccaaantaaaaaaattantttttaaaattngttttttaaaaaaaaancntnccttncccctnttgnggccttaaattattttaanaaaaaangnnc

SEQ ID NO: 5750 - DNA, 898 bp, Homo sapiens
  misc_feature 13, 457, 516, 549, 601, 615, 627, 651, 660, 661, 679, 703,714, 729, 737, 743, 777, 791, 803, 866, 869, 870, 877, 887,890, 891: n = A,T,C or G
gactcctatagtncgaattgggccctctagatgcatgctcgagcggcccgccagtgtgatggatatctgcagaattcgcccttagcgtggtcgcggccgaggtacttttttttttttttttttttaaagttcagttttagttttttaccacttgatggcagtgatggagctagagctctaccctgagaaggttagggcaagaactcattatgaataacaaaagcgtaggtacaaaggaaatccctgacattttaatattattcacatttctaggtgatattacttatattgcaagtgacagtaatagggggaaaagcctctagatggagcttcagtactttctaagggaaaacatttcctgtatctttccaaatgcatattttatattattttacataatatattaaatccagaatggatttttacaaaataatatttaagggtgaatttatttcanatgtaattatgggaaattaattcaccaaatttcctaaataatttggaaaaaaatggctntttaaagtatcttacatttttaaaatcatttantaaatatttggtggaaaaagtattgtttaaaaccttttgaggtcaaaaccantttctatctagtantaaaagaatttnccatatctaaccaaaggtttggtnaaaaagaanntttttaattaagaaagtncagggtgctttaaaaatcaaatanttggccctttnaatttaaattctggnccatcttntttttnttatggcctaggtatcaatttcaaaaattttggnttttccccaagaanaaccataacctntttacttccacctcaattggccccaactttaaaaaaaattaaaaaccttggggaattttttanttnnaaaaaanaatttttttnaannaaatttt

SEQ ID NO: 5751 - DNA, 894 bp, Homo sapiens
  misc_feature 511, 581, 605, 622, 633, 638, 654, 666, 683, 686, 692, 707,714, 717, 728, 750, 762, 763, 767, 773, 774, 779, 782, 784,789, 797, 823, 833, 842, 848, 854, 858, 863, 872, 876, 877,878, 880, 881, 884: n = A,T,C or G
gactcctatagggcgaattgggccctctagatgcatgctcgagcggccgccagtgtgatggatatctgcagaattcgcccttagcgtggtcgcggccgaggtacacatatcctgagctatccacagtccccgaactctgcaacattgctttcaggtgatagagacaagatggtccatgcaaatgagctgacacaagtcatgtcgtgtgcaatcaagataggatcccagacatcttcagaatggtttacagtcacaagaaataaagttccaatgaagtggttggcatttggaagcacactgttttaaatatatctccctgaaggtatgtttatatattagtgcactggtcaatatctgacactatctgtcattttattgcaaaaggatatcagggcaattaataggagggatcttagcactactttagaccaatctttaaaagcctgggtaaagattcattaactacccaagtggcatttctgacttcaaaattgtagtatcatgccaaganttatactggattaatgggagcctggagtaactctacatttaattatttccattatggggggaaccagccnctttgaatttaaataccaattttncccgacctgattgccanttttggtttgnttttngggtttaccaaagaanaaaatggggatnggggagaatcgaaaaanccncctcanaaaggaacaaggganaaggttntangggggtgaatntttacctggggaaagaggcctnaaaaaccatttnncttncccaanncccgnttntntttgntttaaaanccttcggggaatttttttaaattccnttccccgaanccccccatnaaaaancccccntgtnaattncccctgttngtcnnnannggnaaaaattttt

SEQ ID NO: 5752 - DNA, 622 bp, Homo sapiens
  misc_feature 346, 461, 502, 570, 572, 577, 609, 616: n = A,T,C or G
gactcactatagggcgaattgggccctctagatgcatgctcgagcggccgccagtgtgatggatatctgcagaattcgcccttagcgtggtcgcggccgaggtactccattctccagcattttctacatctggcaagctcgaaagtgaaaccctagtgggccatcatgcaggttttgagttatttactgttacagatgaggaaactgcgaagctacatggccacagtcaacaacgacaacagaaggcaacatagtatggcggttaagagcaccgactctgaagccagcctgaatcctaagagccagagctgtgcaacagcaggtaaatgacttatcctgtgcaagnttcctccttaatggaaatagtgcccaaggccacaatatcgcgagatttacaccgtaaagctggaaacaactcccgtcctagagtaagcactgtttactattaagcagcattcagnaggggcccctttgcaacctggaaaccggctcccttggacgntaccttcatctatgcctcattttcagtgcccacttcaggccttttcccaggacaggtgaaaaaaaccncngaganaccagcccaggttaaagttttgagtcagggancccctgncccact

SEQ ID NO: 5753 - DNA, 639 bp, Homo sapiens
  misc_feature 250, 413, 451, 480, 482, 486, 491, 513, 520, 529, 531, 534,535, 537, 541, 543, 548, 557, 562, 566, 578, 583, 590, 610,612, 613, 622, 627, 635, 636: n = A,T,C or G
atagggcgaattgggccctctagatgcatgctcgagcggccgccagtgtgatggatatctgcagaattcgcccttagcgtggtcgcggccgaggtacagagaaaccacaggttgccctttccacagctggatagacttatccaaaacggcaggatgattctgtattaatctttttggaaagcatgtctgtattaagattgcaaaacatacagatagctaccacaaattaggtcaaatgactgatcaagtngtaacatctgtgaggtcaaattccagttataataaagtgcctagatacacatttatacaacagaccataagagctgaattctttacaaatatctttatgggcatgtaaaattgactctgcatttctgcatgtgggcattcacataaagagagaccagtctgcnctgagtcatatatactccaacttggaaaaagtaggtgntaaccaactgggttaaatcattgccaagntntggntgggnatataaacaaatgacctgggtnaaaaacnatgaatttntncgnncnagtngnaaaanaaggggccncctcntttnaaaaaaaccctnccggnaaaaaanaccttggtttttggggggcncnnatttttganttttnaaaggtgnntat

SEQ ID NO: 5754 - DNA, 649 bp, Homo sapiens
  misc_feature 101, 404, 411, 414, 428, 477, 491, 497, 502, 505, 542, 546,547, 555, 561, 564, 588, 602, 607, 625, 626, 627, 645, 647: n = A,T,C or G
ctatagggcgaattgggccctctagatgcatgctcgagcggccgccagtgtgatggatatctgcagaattcgcccttagcgtggtcgcggccgaggtacanagaaaccacaggttgccctttccacagctggatagacttatccaaaacggcaggatgattctgtattaatctttttggaaagcatgtctgtattaagattgcaaaacatacagatagctaccacaaattaggtcaaatgactgatcaagttgtaacatctgtgaggtcaaattccagttataataaagtgcctagatacacatttatacaacagaccataagagctgaattctttacaaatatctttatgggcatgtaaaaattgactctgcatttctgcatgtgtgcattcacataaagagnagacccnggncttgcactggaggncattatatactccaaccttgaaaaaaagttaagtgtaacaacctggggntaaatcaaggcaanggctgnttggnaantataaaccatggactggggtaaaacatggaaattctnggcnnaaggtagnaaatanggnggccctcattaaaaaaaacccttnccggaaaaaaaacncttgntattttgggggcccagtnnncttggatttttcaaaggngntt

SEQ ID NO: 5755 - DNA, 400 bp, Homo sapiens
  misc_feature 3: n = A,T,C or G
gantgtaatacgactcactatagggcgaattgggccctctagatgcatgctcgagcggccgccagtgtgatggatatctgcagaattcgccctttcgagcggccgcccgggcaggtacgcgggtggctggttgtttttacctatacaaatcaaaaggctattttgattgtcttcattttccccttataaattaggttggtgtctttagtcatttaggctaagttttactatctgattcttaacttttctattgtagaatggtgctgtcatgtggactgtcctcccgagtgtcccactggatgttcagagaatttatgtgaaggtcacgtcatttagcattgagatgctgtggttaccttcttccatttcttccataatatgcagccacatctatgtgtgc

SEQ ID NO: 5756 - DNA, 409 bp, Homo sapiens
  misc_feature 76: n = A,T,C or G
gattttatacgactcctatagggcgatttgggccctctacatgcatgctcgagcggccgccagtgtgatggatttntgcagaattcgccctttcgagcggccgcccgggcaggtacaagacttctgtgtgctttcctgtgtcaaactgatcagaggatcagtgtgtggaaagtcccaaggtttgggctgggtgggaagtaggaaagcctcataaacactcaaagctgtgaatggaaattcacatagtattctgtgatcagtaggtaaatagtaacacccaggccaggaacgtgaaggtgaagtgaggtgagggaaaggagacagaataccaagagaagcaaaacactttaactaaagggaagcgacagacctcctccctccaggagagggccagcttgagaaatggaag

SEQ ID NO: 5757 - DNA, 390 bp, Homo sapiens
  misc_feature 4: n = A,T,C or G
ttgnatacgactcactatagggcgaattgggccctctagatgcatgctcgagcggccgccagtgtgatggatatctgcagaattcgccctttcgagcggccgcccgggcaggtacgcggggaggtcacacaggaaagaagcagaccacgaaatgaacttcggctgtcacctgcggtgggcgcactagaggtcttttgaactccttcggctaccgtcgccgcgttctcgctgtgcactcttattctgcgcctgcgcgcggctacagcacggttcgtttttcctttagtcaggaaggacgttggtgttgaggttagcatacgtatcaaggacagtaactaccatggctcccgaagttttgccaaaacctcggatgcgtggccttctggccag

SEQ ID NO: 5758 - DNA, 1198 bp, Homo sapiens
  misc_feature 15, 16, 320, 324, 376, 403, 412, 445, 465, 483, 493, 496,503, 512, 522, 536, 553, 558, 580, 590, 614, 616, 617, 622,624, 627, 628, 636, 639, 646, 647, 648, 651, 652, 661, 669,673, 681, 682, 695, 698, 713, 716, 726, 743, 746, 747: n = A,T,C or G
  misc_feature 751, 754, 759, 764, 777, 779, 785, 792, 796, 797, 802, 805,815, 816, 817, 825, 827, 846, 848, 849, 862, 864, 865, 866,871, 872, 873, 879, 882, 884, 889, 890, 895, 897, 909, 915,917, 918, 919, 921, 925, 932, 933, 934, 940, 941, 944: n = A,T,C or G
  misc_feature 949, 951, 959, 964, 966, 967, 968, 969, 978, 994, 997, 999,1000, 1003, 1004, 1005, 1006, 1009, 1012, 1015, 1017, 1019,1022, 1023, 1027, 1032, 1036, 1055, 1056, 1059, 1061, 1064,1067, 1068, 1075, 1089, 1090, 1091, 1092, 1108, 1109: n = A,T,C or G
  misc_feature 1111, 1116, 1117, 1118, 1123, 1125, 1128, 1129, 1139, 1141,1142, 1143, 1144, 1145, 1148, 1149, 1150, 1152, 1154, 1158,1171, 1173, 1177, 1184, 1186, 1189, 1191, 1193, 1197, 1198: n = A,T,C or G
gccgccagtgtgatnnatatctgcagaattcgcccttagcgtggtcgcggccgaggtacgcgggtggactggggagaacttcggaggatgttcatgtccaggagcagccccacgccctgtatggtcggtgtctagagcctcacagcaactaagaccaacccatctcttagaagaaggaatgtcaaaatgtcatgttcaattttacattcagtgcctggaatcttttcttcacaattgaaatgaaatgtgctgaaggaggtgaatccatgcattaatcttcagctcacaaaggaaatactacataataagcaagaccacanactnaagaacggacattaattggattttttttttgccctggcctggaaaagaaaangtaccctgccccgggccgggccgcttngaaagggcnaaattccaccaccacctggcggcccgttactangtggatccgaaccttcgggnacccaagcttttggcgtnaatcaatggncantaagctnttttcttgnggtgaaaaantggttttccgctcncaaattccccaccaacnatttncgaaccccggaaagcattaaangtgttaaaanccctggggggggccttattgaggngnngcttnantcnnaattaaanttngggtttnnnctnnactgccccnttttccanaccnggaaaaanntgtctttgcccanttntatttaatgaaatantgnccaacccccngggggaaggggggtttnggnntttnggngcttnttccntttcccctttaantntaattntttgccnttgnnttttnggnttgtggggannngtatttanantaattttaagggggggaantnnggtttttccccanannntgggnnnaacccnggnanaaaannttttnantaaaaggccccnaaaggncnnnancccntaaaggnnnattgtnngcnttttntnaagtcccnccctntnnnnttataaaanatcctttaatttaggnggnannccnnnnggnttnatnancnccnntttnccagngaanccttttgcctttttttcannccncnttntanngaaattncctttttttttggnnnngggggtttttttatanncntaggnnnaatantntgnngggatttttnannnnnttnnnanancctntatcactctgtgntntttntattttntnttnantngaann

SEQ ID NO: 5759 - DNA, 1150 bp, Homo sapiens
  misc_feature 15, 79, 414, 435, 437, 445, 514, 525, 539, 587, 593, 610,612, 620, 626, 637, 655, 656, 660, 702, 709, 719, 720, 726,743, 748, 761, 763, 770, 775, 776, 795, 796, 813, 824, 832,833, 837, 846, 857, 858, 867, 872, 874, 879, 884, 891: n = A,T,C or G
  misc_feature 900, 905, 913, 914, 948, 951, 952, 955, 960, 967, 970, 972,973, 977, 990, 997, 1004, 1010, 1011, 1017, 1024, 1026,1028, 1029, 1034, 1035, 1039, 1043, 1045, 1049, 1050, 1051,1054, 1063, 1066, 1073, 1080, 1082, 1106, 1107, 1108, 1113: n = A,T,C or G
  misc_feature 1114, 1118, 1119, 1122, 1124, 1125, 1128, 1131, 1133, 1136,1141, 1148, 1149: n = A,T,C or G
gccgccagtgtgatngatatctgcagaattcgccctttcgagcggccgcccgggcaggtactttttttattcacctcanatgggtcatgtgccgacatcataaggggatttgagggaggcatatcaaacatgtgaacataaaaacccaatcattatgcttatctattacaaaaggatcaagtttaggctcttaaaagctcccaaatcaacttgatcaaaaacaataaaagattactgtttagtttttcaaatatctgagctactaagaaacatattttggcactacatgagttattctatactaattattgtgagcctataaagctcattaaaaatttttaattttcttgcagacctgcaaaatttggttatttgacatcacttcaatcactgacaagcagggccataaaagangtgtcattaatgctctaatangngatctggnttctcctaaaagtagacaaccagtagaggctggaaatatcacagaaacgtctttgctttaaaacaactngtttaccttangaaaaccccctaanggattgatttcaacagtttttccaatgctttgggcgaattccaagttncacggngccctaatttggaaacngnaaacattnaacccntttttgaaagnaccaaaatttaccaagcnngtgntggtaaccagttcacggtttttaagggttaatgggcaaaagncaagaancttaatttcnncccctnggaaaaaaaacattctnggccngggaaaaggaatnanccttttnaactnnttcttttttgccaacaganntttccctttttaccggnggcttttaacntttaaggnngttnttttaactnggccaaaaaanntttcccaantgggnanaattntttgnaacctcnttcttcacnaaaangggggccnntttaacaaggcctgttttggtccaaaaccctttnttnnggnaattnggaaaangancnntccnaaaacccctttgngcccttnggggttncccaanntttttngggaaangnannttttnnaacnttancntccnnnccntaaaagggnaanctttaanaattttntntaaaaaaaaaaaaaaaagggtttnnnttaanngggnnccntnnggnggnanggngtttnccccccnnt

SEQ ID NO: 5760 - DNA, 1183 bp, Homo sapiens
  misc_feature 14, 415, 500, 570, 576, 589, 590, 625, 626, 629, 653, 657,663, 664, 671, 682, 692, 695, 703, 713, 736, 750, 751, 765,767, 768, 784, 800, 801, 812, 824, 826, 827, 848, 859, 860,864, 874, 875, 887, 889, 896, 902, 904, 909, 918, 919: n = A,T,C or G
  misc_feature 929, 936, 937, 940, 941, 954, 960, 968, 979, 982, 988, 989,990, 995, 996, 1007, 1019, 1029, 1035, 1038, 1055, 1056,1057, 1065, 1067, 1072, 1078, 1080, 1082, 1089, 1091, 1092,1093, 1097, 1098, 1105, 1107, 1115, 1126, 1127, 1133: n = A,T,C or G
  misc_feature 1134, 1135, 1138, 1141, 1155, 1157, 1162, 1164, 1171, 1172: n = A,T,C or G
gcctttgtgatggntttctgcagaattcgccctttcgagcggccgcccgggcaggtacgtcccaccccctgctgggtcagtagcttctgggccagtggttgggggcagaaagaaggtcagaggccctgaacagataaagcaggaggtagagagtgaggaggaaaaacccgacaggatggatattgacagtgaagacacagattcaaacacatctttgcaaacaagggctagagaaaagaggaagcctcagctggagaaggacacaaagccgaaagagcccaggtatactcccgtgagcatctaccaggaaaagctgctgctcaagaggctggaagcttgtcccggtgcttgtaccatgacttccggaagctccggagacttgaaacgcaaactgattgtcagacaaagccaaaangggatagggggattaccacttttttgacttggatcaaagttggttaatgctgctcttttgttagtttgaccggattttatggagnccaaagaaaggagggaattttcagactttcagcttggacaaagccacgtacccttgggccgcgaaccacnctttanggcgaaatttcanncacacttgcgggccgttccttagtgggatccccannctncggtaccaaagcttgggcgttaantcantgggcnntaacttntttccttgtgntggaaatttnttntcccgttnccaattttcncacaacattacgaacccggaacnttaaaagtttaaanncttggggggccttntnngtgaccttaacttcanattaaattggggtggnncttccttggcnctttttcattangnnaaccttttgtgcccccttttnttaatgaattnnccancccccggggnnagggggttttgntnttggggncttttncnctttntttcttaannaattccttgncttgggnngtnnggtttgggggagnggtttngttatttnaaggggggttncgnttttcnnnaaatnngggtttccccnaaaaaattttancaaagccctntaagcncgnacctttaaaggcctttnnngggttttntnggtcncccccngngnttaaaanannntttnnaaggggngnaacccaanatttaaaaccnnttcccnnnaanctntggccttttttacncnttttngnaatttcnntttttttgaag

SEQ ID NO: 5761 - DNA, 1198 bp, Homo sapiens
  misc_feature 170, 173, 179, 238, 278, 313, 334, 368, 371, 401, 432, 443,468, 472, 482, 520, 528, 549, 553, 565, 570, 573, 574, 581,589, 591, 608, 611, 624, 627, 638, 649, 651, 657, 708, 715,718, 724, 729, 732, 751, 757, 767, 768, 776, 778, 784: n = A,T,C or G
  misc_feature 791, 796, 802, 806, 812, 825, 829, 854, 859, 864, 871, 877,878, 889, 897, 903, 904, 915, 917, 920, 926, 936, 937, 939,943, 944, 951, 960, 962, 965, 967, 976, 980, 987, 993, 997,1000, 1001, 1003, 1013, 1015, 1016, 1026, 1028, 1029: n = A,T,C or G
  misc_feature 1030, 1035, 1036, 1046, 1052, 1053, 1061, 1069, 1070, 1071,1077, 1088, 1089, 1091, 1102, 1118, 1123, 1124, 1125, 1128,1133, 1137, 1138, 1152, 1158, 1160, 1163, 1164, 1165, 1170,1171, 1177, 1179, 1189, 1192, 1194, 1195, 1198: n = A,T,C or G
ccagtgtgatggatatctgcagaattcgccctttcgagcggccgcccgggcaggtacgcggggggtctaaattgaaatggtgacagtgggacctggtgtgggggttgtttgttgtgtaagagacactcagagaaagaatccctgctatctgagaatttcaggagtacaanatnttggancagacgtaaagaaagttgcaaagaaagaacaatagaagaccacgaactggtgattgaantgctatccaactgggggatagaagaagaaaacaaactatnctttagaaaaaattatgccaaatatgagttctttnaaaacccaatgtatttttttncagagcatatggtatctttttgcaactgaaaccnatngtgaaatatcccccacacagattttgccanatgtttctgagttcaagccccatatttctgnaattcatgggnttctttaccatgccaaaaagaaccntggnaaagaaagtnttgggaaaaaaatttactttttttctaaagaaagaacnagggttantattttttctactaaaagggnaccnttcaaaaagganccggnggnntttgcantttttttnanccgaattttggcaattnggnggattttttattntgntcccttggcanggccaaaaaancntttgangccccggacttaacttttgggttttttgttttaaagggggttcccttcaanatttgcnttnaccaanaaacnatntgctgtgggcctttttaancttaanaaaagcgggnnggggcccnanaccttnaaaatgntttgncctaanaaanaacccnattattccttccngggngtaccccgatttaattggttaaaantgggnttgcnacttttncttggnncgtaacccctnaagggganttccannccctggggggngnatntttggntcccaatttnncncaanntgggggnataaatggngnggngntgtcggggnaaanttttttnggttcnatgnacnnanaacaaacccntnncataaatatncnnnggggnntataaaaatngccccnntttttggnttcccccnnncccctnttcggggaaanntntcctttttttntaaaattttccccccngagannngtnaaaangggnnctaattattcccgnggtctntnggnnnaaccnntttggngnctcccccctntcntnnaan

SEQ ID NO: 5762 - DNA, 1203 bp, Homo sapiens
  misc_feature 16, 365, 393, 426, 443, 444, 450, 484, 486, 492, 507, 513,523, 537, 553, 591, 597, 601, 609, 622, 633, 637, 651, 652,664, 671, 683, 687, 689, 693, 702, 707, 709, 710, 720, 721,723, 744, 755, 758, 760, 762, 763, 765, 768, 770, 772: n = A,T,C or G
  misc_feature 782, 783, 791, 798, 801, 802, 806, 810, 814, 822, 825, 827,828, 831, 834, 837, 842, 843, 845, 849, 850, 865, 867, 871,875, 880, 886, 888, 892, 894, 895, 897, 900, 902, 903, 904,905, 906, 910, 916, 919, 920, 927, 932, 933, 951, 962: n = A,T,C or G
  misc_feature 966, 975, 979, 986, 987, 990, 996, 997, 1000, 1001, 1004,1005, 1006, 1007, 1008, 1012, 1016, 1021, 1027, 1031, 1032,1035, 1037, 1038, 1045, 1046, 1047, 1048, 1052, 1054, 1059,1065, 1067, 1069, 1078, 1085, 1086, 1087, 1089, 1090: n = A,T,C or G
  misc_feature 1094, 1099, 1104, 1108, 1114, 1116, 1119, 1120, 1128, 1131,1134, 1139, 1140, 1149, 1153, 1154, 1156, 1168, 1178, 1182,1184, 1188, 1191, 1194, 1196, 1197, 1198, 1200, 1201, 1202: n = A,T,C or G
gccagtgtgatggatntctgcagaattcgccctttcgagcggccgtccgggcaggtacaaagttgccaaaggcctgcatccataccatcagatattatgcatcttgcttttccacgatcaaattctgggtcatgaaccagatcttccatgtcttcccagagtttacgctgatattgagtcatataggccatgtagctagcagctcgggctgcaatggaggcagcgtggtaaaacctacaacccatgacctccatttcttttgaggtagaatctagaggggatgttgtgtttcctcttttgctgtggtctaatgcttctacaatggggccttcagctggtgggtttggttggaaaggagaagtgtncttggccacagggatatacccttgtgtnccattgaaagaagaaaggattggcaatcagcanggtcttttaaaaacctnnattggnggcaattttttaaaaagagggatgccattgggangnaacccnaaccgtttttttagnaagtcncaacaaattnagggtttccctttncattgacttccctttnaaaattggaaatgggcacccctttttttattacacccntttttngttnaatttctncttaaaaaaaacnttggaaaaatnaaanttggtttggggggnnaaaaatggcctnccctttngtaataatcttnaaangnggantttgtaaantaatntnnttttttaaanntnggggaaaaaaatttttccctnttttaaaaggnggngnanntnccnangnacttgggggnnttttcccnttggccntgnnaaanattnaaantttaaaanagntnntgngcntgnaaaanntngttnnttttggggacatttnantttntttnttttngaaaananaagngnngnttncnnnnnttcnggaaanttnnaaaaaantattnnccaaattttttttaaccnctaaaaagggncctntttttttgncccntaatccnnaantttggnnttnnaannnnngaantttngggtnattttnaaannttntnnaaaaaannnnctcntnttttnaaaatnangnaaaaaaaanaaaaacnnntnncatnctccnggggnaatnccccananggnngtttttanttnccngcaanncatgggaantttnntngattttgggtanttatcccctntccncntccngcnccncnnngnnna

SEQ ID NO: 5763 - DNA, 644 bp, Homo sapiens
  misc_feature 121, 151, 153, 170, 248, 486, 603, 618, 627, 634, 638, 643: n = A,T,C or G
gattgtatacgactcctatagggcgaattgggccctctagatgcatgctcgagcggccgccagtgtgatggatatctgcagaattcgccctttcgagcggccgcccgggcaggtactgtantctcaactggtggtgttaatattgctattngnaaacctgtaatgtgatngaactgtggtcatggcattgtgtttttggaaaaaatatgaaacaaccattgatgcttatcatttggatagatgtttgntttatttgcatgctttaagaaactacagctatattggagcttacaagtttggagctggcaaagagcatgcaaaagaggggatgctattcattatgtcttgtttatttccaaatttgtccccattttgcatttttttccctaaatttgaaaaaatcatatccctttttcatggcaaaagactgataatcacatctaaagtttagggggaaagatctgtattagtaattgtattcactanaagggcttccaactgcctgctactaagtcatataacatatttataaaggaaatatgaaaatggcttaaacatggcttaacatatttctttttggtaaaaatatattttttaaatcanttttaaaagcacaanatctttttncctttanaaanggaant

SEQ ID NO: 5764 - DNA, 881 bp, Homo sapiens
  misc_feature 225, 252, 276, 321, 326, 337, 338, 363, 364, 385, 418, 421,425, 429, 447, 460, 482, 484, 485, 489, 497, 500, 508, 510,529, 540, 545, 570, 576, 585, 589, 590, 599, 600, 602, 608,628, 638, 643, 649, 668, 669, 670, 678, 679, 680, 681: n = A,T,C or G
  misc_feature 684, 697, 698, 699, 700, 705, 706, 707, 710, 717, 721, 722,734, 736, 737, 745, 746, 750, 753, 766, 767, 768, 774, 775,779, 793, 816, 819, 821, 825, 827, 831, 832, 836, 841, 842,850, 852, 855, 860, 862, 863, 864, 865, 868, 871, 872: n = A,T,C or G
  misc_feature 875, 876, 878, 879, 880, 881: n = A,T,C or G
atgctcgagcggccgccagtgtgatggatatctgcagaattcgccctttcgagcggccgcccgggcaggtacgcgggtatccaggcgctgatcagcggtattgaagcccagctgggcgatgtgcgagctgatagtgagcggcagaatcaggagtacttgttgttgctttgtttggagggtgtggtggtctccactcccgccttgacggggctgctatctgccttncaggccactgtcacggctcccgggtangaagtcacttatgagacacaccantgtggccttgtttggcttgaaagctcctcagaggaggggccgggnaacanagtgacccgannggggcagcctttgggcttacccaannacggtcaactttgggtccctncgcccgaaataccacataagtacctttggccgntancacncttnagggcgaaatttccaacnacacttggccggnccgttactaagtgggaatcccnannttcngtaacccnaanctttggcngnaaattaaatgggtaccatnagcttgttttnccctngtgttggaaaaatttgtttattccngttttnacaaatttncacnnacaaaaaannantgtatnccccgggaaagccataaaangtggtataanccctngggggnggcctaaaatgggaggtgnnngcttaacnnnnacnatttaaatttgtnnnntttgnnnttnaaattgncccnnttttttacaagngnngggaaaanncagnttntgcccacgcttgnnntttaannaaanttgggaccaacacnctcgggggggataagggttggtntgngngtantntggnncccnttttnngcgttttncntcntatanannnnaanacnntgnnannnn

SEQ ID NO: 5765 - DNA, 606 bp, Homo sapiens
  misc_feature 1, 14, 26, 34, 52, 64, 73, 122, 129, 130, 139, 144, 174,253, 292, 306, 326, 345, 394, 396, 407, 427, 527, 588, 603,605: n = A,T,C or G
ncttagctttgaanaccactattttngaattggnccctctagatgcatgctngagcggcccgcnagtgtgatntttatctgcagaattcgcccttagcgtggtcgcggcccgaggtactccnacttttnnttttttttnttttnggtctcaaagacatttatgagtgaaagaancccgtatcgaaagcttacatgctatatgattccatctgtgtgacattttcaaaaagacaaaagtgtagtcatggagaanagtggttgccaaatgttatatgggggaagggggttactncaaagggataacanaattttttagggtgatgttnctgctggaatcctaattgnggagatggttacaggactctacaaatatgttaaaattcacagaactgtncnccaaaattaanaagtcaaattttctgtatgntaatttaaaaaataaaagaaattttaaaaaggcaattttgccatttaaaatttatagttaacacatttagagaggctatttaaaattttgttgtttgcancataattccagattataacaccattttaatgagtaccataggcttcatttgacagtgtttnatggagctcacagancnt

SEQ ID NO: 5766 - DNA, 647 bp, Homo sapiens
  misc_feature 601: n = A,T,C or G
gattgaatacgactcctatagggcgaattgggccctctagatgcatgctcgagcggccgccagtgtgatggatatctgcagaattcgccctttcgagcggccgcccgggcaggtaccagatttattgcctgccaggattggaattcatgcagagaggaaggattcatgaaaaaaataatcaaagtcaggaaagtctttttctgtaatcttgtctcatacagtgagttatttttgtctgggtagtttacggggatgtaactccttcagtcatctaaccgtgatgtagtaaaagtcatttgcaggaaatgaaactccactttgttacttttttcacttaaaggctaatctgattagctttaaaacatttgttcatcttttaattcagtatttgtatgatgcctatggaagacatatggatttaaatagaacttggctaaccatctaccaataagagaaagtgagatgctaaatcagagaggcaggaaagtctatttcagtaaaagctattttgacctgaaatactgtaggcagtcttacagagtattttaattgggaggatattgatgcatgctagtaaaaaaagtgtatttgctgatatggntgaagttatgtaatcattaaatttctatataagtttaaaaatgtga

SEQ ID NO: 5767 - DNA, 598 bp, Homo sapiens
  misc_feature 7, 23, 56, 101, 371, 404, 414, 424, 425, 426, 431, 476, 495,585: n = A,T,C or G
gacttgntatacgactaattagngccctctagatgcatgctcgagcggccgccagngtgatggatatctgcagaattcgcccttagcgtggtcgcggccgnggtactccagcctggctgacagaacaagaccctgtctcaaaaacaaaaacaaaacaaagtttcttgtttgttaatcatcagcttgttgatagaaaactcacagaattggagaaatatttactattcctttctttctgctaataccactaatcattttctatgaaagacctgttctttttttgaacttatgaataatgttagaaatggaacatgatgttttaaatgtatacataaaccttccaaattaattatcaggtgatccagtagtanacctgtgacctctgaaggctcctgcttctcatnccttcccttntgctgtgatnnngaganttccctctgctcattccccttgtgtctgtttcttccatcctcttncccatgctccctctgttgncatttccccttactctccactctttgcctgcactccaacctgggcgacagaacgagactctgtctcaaggtaattaaaataaaaatattngcaaagggcattt

SEQ ID NO: 5768 - DNA, 599 bp, Homo sapiens
  misc_feature 12, 14, 25, 29, 37, 45, 59, 62, 83, 96, 103, 114, 182, 186,214, 216, 218, 239, 301, 302, 334, 338, 355, 387, 421, 433,458, 459, 463, 487, 503, 520, 536, 538, 554, 567, 574, 579,580, 586, 599: n = A,T,C or G
cgactactatangnctaattgaggnctanttgggccntctagatncatgctcgagcggncgncagtgtgatggatatctgcanaattcgccctttngagcggncgcccgggcangtacctgagcccagttctcccacctggcatggctctacaaccatgaaaccctgatgccctcacatgcntaanaagccctgacaaagtggatgtggatatntntntcactctgcaaaatgagactnacgatgacctgcaatgtgatgcttctttgggccttgaaaaaaaaaaaaaaaaaaaaaccacnnaaaaccacccaattgctttaaggttgcctgantcanagggcaccttgatgctntggccagggacactgaagactgaatcacctancttgcctttgcataaactatttactaatatgtgntttcatttctgnttttttccaaccttaagctttatgnncccntaatccacagcatgtccttgccgnccatgcctttactccnatgcataaaaggaggcntaggcaaatgtacctngnccgctaccactcttanggcgaatttcaanacactgncgggnncgttcntaggggatccgan

SEQ ID NO: 5769 - DNA, 652 bp, Homo sapiens
  misc_feature 605, 616, 637, 645: n = A,T,C or G
gattgaatacgactcctatagggcgaattgggccctctagatgcatgctcgagcggccgccagtgtgatggatatctgcagaattcgcccttagcgtggtcgcggccgaggtacaaatctagctgagaacaaagaatttatattccaaacaggataaaagtatgaaaaatgtctttattacctacctagtattttccttcctccgtttatgacttcttttacatacacgttttatggaattattcaggcaaatgccttctttgggactcctaactctgtgtgcagcatggttgaagaatgggatattcctgttacagatacatcaggcacatcaccaactcccaacgaatcaaatccaattgaatgcttttaaccctaaaattttcaggaaacaaatttatcatctttgctaaattagaagacacaatgggagccatatggtaatggtgaccatatttcccaaattataaatttatggcatagaacctgaggaatgctcatcatggaaacaacaggagtgaaaatttaaatgcaagcagtgtgggccccatattgctctatggctaccatggctgcctgtcccattcaagtgggatgtgtttcanaggaagccctnactttggatggcgcccccctnatggaaanggaggag

SEQ ID NO: 5770 - DNA, 645 bp, Homo sapiens
  misc_feature 351, 490, 495, 501, 567, 584, 586, 593, 605, 631, 637: n = A,T,C or G
gaattgtaatacgactcactatagggcgaattgggccctctagatgcatgctcgagcggccgccagtgtgatggatatctgcagaattcgccctttcgagcggccgcccgggcaggtacaacatctgctgtttcaataggctgcatccattagagctgctgtttcactgtgtgtttgtgcctgagttggaggtggaggggcaaagacagcgtgggccgtgatggccacacacagggcatgcgtgtcatggggactcagaccctggtggagatagtatggtgcaaagcatggcctccgcactaaccctgggtcctcacctggtgcaaggtgggaagctttcctggctcgcanaagatcactaatgtgtccctgtgtaggctcctcctaggttgaatcagctgaggcagcacctgatgaagaaactcaggaagacagccccacatctctaaggagaaatgaagaaaagcaaatcctgctctctctacttttnacctnctgctncccatgttccctgcctggtttgctgttgatctgttgattgacttaaactgtaagcccatggggcanggccagtcacttttttntnatgacanagctcactgcanggctgtgctcggtgctagggaaacancattanaataaaac

SEQ ID NO: 5771 - DNA, 705 bp, Homo sapiens
  misc_feature 289, 343, 346, 356, 366, 374, 376, 391, 392, 397, 418, 421,438, 442, 465, 467, 474, 490, 494, 502, 509, 517, 527, 531,556, 557, 569, 573, 595, 600, 608, 624, 631, 633, 643, 644,647, 661, 668, 670, 675, 680, 686: n = A,T,C or G
gactactatagggcgaattgggccctctagatgcatgctcgagcggccgccagtgtgatggatatctgcagaattcgccctttcgagcggccgcccgggcaggtacttgcttggtctcccctccctggaaacgttctcaaattggtaagaaaggcaattacagggctcagctcgtttgtttcccacctgtcaaagcactgtccttcattgtctgatgtccagtgtctcaataccattgtcttcttatttatctggattctggggttgtttcaggtgggagggtaaattnagtccctgttactccatcttgactgaaagcaaaagtccagtttctttagtttgntcnccccttatgnacaagaactnaatccctncnaaatgaatgggttannatgantttccctattagggtttttanctnatttgggccaaggatgngtgnaacccaattgggttcaccctttncnttcatgnacaccctggacttgangttnaccctctnaatattnatggcagnaattcctgcntganattgttagaaaaaaattaaattganngccgaaattgtntggntaagaaaacaaacttattttcnaccangaattggnttttttttgaaaaggncctcaananaatatttttnntcntccaaaaacaattnaaaaggntntcttnagaancattcntaaccatttagaattctcg

SEQ ID NO: 5772 - DNA, 897 bp, Homo sapiens
  misc_feature 3, 4, 5, 409, 462, 467, 475, 510, 591, 619, 636, 638, 659,676, 683, 686, 692, 712, 724, 740, 747, 753, 778, 783, 787,789, 837, 851, 860, 884: n = A,T,C or G
ggnnngattgtatacgactcactatagggcgaattgggccctctagatgcatgctcgagcggccgccagtgtgatggatatctgcagaattcgcccttagcgtggtcgcggccgaggtacgggcattgaatactgctgactggctttggagaatgattaaacaagaaatatgttataagataaaatggtagaaacaactatagtttgagtatgttccccaagtttcatatgttgaaaaattaatcctcaaattcatatgttgatggagtagaccccatgatgggacccaaggctttataagaagaggagggacctgagttgaaatgcactttttgcccttccacccttctatcacaatttgaggcagcaagaaggccctcaccagatgttgagcaaattccaatgtcangctcttggacttcccaatcttccagaaccatgagcccgaatgtttcttttttnaaatnaaattatncagtcccggtgtttttgttacagcaacagaaaatngactaagaccaagaattggaataaaattggaataaatgtttcatgttatgggtttggataccaatgggggtctgaccaacntttatttaatgaatgccccatcaaaatnttgaaaagaacccattntngaaaaggttttttattccttnggggtttctattcttgncttaccngcnttcttnataaaaaaaattttgggcanttccccaaaaancccatttctgggtttncattttnaaaaantaaattcaggccttgggcaaaaatnttttncctngnttttaagccttttttccaaaggttaacttttttttccccaagccaaanaaaacattccttangggaaaggntttttggacaaattaattgggggnaaattattttgtt

SEQ ID NO: 5773 - DNA, 882 bp, Homo sapiens
  misc_feature 3, 4, 5, 7, 12, 481, 485, 546, 547, 579, 582, 600, 610, 614,633, 660, 677, 690, 691, 696, 737, 750, 767, 770, 771, 774,783, 795, 800, 823, 832, 842, 851, 853, 856, 862, 877, 882: n = A,T,C or G
agnnngnttgtnatacgtttactatagggcgaattgggccctctagatgcatgctcgagcggccgccagtgtgatgggatatctgcagaattcgccctttcgagcggccgcccgggcaggtacgcgggacacattcagaggtgagcccagagcgggtaaagtggactggggagaacttcggaggatgttcatgtccaggagcagccccacgccctgtatggtcggtgtctagagcctcacagcaactaagaccaacccagctctcagaagaaggaatgtcaaaatgtcatgttcaattttacattcagtgcctggaatcttttcttcacaattgaaatgaaatgtgctgaaggaggtgaatccatgcattaatcttcagctcacaaagggaaatacctacattaagaagccaagaccacagactcaaagacggacataattggattttttttgcccattggcctggaaagaaaggtccttngggnccgcgaccacgctaagggcgaatttcaacacactggccgggccgttcttagtggatcccanncctcggtaccaaacttgggcgtaatcattggncantagctgtttcctgtgtgnaaattggttntccnttacaaatttccccaaaanataaccaacccgggaagcattaaattngttaaagccctgggggngccctaatgaggnngagcntaacctcacaattttaatttggggtttgggccttcaattgncccccttttttcnagttcggggaaaacctnttnngtngcccacttngatttttaattnaaatncgggccaaaaccccccggggggnaaggggggngtttggcgtnttttggggncnctnttttcnctttctttgtttaanttaan

SEQ ID NO: 5774 - DNA, 693 bp, Homo sapiens
  misc_feature 159, 358, 373, 381, 385, 398, 409, 422, 428, 430, 435, 438,443, 447, 449, 464, 471, 479, 480, 482, 489, 490, 491, 492,501, 509, 511, 512, 527, 528, 531, 542, 554, 565, 588, 591,598, 602, 607, 614, 616, 622, 626, 633, 636, 643, 645: n = A,T,C or G
  misc_feature 649, 654, 656, 660, 661, 667, 668, 673, 674, 687, 688, 693: n = A,T,C or G
acgactactatagggcgaattgggccctctagatgcatgctcgagcggccgccagtgtgatggatatctgcagaattcgcccttagcgtggtcgcggccgaggtacgcgggggacgccaacatggcggcgcccagtggcgtccacctgctcgtccgcanaggttctcatagaattttctcttcaccactcaatcatatctacttacacaagtagtcaagcagtcaacaaagaagaaatttcttttttcggagacaaagagatatttcacacagtatagttttgccggctgcagtttcttcagctcatccggttcctaagcacataaaagaagccagactatgtgacgacaggcattgnaccctgcccgggccngccgctcnaaanggcgaattcccancacactggccngcccgttactaantggtancncgganctnggtancaancnttgggcgtaaattantggggtnataagctnnantacctgnnnngaaaaattngtttattncnncttaacaatttttannacnatcattaaccnaatgcccggganagccataaaanattgttaaaatccttggggtttngcnctatatngaangtggnactttancntccacnattntatttgncgntttatancnttanattgncncctnntttttnnattanntgtaaaaaacctnnttccn

SEQ ID NO: 5775 - DNA, 950 bp, Homo sapiens
  misc_feature 399, 402, 469, 471, 472, 534, 561, 570, 577, 581, 647, 648,650, 675, 683, 687, 706, 716, 718, 730, 739, 740, 758, 761,762, 763, 767, 768, 811, 827, 838, 845, 848, 858, 865, 870,871, 872, 874, 877, 878, 886, 887, 897, 899, 911, 923: n = A,T,C or G
  misc_feature 925, 928, 929, 933, 934: n = A,T,C or G
cgaattgggccctctagatgcatgctcgagcggccgccagtgtgatggatatctgcagaattcgccctttcgagcggccgcctgggcaggtacccttcacaatacattggcaaattctgaagctacaaagcacaagagaccagaaagccaagtagaaagctatgaaaaaccatttttaggaagctagtattagagttcaagacccagcagtgaggacaagaggcttttggtgactgtctggggatttcatttggaaagtctggagattggtgccttttaagaagggacaaaactaagggtaagtgaactttggttctaggaatggcaagatcagcaagaagatcaccattgccaactgtagcctttacacaatgtcatagcagcccaaatttcagtcangcntatttgaattaagtttattgtctactttgcccagcttaaggaatgtattgaatgctggtcctttcgnannattaccattcaatattgggagggttctaacaactttctttaagggcaccaatggtcaaagcntttttaaggtaaaaatttattacttangacaatttnaaagaanaatngggaatttggaaaaaacccaaagaagaaaagggggccagaaccaattatgaaaattattacttccnnanaatgaattcaagggcccgggggggngtttaaanaccnagggactttggaaaaaacncattggaatnanttgggttcaaangaaaaattnnaatgacccgggggggganaannnaaanntaaaagggggaaaattttcccccccaaaaaaaaatttggaaanttttgggggggggtanaaaaaagaatntaaaagngtntttttttaanagcttgnaaatnnncnatnncccgagannttaaaaaccntnatttgggggggntaaaaaatccananttnnacannggggcggcccccaaat

SEQ ID NO: 5776 - DNA, 977 bp, Homo sapiens
  misc_feature 3, 5, 6, 7, 388, 389, 414, 535, 540, 570, 601, 614, 626,634, 641, 651, 652, 653, 656, 661, 665, 667, 671, 673, 693,695, 697, 710, 714, 718, 722, 724, 725, 735, 739, 740, 752,756, 780, 781, 782, 783, 805, 812, 819, 826, 829, 833: n = A,T,C or G
  misc_feature 837, 839, 842, 844, 852, 853, 854, 855, 856, 857, 858, 867,873, 877, 884, 886, 891, 893, 898, 906, 907, 912, 914, 922,938, 939, 940, 941, 943, 945, 948, 949, 957, 958, 959, 962,963, 964, 972, 973, 974, 975, 976: n = A,T,C or G
gtngnnntattgtaatacgactcactatagggcgaattgggccctctagatgcatgctcgagcggccgccagtgtgatggatatctgcagaattcgccctttcgagcggccgcccgggcaggtacttcttattatccttttaatatacatgatatagaaagtaatgactactctttttttcttttatttctggttttataaatttttgtcttctctattttgtttgtggctggactggcttggattgaggattagaaatttccagatcttttcaaagaatacaatgttagttttgttgatttttaaattgttttccaattttccatttcaatgattttctccccttttattatttattttattctccttgttttatgtttaacttggnnttttttctctagttgctgaacactngattttaccgtctttaatattttccgaatatatgcacttaaatggctatacattttctcactaaatcattacttttactattattctacaaaaccttttcattaagttttgttttaaccanatttngttttaagtgggttaccctattttttaaanatttaatttttggaggataaaaataaaattnctgggtaaattcnaccatttttaanttttaagnaaaggtnccctttgggnnnggnggaanccancncctnanaggggcgggaaatttccagnananacttgggcggggncggnttancatngnngggatccgancctnngggtacccaaancatnggccgtaaacaaagggggcaatannnnggattcctgggggggaaaaatntgtatancgcgttnacaaatnccncacncacncntananagtccggnnnnnnntaaatgtgngtaaangcgnggggggngnccttnanaggcngggggccnnacacncncatatatnattgcgggggcgcccnnnngngnccnntgtttctnnngannngtgaaacnnnnng

SEQ ID NO: 5777 - DNA, 651 bp, Homo sapiens
  misc_feature 455, 460, 485, 515, 526, 547, 550, 567, 570, 575, 585, 588,591, 598, 612, 613, 621, 627, 628, 637, 640, 646, 647, 651: n = A,T,C or G
ctatagggcgaattgggccctctagatgcatgctcgagcggccgccagtgtgatggatatctgcagaattcgcccttgagcggccgcccgggcaggtactttggccaccgtccccggaaataaccgcgcctgcctctcaagataccccatcctctccacgccgctgccgctgccgccatgcaaggggaggacgccagatacctcaaaaggtgacgactccccaaggctctgtcctaccctccttgccagggccctgaagatgttcttgggttggctgtgagatgtcactgggcaacgctagtttagcagacgggatgggaagcagggagagaagtcaccgaaaggagagggaaaaggtgaagtggagaaaaaaggagagctctgggggggtttcaaagtcctttgacctgactcggcggagcccttgacagcatttgaaagatggttttcttcgntacancaccttattccaaggggagagggangtagggcaatgtaaacccgcgttcttttgnttttttttttnagccttttttccaaaaacttnttncattttttcccattaanagnaatanaaattccccnatnganaagcctnggggaataaaaagnnttggtgcnattccnngcccttaangcnctccanntttn

SEQ ID NO: 5778 - DNA, 638 bp, Homo sapiens
  misc_feature 600, 637: n = A,T,C or G
gactcactatagggcgaattgggccctctagatgcatgctcgagcggccgccagtgtgatggatatctgcagaattcgccctttcgagcggccgcccgggcaggtacgcgggtggctggttgtttttacctatacaaatcaaaaggctattttgattgtcttcattttccccttataaattaggttggtgtctttagtcatttaggctaagttttactatctgattcttaacttttctattgtagaatggtgctgtcatgtggactgtcctcccgagtgtcccactggatgttcagagaatttatgtgaaggtcacgtcatttagcattgagatgctgtggttaccttcttccatttcttccataatatggcagccacatctatgtgtgaagaaatgtaataagataaaatttctctggacgcataataatgtgagaaagattgtcacatgtcccagcaaattgttattaatataaatttggttacttggcaagctgagaattttgccagatgttactcaaaaatttcacaatgaaaggaaacagggagtcatcttatccctgggttcccttttttttaggattttcaaaccaacttaangaaccttttggaaattaaaaacttaaaagaatgaaang

SEQ ID NO: 5779 - DNA, 658 bp, Homo sapiens
  misc_feature 472, 485, 537, 544, 574, 602, 607, 608, 618, 631, 651, 658: n = A,T,C or G
gactcactatagggcgaattgggccctctagatgcatgctcgagcggccgccagtgtgatggatatctgcagaattcgcccttagcgtggtcgcggccgaggtacgcgggggagacacattcagaggtgagcccagagcgggtaaagtggactggggagaacttcggaggatgttcatgtccaggagcagccccacgccctgtatggtcggtgtctagagcctcacaagcaactaagaccaacccagctctcagaagaaggaatgtcaaaatgtcatgttcaattttacattcagttgcctggaatcttttcttcacaattgaaatgaaatgtgcttgaaggaggtgaatccattgcattaatcttcagctcacaaaggaaatctacataaggaagcaagaccacagactcaaagacgggacataattttggattttttttgccatggccctggaaaagaaaggtaccctgncccggcggcccgnaaaggggccgaatttccagcacacttggccggcccgttactaattggatccnaagctcngtaaccaaagcttgggcggtaatccatggncataacttgtttccctgtggggaaaaantggtnnttccgctcanaatttcccccccnaacaataccaaccccggaanccttaan

SEQ ID NO: 5780 - DNA, 835 bp, Homo sapiens
  misc_feature 11, 12, 418, 549, 576, 586, 587, 588, 589, 590, 591, 592,593, 594, 595, 596, 597, 598, 599, 601, 602, 603, 604, 605,607, 608, 609, 610, 611, 612, 613, 615, 616, 617, 618, 619,620, 621, 622, 623, 625, 626, 627, 628, 629, 630, 631: n = A,T,C or G
  misc_feature 632, 633, 634, 635, 636, 637, 638, 639, 643, 644, 645, 647,648, 649, 650, 651, 652, 653, 654, 655, 656, 658, 660, 661,662, 663, 664, 665, 666, 668, 669, 670, 671, 672, 673, 674,675, 676, 677, 679, 680, 681, 682, 684, 685, 686, 687: n = A,T,C or G
  misc_feature 688, 690, 691, 692, 693, 694, 695, 697, 698, 700, 701, 702,703, 704, 705, 706, 708, 709, 712, 713, 716, 717, 718, 719,720, 722, 723, 724, 725, 726, 727, 728, 732, 733, 737, 739,740, 741, 742, 744, 745, 746, 748, 750, 751, 752, 753: n = A,T,C or G
  misc_feature 754, 755, 758, 759, 760, 761, 763, 764, 765, 767, 768, 769,770, 771, 773, 774, 775, 776, 777, 778, 779, 780, 781, 784,785, 787, 788, 789, 790, 791, 793, 794, 797, 799, 800, 801,803, 804, 805, 806, 807, 808, 810, 812, 813, 814, 815: n = A,T,C or G
  misc_feature 816, 820, 821, 823, 825, 826, 827, 828, 831, 834: n = A,T,C or G
aattgggcccnntagatgcatgctcgagcggccgccagtgtgatggatatctgcagaattcgccctttcgagcggccgcccgggcaggtactttaagaaattatagcagttcttcccaccaaagggaagggcaggtaagaccctggttaactgattagtgaaaaggttacgctgcctacacttgaagttttgagttcgtgcctgagaccctgaggcctgcagcattgcagccatagggcaggatttctcagcctcatcactgctgacgttctgggctgaatgagtttttgtcttggggctgtgctgtgcatagcagggtgttgagcagcatcactggcctctacctactacttgtcagtagcaaaccccccatcccttgcagctgtgacagtgtgtctccagatgttgccagggtgtnccctaggggacaaaaaatgccccttgcttgagaaccactgcattagaatttgagctgaggaaagaaaggatcttgcctggcaaggaaaagtgtaactgaaaaaattaaaaagaagggtgccccgggatagnaaatgagacttaccaaaaattaagatnggggcgggcnnnnnnnnnnnnnnannnnntnnnnnnntnnnnnnnnntnnnnnnnnnnnnnnnattnnntnnnnnnnnnntngnnnnnnnannnnnnnnnntnnnntnnnnntnnnnnnanntnnnnnnngnntgnnttnnnnngnnnnnnnaagnngttntnnnnannncntnnnnnnatnnnntnnntnnnnncnnnnnnnnnttnnannnnntnnaantnnntnnnnnntntnnnnntctnngnannnntanttng

SEQ ID NO: 5781 - DNA, 1057 bp, Homo sapiens
  misc_feature 4, 76, 83, 149, 176, 213, 246, 252, 260, 271, 307, 318, 323,376, 392, 395, 414, 436, 446, 456, 460, 463, 467, 496, 502,512, 513, 523, 525, 548, 555, 556, 557, 560, 580, 587, 607,619, 621, 643, 654, 659, 661, 663, 667, 678, 688: n = A,T,C or G
  misc_feature 690, 691, 695, 701, 702, 704, 706, 731, 732, 743, 746, 756,763, 779, 782, 795, 805, 816, 820, 822, 825, 835, 840, 846,847, 851, 856, 862, 863, 866, 871, 874, 880, 885, 892, 896,902, 905, 912, 913, 914, 920, 921, 927, 928, 934, 936: n = A,T,C or G
  misc_feature 950, 951, 959, 960, 963, 969, 987, 996, 1000, 1001, 1003,1006, 1009, 1010, 1019, 1022, 1025, 1028, 1041, 1045, 1057: n = A,T,C or G
atanggcgaattgggccctctagatgcatgctcgagcggccgccagtgtgatggatatctgcagaattcgcccttngcgtggncgcggccgaggtattccattctccagcattttctacatctggcaagctcgaaagtgaaaccctagngggccatcatgcaggttttgagttatntactgttacagatgaggaaactgcgaagctacatggncacagtcaacaacgacaacagaaggcaacatantatggnggtataanagcaccgactnttgaaagccagcctgaatcctagagccagagctgtncaacagcaggnaaaantgactttatcctgtgcaagtttcctccttaatggaaaatagtgccccaagggnccaccaaaatatcggncgnaggattttacaacgttaanaggcttgggaaaaccaaccttncccggtcccnttaggaggtnaagnccncctngttttaccttaatttaaagggcaaggccntttcangtacgggggnncccccttttngnaaatcccctgggcaaaaacccgncttcccnnnagnaccggtttacccttcaattntttattngccctcaatttttgaaggtngcccacctttcnanggccctttttttccaaggggancaagttggganaaaanancnaccnaaggaccaccngggcccggtntnnaagnttctgnnantnctaggggaccccccttggtccccannttaaattagcngcntgttggcttnttggggngccgggcagaggggcnagnttttttttggganccccaaatcntcctccttttntggnanggnccttataggnaggcncccaanngaanaaacnaattcnnacnggccnggncccccnaaacncggaaancttnaccggncgnaaggggnnnaccaannttaccnntttggngngggttttttaaaanntgggcccnnttncttaanccaagttcctgggaaaanttttccttncccnngntanccnnccccggggncgnccnttnttttaaaagggcnaaanttcccagccccn

SEQ ID NO: 5782 - DNA, 969 bp, Homo sapiens
  misc_feature 181, 186, 192, 193, 194, 196, 207, 208, 209, 213, 214, 215,219, 224, 225, 230, 232, 234, 236, 238, 240, 241, 250, 270,276, 286, 292, 301, 308, 314, 321, 333, 335, 346, 347, 349,356, 357, 365, 376, 389, 400, 401, 406, 407, 409, 415: n = A,T,C or G
  misc_feature 423, 427, 434, 438, 467, 472, 482, 483, 485, 494, 506, 514,519, 522, 523, 524, 529, 533, 537, 541, 546, 547, 551, 552,555, 559, 560, 567, 568, 572, 576, 577, 579, 581, 598, 609,610, 611, 614, 615, 622, 623, 637, 638, 639, 650, 651: n = A,T,C or G
  misc_feature 652, 660, 665, 666, 667, 668, 678, 680, 681, 682, 685, 688,689, 690, 693, 694, 696, 698, 710, 722, 726, 727, 732, 735,744, 762, 768, 769, 771, 777, 779, 785, 792, 796, 801, 803,812, 813, 814, 817, 825, 830, 831, 834, 840, 842, 844: n = A,T,C or G
  misc_feature 851, 856, 860, 864, 870, 872, 873, 874, 882, 898, 901, 903,907, 909, 915, 918, 919, 923, 931, 935, 947, 948, 950, 951,957, 965, 967, 968, 969: n = A,T,C or G
attgggccctctagatgcatgctcgagcggccgccagtgtgatggatatctgcagaattcgccctttcgagcggccgcccgggcaggtacttttttttttttttttttttttctttttttttttttttttttttttttttttttttttttttttttttttttttttttttttttttttttnggaancttttnnnanctttaatggannnaatnnnaatngggtnncaaantntntnanannaaagggggntcccaatgccctcaaatttnaaaaanttttcccccntttccntttttaaangactttngttaanttacccnaaaaaaaaaaancngggcatttganntnttggttnncctttttnccccaaatttncacccctcccccntttaaaaaaannaaaanntngaaaangggccccntttnttttttngccnaaaaaaaaaaaaaaaaaaaaaaaaaaaangtttntcttgggggnngngaacccccncttagggggggngaaatttncaccncannntgggngggngcgntttnttatnngggnnatnccgnngctgggnnaccnaaanncntnggggggggaaaataaanggggaaaaagnnnttnnttccccnngggggggaaaaaannntttttcccccnnncaaaaatntcccnnnnaaaaatattncnnnccnggnnnacnnananaagggttaaaancccccggggggngccnnaaaanggnggggggccnccactccccatttatttngggtgnngngccccnanggcccnttttttnaaanggggngnaaaactgtnnnggngccctttnttttnnaanaaatcncncnccccccnggggngggngggnggttgntnnnaggggggncctttttccctttctnagnanaaananaaattnttnngccntagggggntttntggtgggggggnnanngggganttaacttncnnn

SEQ ID NO: 5783 - DNA, 651 bp, Homo sapiens
  misc_feature 356, 557, 572, 588, 594, 603, 608, 612, 621, 624: n = A,T,C or G
gaattgggccctctagatgcatgctcgagcggccgccagtgtgatggatatctgcagaattcgccctttcgagcggccgcccgggcaggtaccaaagaattcctgcctcagcaggttctgagagaaagtaaagggccagtctcttccaaaatgaaacaagatacagcaaagggaatatacttaattcagaaaagcagcttggcaagactgaaaggagcctgaagtcaaaactcagagactcccaggtctgatttatccttctctccattggctacatgttcataagctgaatgttccagtcatgggaaatggacgtgagttcaaaaatgtgctagtgtgactgtaaaatgctttgncctcatctttctgattccagagactaaatacttatatggaaatcagcctattaataacatcttatcgtaagggataaattacagtgccatccatgaagcaaagggactggcaaattatctagtgactacagccttttagataggggcaggagaaataaagggcaactttttacctaactgatattgtggaaagggaaacangagcaaaagtttctnccccgttctccatggnggtcangctttcctnatctngggnaaaactcgnttnattttattgggaacagggtttcctggg

SEQ ID NO: 5784 - DNA, 615 bp, Homo sapiens
  misc_feature 393, 520, 536, 555, 567, 576, 596, 605, 615: n = A,T,C or G
atgctcgagcggccgccagtgtgatggatatctgcagaattcgcccttagcggccgcccgggcaggtacctaaggcttttcacggattgcatactcaggacaattttcaggaaattaatttccagatcctccatatacactatactctttccttaaattgatctgctgagaatgagtctttgttcatactgtttcttttcccacagaaaaaagatataggctacccatcccaaatcttaatacattgctcttaatgtgacaccaaaaacctcagatgtagcaaacagaggaaaggtttgatgattaatcataaaaccatagagccttgggcttttgcctcttatacacatgttaaagctgattatgatgttagataacatagaaattgggtgnttgggactcacaaatagattttcagaattcagatgtatgataaagtggaagtgatggtaacaattttttttttttaacggctttttggatttctcttcctgactcttgtcaaaagaatttcttgctnttgagggaaaagccantgggaggagtgaaacaaanaaaattagtagnaaggcactngaaatgccaaaaatgtcttnttacatatnattataatcn

SEQ ID NO: 5785 - DNA, 656 bp, Homo sapiens
  misc_feature 611, 621, 625, 630, 642: n = A,T,C or G
tagggcgaattgggccctctagatgcatgctcgagcggccgccagtgtgatggatatctgcagaattcgcccttagcgtggtcgcggccgaggtacagtttctgagtatgggaacttccctccccaagtggtgggaagttacagttaactacagcttactcaactatcacttccagaggtttagtgtttttaatatgggaaagaggagaaatctcaggtctaatcagggttctgcccatcagcttttcactgaaactttcaactgtgttttgttttttgtttttttttccatctttcagtttctagctgtgtttgccttctccctccgcgttccctcctctttttttgcttttggtctcctttccagcttcatgtctccatgagttcaagctgtaccctgcatttgggaacagagagaaaaacaaagaatttgcttgaaaaaaaataggccaggtgcgggtggctccacctgtaattccagcattttgggaggctgagatgggtggatcacctgaggtcaaggaagttcgagaccagcctggccaacatgggtaaaaacccatgtctcttttaaaaaaatacaaaaatttagcttgggccgtggggggcancttgcctggngatncccanctaccctggganggctgaagccaagg

SEQ ID NO: 5786 - DNA, 948 bp, Homo sapiens
  misc_feature 1, 8, 12, 13, 19, 23, 36, 41, 44, 50, 52, 53, 55, 56, 60,64, 65, 66, 69, 70, 74, 77, 84, 85, 87, 93, 94, 106, 109,116, 123, 127, 129, 131, 132, 133, 134, 139, 367, 390, 426,434, 453, 500, 516, 519, 543, 548, 560, 562, 566, 571: n = A,T,C or G
  misc_feature 573, 589, 606, 611, 618, 626, 631, 651, 666, 673, 680, 681,690, 691, 699, 705, 706, 715, 721, 730, 743, 744, 750, 754,762, 765, 769, 771, 784, 786, 789, 792, 795, 798, 813, 818,820, 828, 837, 847, 863, 869, 870, 871, 891, 892, 902: n = A,T,C or G
  misc_feature 915, 922, 926, 937, 939, 943: n = A,T,C or G
ncgtgtcntacnntattgnatanatgtgatgtatgntggtntanatgtgntnnanncgcntgtnnntanntgtngcntgtgatnnanttatanntaagtgagggangtntgcgtgngatgtgnacantnannnnagggngaattgggccctctagatgcatgctcgagcggccgccagtgtgatggatatctgcagaattcgcccttagcgtggtcgcggccgaggtacgcggggtcttcacccccatgatcagtttaaagaaaatgtgtaggtcaatatacaaaggaatacattatacttaaattattcacaagattttgattaaaaagtatggtgttataaaggaaaatatattacttatattgnttcctaatattataaagtacgangaaacaacaatctgataatgattgtgaaatcaccanggattttntcacttatttaatttattntttatctctttttttaagggcccctcctgggtatttcctggggtagnaaatggggtgaccctnggnattcccaagggaccaaccaggggngcccnctgggattctcntngggnccccncnttggggaattcttggnggaattcaatggccccnttacntgggtgnccttcaanaaacntaattttctttccccccagnttaattgaaattccnattattngaatggnncaaaaggtnntttgggangtttannccaaggatnaggggnaggggaccntccggccaatggnnattatntctnttgggaanccnaatncntttggtaaccaancnaanggnccnccnttaatttttttttantaaancntataaatnctttttccnaattgggaanaaggaataaaattggnctttgnnngttgccattttttaaatggnnatttccattnaagcaaataccantaccaangggntttcgggaacntntttncaaaa

SEQ ID NO: 5787 - DNA, 681 bp, Homo sapiens
  misc_feature 351, 360, 366, 382, 389, 393, 402, 414, 417, 419, 420, 448,454, 502, 505, 507, 512, 514, 518, 526, 533, 542, 546, 559,561, 564, 573, 574, 581, 582, 583, 595, 598, 607, 611, 613,614, 615, 616, 621, 626, 629, 634, 636, 637, 650, 653: n = A,T,C or G
  misc_feature 654, 661, 663, 666, 668, 678, 679, 680: n = A,T,C or G
atgctcgagcggccgccagtgtgatggatatctgcagaattcgccctttcgagcggccgcccgggcaggtacgcgggatgaacaagctcaggaaaaatctaagaaggccttaatttctcacctctagctgactttcaggctacataaacaggaattgaatgataaggtagaaatgtgaactccctgactgagtgttgaaggtatgccctacacatccacaaaacccttgagcaaagactaaactaaataagcagagacttaagtggccacacataaaaaagaatacagactgcagaatgtgttcccccaaaaaatcactaagcaaagagcaggagtaacaataaacagcancaataaatnctgcanaaaaggagattttggntttttangagntgccccttntttttttttttnaancnncttttttttttcaacaaaaaaatttttngggggncttgccaaaaaaaaaaaaaaaaaaaaaaaaaagggtttctttggggcngcncnccccngngtgngggggggnaaaattnccccccccngtgnggggggggctttntnttnagggggganncccggtnnncgggaccaaaanggnttggggggnaaanannnnggganaaatnccnttttncnntgggggggaaaanttnntttttcncngtncnaaaattcccnnng

SEQ ID NO: 5788 - DNA, 940 bp, Homo sapiens
  misc_feature 4, 7, 10, 13, 16, 17, 20, 21, 24, 39, 41, 44, 47, 50, 51,55, 57, 59, 61, 62, 65, 68, 73, 74, 76, 79, 81, 100, 102,104, 105, 106, 117, 119, 123, 176, 204, 227, 299, 409, 411,469, 472, 490, 503, 507, 514, 526, 530, 542, 548, 549: n = A,T,C or G
  misc_feature 559, 577, 586, 591, 599, 603, 625, 632, 641, 646, 648, 657,670, 676, 677, 682, 694, 725, 726, 728, 731, 734, 737, 745,752, 773, 784, 790, 801, 803, 813, 817, 819, 828, 836, 837,839, 862, 865, 867, 870, 878, 881, 889, 891, 904, 913: n = A,T,C or G
  misc_feature 914, 915, 919, 922, 927, 929, 932, 939: n = A,T,C or G
atanacntangtntanncgnntcncatatttatatatantntanatntcnntatntntntnnatnatntgtanncngtntntatatatataggttgggcncntnnnttgtatatatngngtgngaattgggccctctagtatgcatgctcgagcggccgccagtgtgatggatatntgcagaattcgccctttcgagcggccgnccgggcaggtaccatggtgctgnacagaccatcaggaagaactgaaaagttcaggcaacttgagaaaataaagtcaccaccagcaagaagctgtntaaaataaccggaagattataacccaagcacgtggaggagtgtgctagtgagtagaattgttatgaaagctattagaggtcctccatagatgcatgtgcttagtcctaangnagaaggaagaggagtaaggatttgccacggtaggaacacctgaaagttttcaagttgnagncaccttttgtattttggnaaaggttgttccnaaanggcttgnagttttgagcangagnccttggggaaanaggacnntttacaaagncttttttttttaaatttncaaagttcnctttngttttttnaacnataattgtaagaaattggcaanaagggcncacctgtangaaangntttgggatnttcccaaagggcncctggnnaatgnccttgggccccntgggggaaacctaaggaaggcccttgggggnntntanccntcntttggctnttttttnccagcctttgtccttgccccncagggttaagncctttnccccaaagggntnatgccaattnggantngccaagtanacttggtnntnttgggggtttctcaagggtaaanggnanganggatgttnttnccaggggntnggccctttttgtntggtaaatnnngggnggnccccngngancacctgng

SEQ ID NO: 5789 - DNA, 1096 bp, Homo sapiens
  misc_feature 3, 5, 9, 10, 14, 17, 20, 22, 30, 34, 39, 44, 46, 47, 49,51, 52, 57, 60, 66, 67, 68, 69, 73, 77, 80, 81, 82, 85,86, 88, 91, 105, 106, 107, 115, 118, 121, 122, 123, 124,127, 129, 130, 132, 134, 137, 231, 267, 270, 279, 286, 288,290: n = A,T,C or G
  misc_feature 299, 300, 301, 302, 316, 324, 326, 340, 342, 345, 352, 358,365, 370, 374, 377, 380, 381, 385, 388, 389, 392, 394, 396,398, 405, 412, 417, 434, 437, 438, 445, 451, 453, 454, 455,456, 468, 481, 483, 494, 506, 507, 521, 523, 569, 571: n = A,T,C or G
  misc_feature 602, 655, 702, 744, 809, 836, 912, 917, 942, 970, 976, 998,1018, 1020, 1021, 1037, 1048, 1059, 1064, 1071, 1073, 1075,1076, 1091: n = A,T,C or G
tcntntgtnntcgntanatnantgtttttncgtnatttnatttnanncnannctatnttnttactnnnntccntgtnctnnntcnntnttnttatattttcttcnnncaggtagnggnatnnnntgnanncnantcntattaggtcgaattgggccctctagcatgcatgctcgagcggccgccagtgtgatggatatctgcagaattcgcccttagcgtggtcgcggccnaggtacctgtaaaactcttatctaaattaagctatnaantttattaangggtggnantngggccaaannnncccataaaagttancttttttntntaaaaaaaggagantnacnctttttnatttantggttgnttacnctcntanaannaaanatnngtncncnancaaacgngtttacnttgtntttttttatgcggaacnacnntggaagnctaccncnnnnattgggaaatgnagaaaaaaggtananaaaaattttanaaaacccctaannaaactttttgccangnaaagaaaaataaaccaacctaaccaagaaaaaaaatttttttttgntngaacccctgggggggggttttttggggccanaaaaggaattttttcttttaaaaaattaattggaaccaaccccaaggaaaagnccacccaaggtccttattaaaattgggaaaacccggttaattttaangttttttaattttggggggttttaaaattccaaaaaaaaatnggtaaaaaaaacccttttccttggctttcttttccaaaaaaaaaggaaccaaggtttatttttanaagcaaggaaatttataaaaaaaaggnaaggaaaaaacccccacccaaggaattttgggaattaaattcttttttggttaaaaggccccattggttattcctnggatncaaaagggggaccggttggttaagnaaaaattaattataaaaagggaaacttntttggnaaaaggccttcaaattaggttnaaggaaaaaaccaaaaattngnntttggggtgcccgggnaggggccttcnattggccctgntaaanttccccnancnncttttttgggggaangggcc

SEQ ID NO: 5790 - DNA, 585 bp, Homo sapiens
  misc_feature 560, 585: n = A,T,C or G
gggccctctagatgcatgctcgagcggccgccagtgtgatggatatctgcagaattcgccctttcgagcggccgcccgggcaggtactcaagctttggcttttctgaactttccttattttcaaaaatgtcccccagccccacttccacctgagacattcacacaccccatttcctcttccaggaaggctcttatgtcgcctgggtaaacttactcttcaagtctagtgacttttttccagaagctttcctgatatctttccatttcaccccactgctgacttattaaaatttctagaattttatacttttacactacattctctgtgttgtattctcttattcagggtctgctatttaatttttaagttccttgaaaatagagacaatttcattgttttcatcagtttggtccaagtatatataacatagatgaaaaatagatattttgtattatatatattatataaataattgttgaatgagatgaataaactatagtgagaagatgctaggctttgttaaccatttcaaaacctaaagctcaaatcccagcgcggncacttgctacctctggtacctccgn

SEQ ID NO: 5791 - DNA, 604 bp, Homo sapiens
  misc_feature 317, 389, 390, 392, 393, 398, 399, 414, 416, 422, 436, 439,482, 486, 487, 491, 494, 495, 497, 498, 514, 521, 522, 527,536, 537, 539, 542, 544, 557, 562, 565, 570, 578, 581, 582,583, 585, 589, 592, 593, 596, 604: n = A,T,C or G
atgctcgagcggccgccagtgtgatggatatctgcagaattcgcccttagcgtggtcgcggccgaggtactttttgcattttcaaatgactttgactattgccagagtcattatagacctgcctatgatgtaggagtttattgtatctagtggaaaacatacctgtttgtggggcagaagcttctgttccattcatcctgattttagacacagcatttaacttttcaggttcagttccatatgtataaagtagggataatagtgacatcctagtgtattaagaattaaggtgttattatttctgtcactgttacttnaccctaattttgttttccacactcatctctgagcttttttacttcttatgttgttcaagtgttttctaaaanngnnagaannaaattaaaataaatntncctttnccggggcggcccgntcnaaagggcgaattccagccacactggcgggccgttacttaggtngganncccnctnngnnaccaaatccttggccntaaatcnncgggncatagcttnntnccngngggggaaaattgnttatnccngttcncaaatttnccnnncnaaanaanncgnagcccggn

SEQ ID NO: 5792 - DNA, 595 bp, Homo sapiens
  misc_feature 569, 585, 594: n = A,T,C or G
gaattgggccctctagatgcatgctcgagcggccgccagtgtgatggatatctgcagaattcgccctttcgagcggccgcccgggcaggtacgcgggtcatttgggcggtcaacgcgggtggagaggcgcatgtggacgtgcacgggatccacttccgcaaggaccctttggaaggccgggtgggccgagcctcagactatggcatgaaactgccaatcctgcgttccaaccctgaggaccagatcctgtatcaaactgagcggtacgcggggggttccgggcgttaccatcgtccgtgcgcaccgcccggcgtccagatttggcaattcttcgctgaagtcatcatgagctttttccaactcctgatgaaaaggagggaactcattcccttggtggtgttcatgactgtggcggcgggtggagcctcatctttcgctgtgtattctctttggaaaaccgatgtgatccttgatcgaaaaaaaaaatccagaaccttgggaaactgtggaccctactgtacctcggccgcgaccacgcttagggcgaattccagcacactggcgggcgntactagtggatccgangctcggtanc

SEQ ID NO: 5793 - DNA, 575 bp, Homo sapiens
  misc_feature 498, 515, 552, 570: n = A,T,C or G
atgctcgagcggccgccagtgtgatggatatctgcagaattcgcccttagcgtggtcgcggccgaggtaccagtcatattggattagggctcataatgtcattttaacttaattgtctgtcaaaaaattctgtcttcaaatacagtcacatttctagggtttaggattttaacatatgaatgcagggggacaattcagtccataatactgtggttatcactttttggtcttaagatgattgctacagctctacaacccacatctattataaaaacaaaaagaagagagaaataaattgagagaggagagttccttgatcactttgcaggacgtgcgacaggggtgttgctcatctgtttggccaccacacattctcaggccctttgcaggacagggagcatgctgacaggcaggtgcagcaacccaggcgagtgccttggggctccagccccaaggtaggatctaagggtgggtgcctgtgactcctgaaagcccaantgggtgtgtgttacaantgtgctcttttaaatttgcccatctgaagacagctgnagaagtgtaaccagctcngtgcc

SEQ ID NO: 5794 - DNA, 584 bp, Homo sapiens
gggccctctagatgcatgctcgagcggccgccagtgtgatggatatctgcagaattcgccctttcgagcggccgcccgggcaggtactttgctacacggccgggggccattgagactgccatggaagacttgaaaggtcacgtagctgagacttctggagagaccattcaaggcttctggctcttgacaaagatagaccactggaacaatgagaaggagagaattctactggtcacagacaagactctcttgatctgcaaatacgacttcatcatgctgagttgtgtgcagctgcagcggattcctctgagcgctgtctatcgcatctgcctgggcaagttcaccttccctgggatgtccctggacaagagacaaggagaaggccttaggatctactgggggagtccggaggagcagtctcttctgtcccgctggaacccatggtccactgaagttccttatgccactttcactgagcatcctatgaaatacaccagtgagaaattccttgaaatttgcaagttggtctgggttcatgtctaaagcttgttccagctatccagaatgcccacaagaattcaacc

SEQ ID NO: 5795 - DNA, 823 bp, Homo sapiens
  misc_feature 572, 608, 623, 662, 668, 686, 716, 740, 744, 746, 752, 789,803, 811, 819: n = A,T,C or G
gggcgaattgggccctctagatgcatgctcgagcggccgccagtgtgatggatatctgcagaattcgccctttcgagcggccgcccgggcaggtacccttcacaatacattggcaaattctgaagctacaaagcacaagagaccagaaagccaagtagaaagctatgaaaaaccatttttaggaagctagtattagagttcaagacccagcagtgaggacaagaggcttttggtgactgtctggggatttcatttggaaagtctggagattggtgccttttaagaagggacaaaactaagggtaagtgaactttggttctaggaatggcaagatcagcaagaagatcaccattgccaactgtagcctttacacaatgtcatagcagcccaaattcagtcagctattgaattaagtttattgtctacttgccaagctaaagaatgtatgaatgctgtctttagaagataacatcatatggagggtctacaacttcttagacacaatgtcaagctttttagtaaaattatactagacattcaagagatgggattgaaaaccaagagaaagggcngaccaataagaaatatactcacagatgattcaggcngtggagttaagaccnaggacttggaataacaatgataattgttcaagaaaattnaagacngggggaaaataattaaangggaatttccccccaataattggaacttgnggggataaaaagaacaaatgggtntttnanagctgngaaattgcattacctgaaattaaaaactcaattggtngggttttaaaattnaatttaancacggccnccct

SEQ ID NO: 5796 - DNA, 841 bp, Homo sapiens
  misc_feature 8, 10, 13, 16, 19, 24, 27, 31, 32, 34, 35, 39, 41, 44, 50,51, 53, 55, 56, 58, 59, 62, 63, 66, 72, 73, 81, 87, 88,89, 93, 96, 98, 99, 104, 106, 109, 115, 117, 118, 122, 125,133, 208, 434, 502, 508, 512, 519, 540, 552, 570, 625, 632: n = A,T,C or G
  misc_feature 685, 720, 724, 739, 743, 745, 749, 757, 758, 760, 763, 765,772, 775, 789, 814, 832, 833, 841: n = A,T,C or G
cccctccntnctnctntancgttnttntganntnncttntntgnttgggnntntnntnnttnnttnttattnntttccctnttcccnnntggnttngnntcttntntanccatcnanntatnggnccctctanatgcatgctcgagcggccgccagtgtgatggatatctgcagaattcgcccttagcgtggtcgcggccgaggtacngatatataacaatgaggtgctccatcaaccgctttctgaagctcaaaggaaatccaaaagcctaaaaattaatctcaatcatgcaggagatgctctaagagaaaatacattggtttcagaacatgcacaaagagaccaacgtgaaacacagtgtcaaatgaaggaagctgaacacatgtatcaaaacgaacaagataattgttgaacaaacacactggaacagcanggaggtctcttagatcaagaaaaattatttcaaccttacaaaagcaaaaaattatgttggcttttcanaccagncaanttaagtntcatgccacataaggaaaggnttggaccaacanaaagcaaaggataaccanattggatatttccatttttttctttgaagaagggaaaaaaatggccaaccattcnttcctcncttaaaaaaggaagaaaaaaaattggaggggaggaatatttttaaaatttacnaaattaaaccccatttttaaaaaaaaaaccccgtnttanttttccaaattattngganantaanactataannantangnatcgccnttntgggggtacccttncccccgggggccggccccgcttctnaaaaaggggccgaaaatnnccaggccn

SEQ ID NO: 5797 - DNA, 881 bp, Homo sapiens
  misc_feature 2, 3, 7, 529, 579, 679, 692, 709, 716, 733, 753, 827, 833,845, 866, 869, 870, 875, 877, 878: n = A,T,C or G
gnnaagngtttaaaacctttactatagggcgaattgggccctctagatgcatgctcgagcggccgccagtgtgatggatatctgcagaattcgcccttagcgtggtcgcggccgaggtacgcggggtcttcacccccatgatcagtttaaagaaaatgtgtaggtcaatatacaaaggaatacattatacttaaattattcacaagattttgattaaaaagtatgtgttataaagaaaatatattacttatattgtttcctaatattataaagtagagaaacaacaatctgataatgattgtgaatcaccaggatttttcactatttaatttatttttatctcttttttagggccctcctggtattcctgagagaaatggtgaccctggtattccaggacaaccagggtcccctggttctcctggcccccctggaatctgtgaatcatgccctactggtcctcagaactattctccccagtatgattcatatgatgtcaagtctggagtagcagtaggaggactcgcangctatcctggaccagctgtcaccaagcacctatttttataacttaacttnccatggagagaataatggcttgcgtgcattttatgtatccataacatacatacaaggctcggtctttttcaatggggataacaagtttcacaactctttngatttgaaattgntaatggaatcttgggtngaccaanggatttttcttttaatnggattccaaaagttaggccnagaactttttaatgtcaagatgaaaaaagggtgtaaaggggaccctgcccgggccggccgttcgaaaagggcgnaatttncagcacaactgncgggcccgttctagtgggatncgnncctgngnncct

SEQ ID NO: 5798 - DNA, 925 bp, Homo sapiens
  misc_feature 132, 339, 384, 405, 407, 414, 432, 434, 447, 489, 507, 514,515, 516, 528, 536, 537, 546, 551, 560, 575, 586, 592, 595,613, 621, 644, 649, 669, 673, 674, 675, 684, 688, 690, 692,698, 699, 708, 709, 711, 713, 715, 724, 728, 729, 731: n = A,T,C or G
  misc_feature 734, 737, 738, 740, 751, 753, 754, 756, 757, 758, 759, 762,765, 772, 781, 782, 789, 790, 791, 800, 803, 807, 820, 821,824, 828, 834, 835, 840, 842, 850, 853, 864, 865, 868, 870,875, 877, 881, 882, 883, 884, 885, 892, 899, 904, 906: n = A,T,C or G
gactactatagggcgaattgggccctctagatgcatgctcgagcggccgccagtgtgatggatatctgcagaattcgccctttcgcgcggccgcccgggcaggtaccagctgctctacgtggcggttcccantggccctccctcaacaaccatcttggcttcttcaaacaaagtgaaaagtggggacgacatcagtgtgctctacactgtcctgggggagcccgatgtggaggtggagttcacctggatcttcccagggcagaaggatgaaaggcctgtgacgatccaagacacttggaggttgatccacagaggactgggacacaccacgagaatctnccagagtgtcattacagttggaagacttcgagacgattgatgcangatattacatttgcactgttnanaatcttnaaggacagaccacatgtngntaccactgttganttttttcctgacttggaaaaggaaaatgtaattgaacttatngaaagccccatttgatgnaccttcnnncctgtgaccacnctaaggtnnaatttccanccacnactgggcgntcggtttacttaagntggattcccgnagcttncgnttacccaaagcttgttcnttaaattnaatgtttatttagcttttttttntgtanttaaaaatttttattttcantttnnnctttttatnactncnantattannaatactgtnnananantaaaaattntttnntnttntannantgcttaaatananntnnnntanaanttcaacntttaatttnntcttttnnnttaaacttntancctntttatctaatttnngtnaaantttatnntattncnaattatanatntaatatataanntcnanatttntntcannnnntttcccnagggggnggaananccccccccccccccccccc

SEQ ID NO: 5799 - DNA, 499 bp, Homo sapiens
  misc_feature 210, 228, 233, 242, 263, 300, 337, 373, 485: n = A,T,C or G
gtaatacgactcactatagggcgaattgggccctctagatgcatgctcgagcggcccgccagtgtgatggatatctgcagaattcgcccttagcgtggtcgcggccgaggtacttttttttttttttttttttttttttttccattctcacactcaaactttaatttgagcattagagggatatagaaagaaatttgggcttatggccanattaataacttgttcaanaaatntttactganatagtgccagaggatgctganaagcagggtgaataagtaaccaaaaaggcagggtttnttcctttttgaagcttccggtctattcaggaatgcanacaagtcagcaggtaatcacggtgtgcacaggtganatggactgtgataagggaagttcgggcgcctcctgcagtgggtgctccagcatcccagggggcttagatgaagcaaaaatgggggatgtgataggggtggaggatgatccancatgcatatgactc

SEQ ID NO: 5800 - DNA, 411 bp, Homo sapiens
ttgtatacgactcactatagggcgaattgggccctctagatgcatgctcgagcggccgccagtgtgatggatatctgcagaattcgccctttcgagcggccgcccgggcaggtactccagcctgggcgacagagcgagactgtgtcaaaacaacaccacaagctagctgagtagggattcttgggcgaagtggaagacattataagcaaatagggtagtatgggcatggaaacgaactacatgattaaagattagtattatctggcgagggaggaaaagtgccagagcaagtgccgaaactggaaggttacatttagttcaggatatgaagatcatatagggcctgcacggtggctcacacctgtaatcccagcactttgggaagccaaggtgggggaggatcgcttgagc

SEQ ID NO: 5801 - DNA, 413 bp, Homo sapiens
ttgtatacgactcactatagggcgaattgggccctctagatgcatgctcgagcggccgccagtgtgatggatatctgcagaattcgccctttcgagcggccgcccgggcaggtaccagatttattgcctgccaggattggaattcatgcagagaggaaggattcatgaaaaaaataatcaaagtcaggaaagtctttttctgtaatcttgtctcatacagtgagttatttttgtctgggtagtttacggggatgtaactccttcagtcatctaaccgtgatgtagtaaaagtcatttgcaggaaatgaaactccactttgttacttttttcacttaaaggctaatctgattagctttaaaacatttgttcatcttttaattcagtatttgtatgatgcctatggaagacatat

SEQ ID NO: 5802 - DNA, 414 bp, Homo sapiens
  misc_feature 2: n = A,T,C or G
gnatacgactcactatagggcgaattgggccctctagatgcatgctcgagcggccgccagtgtgatggatatctgcagaattcgcccttagcgtggtcgcggccgaggtactaattcttaggccaactggcctgttccatcacaccccaccacattctaccttctggggcgtgctcctaccacacctgctagagtgccttttctacctaactgccagacttgcaccaagttaggactcaaatatggcaggtcctacaaatactccagagaaccctgatttacatacctacctgtcaactgagaaaccttgaactcaggctttagtgtgtgaattatcccaagctgctcatcccagttttggataatcccaaactgtcctatgtggataactacctggacaaaggattcctgtga

SEQ ID NO: 5803 - DNA, 495 bp, Homo sapiens
  misc_feature 166: n = A,T,C or G
gaattgggccctctagatgcatgctcgagcggccgccagtgtgatggatatctgcagaattcgccctttcgagcggccgcccgggcaggtactttttttttttttttttttttttttcgaataagcttactttaatagatccaggggactgtttaatgcactgaanaattatttttcaggcattctgtgatgtccaaattaggttaatatacctctgagaagtgaatcagttactcctcgttggatagtaaggtcagaacaactgttcctgaaaccttagtacacactagctgataagacactgttgcccataatgtctatttattggatcagcaatttataagtcccgcattctcatgccacatagctctacacagctgcaaaaatataccatagcttgcaggtgatcattggtttgataaaagatattgagtcgctcatcttgtgaaagtgatctttgatataagaggagcatcagcggggaagctcacatgg

SEQ ID NO: 5804 - DNA, 1055 bp, Homo sapiens
  misc_feature 1, 2, 4, 7, 9, 14, 177, 253, 265, 292, 313, 330, 349, 364,376, 381, 391, 424, 429, 448, 454, 464, 480, 493, 501, 505,506, 511, 512, 515, 539, 540, 549, 580, 586, 588, 590, 601,607, 615, 622, 635, 651, 655, 671, 677, 687, 689, 692: n = A,T,C or G
  misc_feature 709, 717, 718, 729, 740, 757, 758, 775, 781, 791, 795, 797,809, 815, 816, 819, 820, 825, 829, 831, 832, 834, 852, 855,857, 865, 866, 883, 889, 893, 899, 900, 905, 907, 909, 911,915, 917, 921, 922, 928, 931, 935, 936, 939, 940, 943: n = A,T,C or G
  misc_feature 964, 969, 974, 981, 984, 985, 988, 990, 998, 1003, 1004,1011, 1022, 1030, 1031, 1032, 1035, 1036, 1042, 1046, 1047,1049, 1053: n = A,T,C or G
nntngantnactanagggcgaattgggccctctagatgcatgctcgagcggccgccagtgtgatggatatctgcagaattcgccctttcgagcggccgcccgggcaggtaccgggagctccatttgtgctcttggagggagaagtggctgctccaggtggcaggggtgttgtgccanatttgaggagaaatgagccactttcagagcttgatggctgactggaactgctggcttttaacttccctttatcttnttgatttgtcanagttgtttgcctgtgattggagtgatngagcaacatgggattaacctnttggcgctgtccttggnaagggaacccatttttttngggtttaattttttncgtgtggcggtnttagntggctttttngaacccctttctttttggccattggttttaacnttttncctttttgcaatgttgggnggcccnttcgggcccnttgggcctattcttgnaagtttaaaaagncggaaagncttnnccaannacnatttaccaaaggaaaaaataaccnntggttttcnttactttttgggggggggaaaaatggggaantacctncncnaaaaatgttantggggngtaaaaanaaaaccngactttttttgcnaccaagggaaacccantttngttgtttaaaaaaaantttttngggaaaaagnangcncccaaaacaggccaagnaaaccttnncttgttcccancttggggaaanaaaggacaataaaaatnngggtttttggattattnccattngaaaagggcnttgncnttcaaattcaangggtannagnntgttnccgncnncnaaaaaacccatggaaaanggntntattaatnngtgtggtgcaattgtancccttnatgngccctnnaaacnancncntttnangggnngaaatnttnccanncanncantttgcccggggcccgggttanttaanttggngataccnaannccncnggttcccnaaagnntttggtnatgataaattnaatagggnnnatnnagcctntgtnntncctngg

SEQ ID NO: 5805 - DNA, 831 bp, Homo sapiens
  misc_feature 564, 570, 617, 634, 641, 644, 661, 696, 718, 723, 734, 741,788, 790, 809, 813, 825: n = A,T,C or G
gaattgggccctctagatgcatgctcgagcggccgccagtgtgatggatatctgcagaattcgccctttcgagcggccgcccgggcaggtaccagctaccaagctgttctcagtgacagctggaacctcagagcatctagtttggaagaggttaagctttacatcttcagcccacttaaggggtaaaacaaatcaagccccacactcatgggaaggggagaggatggaaaggaggggcagggatgacggcaccaaggggaagtgtccagaacaccatctctctcacccccaaaccagccggtttcccatctgtttttaccttaatggcttttgcggtctccagtgactgctcaggagggattcccacctccctctcccttagcagctgttgaatgaaatacgtaatatctctacctgcaatcgggatgtgtttgatgcagcttccaattacataaccttctgccactgggataacatgggtgactccatctccgctgtcaatgactatcccccgttaatgtacctcggcgcgaccacgctaagggcgaattccagcacactgcngcccgntactagtggatcccaacctcggtacccaagcttggcgtaatcatggncatagctggttcctggngtgaaantgntttccgctcacaatttncacacaacataccagcccggaagcataaagtggtnaaagccctggggtggcctaatngaggngagcttactcncatttanttggcgttgggcctcactggcccccttttccatccgggaaacctggncntgccaccttgctttaatgnaatnggccaacccccngggggg

SEQ ID NO: 5806 - DNA, 598 bp, Homo sapiens
  misc_feature 3, 7, 9, 11, 12, 15, 18, 19, 21, 22, 23, 24, 25, 27, 29,30, 31, 33, 34, 35, 38, 40, 43, 44, 45, 48, 49, 50, 52,55, 56, 58, 59, 60, 62, 63, 64, 68, 70, 71, 72, 80, 82,85, 86, 90, 100, 103, 108, 116, 186, 187, 189, 196, 208,212: n = A,T,C or G
  misc_feature 217, 225, 227, 228, 234, 245, 246, 288, 572, 574, 582, 591: n = A,T,C or G
ctnttangncnntcnacnnannnnngngnnncnnngtngntcnnntcnnngntcnngnnnannntctncnnncagcaagngngtnncgtngttgacgttnacnactcnctataggncgaattgggccctctagatgcatgctcgagcggccgccagtgtgatggatatctgcagaattcgcccttnncngcggccnccccgacgggcnccanatttnttgcctgncnngattgnaattcatgcanngaggaaggattcatgaaaaaaataatcaaagtcaggaaagtntttttctgtaatcttgtctcatacagtgagttatttttgtctggatagtttacggggatgtaactccttcagtcatctaaccgtgatgtagtaaaagtcatttgcaggaaatgaaactccactttgttacttttttcacttaaaggctaatctgattagctttaaaacatttagttcatcctttaattcagtatttgtatgatgcctatggaagacatatggatttaaatagaacttggcttaccatctgccaataagagaaagtgagatgctaaatcagagangnaggaaagnctatttcantaaaagc

SEQ ID NO: 5807 - DNA, 522 bp, Homo sapiens
  misc_feature 26, 84, 202: n = A,T,C or G
gaatttaaatttttgaatttccaaancttttggatttttcccgggccctctagatgtttgctcgagcggtttgccagtgttttngatatctgcagaattcgcccttagcgtggtcgcggccgaggtactaacatcaataagtcgagaaaattatattaactgaaagaaaacaaaataatagagaattttattaaacgtattnctaatgtttctcttcatgtttggagaaaagctgccacataattaaaacaattcttaccctgtaaaactgattgtcttccaatctcaggaggtttacattaacaggaatatatgaataagaaacaggcctatggccgggctccgtggctcacgcctgtaatcccaacactttgggatgccgaggcggacggatcacgaggtcaggaaatccagaccatcctggctaacacggtaaaacctagtctctactaaaaatacaaaaaaaaaaaagaaagaaagaaagaaaaaaaagtacctgcccgggcggcgcgctcgaaaggg

SEQ ID NO: 5808 - DNA, 467 bp, Homo sapiens
  misc_feature 130, 359: n = A,T,C or G
cctctagatgcatgctcgagcggccgccagtgtgatggatatctgcagaattcgcccttcgagcggccgcccgggcaggtaccacacacacacaggcacacacaggcacacgcaggcacacacgcagacncacacacacataaacacacagagttcactagtccgagttactgattttcttaggattctcaaagtgacaacaccggaaacaaggtaattcatgttaaaacacaagggttatatcagtaagagatgggatccccgaagtaaaccgtggaatttgaatcaagcttcgaagagctaaaaaaagaaattggagtttcaacattcaccttcttgaatccttaagaaatacagangttcaaaatagaaaacattacaggtttcaggatacaaaagtagaaacatctgagattaagcctacatttttaaaaaaagatattgaaaattactgtgcttgtaatact

SEQ ID NO: 5809 - DNA, 464 bp, Homo sapiens
  misc_feature 3: n = A,T,C or G
ganttgggccctctagatgcatgctcgagcggccgccagtgtgatggatatctgcagaattcgcccttagcgtggtcgcggccgaggtactgttgcagtgagctcaagtgttgggtgtatcggctcaaaacaccatgtgatgccaatcatctccacaggagcaatttgtttaccttttttttctgatgctttactaacttcatcttttagatttaaatcattagtagatcctagaggagccagtttcagaaaatatagattctagttcagcaccacccgtagttgtgcattgaaataattatcattatgattatgtatcagagcttctggttttctcattctttattcatttattcaacaaccacgtgacaaacactggaattacaggatgaagatgagataatccgctccttggcagtgttatactattatataacctgaaaaaacaaacaggtaattttcat

SEQ ID NO: 5810 - DNA, 473 bp, Homo sapiens
  misc_feature 94, 96, 97, 102, 112, 115, 117, 124, 133, 137, 142, 144,146, 147, 161, 162, 166, 168, 173, 211, 212, 219, 224, 254,291, 332, 430, 435, 444, 466, 473: n = A,T,C or G
cgaattgggccctctagatgcatgctcgagcggccgccagtgtgatggatatctgcagaattcgcccttagcgtggtcgcggccgaggtacttntnnttttncttttttctnatntnttgggtntatcggctnaaancaccntntnntgcctttttttttnnatgntntattngtttatcttttttttatgatgctttactaacttcatannttagatntaaanattagtacatcctagaggagccaggttcanaaaataaagattctagttcagcaccacccgtagttgngcattgaaataattatcattatgattatgtatcagaagctnctggttttctcattctttattcatttattcaacaaccaccgtgaccaaacactggaattacaggatgaagatgagataatccgctccttggcagtggntatantattatatnacctgaaaaaacaaaccaggtnattttcn

SEQ ID NO: 5811 - DNA, 1176 bp, Homo sapiens
  misc_feature 1, 2, 4, 7, 8, 10, 12, 13, 14, 15, 19, 20, 22, 24, 25, 26,27, 28, 31, 32, 37, 42, 43, 44, 46, 47, 48, 50, 55, 56,60, 61, 63, 64, 69, 75, 78, 82, 84, 85, 91, 93, 94, 97,102, 103, 104, 109, 118, 415, 516, 546, 551, 561, 619, 635: n = A,T,C or G
  misc_feature 644, 649, 658, 670, 694, 726, 746, 786, 789, 842, 846, 873,889, 903, 910, 915, 923, 934, 940, 977, 979, 984, 989, 1008,1013, 1014, 1040, 1047, 1065, 1069, 1091, 1099, 1119, 1123,1125, 1130, 1131, 1134, 1170, 1172, 1173, 1174, 1175: n = A,T,C or G
nnancannanannnngatnncngnnnnnttnncctanaatannntnnnanttgtnngatnntnntcggnaaagtngtngttngnngttctncnntanggggnnnagatnagacacttntcactatagggcgaattgggccctctagatgcatgctcgagcggccgccagtgtgatggatatctgcagaattcgccctttcgagcggccgcccgggcaggtacgcgggtatgtatttgttcacttacccttttttacttttaatcaatgtcagataccaagagttgtgttaagctgagtgtagtgtgtaactaactacacttggatcttactgatccagaaatagtccccatagttaggagtagttacttatgaagtggttattaaaagtgaaccacagccacatatacattatcntattactgctttttgtttatgattaaatactgggtatgttcttgggtaaatcccatcctttattgtattaggaaaaaaaaaatttacttttttttaccagngtttttttcccaaaaagaccaggaaattangaatncaccaaaagnctttcaaaggggaaattttaaattattttcctttggtaaaatggggaccttaagaatnaaaatttccaaaaccntggaatttnaggcncccaatttncccaaggaaagnaaaaaaaaaccaaggcttgggggnaaatttaaaaggtttaaaatccccaacctttnggaaaaatttggttttttancaaaattaaaattccaggaaaaccatttcccaaaaacccnttnaaaggggcttccaagggaatccccccaattaagtacccaaggaagccccccancccnttttttttggaattaaaaccttttaantaaaaaaggtcttttnggggaggaccttanggaaagnccaanggaattangttttttggtnggaacnaacaattaaggcctttctcccccaaaaaaaaccttangnaaatnaggantttttttaacctgggaaantaagnnggggtattaatccttggaagggggantattggntttcctttaaaaaggggncccnaaaaatggtttattttaaaaanaaaaaaanaaaaaaaaaaaaaaaagttncccntntgggnntcngccgaaacccccccctttaagggggcgaaaaatttncnnnnc

SEQ ID NO: 5812 - DNA, 1118 bp, Homo sapiens
  misc_feature 1, 2, 4, 8, 10, 14, 15, 16, 22, 25, 27, 28, 29, 31, 32, 35,36, 37, 39, 40, 47, 51, 55, 56, 59, 60, 61, 65, 67, 71,75, 78, 81, 84, 85, 87, 91, 92, 95, 99, 100, 101, 102, 103,104, 111, 118, 124, 126, 127, 573, 622, 668, 818, 820: n = A,T,C or G
  misc_feature 855, 889, 901, 932, 968, 979, 1025, 1028, 1034, 1061, 1068,1071, 1083, 1085, 1086, 1088, 1091, 1101: n = A,T,C or G
nncncccntngcannnacggtntantnnntnnatnnntnngtatatntgtnactnnttnnnaatncntttnactngtnttntcnnancctnnagngggnnnnnntgacccnttgtgtntacagncnntttgggccctctacatgcatgctcgagcggccgccagtgtgatggatatctgcagaattcgccctttcgagcgggcgcccgggcaggtaccagctactgcaaaaacatgccaaattgtaaagaccatcgaggctaggaagaaactgcatcaactaacgagcaaaataaccagctaacatcataataacaggatcaaattcacacataacaatattaaccttaaatgtaaatgggctaaatgctccaattaaaagacaccagactggcaaatttggataaagagtcaaggacccatcagtgtgctgtattcacaaggacttcatcttcaacattgcaggaggaccacgcattagggctcaaaaaattaaagggggatgggagggaaagacctaccaagcaaaatgggaaagcaaaaaaaaagcaggggggttacaaattcctaggtncgcctggataaaaaaccaggactttttaaaaccccaacaaaaatatttnaaaaaggaggaccaaaaaggaaaggggccccatttaccattaaatngggtaaaaagggggattccaaaatttccaaacccaaagggaaaggaaggccttaaaccttaattcccttaaaaaataattaattattggccaccccccaaatttaccaagggggggccacccccggggaatttccattaaaaaggcaaangntccctttaaggaggaccccttaccaaaagggaggnacctttaagaaccttccccatttccaattaaatnaaccgggaaagnactttttaaccacccccccacttggttcaancaatttaggaccaaggcttcaattgggaggacaagnaaaaggttttnaccaaaggggattattccaggggaggtttttaaaccggccggaacnttnttgcancccaaccaggggaccccttaattaagnaccattnttnccaggaaattgntnntnccnccccccaaantccaaccagaaatttcc

SEQ ID NO: 5813 - DNA, 1100 bp, Homo sapiens
  misc_feature 3, 7, 10, 12, 13, 15, 16, 18, 23, 24, 26, 28, 29, 30, 31,32, 33, 34, 35, 36, 38, 39, 40, 41, 44, 45, 46, 49, 50,51, 54, 56, 58, 59, 63, 64, 66, 69, 70, 71, 73, 75, 76,78, 80, 81, 82, 83, 85, 88, 89, 90, 92, 93, 95, 97, 105,106: n = A,T,C or G
  misc_feature 110, 111, 115, 118, 120, 125, 129, 428, 453, 466, 580, 594,627, 763, 807, 835, 854, 859, 868, 875, 878, 880, 890, 904,917, 936, 937, 942, 978, 1002, 1015, 1020, 1021, 1023, 1037,1056, 1069, 1070, 1074, 1076, 1078, 1084, 1096, 1099: n = A,T,C or G
tcncccnccngnngnntngttgnngngnnnnnnnnncnnnngannntannnctnangnntgtnntntgnnntntnntntnnnntnttnnntnntngnaggggtgnnggcnntttnatncnctcantatngggcgaattgggccctctagatgcatgctcgagcggcccgccagtgtgatggatatctgcagaattcgccctttcgagcggccgcccgggcaggtacgcgagaggcattgaggcagccagcgcaggggcttctgctgagggggcaggcggagcttgaggaaaccgcagataagtttttttctctttgaaagatagagattaatacaactacttaaaaaatatagtcaataggttactaagatattgcttagcgttaagtttttaaccgtaattttaattagcctttaagatttttaagnagaaaaatatgaagacttagaaagnagtagccgtgagngaaagggaaaagataaaaaggtttcctaaaaaccatgaccggaaggtttgaggatgaaaagcttcttcatggggagtaaaaaaaatggtatttttaaaaaggaaaaattggagnaggaaagggacctnccaggggcccccggaatttaattacccaattangaaggggccaaatggctttttaggattaaaaaatggaagggtgactttaaaaacagcctttaaaaggtttaagtttttaaaaaggttttggttagggtggatttaaaaaaattaaattttggaagggccggatccnttttttaaaaaaaagggaggaatttaaaaaccccggaaagggtngaattttaaaaaaggaacccttttgganaaattccccattggaccgnccaangggggaggnaaatttngcngntccatttttnaaaaggcccttagntttaaaccgccantttttccttaaaaccgccnngaccnaaaaaaatggggaaaaggaatttaaattggggggangttgggtttggggattgaaaaacnaatttttgggaanaaaannantagaaagtttttgnaaacttggggaaaaacttnggggaaaaaccannaaangnanccttcngggccggggaanccnc

SEQ ID NO: 5814 - DNA, 1142 bp, Homo sapiens
  misc_feature 8, 11, 12, 14, 15, 16, 17, 18, 19, 20, 22, 23, 24, 25, 27,28, 31, 35, 37, 38, 41, 44, 50, 51, 52, 53, 54, 55, 57,60, 67, 68, 70, 71, 74, 78, 80, 82, 83, 84, 85, 86, 87,88, 89, 90, 91, 92, 96, 104, 105, 106, 107, 111, 116, 120,121: n = A,T,C or G
  misc_feature 123, 150, 451, 482, 574, 576, 585, 609, 612, 627, 698, 701,704, 720, 721, 752, 758, 771, 772, 807, 809, 814, 821, 841,853, 862, 873, 881, 895, 897, 901, 913, 917, 940, 943, 947,954, 963, 970, 980, 981, 985, 987, 1001, 1013, 1019: n = A,T,C or G
  misc_feature 1023, 1025, 1027, 1032, 1047, 1052, 1054, 1055, 1060, 1061,1065, 1069, 1070, 1083, 1088, 1089, 1092, 1095, 1101, 1105,1107, 1108, 1110, 1112, 1118, 1119, 1121, 1122, 1129, 1130,1131, 1132, 1134, 1136, 1138, 1140, 1141: n = A,T,C or G
cccctctnctnnannnnnnnannnnanntangtananntgnaangatagnnnnnntnctngtaatcnntnnagnacantngnnnnnnnnnnnaagnggggttannnnattngggangacnncncactatagggcgaattgggccctctantatgcatgctcgagcggccgccagtgtgatggatatctgcagaattcgccctttcgagcggccgcccgggcaggtacatcggtcccttgaccattacacccacggtggccctaattggcctctctggtttccaggcagcgggggagagagccgggaagcactggggcattaccatgctgtaagtggaaacatctcccctcatcccaccactgcggggcaagcctttaggaacattcacaggactttcaggagataatgttttttcaataaataaagaaatgggtctggacaagtttcaacntttatttgctttcgtgctggggggaaataantttggaaggggtttttttgacccaagaagttttgggggaaagtggaccattataagtttggaccgttatttacaaaaagacaagacttttangncaagccaantatggaaagaaggggtgggaattngtnaaagtttttttaaangcttttgggttaagttgggggggtaaagggtaagtgggccgcccatttttggttttttttgaccttttttnganggntcctttggcccaaaanntctttcattggttttccaatgggaaggtttnggaccnattaccttggaannaaagaccccaaaaaatttttttttattatttccantngaagnaacttcnaaaaaaaatattttcccaanaaaattggggcnaggggaaantcttggggagntatttttnccaagaaaaaaaantncctntgggggaaaaangggncctgggttggccccatttggaangantggnggaactnttttttttntccccangggccccccnncctngnggctcttttcaacnttcttttaaaangggttngggntngnttttngggggaaaagggacnacttnanntttcnntttnctcnngggggttccctcntctannatnacnaagtgncccntnntncntttttnnanncctccgnnnncncntnanng

SEQ ID NO: 5815 - DNA, 1156 bp, Homo sapiens
  misc_feature 9, 12, 14, 15, 20, 24, 25, 26, 32, 35, 40, 41, 47, 49, 50,52, 54, 59, 60, 62, 64, 66, 79, 82, 84, 85, 86, 89, 91,92, 99, 102, 103, 111, 114, 117, 121, 124, 125, 508, 666,698, 704, 707, 715, 760, 765, 768, 770, 783, 823, 847, 879: n = A,T,C or G
  misc_feature 904, 912, 917, 928, 932, 936, 949, 963, 964, 974, 980, 999,1002, 1004, 1031, 1054, 1058, 1075, 1078, 1081, 1084, 1093,1094, 1100, 1105, 1113, 1118, 1121, 1132, 1133, 1136, 1139,1146, 1155: n = A,T,C or G
ccccccccnctntnnttatntgannntttctnttnacatnngtgttntnntntntattnnanancnttcttcttcttcnctntnnnttntnnactggtnttnnctagattntgngtncgantcnntatagggcgaattgggccctctagatgcatgctcgagcggccgccagtgtgatggatatctgcagaattcgcccttagcgtggtcgcggccgaggtactctggttaggttaggacttgccctcgtggtggaaacttttcttaaaaagttataaccaacttttctattaaaagtgggaattaggagagaaggtaggggttgggaatcagagagaatggctttggtctcttgcttgtgggactagcctggcttgggactaaatgccctgctctgaacacggaagcttagtataaactgatggatatccctacctttggaaagaagaaaaggtttcttactgctttgggtccttggatttttatcaccacaaaaaggcaggaatangtatttttttaatatttttaaaatggttaaaagaccaaaaaaaaaccttattattggtaattggggtttttttggttgggatttattggtggttggtttttttgccttaaaaagggaaaaaaaaaaccccattcccaagggttccaccggggggccancccaaaaatttttggaagaaaccaaaaattangttccnggnatttatgnaaaaataaaaaggccattcttccattttttttggaggttaggaangaagncanangggggaaaaggtngggttttcttttaaaaattggggtggaaatccttgggggnattttaagggccccccttcaaaanaaacccctttttttggggggttttttcttggncccttggccccaacccctttttggngaagaaanggtgngggcccacttngggntttnaggttttaaccanggacccgaaccacnnttttccttangccaanttcaacctttggaattctnccngnggggctttttggggttttaaaaaaggnacaaccaccttttgtccccccanttangggtttttaaaaagaantanaanaangtttgggcnntgggtncaaancttttgangccantgntttcctttgannaanaanggggggnttttttggng

SEQ ID NO: 5816 - DNA, 1195 bp, Homo sapiens
  misc_feature 1, 2, 4, 6, 8, 9, 10, 11, 17, 19, 21, 22, 24, 29, 30, 34,36, 37, 40, 43, 44, 46, 48, 50, 51, 52, 53, 55, 57, 60,61, 62, 64, 65, 72, 76, 78, 84, 88, 91, 96, 97, 98, 100,106, 115, 119, 120, 134, 212, 360, 396, 399, 452, 474, 484: n = A,T,C or G
  misc_feature 517, 587, 593, 595, 600, 601, 621, 622, 693, 701, 741, 758,766, 775, 786, 805, 806, 808, 812, 815, 820, 821, 822, 828,855, 862, 863, 865, 868, 878, 879, 884, 888, 894, 896, 898,899, 909, 914, 917, 920, 921, 923, 932, 936, 938, 942: n = A,T,C or G
  misc_feature 944, 947, 959, 968, 970, 971, 972, 975, 996, 999, 1001, 1004,1011, 1013, 1015, 1020, 1021, 1022, 1024, 1025, 1033, 1034,1038, 1041, 1042, 1047, 1049, 1051, 1054, 1058, 1059, 1060,1064, 1073, 1076, 1077, 1084, 1085, 1086, 1087, 1094: n = A,T,C or G
  misc_feature 1097, 1110, 1111, 1112, 1116, 1119, 1120, 1121, 1124, 1125,1129, 1130, 1132, 1139, 1142, 1145, 1152, 1153, 1157, 1159,1166, 1171, 1172, 1174, 1175, 1185, 1187, 1190, 1193, 1194: n = A,T,C or G
nncncntnnnntctctnantnnantttanncgtntnnttntcnntntncnnnnantncannncnncatgacntgantntatgantctnttnttccnnncngggganagtgaatcntttnntcactctacggcgnattgggccctctagatgcatgctcgagcggcccgccagtgtgatggatatctgcagaattcgcccttagcgtggtcgnggccgaggtacagcggggacatctcactcatccttctactcgtgacgcttcccagctctggctttttgaaagcaaagatgagcaacactcaagctgagaggtccataataggcatgatcgacatgtttcacaaatacaccagacgtgnatgacaagattgacaagccaagcctgctgacgatgnatngaaggagaacttccccaacttccttagtgcctgtgacaaaaaggggcacaaanatttacccttcggcccgattgntcttttggangaaaaaaagggacaaaggaattggaggggattnaaggaaaggaatttggattttttttcctggaagttttttcttggtccctttggccttgggggaggaaccnttaagncncaccnnggaccttaacccacctaagnncaagtaagcccccattgggaaggcaaggccgggcccccttggtttccccgggggggggccaagccccaagntgggaacncccaagccccccccaccccaaattgggggcccctttccangaaggaccccccagggnaaaccaanttaaaaaantggtcctttcntcccccaccccggttggtnnantacnacnagttnnntgatanactataaaggtcccccctgcccccggngtataanntngangtgatgattnntgtanacantgattntnanntcagacatcnatccntgnacnntngcgtgctanatcncntagntntangtctttcgattngatttacantnnnttnttcgacttcgtataactcttnttnantanttctacncntngatgnnngnnaagatttnnatanggnngttgncntnggntgannncttntcctatgcngtnntttacannnngtcgttntanatgtttaatgctnnncttnatnnngcnngtcnncnttctacnttnttnttcttgnntagncngttgccntactnntnngtctacgtcntnatngtnng

SEQ ID NO: 5817 - DNA, 1236 bp, Homo sapiens
  misc_feature 3, 4, 5, 6, 8, 9, 11, 13, 15, 18, 23, 24, 33, 34, 35, 40,42, 44, 46, 48, 49, 52, 53, 54, 57, 58, 60, 70, 75, 95,99, 101, 103, 106, 109, 113, 114, 133, 148, 159, 193, 388,407, 442, 479, 490, 524, 563, 572, 577, 579, 587, 593, 601: n = A,T,C or G
  misc_feature 638, 655, 657, 672, 690, 691, 693, 700, 706, 708, 736, 750,753, 758, 768, 784, 786, 791, 809, 815, 817, 822, 845, 855,870, 871, 872, 876, 878, 884, 886, 901, 914, 916, 919, 935,937, 950, 981, 998, 1011, 1012, 1020, 1022, 1029, 1030: n = A,T,C or G
  misc_feature 1037, 1059, 1067, 1073, 1074, 1082, 1084, 1093, 1096, 1098,1108, 1109, 1114, 1115, 1117, 1119, 1130, 1138, 1146, 1152,1158, 1163, 1181, 1186, 1193, 1212, 1215, 1221, 1225, 1226,1233, 1236: n = A,T,C or G
ccnnnncnncnantnatnttttnntttgtttannncttcnancngncnnttnnngtnntnattaggtatntgtgncatgatataaacctcttccntagngngnttnaancatnntgtactcactattgggcanaattgggccctctanatgcatgctcnagcggccgccagtgtgatggatatctgcagaatncgcccttagcgtggtcgcggccgaggtaccaaaaagactctcaaaaaccaatactcccacgggcaagggaatagccaagtttgttgccggtttccaatgaatgacatcagccctgtgtaggtctcaatcaaaaatgggttcagttaacaccatcagtttctttcctcttccaagatccaggtttgaaattcttgntgggcattctgggatagcntggaacaaggctttaggacatgaacccagacaaancttgcaaaattttcaagggaattttccttaacttggntggtattttcnataagggaatggcttcaagttgaaaaagttaggncaattaaaggggaaaccttttcaagttgggaacccaatngggggtttncccangnccgggggnaaccangtaaaagnaaggaacctgggctttccctttcccggggaaccttcnccctttcaagattaggnantccctttaaaggggncccctttccttccctttnngnacctacntttggngnccccagggggggaccaattctcccaagnggggaaaaggggtnggnaaacntttgggcccncaagggccaaaaattngncgganttaggaaccaaggccggnctttcnanaaagnggaaatttccggctttgggcaanggccttggcnaccaaccaaaccttnnnaagncntattgnanttggaaaagtttcgntaatttttgcccngnaanccaaaaggaaggaagntnttttggtttttgntgggaaccccaagacaagaaaaatttccccntccccttttgttcaatntggggtttccccnngggggggngnctaattnntttttgntccaaaggaagccccaggaaancccccttngaaatnnggggtctncnttcccaaanaangntttttcaaanntaccnntngnaccctttttcnaaagagtnctttccantggggnaagtcntcttnaaatgggccccccccggnccgtnggtttancaaaaaatattacctttanccntggggngggnncgttttntan

SEQ ID NO: 5818 - DNA, 848 bp, Homo sapiens
  misc_feature 589, 596, 621, 622, 645, 651, 659, 666, 683, 685, 687, 691,702, 722, 730, 747, 755, 764, 765, 771, 775, 784, 786, 787,789, 794, 801, 804, 808, 811, 813, 820, 822, 827, 829, 835,839, 848: n = A,T,C or G
caattaaccctcactaaagggaacaaaagctgggtaccgggccccccctcgaggtcgacggtatcgataagcttgatatcgaattcctgcagcccgggggatccactagttctagagcggccgaggtaccaaatgaagtgtgaagacaaggccatccaccactttatagagggtgtaaaaataaaccagaaatcaagggagaaagaaaagatgaaagacaaactgcaaaaaattgccaaaatgcgactttctaaaaatggagcagattctgaggctttgcatgtcttggcattccttcaggagctgaatgaaaaaatgcaacaagcagatgaagactctgagaggggtttggagtctggaagcctcatcccttcagcatcaagctggaatggggaatgaagaatagagatgtggtgcccactaggctactgctgaaagggagctgaaattcctccaccaagttggtattcaaaatatgtaatgactggtatggcaaaagattggactaagacactggccataccactgggacaggggttattgttaaacacccttgaatttgcttgggtcctttgaagagaagcccccnagggagntttcttggggaggagggggaccaannatttggggggggttagggtcccnccgggnctttggtngaatagnaaattatttttctccgnantngccntttctttggangtgccaatttttggaacctngtaaacanttttggctttaatcccnccttttangtgggggannaaatcntacntgggccttngnntnctttnttttaanaanaaangcnancccaaantncttcntnttatanattnaaagtcccn

SEQ ID NO: 5819 - DNA, 854 bp, Homo sapiens
  misc_feature 2, 3, 7, 9, 599, 701, 709, 728, 737, 738, 782, 787, 794,822, 824, 833, 837, 841, 849, 851, 852: n = A,T,C or G
gnnaagntntcccagcgcgcaattaaccctcactaaagggaacaaaagctgggtaccgggccccccctcgaggtcgacggtatcgataagcttgatatcgaattcctgcagcccgggggatccactagttctagagcggccgaggtaccatctaggtcagtttaagaagagtcagctcagagaaagcaagcataagggaaaatgtcacgtaaactagatcagggaacaaaatcctctccttgtggaaatatcccatgcagtttgttgatacaacttagtatcttattgcctaaaaaaaaatttcttatcattgtttcaaaaaaacaaaatcatggaaaatttttgttgtccaggcaaataaaaggtcattttaatttagctgcaatttcagtgttcctcactaggtggcatttaaatgtcgcctgatgtcattaagcaccatccaaaaagtctgcttcataatctattttcaagacttggtgattctgaaagttttggtttttgtgactttgtttctcaggaaaaaaaatattcctacttaaattttaagtctataattcaatttaaatatgtgtgtgtctcatccaggatagggatangttgtcttctattttccattttacctattttactttttttgttaggaaaagagaaaaaatgaatttcttaaaagatgttcccccatggggtttttggattgnggtctaancctttggattgacccttcnttttaatcnngcctttaaacccttaaaaacaaaattttttttacctttaaacantggangtggccncttttaacttattccttaattggccaantnggcttaacncctntttntcccccancnntg

SEQ ID NO: 5820 - DNA, 1158 bp, Homo sapiens
  misc_feature 1, 2, 3, 5, 6, 9, 14, 16, 17, 18, 21, 22, 25, 26, 28, 32,33, 34, 35, 37, 39, 41, 42, 44, 45, 46, 48, 51, 52, 54,55, 57, 59, 60, 61, 64, 68, 69, 70, 72, 79, 80, 82, 85,87, 89, 90, 92, 93, 94, 95, 96, 97, 99, 107, 112, 115, 125,163: n = A,T,C or G
  misc_feature 205, 223, 231, 379, 383, 406, 462, 481, 482, 513, 522, 543,556, 575, 612, 628, 643, 649, 660, 679, 682, 684, 691, 714,748, 779, 784, 785, 799, 816, 828, 845, 848, 864, 877, 880,886, 889, 890, 900, 904, 907, 910, 915, 921, 922, 932: n = A,T,C or G
  misc_feature 933, 946, 952, 957, 959, 963, 980, 991, 993, 996, 1007, 1014,1027, 1032, 1036, 1049, 1054, 1060, 1066, 1074, 1077, 1078,1081, 1101, 1106, 1112, 1113, 1114, 1118, 1119, 1130, 1133,1134, 1138, 1142, 1146, 1148, 1153, 1158: n = A,T,C or G
nnntnntantatantnnntgnnttnntnatannnnancncnnannnangtnnanntntnnntgntatnnntntaatagnntnttntntnntnnnnnntngtaagggntgtanacnatcactatanggcgaattgggccctctagatgcatgctcgagcggccngccagtgtgatggatatctgcagaattcgcccttagcgtggncgcggccgaggtaccctnaacatctntgctgctcccactggagagtgagtctggagtccctggcactggggctttggtgagggctccatatacacccatggcctgagccaccatgctggtgacatcgccagggttggagggcagtagggataagtgttggagtccttggccagntttnggtagaacagcgctgacatactnctcggccacagtcaagtgaagctgcttgccatctcccattatggttgtgtcaggangctgcaagccagggattcnnaataagcctttcaagctttttaggccctttngccctttcngcccagaaacttgcacctggnccctctccctgcntgccctggatttatcttgnttcaagccctttttctgctttccgggagggccaaggnatcctgggggccctgntttttcttttccccnttctgncccacaatttngatgggggcccggaacttnttnanggggttncccccttcaagaaccttcttaanaaaacctggttgggccccccgttttccccggccnttacccttgtccccccggggcccgggcccgncttcnntaaaagggggccgnaaattttcccaagccancaccttgggccnggcccggtttaactaanttnggaattccccggaagncttccggttaccnaangccttnggnncggtaaatancatnggntcnttaancctggnntttcccttgnnggtggaaaatttnggtttnttccngntttnaccaaattttccaccancaaaacattancnaancccgggataancccttanaaaagtgggtaanaaagncccntggggggtggccnttaanttgaantggaanccttaacntcnncantttaatttgggcgtttagcngcctnaacttnnncccnntttttttcaanatnngggnaaanaccntntgcgnggccn

SEQ ID NO: 5821 - DNA, 1177 bp, Homo sapiens
  misc_feature 2, 3, 4, 5, 8, 15, 20, 21, 24, 27, 30, 31, 33, 36, 37, 40,41, 42, 43, 45, 47, 49, 61, 62, 64, 65, 69, 70, 72, 75,78, 82, 83, 94, 100, 104, 105, 106, 107, 108, 141, 182,202, 220, 221, 265, 288, 304, 313, 318, 324, 336, 338, 354: n = A,T,C or G
  misc_feature 357, 361, 368, 390, 404, 418, 431, 433, 434, 436, 438, 442,454, 463, 483, 495, 500, 510, 570, 581, 583, 586, 600, 602,606, 618, 644, 656, 660, 662, 667, 671, 678, 682, 683, 701,703, 708, 710, 717, 727, 737, 748, 752, 754, 756, 757: n = A,T,C or G
  misc_feature 762, 768, 776, 783, 787, 797, 800, 802, 811, 816, 822, 845,847, 873, 885, 888, 892, 912, 917, 919, 920, 923, 924, 938,941, 944, 953, 954, 968, 969, 975, 981, 982, 997, 1003,1007, 1011, 1035, 1038, 1039, 1041, 1049, 1050, 1051, 1054: n = A,T,C or G
  misc_feature 1055, 1057, 1071, 1078, 1079, 1085, 1086, 1089, 1091, 1103,1109, 1122, 1127, 1128, 1129, 1131, 1137, 1138, 1144, 1150,1153, 1154, 1155, 1159, 1160, 1161, 1162, 1166, 1170, 1172: n = A,T,C or G
cnnnntancattttnatcannatnatnttnntnacnnttnnnntnantnttgtatacaaanntnntatnnanatnatnattnnagtcttccagntaaggnggtnnnnntgtcatcactatagggcgaattgggccctctanatgcatgctcgagcggccgccagtgtgatggatatctgcanaattcgccctttcgagcggncgcccgggcaggtacttnnttttttttttttttttttttttttttttttgaattttaatgacnctaatagctttatttaacaaacnctgagtgactactatntgcaaagcnctatnctaggngcctgaaagatncnaagatgaaaaaagacncantccntgcccanaagggagcgtataatctagtgnggggagacaaaatncccaatatttactngtaattacaaggnanntnancaanaagtggggcaangtgcctganttgtggccctgagttgttgnatactaacctanccctnaaagggttcncaaattttgaaaaacaccgattggaaaaatacgttggtgggtccttggcttttcgaaaanaaatcccccantnccncaaaggttttgggncnatanattggggaaaangtttaaaaattggggcccccttaccncccaaaaaacangggngnggganaaantaaaacnaacnnaggtttggggccccagangntgggnangggcctnctttgttttngaaaaaaganaaccctttggngggncngnngaacnccaccntcttatangggggcnaaantttcccaacnacncnaccttgggncgggncccggnttactaaagatggggaatccccnanagcttcgggttcccccaaaccctttnggccggtaaaancanatgnggtccaataaggcttgtttnttccntnntgnntgaaaaaattttgnttnatnccgccttcnncaatttttcccacnncaaaanttttcnnaagcccggggaagcnataaanaggngttnaaaacccttggggggggccttaantgnntnggagcctnnnccnncncctttaaatttgtncggtttnncccctnnacntngccccctttttnccaaangggggaaaaaacnttgtnnntngccccnnctttgntatttnaannnaaannnngtcncccncnccccc

SEQ ID NO: 5822 - DNA, 1168 bp, Homo sapiens
  misc_feature 1, 3, 4, 6, 7, 9, 12, 15, 16, 24, 26, 28, 32, 39, 40, 44,46, 47, 48, 50, 51, 54, 59, 60, 63, 65, 67, 68, 70, 72,75, 76, 80, 84, 88, 91, 105, 107, 109, 119, 120, 126, 128,143, 184, 200, 223, 224, 225, 231, 236, 248, 314, 376, 395: n = A,T,C or G
  misc_feature 405, 420, 434, 442, 461, 476, 478, 481, 502, 508, 521, 557,573, 583, 590, 603, 606, 614, 620, 626, 644, 646, 656, 686,690, 698, 700, 714, 731, 736, 737, 743, 749, 750, 752, 796,807, 808, 818, 822, 823, 846, 850, 859, 869, 878, 890: n = A,T,C or G
  misc_feature 908, 914, 928, 930, 932, 937, 939, 947, 957, 958, 961, 962,966, 970, 979, 981, 989, 1002, 1008, 1009, 1011, 1017, 1026,1029, 1038, 1048, 1049, 1053, 1065, 1075, 1078, 1084, 1086,1087, 1110, 1112, 1113, 1118, 1120, 1126, 1133, 1134: n = A,T,C or G
  misc_feature 1135, 1136, 1138, 1142, 1150, 1152, 1153, 1162, 1163, 1164,1165: n = A,T,C or G
ncnncnntnatnccnntcactgcntncncccntcccganntttntnnnannttnttatnntcnangnnananatnnatcnacancttntcntagtaagggggggngngngttgactccnncatatncnacttgccccctctanatgcatgctctagcggccgccagtgtgatggatatctgcantaattcgccctttggngcgggcgcccgggcaggtacacnnngaggcnttgangcagccagcgcnggggcttctgctgagggggcaggcggagcttgaggaaaccgcagataagtttttttctctttgaangatagagattaatacaactacttaaaaaatatagtcaataggttactaagcatattgcttancgttaagtttttaacgtanattttaatancttaagattttaagnaggaaaattatggnagacttancaagagtagctatcgaggnaagggaaaaagcatnanaanggtttttctaaaacattgtancggaangttgagaatgaanctttcttcatgggagggtaaaaaatgttattttaanaaggaaaaattgcagnagtaaaaagngacctancaggagccccccnganattttaantacccntattanggaaagggggccaaaatngncttttttagnaatttaaaaaaaatggaaaggggttggaancttntaaaaacnanggccttttaaaaanggtttttagatttttanaaaanntttggntagggnngnattttaaaaaaataaatttttggaagggccggaatccttttttnaaaaaaaggannattttaaaancccnnaaagggtgggaattttaaaaaangaanccctttggnaaaattcccnattggaccncccacgggggangaaaatttggcccgttcnattttnaaaaaggcccttantntnaacgncnctttttancttaaaaccnnccnnaccnaaanaattggggnanagaaattnaaatttgggggangttggnnantggatngaaaaaacnaanttttggcanaaaaaaacannaaanttttggaaagtngggaaaaaanttnggaaanannagaaaatttccccgggtaaaggncnntctcnantaacantaatgtnnnntnctantaaacatncnnttcccttcnnnnccg

SEQ ID NO: 5823 - DNA, 1241 bp, Homo sapiens
  misc_feature 3, 4, 5, 6, 7, 9, 12, 14, 16, 26, 29, 30, 31, 32, 34, 35,38, 39, 40, 45, 48, 52, 57, 58, 59, 61, 66, 71, 72, 73,74, 77, 79, 80, 81, 83, 85, 87, 95, 96, 97, 100, 101, 102,107, 114, 118, 120, 122, 129, 130, 168, 180, 182, 189, 194: n = A,T,C or G
  misc_feature 195, 208, 209, 212, 214, 224, 228, 231, 232, 237, 241, 242,248, 250, 272, 284, 301, 331, 334, 335, 345, 352, 358, 369,378, 383, 385, 388, 389, 395, 402, 403, 405, 420, 426, 436,437, 455, 457, 460, 468, 471, 472, 479, 484, 494, 516: n = A,T,C or G
  misc_feature 521, 540, 595, 604, 631, 635, 638, 648, 682, 685, 691, 699,709, 712, 716, 718, 719, 720, 741, 748, 757, 771, 795, 821,835, 848, 857, 861, 863, 867, 885, 892, 893, 894, 905, 906,909, 910, 911, 917, 919, 921, 923, 926, 927, 928, 929: n = A,T,C or G
  misc_feature 931, 932, 933, 934, 942, 944, 951, 975, 976, 1007, 1008,1009, 1016, 1018, 1024, 1042, 1074, 1076, 1079, 1080, 1081,1082, 1101, 1123, 1124, 1125, 1135, 1137, 1144, 1146, 1155,1173, 1178, 1181, 1188, 1189, 1193, 1204, 1206, 1211: n = A,T,C or G
  misc_feature 1216, 1220, 1240: n = A,T,C or G
ctnnnnnantanantnttgattcttnttnnnngnntcnnntatgnatntatncgctnnntnttaantcatnnnnganannntntntntaatatannnttnnntagtnagagggnggcngngnggctatnnactatagggcgaattgggccctctagatgcatgctcgngcggccgtcagngngatgttntgtcnncttaatccttccnntgngngggggcggcntacntgnnagttnccanntttgcncngactaaaagataaccacccctntctctggcactnatcaacacaagaaccantaaaatggtagatgaaatgaaggaataaangcnnggggttattncctattntaaaanaaaaaaaaatnatttcttcngcagntnttnnccacanacatttnntnatacaagaattaccnagtgtnttttgacctnncagccctgttccccattntnctnccaaaaanccnngagggtnggganacaagtttgnaagccaaaccaaagccaatttnttggnaaaaaaatttacccttagnaaaacccccttaccaaaaatttttggaatttaaaaaattcttaaaaaccctttcntaataaaantttttttggccttttttttttaaaaanaaanatnttttaaattnatttcaaaaaaaggggccccttggcttttttaanatngaacanttggcctnttttttcccnttncccnannnaaaaaaattataacccccccnaaattanccccccccntttttggttcaaangttaaaccaattggccttccaaangttttgaacccagggcccaaactttnttttattttttttnaaaacccttattnttgggaccnaagntngttngttctttttttaaaaacncaaaaannncccccgggagnnaannnaaaagntngnanctnnnntnnnnttaaaccntngttcccncctggttttaaactaaattatccnnatggccccccccttttttttccataaagggnnnggggccnangggccnaaaaaaaccccaaaaaanggggttttttgaggggggcccttaatttcccncnaannnnccccttttttaaaaaaccnccttcccctttggggttttttnnnttcaaaaaangnggaaagncnttttttttntttaaattcccccccttnttttntcntcaaaanntttngggggcccccncnggaancttgngatngggtttttttttcccttttng

SEQ ID NO: 5824 - DNA, 492 bp, Homo sapiens
  misc_feature 76, 79, 81, 82, 89, 92, 100, 108, 114, 143, 165, 301, 418,423: n = A,T,C or G
ggcgaattgggccctctagatgcatgctcgagcggccgccagtgtgatggatatctgcagaattcgcccttagcgnggncnnggccgangtnctctactnaccctttntctganagaaaaggatgaagtcaagggcctggtanaggcaccactaagaaaggcatntgaaaggaccaaagagagtgaccagcaagcattttttgcaaggctgaggagctgacagcttccatgaaaggctggaccacccagtggtgaaaagcatcatctgggttaccttgtgctgccataaaacacaccacanacttggtgacttaaaccacagatatttatcttctcacaatcctggaggctggaagtctgcaatcacggtgccagcatggtcaggttctggtgagggcctctttccttctcactgtgngctcnttcttgtgcatggagagagagagcatgaacaagccctctactgtcccttcttaaaagggcactaatccc

SEQ ID NO: 5825 - DNA, 496 bp, Homo sapiens
  misc_feature 100, 101, 443, 467, 496: n = A,T,C or G
gggcgaattgggccctctagatgcatgctcgagcggcccgccagtgtgatggatatctgcagaattcgccctttcgagcggccgcccgggcaggaacatnnatgtatttgaaattgcaaccctcaagattaaagatttaatagaggaatcaatttaaatattttcttatatactacaacagctatgcatttttgcttaaccataccatataacccaactgtaacatatgaaaattgcataggaaaaaaatgtggtcaccaggcaagatttatctttaaaaaaaaaaaaaaaaaaagcttgggtctaaggggtaatgtccatgcaaatattccatgccaaataagatatatacaagacatgctgatttcctgccttccgccatccaaccgggaaccaccactgtcctgttaatcaagccagtagggtgggaaaaataccactgntttaagaaatctggcttctatcancctctgtcatggagaaacaaaccgagacn

SEQ ID NO: 5826 - DNA, 493 bp, Homo sapiens
  misc_feature 38, 45, 46, 49, 57, 62, 64, 66, 89, 187, 328, 410, 449: n = A,T,C or G
gaattgggccctctagatgcatgctcgagcggccgccngtagagnngtncttcagcngccgncngngcgatggatatgtgcagaattcncccttagcgtggtcgcggccgaggtacatctacagagtggtgggactgggccaggccttgaacccagtggtctgattcagagcccatgctcttattantgtttccccaaatgggtagtgaagtaaatttctgataaaatgaaaagttctctttgtatactgatatccattacaaaacctgcaggactacagcacttcacaaaatgcatcatttccacaaacagtgatgttctttttcanggtaaactatattgcaataacagcaaatatgaaaagatactaatatagtatctcacatgccctcctttgtatattgaaatcnatgaaactccaccatcatcaggaggacctaaaacatganttgtttttccagggctaggaataaatgtctgctgactcatctcg

SEQ ID NO: 5827 - DNA, 583 bp, Homo sapiens
  misc_feature 5, 6, 11, 12, 19, 20, 27, 32, 36, 43, 47, 90, 93, 96, 100,101, 102, 174, 319, 341, 363, 373, 439, 442, 443, 446, 447,455, 472, 494, 499, 501, 502, 512, 513, 515, 519, 520, 524,528, 536, 543, 550, 557, 559, 568, 574, 575, 576, 583: n = A,T,C or G
ctctnntaacnnttaaaanngtatatnatatnctcnccagcanagtncatcaattcgactcctatagggcgaattgggccctctatatgnatncgncgannngggccctctagatgcatgctcgagcggccgccagtgtgatggatatctgcagaattcgccctttcgagcggncgcccgggcaggtaccaagcactttacaaaaagaatccccatatatttgtttttggaggccacaagaaatgggaagggctaatgagagactgcagttaattctgcagctagtcttagggaaaacagaactccaaaaaaatagaanagctgaaaggagaagaaagcanactgaatttttgtgcttatcanaggaagaacnaaagaatatggagttgtcctggatcctgagaccattagtggggttacctgagatgacctgtgatgngtnnggnnctgagttnttttttatttgacctanagccagaaaattataaaattgnccctntnngtataagganncntcanntcancttntgggtggnataatanttttatnggaatcnantctttcatnacctannnggattan

SEQ ID NO: 5828 - DNA, 967 bp, Homo sapiens
  misc_feature 128, 143, 151, 154, 159, 161, 168, 178, 181, 188, 199, 200,225, 250, 253, 288, 298, 308, 310, 320, 333, 336, 339, 353,355, 380, 383, 399, 402, 428, 431, 448, 455, 459, 464, 473,474, 488, 490, 496, 504, 515, 525, 526, 527, 529, 531: n = A,T,C or G
  misc_feature 550, 560, 563, 569, 620, 625, 627, 634, 639, 661, 674, 679,680, 686, 688, 694, 695, 698, 703, 708, 713, 716, 736, 746,748, 754, 760, 765, 768, 772, 776, 780, 785, 789, 795, 798,799, 803, 809, 816, 821, 823, 830, 839, 842, 852, 853: n = A,T,C or G
  misc_feature 861, 869, 872, 874, 876, 878, 882, 888, 889, 891, 897, 899,903, 907, 915, 918, 920, 928, 932, 946, 961, 966: n = A,T,C or G
ggcgcgcgtaatacgactcactatagggcgaattgggtaccgggccccccctcgaggtcgacggtatcgataagcttgatatcgaattcctgcagcccgggggatccactagttctagagcggccganggggcaggttttttnttaatttnttnttgantnctttttnttgcttttgnttntttaccnttggacccagnngctttgatagctttggagacctatnctctgcctgtgctatcatgggtaangcnaaagtgaaggcccatggcaagaaagtgataactgncttgaacganggcctgaatnanttgaacaggntaagggcaccttntgncancctcaagtgagctncnctgggacaagctgcatgtggatccnganaacttaggctctgggnaanatgattcgtgattgtgctgggccacnacntgggcataggattatcnaccccgnttgnacagnctgcttttnnagaaaggtggtggntngaattnttccgctngcctggctcanaaagtccttnnncngncacgcggaggtgggagctncagcttttgnttnttttantcgagggttaattgcgcgcttgggcagtaaatcatggtcatagcttgtttnctgtngnaaaaatnttttnccggttacatttcccacacaancttaccgagccgngaagnnataaantntaaaannatnggggngcttnatganttnaccatacttaccttgaaatnggtgtttgancnttattngtccgnttttncangatngggnaaancttgnccgngcccanctnnaatnaagtgnatacggncaacncntcgtganaaaaggcgnttngcggtttagnngggccttnttaaaaanttntncntnaatnaaaatnngntgtgantncgtncgtntcggtttntgnanaagcggantaantcttcttttaaggngggtcatctcctttnttccnt

SEQ ID NO: 5829 - DNA, 839 bp, Homo sapiens
  misc_feature 3, 15, 188, 189, 190, 191, 192, 209, 222, 226, 227, 229,241, 242, 244, 250, 257, 258, 259, 260, 261, 262, 263, 266,281, 285, 291, 292, 293, 294, 295, 296, 298, 303, 305, 307,308, 311, 312, 319, 323, 325, 329, 332, 339, 355, 357: n = A,T,C or G
  misc_feature 358, 368, 369, 370, 374, 380, 386, 387, 388, 392, 401, 402,403, 406, 409, 413, 414, 415, 426, 427, 439, 453, 460, 465,466, 468, 470, 480, 482, 502, 503, 518, 524, 527, 534, 539,547, 552, 557, 560, 569, 611, 612, 619, 627, 631, 640: n = A,T,C or G
  misc_feature 644, 651, 658, 659, 672, 675, 676, 677, 679, 681, 691, 693,698, 702, 720, 723, 724, 727, 732, 738, 742, 747, 748, 749,750, 757, 758, 764, 769, 782, 783, 793, 800, 802, 817, 818,821, 826, 828: n = A,T,C or G
ttntttcgtaatacnactcactatagggcgaattggagctccccgcggtggcggcccgcccgggcaggtacaagcttttttttttttttttttttttttttatttttttttttttttttttttttttttttttttttttttttttttttttttttttttttttttttttttttttttttttttttttnnnnnaaaaaaaaaaaaaaaanttttttttttttnaaanncntttaaaaaaaanncntttttnaaaaaannnnnnnccnttttaaaatttttcncccnaaaaannnnnngnggggntnannccnnttttttnaaangnttanggntaaaaanggtttttttttttgangnnccaaaaaaannntccnaaaatnaaaaannnaggnaaaagggtnnntcnccnaaannnggggggggggnntttttaaaaaangggggggggggggnaaaaaanccccnncncnttaaaaaaanangggccccccccggggggggnnaaatttataataaantttttnaanccccccnccccngggggggnccccnccccnccnatttttttnccttttaaaaggggaaaaaaaccccccctcgggaaaaaaaannaaaaaanatttttcntggngaaaaaaantttnccccccnaaaaaannccaaaaaaaaaanaannngngnaaaaaaaaananaaaancccnggggggcccaaagggggnccnnccnccaanaaattngggnggacnnnnccccccnnttttanaaaanaaaaaaacttttnncccctttttntttaaananaaacccccccccccnnggnaagangnttttttttttt

SEQ ID NO: 5830 - DNA, 763 bp, Homo sapiens
  misc_feature 1, 2, 5, 14, 25, 30, 37, 41, 45, 54, 117, 278, 283, 419,422, 468, 578, 627, 633, 634, 640, 645, 646, 656, 673, 686,687, 694, 695, 697, 698, 703, 713, 716, 717, 718, 719, 725,726, 740, 762: n = A,T,C or G
nncanttaaccacnccttttggacnatatngcgctcncagnttcnccgcggcgngcggccgcccgggcaggtacaccttgttaccaaataggttgttctcttccccacccacctttnagcttttgctctaaaatacattcaggttccaggcctgaccatccttgtttaatctatcatactcttccaggttttttttttggtctaaggctggaacttttttcttttttttcagctgaagtcttatgacttttcatgagtcaaaattgtttggatttcancaagncaaatcttgcaaaggcctgcatattttttttaagattatatgaagtctgtgcaaaagctttaaaaaaatgcctctgccttgcctgcaatacatgcaatgtatgttaacttagtctctcttctcagacactgttggnagntatttctgggttttcctttttttaaaaaaaaatatggacttattgnggctatctgagagggtctaacattcacatgcaatttggtgtggccatttagctattaatgagttaatggcgcaaaacttggtgaaatttgaagtggtctcttcccttttnccatgacgtaaatacataaggggggtcccgggaattgttcaaggttttncccccnnctaatnttggnncctcggccgntctaaaaataagggganccccccggcctgnnggaattnnanntaaancttattgaanccnnnnaacctnnaaggggggcccggnccccaacttttggttcccttang

SEQ ID NO: 5831 - DNA, 893 bp, Homo sapiens
  misc_feature 3, 4, 370, 634, 649, 668, 681, 686, 692, 695, 705, 711, 719,740, 751, 764, 765, 766, 767, 768, 774, 775, 776, 777, 778,780, 781, 782, 783, 784, 785, 786, 787, 788, 789, 790, 791,793, 794, 795, 796, 797, 798, 799, 800, 801, 802: n = A,T,C or G
  misc_feature 803, 804, 805, 806, 807, 808, 809, 810, 811, 812, 813, 814,815, 816, 817, 818, 819, 820, 821, 822, 823, 824, 825, 826,827, 828, 829, 830, 831, 832, 833, 834, 835, 836, 837, 838,839, 840, 841, 842, 843, 844, 845, 846, 847, 848, 849: n = A,T,C or G
  misc_feature 850, 851, 852, 853, 854, 855, 856, 857, 858, 859, 860, 861,862, 863, 864, 866, 867, 868, 869, 870, 871, 872, 873, 874,875, 876, 877, 878, 879, 880, 881, 882, 883, 884, 885, 886,887, 888, 889, 890, 891, 892: n = A,T,C or G
tcnncactactatagggcgaattggagctccaccgcggtggcggccgaggtacgctctccccttattccagcagggctactttcctcttcactctgatgaggggagctttatctgctttcaaaatggagcacgtcgcactggagtttcgtgccctctcgttaacctgtcaggagccacagggctccataaaacggaatcagtgtctcaatatacatgacctatgttcatagcaatgttcagccatttgggtttgaagaaaaccacattaaagccaagacccgtttggagcgaactgccttgttctttgctgtgtggaaggttctgtccctactgctgaactccagttcctcccaagcaccctggcctcanaaatcctggcttccccaagttaggtgctgtctgacctgagccaggccactgcttggtgcctctacaggccactgtgcatgttgagaattgcccaaaaggattagtgaagctcctgaccctggcgaggccataatgaacactgaagtgcacaggccaagggatgtaattgaaaggcatttatttttgtgaagatgctataaaattagcatttaaatatcccattcccttctcttggcctcctcctatccccctatggtatttctncttcctttccttaanggcaggctttttgggaaangcattggctcatntttgncaacgnggnccttaccttnaacctntgggcttnttgaaaggactgaaaaaattnccggttggtangaaagggggtgtnnnnngggggnnnnngnnnnnnnnnnnntnnnnnnnnnnnnnnnnnnnnnnnnnnnnnnnnnnnnnnnnnnnnnnnnnnnnnnnnnnnnnnnnnnnnnnnncnnnnnnnnnnnnnnnnnnnnnnnnnnna

SEQ ID NO: 5832 - DNA, 896 bp, Homo sapiens
  misc_feature 501, 596, 638, 761, 837, 856, 857, 882, 884: n = A,T,C or G
agcgcgtatcgactcctatagggcgaattggagctccccgcggtggcggcccgaggtaccacatcttaaatactctccagtgttctgagtctattatggggaggagcagtcttttgagacgctggaagggaaaatacaattgagatagggatgtgacggtgacagtataacagtaaatggaatcaaaatggtgaacaaaaaggatatttggtgacaaataatgggtgtggatccatttgattggatcagggtcctaattcctgattctgcccaacaagttaattggagctggctggaaaacagcaaaaccaccttcacggatcttggtggcccaattaggcttggcatctgctctgaggccagatggagaatacactttgctggcacctgtgaataatgcattttctgatgatactctcagcatggatcagcgccttcttaaattaattctgcagaatcacatattgaaaggtaaagttggccttaatgagctttacaacnggcaaatactggaaaccatcggaggcaaacagctcaaagtcttcgtatatcgtacctcggcccgctctagaactagtggatcccccgggctgcangaatttcgatatcaaagcttatcgataccgtcgaccctcgangggggggccccggtacccaacttttggtccctttagtgaggggtaattgcccgcttggcgtaatcatggtcatagctggtttctggggtgaaattggtatccctcacaattcccacacatacnaaccgggagcctaaaagtgtaagcctggggtgcctatgagtagctaactccctttaattgcgtgcgctcctgcccntttccagtcgggaacctgnntgccactcattatgaatcggccacncncggggagggcgg

SEQ ID NO: 5833 - DNA, 972 bp, Homo sapiens
  misc_feature 275, 356, 369, 450, 455, 489, 502, 521, 536, 628, 663, 670,685, 691, 719, 722, 727, 761, 786, 793, 806, 812, 816, 831,838, 867, 880, 903, 913, 916, 925, 926, 931, 932, 937, 951: n = A,T,C or G
tagccgtatcgactcactatagggcgaattggagctccccgcggtggcggccgaggtaccacatcttaaatactctccagtgttctgagtctattatggggagggagccagtcttttgagacctggaagggaaatcaaattggagaatagggatgtgaccgggtgacagtataacagtaaatggaatcaaaatggtgaaccaaaagggattttggtgaccaaataatgggtggtgatccatttgattggatcaagggcctaattcctggatctgnccaaccaaggtatttggacctgcttgaaaaccaccaaccacctttaccgggatcttggtggcccaattaaggcttggcatntgctctgaggccnaaatgggagaaatccctttgctggcccctggtgaataatgccatttctgatgatcctcttaacatgggatcaacgccctcntaaantaaattcttgcagaaatccatatttggaaaggtnaaaagttgggccntaaatgagccttaccaacnggcaaaatactgggnaaacccatcggaggcaaacagctcaaaagtcttcgtatatcgtacccttcggccgctcttagaactaagtgggatcccccccgggcttgcanggaaattcgatttcaagcttatcgatacccgccancctcgangggggggccccggtnccccanctttttggtcccttttaatggagggttnaantggcncccttggccgtaaatcatgggcatagctggtttncctggggtggaaattggtaatccgntcacaanttccccacaacantacgancccngggagccataaaatngtaaaanccttgggggtgcctaatggagtggacctnacctccatttaanttgcgttgccctccttggcccgntttccagtcnggnaaccctgtnntgccnncttgntttaatgaattggncaacccccggggagagggcgg

SEQ ID NO: 5834 - DNA, 897 bp, Homo sapiens
  misc_feature 204, 232, 235, 250, 265, 286, 393, 399, 436, 476, 546, 579,581, 634, 641, 648, 687, 708, 710, 716, 730, 736, 755, 758,765, 766, 775, 776, 786, 799, 800, 801, 813, 815, 824, 840,848, 849, 861, 864, 868, 871, 878, 881, 883, 886, 891: n = A,T,C or G
  misc_feature 892, 894, 895: n = A,T,C or G
agccgtatcgactactatagggcgaattggagctccccgcggtggcggccgaggtacaggtagatcttgtagtcaagtgcctggttgtaaaacctgtgatgggtgtaacttctgacatctggctttgatgggtcttctggaattggaatctggccaattggctggaacggcatcaacttggaaccagtgatcgtcttaatcttngttcttcaactaatggtgaatgggtggnctnaagaacatctggcanaacgaacccttcttngtgggctgacattcttcaaangtggtgacaacttcctgagcttgtctgcttgtcaaaagtggccttaaaaacataacactcactttatatttggtggccaccataagtcctgatccaccacggatganctgcangaaccaaggttgatttcttttatttggtcccgtcttnttcttgggggtcacccgcacctcgatatccaatgagcttnacattgggtggtggtccactgggcccctcaagcttgggggtgtgaccctgaagtgaacttcaaggtcaanttggtgcaagaaatagcttgtggactggggttncnaatcaagggctgctcttcatatcatcgtgccaaggcaaccacacttgactgtntaccctnggcccgntctaaaactaagtggatcccccgggctggaggaaattcnatataaacttattgataccgncnacctcnagggggggccccgnacccancttttgttccctttatganggntaattgnncccttggcnnaatatgggcnatactgttcctgnnnaaattgtatccntnaaaattcanacacatacaaccgganccataaanntaaacctggggnccnaatnagngacctanctnanttnattgnntnncc

SEQ ID NO: 5835 - DNA, 830 bp, Homo sapiens
  misc_feature 672, 675, 701, 765, 778, 779, 797, 818, 829: n = A,T,C or G
gccgtatcgactcctatagggcgaattggagctccccgcggtggcggcccgaggtaccaatttggatgaattcttgatagatttaaatagtgtatgtaattttgtaatgcttagactcttgaagagctactttctgttttaatgttaagattcttgtgtcttagttttttttaacatggatgaattccatgtaaacaggtatggaagtaggaaatgtttaggctggacttggtggattattaattgactttcttgggttcttgggagtcaacattactaaagcagtgtgaatccctgtttgcttcagggcgagatgtgtgacagaggtggcatcaagctcttacagtcccaaccctccaacggaaatgggcgaagatctcaggaatggcatcggtcacaggaaatcgatagtggctggctgctagcatggccacttggggcttaggcagaaatagagccatggtacctgcccgggcggccgctctagaactagtggatcccccgggctgcaggaattcgatatcaagcttatcgataccgtcgacctcgagggggggcccggtacccagcttttgttccctttagtgagggttaattgccgcttggcgtaatcatggtcatagctgtttcctgtgtgaaattggtatccctcacaattcccaccaacatacnaancccgggacataaaagggtaaagcccnggggtgcctaatgagtgagctactcacattaattgcgttgcgctcactggcccctttccaatcngggaaacctgccnngccagctgcatttaatgnaatcgcccaccccccgggganagcggtttgcnt

SEQ ID NO: 5836 - DNA, 870 bp, Homo sapiens
  misc_feature 151, 339, 364, 368, 383, 434, 458, 500, 503, 505, 529, 543,548, 605, 615, 616, 624, 630, 644, 645, 646, 654, 657, 680,685, 689, 695, 704, 710, 712, 726, 729, 734, 736, 737, 752,759, 763, 773, 775, 781, 790, 791, 792, 800, 833, 853: n = A,T,C or G
  misc_feature 854, 869: n = A,T,C or G
gtaatacgactactatagggcgaattggagctccccgcggtggcggcccgaggtactttaggccgaagctgttcttcatggaagactcagcatagcggaagtaggaggaacctggaggtctgtccaggttgtcgatgaagtcacgcacgtnttccggcaggatgactcggtgctcgcccatgtcccggtagttccccagcacgcacactggcacgtgggtgggcacttttggaagctcccggagaatgtaattgaaggtccactgcttggtaatgtcgaacatcatgaccaccccgttgcagttcttgtacctgcccgggcggccgctctagaactagnggatcccccgggctgcaggaattcngatntcaagcttatcgatnccgtcgacctcgagggggggcccggtacccaagcttttgttccctttagtngagggttaaattgcgcgcttggcngtaaacatggtcatagctgtttcctgtgtgaaattgttatcncgntnacaattccacacaacaatacgaanccgggagccataanagtgntaaaagcctgggggtgcctaatgagttgagctaacttcacatttaaattgcggttgngctcacttgnncgcttttnaattcnggaaaaacctgtcnnnccaagctncanttaaatgaatcgtgccaacatcnccgangaanaaggcnggatttgcngtattngngcggctctttctanttnacttnanntcaattgactctatngtcttcngacntttcgggttncnggtaanccagatttnnnattaattnaaaaggcggtattttcggttattccaaaatatncaggggattacccaagaatnnaaacttgtcgacccnt

SEQ ID NO: 5837 - DNA, 966 bp, Homo sapiens
  misc_feature 32, 50, 242, 244, 295, 371, 404, 495, 563, 642, 692, 763,798, 824, 836, 843, 863, 871, 893, 894, 896, 898, 901, 902,904, 922, 939, 940, 943, 954: n = A,T,C or G
tacccgtatacgactcctatagggcgaatagnagctccaccgcggtggcngcccgaggtacagtcctgattgcatcataattggtgggtttccaacccagtgggacattcttaccgtatgttacctggaaactaagtgggattaccccaacccccgcgtggattggaaagtggatgtaatctggattctgctagattccctccctaatgctgaaaaacctggccttcattccaaccagctgncnttgggatgattttgggggaacatgccgactcaaagtgtggcttgtgttgantggtgtgaattgtggcaaggtggttctctccaggaatttgaatcccagaatgggaaccggccatgatagtgaaaantggaaaggaaggccttaagaatgggtgggttgnaaagtgcctatgaaagtcatcaaagcctaaaagggatatacccacctggggctatttgggattaaagtgtggcttgatccttattggaatnccatgtttgaaaaaatctattccaggattcattcccgtgtcaaccaatgggtaaaagggggatgtatngcatttgaaaaatgaagtctttcctgagcccttccatgtattcctcaatgccccggggattaaccacggttatcaaccnagaagcttaaaggatgatgaaggttgctcagcttcaagaaaaagtgccanaatcccctgtggggacattccagaaaggacctaaaaagaacctgtgactaggtgagcctctaggcttgtanaaaattaaaaacctaccatggggattaactcgagncctttaattttcatccatgtaccctngggccgttttanaactaantgggatccccccggcttganggaattcnatattcaagcttttcgataccnncnanctnnangggggggcccgtccccanctttttttccctttaannganggttaattgcncccctggcttat

SEQ ID NO: 5838 - DNA, 891 bp, Homo sapiens
  misc_feature 148, 152, 154, 156, 157, 163, 164, 167, 168, 171, 173, 174,176, 187, 194, 195, 199, 202, 203, 208, 210, 212, 219, 233,241, 249, 251, 256, 257, 261, 262, 268, 275, 277, 279, 293,301, 303, 305, 320, 322, 325, 333, 344, 347, 348, 356: n = A,T,C or G
  misc_feature 357, 358, 362, 364, 372, 385, 400, 404, 408, 435, 437, 445,454, 467, 481, 488, 514, 523, 525, 531, 542, 554, 556, 565,566, 568, 574, 576, 579, 600, 604, 606, 629, 675, 676, 678,684, 702, 727, 728, 735, 751, 753, 773, 784, 785, 789: n = A,T,C or G
  misc_feature 794, 795, 799, 800, 806, 807, 816, 821, 823, 833, 835, 852,853, 865, 869, 870, 871, 876, 885, 886, 890, 891: n = A,T,C or G
tagcctatcgactacttagggcgaattggagctccccgcggtggcggccgaggtacaagctttttttttttttttttttttcttttttttttttttttttttttttttttttttttttttttttttttttttttttttttttttttcnaaanancnncctttnnttnnaangnnanccatggccctnaaagctnntaanaannttggntnancaaaggnaactaggggtcggnaaaaaggnttttgggngnaaaannttgnnttttcnttggggngngntcctgggaaaaggnaaaaaagngncncaccctgcaggtaantnggntaaaaaanccaaggccaanggnngggggggnnnaganantcaccttntccaccctggggnctgggtgtagggttntccntttntccctgggccttcccatttggcccatnancctaggtntttggaccntttttttggaggnttttttattttaangaacggngattttttttattttttggccctttnttgggcccncncccccnttttaacaaantggaaattgggnanaagggcctnntnaattgntntcnggggtcccaacttgttttgtntttngnccaagggtgacaaaaaaaccccnccccagggttttattgggaatggggccccccggccctttttaaaannangggaancccccgggctggaggaantttattttaaaactttttaaacccnncaccttngggggggggcccgggncncaattttttttcctttaaanggggttaattnncccnctggnnaaannatgggnnaaaattttnttggnanaaattttttncnttaaaattccaaaaaanncaaccgggaaanaaannnaaaanccggggggnnaaann

SEQ ID NO: 5839 - DNA, 790 bp, Homo sapiens
  misc_feature 2, 185, 457, 480, 531, 546, 580, 583, 626, 633, 651, 677,690, 698, 704, 706, 708, 710, 711, 713, 720, 721, 723, 729,731, 734, 748, 751, 757, 768, 775, 778, 782, 790: n = A,T,C or G
gncgcgcgtatacgactcactataggggcgaattggagctccccgcggtggcggccgaggtacttgacgatctgaggaataatgaatttgaagacattaacatttctctgcaccagattgagccgactctccccttcttgctgacggactcctgcagttaccactacaatcttagaattggcggncacagaataatctttatctgccacaattttaggtgtctgaagaaataagctcccatgctgcagaaccatcatttcttctttaagcttatcttccaaaacatcacaagaaccaggtcattaaccagagacttttccagaatgctgatagcacacgccataccaacttgtccaacacccactacagtgatcttattggttgggaactggtgcctcttctttccgcaactggtgcaatgagttttttcttaaaaagttgccattttgcacaaganaagaagaaagctctggagacctntgtaacaagtcgtgcggagaaaacaaaagtcagctgcgtgcgttttcttcngggcaccttgggcgntctagaactaagtggatcccccggctggaggaantcnatattaagcttattgatcccggccacctcaagggggggcccgnacccacntttggttcctttaatggngggtaaatgcccccttggggaaaaanggcatactggttnctgggggnaaattntntncnntncaattcnnancaaatnanaanccggggccataaanggnaagccngggggcctaangaggggnctnactncctttaan

SEQ ID NO: 5840 - DNA, 671 bp, Homo sapiens
  misc_feature 5, 7, 63, 64, 67, 68, 70, 71, 74, 81, 82, 97, 102, 113, 114,125, 130, 131, 133, 136, 140, 142, 145, 150, 151, 153, 159,160, 162, 178, 179, 185, 189, 196, 200, 205, 211, 218, 230,232, 233, 238, 243, 244, 245, 248, 250, 251, 252: n = A,T,C or G
  misc_feature 253, 266, 267, 270, 278, 279, 280, 284, 288, 290, 292, 294,295, 298, 302, 305, 306, 307, 308, 318, 320, 323, 326, 329,338, 341, 353, 371, 380, 383, 386, 391, 401, 406, 424, 427,446, 451, 452, 453, 455, 469, 471, 472, 479, 481, 482: n = A,T,C or G
  misc_feature 496, 498, 502, 514, 517, 519, 526, 528, 531, 532, 533, 536,537, 540, 543, 545, 546, 548, 552, 554, 562, 565, 567, 589,590, 594, 600, 603, 605, 606, 608, 610, 613, 624, 626, 628,630, 631, 632, 633, 642, 644, 645, 649, 656, 659, 662: n = A,T,C or G
  misc_feature 663: n = A,T,C or G
cgtancnactactatagggcgaattggagctccccgcggtggcggccgatgtacacctagtannctnnannccnctgcacnnatagaggtcaaggcncattnatacaggctanntggaggggganccacnntncancgtntngtnacctnnantgcggnntnactatgagcacttgtnntagaanttgntagtatntggngctcngggtgnattccangaccctctcatngnngcccncaacnnncangnnnnagagcataaaganntcntctccagnnntgtntacncnancnnacncacncannnnaattgggctnantgntanctngccgcttgnacncctccggaaatntggtgacgcctctctgcntttatgaangtnccncaggnagcctagagnctggntgtgtattgcggccgttntanaattactcggatcactgantgctnnngnaatggtcatatcangnntatcgancnngtccacctcactcngngggnccagtacccatnttnanatacttntnggnnngcnnaanagngnncntgtnancaaaatgngcnanaagatggccactaaccgaaaannggangcgttnatngnntnantcnatatgctaccncncncnnnnaagcataanannagtnggcgctnaanganngaggtagc

SEQ ID NO: 5841 - DNA, 932 bp, Homo sapiens
  misc_feature 4, 7, 268, 270, 643, 722, 730, 747, 815, 831, 849, 879, 884,896, 902, 907, 908, 909, 921, 922, 932: n = A,T,C or G
cgcnctnctatagggcgaattggagctccccgcggtggcggccgcccgggcaggtacctccctgcctttaaacagaatacttttttcttttttttggcctttctcagattagtcaaaaattctatagaatgactcacttcgaatactaagacacaggaggtttagcctgctttcttaccaaattcatgttacccagacttgtgttctcttgcgtcccttggactgcctgttgattgatggaaagtgtctgcactgacacttttcgtcngnagtctgtagtttcgtggcctcttttgattataactggggtcaccaagaaggtttacttaattaaataccgcatttctaagagaagatctttgtgtaagaaaagatgccacatttagtggtttaacttttgtaacttcacttgatagtttttaagcaattagaatgggagttagggaaagaacatatcatactgaacaaatgtcattctagtttagatagcatttctaagataactgatactaatacttgttttcttccctataacataaaaaacttcactggtaaagtcatgtcccttggaaacatgatagttacataccaggttttctcttcacacataaataacaccactaaagttggtttggtaagggtncaaactaatatggcatatatcaactctacagtttcaaataaatgactttttaattggaaaaagaatagttgaaaactgnatgaatgngaagaacacatgcttangccatttttatggtcaattccactttggaaatctttctaattaatgggcctctcaaggtctagagagnagggcttttattccgnggccctgggcggtctaanactagtggatcccccggcttgaggaattcnatttnagccttttgatnccgccnacctnnngggggggccggnnccacttttgn

SEQ ID NO: 5842 - DNA, 885 bp, Homo sapiens
  misc_feature 1, 30, 33, 38, 41, 47, 51, 52, 55, 61, 635, 659, 663, 667,678, 680, 688, 694, 719, 723, 731, 738, 769, 776, 780, 788,791, 803, 817, 818, 822, 864, 874, 879, 884, 885: n = A,T,C or G
nacgcgtatacgactactatagggcgaatnggngctanacngcgaangggnnctncgccgnggtggcggccgaggtacaagattcagatcctaaactcaaattcctctcccacaataaaccctgccagcaaacgcactccagcactgcctggccctctctgctgtctgtgcttgctttgtgccaagtgccctcagctgcaaaagagatggcaggagaggctcgcagacaacagacactggcctccccctcgccccatctctaagcgtcccctccagccggcctcagcagacaagtcaccaccatcaggtgggtgatcccagaagcagctacaggtttctacatttccagacatatccacggccctgcctttctacaagaaattggaggaattttaaataaagttttgttcccttttaactcattcttaaatataccactttcttcataacatacagctgaaacctttgcccttctttgttggggaaaaacagcaatgcctacctgttttcaagctgattcaaacatttctccaggaaaaaaaaaaaaaaggaatgattttctaaagctaaataaagcagaggacaattcttcctgcaagcatggctggttctctttcacatttctttcattccangaaaataatttaagttttacatangacntttncaattaaggcntnttaaaacnttcttntttttaagaaaactggaatgaaaanttanaattgcanagaaacnggtttttggggttggttttttaaacctgccnttcactngatntgatttanaanaaaattaaaccncctttttataatannggtngcttaaaaaattgcccgggggtcccaaaaaaaaaaattttgnttttaaaccnccccncaggnn

SEQ ID NO: 5843 - DNA, 420 bp, Homo sapiens
gtatacgactcactatagggcgaattggagctccaccgcggtggcggccgaggtaccatatttctccagctggcttgtaagctatgtgaggcagagaacgatcttacattttttttggcctaaaagcggtagaaatttaataaatagatatgaattgattgattcattaatagtataaaaagaaaatttgggggtggtttttccatctttagaacaaagagatgaggctgggcgcggtggctcatccctgtaatcccagcactttgggaggccgaggcaggtggattacttgaggtcaggagtttgagaccagcctggccaacatggtgaaaccctgtctctactaaaaatacctcggccgctctagaactagtggatcccccgggctgcaggaattcgatatcaagcttatcgataccg

SEQ ID NO: 5844 - DNA, 930 bp, Homo sapiens
  misc_feature 1, 2, 71, 136, 149, 420, 533, 613, 637, 671, 725, 757, 770,778, 781, 785, 793, 804, 836, 839, 841, 848, 853, 856, 865,870, 887, 901, 904, 906, 908, 912, 913, 914, 915, 916, 918,920, 922: n = A,T,C or G
nnctcactatagggcgaattggagctccccgcggtggcggccgaggtacatcatttcatgtcatcctgttnggcctgatgaaagaacccttacagttcagggttcctgggactttctaccagtgccccttcttgancaggccctaccanagggtgccacctacaacatcatagtggaggcctgaaagacccacagaaggcattaagggtcgggaaagagggtgttaccgtgggcaactctgtcaaccgaaaggctttgaaccaacctacggatgacttcgtgcttttgacccctacacaagtttcccattatgccgttggagatgaagtgggaacgaatgtctgaatcaggctttaaactgttgtgccagtgcttaagctttggaaagtggtcatttcaagatgtgattcatctaaaatnggtgccatgacaatggtgtgaactaccaagattggaagaagaaagtgggaccgtcagggaagaaaaatgggccagatgatgaacttgcacatgtctttggggaaccggaaaanggagaaattcaaggtgtgacccttcatgaaggcaacctgttaccgaatgatgggaaagacataccaccgtagggagaacnagtgggcagaaaggaaatatcttnggggccattttgcttctgcacatgcctttggaangccaaccggggcttggcctttgacaactgccccaaaacctgggggtgaacccantccccgaaagcccttctgggcaattcttcaancagtttttttaanagatcccnttngaanaacaaacnccttatggttnaattgcccaattgagtgcttcatgccctttanatntncctcggnccctnttnaaactaatnggatnccccgggctgcaggaantcatttcaaacctnttngntncccnnnnncntnangggggggg

SEQ ID NO: 5845 - DNA, 960 bp, Homo sapiens
  misc_feature 103, 232, 327, 573, 607, 614, 622, 667, 756, 825, 831, 836,845, 879, 900, 911, 929, 941, 955, 957, 958: n = A,T,C or G
gcgcgtatacgactcactataggggcgaattgggagcctccaccgcgggtgggcggcccgaggtacttgttaccagtaaaaagaggtataaaagtccctgttncccaagtccaaaccacttttttaaccttaaaatctttgagtttttctgaattactcaaatttgaaagtaattctctttatatctgaaaaatggttttattgaaccgtttgaagattaaaaaatatgcanttgcaaagaaagcatatgacaaacattctgagagtcctcggcccgctctagaactaagtggatcccccgggctgcaggaattcgatatcaaagcntatcgataccgtcgaccctcgagggggggccccggtcccaacttttgttccctttaagtgagggttaattgcgcgccttggccgtaatcatggtcatagctgtttcctgtgtgaaattggtatcccgctcacaattccacacaacattacgaagcccgggagcataaagtgtaaaagcctgggggtgcctaaatgaggtgagctaactcacattaaatttgcgttgcgctcactggcccgcttttncaagtccgggaaacctgtccgtgcccagctgcanttaatgnaatccggncaaccccccggggaagagggcggttttggcgtaattgggcgcctnttccgctttccttcgttcacttgacttcgcttgcgcttcggtccgttcggcttgcggcgagccggtatcaagctcactcaaaaggcggnaaataccgggttattcccaagaatcaaggggataaccccaggaaaaaaacaatgtgaccaaaaggccancaaaanggccnggaaccgtnaaaaggccccggttgctggcggtttttccataangctccgcccccttgccagccntacaaaaaatnggccctcaagtcaaaagngggggaaacccncccgggcttttaanannct

SEQ ID NO: 5846 - DNA, 874 bp, Homo sapiens
  misc_feature 379, 563, 589, 590, 597, 632, 634, 659, 668, 681, 687, 709,733, 736, 739, 744, 748, 760, 761, 789, 823, 829, 832, 834,844, 845, 858, 862, 864: n = A,T,C or G
tatagggcgaattggagctccaccgcggtggcggcccgaggtactgaggaatgaatagaaaggcttccagatgtctaaaagattctttaaactactgaactgttacctaggttaacaaccctgttgagtatttgctgtttgtccagttcaggaatttttgttttgttttgtctatatgtgcggcttttcagaagaaatttaatcagtgtgacagaaaaaaaaatgttttatggtagcttttactttttatgaaaaaaaaaaattatttgccttttaaattcttttcccccatccccctccaaagtcttgatagcaaagcgttattttgggggtagaaacggtgaaatctctagcctctttgtgtttttgttgttgctgntgtgcaagtgtgcctgtcactactggtctgtacctcggccgctctagaactagtggatcccccgggctgcaggaattcgatatcaagcttatcgataccgtcgaccctcgaggggggggccccgtacccagcttttgttccctttagtgaggggttaattgcgcccctggcggtaatccatggncatagctggttccctgggggaaaatnntatccgntcacaaattccacacaaacataccgagcccgggancnataaaagtggtaaaagccctggggnggcctaatngagtgagctaacncaccantaattgcgttgcgcttactggncccctttccaagccggggaaaccntgncgncccanctgnattaattaaatnngcccaacccccggggagaaggcggtttncgtattggggcgcttttttccgctttcttaggtnattganctnantgggctcggnncgttccgggtggngggnancggtattaag

SEQ ID NO: 5847 - DNA, 901 bp, Homo sapiens
  misc_feature 2, 3, 6, 12, 17, 24, 32, 630, 636, 645, 720, 726, 730, 735,742, 747, 750, 757, 776, 778, 795, 799, 804, 806, 808, 809,817, 823, 824, 828, 834, 835, 837, 838, 839, 840, 841, 842,843, 844, 845, 847, 848, 851, 852, 856, 857, 860, 861: n = A,T,C or G
  misc_feature 864, 865, 866, 867, 868, 869, 870, 871, 872, 873, 874, 875,876, 877, 878, 879, 880, 881, 882, 883, 884, 885, 886, 887,888, 890, 891, 892, 895, 896, 897, 898, 899, 900, 901: n = A,T,C or G
gnntcnctatangactnactatanggcgaatnggagctccccgcggtggcggccgaggtaagacattgaaaggttttagtttcttccctatctgcatgtcctctcatatagaaagcccagaattaggggctagaactccaggagagggtctccccgactcatctcttgctgacggtcaccaggatgcagaaatagggagatggttagtgggggccaaagatgccccctcccaggccttcgtggttccctcctccgccccctgcaatctttggaggagtcagtgcctcactccagcagtgagtgcctactgtatgcaggtaagtcagccaggcaaagagagactaacggtctcatgggggaaccctcttgcgggaggccaggtagctggagcgaagcgttccggcccgccttgctgctgggtggagtggagagggagacttctttttgttggttttaatttaaaaacacaaaggcctaaagaaatacgtatcttataatttttttaatttttgagacgttcatttaatgaattgtgcacgaatgaatttctatatatataaaatatacatatatagctctatatttggggaggggcactggctcttttttctctcatttttaaaatgaaantgttgntgcctttgnatgtggttcaaccatccaacttccaactggctaaacttttgccttcagtggtcaaagatgggaaaagaatggggntggcangganatggnaaacggnggtgnccncccaacnatggggggcaggtccccantncaccttgccctcccctngganaaaancntnnttgggggntgggtnnggcnccattnngnnnnnnnnngnnccnnggannggnnggnnnnnnnnnnnnnnnnnnnnnnnnntnnnagnnnnnnn

SEQ ID NO: 5848 - DNA, 497 bp, Homo sapiens
  misc_feature 2, 3, 4, 5, 6, 227, 241, 243, 328, 351, 371, 376, 407, 410,415, 421, 438, 460, 465, 471, 485, 494: n = A,T,C or G
gnnnnngccctaacgactactatagggcgaattggagctccccgcggtggcggccgaggtgccattgaaggggaaggaactgcgggtgtgtgtgtgtatgtgtgtgtgtatgtgtgtgcgcgcgtgcgtgcgcgtgtgtgcgcgcgctagtgtgtggacaaggaggtgggggcagctgagttagagtcccaactcttggactccatttgctattctcttcttttctncccccacacctatntngttggtggtagtgggccgtttatatttgcgttccttttcattcatttctaaatctcttaaaaattttgggttgggggtattgggngaaggcaggaaagggaaaagganagtattagctgaagagcaanaggangacatggagatgaagaaaaagattaacctgncanttaangaacanatcccccggaaaggagnttacaaaagttagtcctttatnaatangccctngtgtcgtcaattgnaggaaaaanttt

SEQ ID NO: 5849 - DNA, 850 bp, Homo sapiens
  misc_feature 1, 10, 566, 591, 600, 606, 613, 615, 698, 704, 749, 780,782, 804, 820, 823, 827, 831, 850: n = A,T,C or G
ngcctatccnctcctatagggcgaattggagctccccgcggtggcggccgaggtacatgatgccaaccgagggggatgattcgtctaaaagcgtccctttagcattacaaagagtgttctatgaattacagcatagtgataaacctgtaggaacaaaaaagttaacaaagtcatttgggtgggaaactttagatagcttcatgcaacatgatgttcaggagctttgtcgagtgttgctcgataatgtggaaaataagatgaaaggcacctgtgtagagggcaccatacccaaattattccgcggcaaaatggtgtcctatatccagtgtaaagaagtagactatcggtctgatagaagagaagattattatgatataggacaccatacccaaattattccgcggcaaaatgggtgtcctatatccagtgtaaagaagtagactatcggtctgatagaagagaagattattatgatatccagctaagtatcaaaggaaagaaaaatatatttgaatcatttgtggattatgtggcagtagaacagctcgatggggacaataaatacnaccgctggggaacatggctttacangaagcaaanaaaggngtgaaantnctaacattggccccagtgttacatctaccactggtgagaattatgtatgaccctcaacggcccaaatatcaagatcaatgatnggttgnattccagagcagtaccacttggtgaatttttgccaaaaacagaancttaaggccctgcaaaatatttcttcatgcnancccgggtcataatggggaaaantatgggggcattttgnggntatntaancccaaaggggttgggcaan

SEQ ID NO: 5850 - DNA, 832 bp, Homo sapiens
  misc_feature 486, 676, 686, 715, 740, 752, 757, 787, 797, 812: n = A,T,C or G
tagggcgaattggagctccaccgcggtggcggccgaggtgcgaggaggtgaggctggagcgcggccccctcgccttccctgttcccagcttagtgtgtgccttgcctagtttcacttgatactcttcaggaattatgtagaaaagaaaagctcacatgtaaatcgattggaatcaccaaaaggaatctaaacaattatgaggtggaatacttgtgtgactacaaggtagtaaaggatatggaatattatcttgtaaaatggaaaggatggccagattctacaaatacttgggaacctttgcaaaatctgaagtgcctgttactgcttcagcaattctctaatgacaagcataattatttatctcaggtaaagaaaggcaaagcaataactccaaaagacaataacaaaactttgaaacctgccattgctgagtacctgcccgggcggccgctctagaactagtggatcccccgggctgcaggaatncgatatcaagcttatcgataccgtccgacctcgagggggggcccggtacccagcttttgttccctttagtgagggttaaattgcgcgcttggcgtaatcatgggtcatagctgtttcctgtgtgaaattgttatccgctcacaatttccacacaacatacgagccgggagccataaaagtgtaaagcctngggtgcctantgagtgagctaacttcacattaattgcgntgcgctcactggcccgctttccagnccgggaaacctngccgngccagcttgcattaatgaaacgggccaacncgcgggggangaggcgggtttgcgntattgggcccttcttccgct

SEQ ID NO: 5851 - DNA, 426 bp, Homo sapiens
cgtaatacgactcactatagggcgaattggagctccaccgcggtggcggccgaggtactccaagacagccatccatttgtagctattctcgagcctgtttgaggattagaaagaggatctttaataatcctgaacattccttgatgggcctagaacagttttctcatgtttggattttgtttgtttttcacaaaaatggtcatttgagctgtaaggcaaaagtgcagcctcctaggctgaatggtgcaaagactggagttttttccacaaggagccctcatcgtcccaatgcaataggactgaccctggccaagctggaaaaggtagaagccttggggaaatggacagatatcatggctgcagtgctgatgtcaactgtgctgtgtggcaggagtctgggatgaatcacactacaaggacaaacat

SEQ ID NO: 5852 - DNA, 879 bp, Homo sapiens
  misc_feature 7, 242, 473, 499, 511, 522, 538, 541, 557, 558, 559, 572,573, 575, 576, 577, 578, 579, 580, 581, 586, 589, 593, 594,595, 596, 600, 601, 605, 606, 608, 610, 611, 612, 613, 614,615, 618, 619, 620, 621, 623, 625, 628, 629, 630, 631: n = A,T,C or G
  misc_feature 632, 633, 635, 641, 642, 643, 644, 645, 646, 647, 648, 649,650, 651, 660, 662, 663, 666, 667, 668, 669, 676, 677, 680,681, 684, 685, 689, 692, 693, 694, 695, 697, 698, 699, 700,701, 703, 704, 705, 706, 707, 712, 713, 714, 716, 718: n = A,T,C or G
  misc_feature 719, 720, 721, 722, 723, 724, 725, 726, 727, 728, 732, 733,734, 737, 738, 739, 744, 745, 747, 748, 750, 753, 754, 755,756, 757, 758, 759, 761, 762, 763, 764, 765, 767, 772, 773,774, 775, 776, 777, 778, 779, 780, 781, 782, 784, 785: n = A,T,C or G
  misc_feature 786, 787, 789, 790, 791, 792, 793, 794, 795, 796, 797, 799,800, 802, 803, 804, 805, 806, 807, 808, 809, 810, 811, 812,813, 814, 815, 816, 817, 818, 819, 820, 821, 822, 823, 824,825, 827, 829, 830, 831, 832, 833, 834, 835, 836, 837: n = A,T,C or G
  misc_feature 838, 839, 840, 841, 842, 843, 844, 845, 846, 847, 848, 849,850, 851, 852, 853, 854, 855, 856, 857, 858, 859, 861, 862,864, 868, 869, 870, 871, 872, 873, 874, 875, 876, 878, 879: n = A,T,C or G
agggagnccgtaatacgactactataggggcgaattggagctcaccgcggtggcggcccgaggtacaagtcctgggcacctcctctttgcctccctcctgcccctttcctgctggtgggggcagatcctgcacacacagacacagcgtctgcccccgagccattccctggagaccctgggtctacccaagtggtcgtcatctgggccattttgccttacttctctggaacatacccaccctnaattacgtgccaaacccggaccgcattctctgccctgtcctggaactggcccctggctgcctggaagaccctgggtaggtcctgagggtgggatggaaaagaaggcactgctgtggtgtgggagcagtcctggggctttctggtggctgtgaccagttgaggggctgtcctgggtggggtggcaaatgggaggacaggtcaaagcgcccttatttgtgggggctgcccctncgggttttttaatcctgtcccttggngcctttttctgnccaacaaagtncaagggaaaggccgangtnttaaaactcctgggtnnngggtggggggtannannnnnnnacctnaanaccnnnngggnnaccnnanannnnnnccnnnntngnttnnnnnnantttttnnnnnnnnnnnagggttttntnnagnnnnaaaaagnnatnnaanncccnttnnnnannnnnannnnnggggnnntntnnnnnnnnnnnaatnnnttnnnagaannanngnatnnnnnnnannnnnantgaannnnnnnnnnnannnntnnnnnnnnntnnannnnnnnnnnnnnnnnnnnnnnnngnannnnnnnnnnnnnnnnnnnnnnnnnnnnnnnannantaannnnnnnnnann

SEQ ID NO: 5853 - DNA, 474 bp, Homo sapiens
  misc_feature 2, 3, 5, 214: n = A,T,C or G
gnngngtatcactactatagggcgaattggagctccccgcggtggcggccgaggtacttactgcctcttaaccagtttttcaggatgccacattctaaaacaactcttcgaaaatattgctctgtatacgaagcttggactccttcagaactacttttgttgagctgttggacaaatatcttattcccaatgctacacaaccagaaagtaaggngttctactttgaaaatgaaaggagattattttaggtatctttctgaagtggcatctggagacaacaaacaaaccactgtgtcgaactcccagcaggcttaccaggaagcatttgaaattagtaagaaagaaatgcagcctacacacccaattcgtcttggtctggcactaaatttctcagtcttttactatgagattctaaactctcctgaaaaggcctgtagcctggcaaaaacggcatttgatgaagcaattgctgat

SEQ ID NO: 5854 - DNA, 434 bp, Homo sapiens
  misc_feature 5, 81, 92, 96, 101, 102, 115, 116, 124, 125, 132, 141, 144,146, 151, 164, 175, 182, 260, 271, 293, 302, 307, 312, 322,324, 330, 331, 336, 342, 344, 345, 350, 351, 353, 354, 355,358, 359, 361, 362, 367, 368, 371, 373, 376, 382, 383: n = A,T,C or G
  misc_feature 386, 389, 390, 391, 392, 395, 397, 398, 400, 401, 403, 404,405, 406, 407, 409, 410, 411, 412, 413, 414, 415, 417, 418,420, 421, 422, 424, 425, 426, 427, 428, 429, 430, 431, 432,433: n = A,T,C or G
gagcnccgcgtaatacgacctcactatagggcgaattggagctccaccgcggtggcggccgaggtactcaaaattctcctnaaatagcaccnatangatcnnagattgagataannctacaagnnctacatncgacagatntcntnttagnctatgccttatgnaaacttgcctncaaaaantctgaaaggagttactatgctaatgcgctgggcatgaatccaattcaaaaccaatctggtgggcccctcatggctcanaaatactctgngtagggctggctgttactgcantcacggacnctganttatntacctgcccngncggccnntctanaactantnnatccnncnnnctnnannaattnnatntnaancttatnnatnccnnnnacntnnanntnnnnncnnnnnnncnnannntnnnnnnnnnnt

SEQ ID NO: 5855 - DNA, 865 bp, Homo sapiens
  misc_feature 5, 11, 12, 13, 436, 438, 479, 487, 496, 511, 520, 575, 584,598, 608, 617, 618, 655, 660, 687, 689, 695, 698, 700, 705,710, 760, 765, 770, 782, 789, 790, 799, 805, 825, 826, 827,836: n = A,T,C or G
taggncgtcgnnnactacgactactataggggcgaattggagctccccgcggtggcggcccgcccgggcaggtaccggtcacttacgcgtcagagcagtgactttgatacgcagtcaggtttttccattaatagtcaggtctttgctgcagatggtgcctccactgagacttccgcatctgggacctcccaaggagaggcttcaactccagaggagtctcgagatgggaagaaagataaagaaggggaccgggcctctgaggaaggcaaacagaaaggcaagggcagcaaacctttaatgcctacctccactatccttcgtcttctggcagagttggtgaggtcctatgttggtattgctaccctgattgccaaactacagctacactgtgggccaagtctgaacttgatcaaaagaaggactggcagtggtgctnanctttttgttcttgaaccaccttgcttcccacattccccaanaattgcanaaagacaanggaccccccttgccnttggcccgncttgtttctttgcaaagccttggcttgcttggaagggaagttgggcaaaaaattnccccaggtngggccttaagttgnaattgaaagntaaaaagcnnccccctttgggaccgggccccttggcttttgggtttnaaaantggacctggaaccaaattgcttggcananttcaantgnanggggnccaanatttccctatttttcctaaaaaaaaggggaaaaactttgggcccgttttnaaaantaaangggattcccccngcctggnnggaaatttnaaattnaagccttttttgaaacccgnnnaaccttgangggggggggccccggtacccaaacttttt

SEQ ID NO: 5856 - DNA, 866 bp, Homo sapiens
  misc_feature 238, 241, 262, 278, 320, 323, 336, 339, 352, 360, 370, 389,404, 418, 442, 449, 456, 478, 509, 514, 518, 532, 544, 548,553, 562, 566, 572, 579, 586, 597, 598, 615, 622, 644, 648,655, 664, 665, 668, 690, 696, 697, 706, 707, 712, 716: n = A,T,C or G
  misc_feature 720, 722, 729, 732, 733, 737, 743, 745, 747, 748, 749, 755,775, 778, 781, 785, 788, 794, 800, 801, 810, 811, 816, 820,826, 827, 835, 837, 839, 850, 858, 859, 862, 864: n = A,T,C or G
ggagctccccgcggtggcggccgaggtcagcactggcccattctgcagatggggacatcgagtcacgggctggctacgaactcctcgggggcgaaggtggcggagagggatgggttccaggacgtcctggcgcccggggaaggctcggcggacggatttgcggtgcgcagccagtgccgttcgtccctcaggtgcttggcgtgatgatcggggccggagtggcggtggtggtcacggncgntctagaactagtggatccccngggctgcaggaattcnatatcaagcttatcgataccgtcgacctcgagggggggcccnggnacccagcttttgntcnctttagtgagggntaattgcncgcttggcgnaatcatggtcatagctgtntcctgtgtgaaattnttatcctctcacanttccacacaacataccagcctggnagcatanagtgtanaagtctggggtgcctaatgagngagcttaactcacattaaatgcattgcgctnactgnccgnttttcaagtcgggnaaactgtcgagncagnttgcnttaatgaantcgnccaccncgccggnggagaangcaggtttgcnntatttgggcgccttttnccctttnctccttcactgacttcaatgcncttnggacttntcggattgnngcnagccgtataaacttaactcaangctggnnataccggannttccnaaantagnanataactntgnnaatnaacctntnannnaaaggnccacctaaatccaggaaacntcnaanaatngcncttttnctgcgnnatttacaanngcttncccnctctgnnggacatancnanatattaacctnataattcnnaangncg

SEQ ID NO: 5857 - DNA, 426 bp, Homo sapiens
cgcgtaatacgactcactatagggcgaattggagctccaccgcggtggcggccgcccgggcaggtactctcttttatggaaacgatctgtggctgtttagaggcagctggatcctctttcaggcgggaatgggagggcgggcacagggaggaggagaggaagagaaaaggaagaattcatttttaatttaggtttctttttttcttcttcatttcggagctctaaggtgtatgcagttgtgaccccatgtgtggggaagtgtagcaaggacggctggtggagggggaaggagggtgcgaggtgtctgtctgatgctttaggaaatgtctactgaggaccctgggacttaagaagaagggcggggagagtgccattgcctgtttgggagacaaaaatgaacgaaaacaggtgactttggaaagcaaa

SEQ ID NO: 5858 - DNA, 891 bp, Homo sapiens
  misc_feature 616, 669, 700, 702, 705, 706, 707, 711, 719, 720, 732, 760,764, 767, 768, 780, 786, 788, 789, 794, 795, 796, 797, 798,799, 800, 805, 810, 811, 812, 813, 814, 815, 816, 819, 826,827, 828, 830, 831, 836, 846, 849, 852, 863, 869, 875: n = A,T,C or G
  misc_feature 879, 880, 881: n = A,T,C or G
gtaatacgactcactatagggcgaattggagctccaccgcggtggcggccgccttcctcccaggctctgctggggctaagtctgccttctagaaaggcttttataaattgtttaagccaaacatttaacaacatacaagagaccttacaaaaagaaggaggtaagtcctaatgctggagaattggttaatcaggtgatattgtaaaattctgcttcctccaacactccttcctccgcgaggtctttgttaatcaccagcttgccgtgtctcaggtagttcagcacaggcccaaagtaggtggggtctctgtcgattaaataggcgcctgtttcatccttgtctgagtccaggtcgggatcggcctggcataagcggtacctcggccgctctagaactagtggatcccccgggctgcaggaattcgatatcaagcttatcgataccgtcgacctcgagggggggcccggtacccagcttttgttccctttagtgagggttaattgcgcgcttggcgtaatcatggtcatagctgtttcctgtgtgaaattgttatccgctcacaattccacaccaacatacgaaccgggagcataaaagtgtaaaagccctgggggnggcctaaatgaggtgagcctaacttcacatttaaatttggcgttggcgctcanctggcccctttttccaattcggggaaaaccntntcnnngccnactttggnntaaaggaaaatngcccacccccccccgggggagggggggntttnggnnttttggggggcntttttncnnttttnnnnnnnaaaanaaaannnnnnntgncctgggnnntnncgggntggggggganggnggnttaattttttnttaaangggggnttannngggttttcct

SEQ ID NO: 5859 - DNA, 612 bp, Homo sapiens
  misc_feature 473, 562: n = A,T,C or G
gtaatacgactcactatagggcgaattggagctccaccgcggtggcggccgcctgagcgatactaaaatgtctgatgatgctggtgacaccttagccactggagacaaagcagaagtactgagatgcctaatagtgattctttacctgaggatgcagaagtgcattgtgattcagctgcagtttcacatgagccaacaccagctgaccccagaggggaggggcatgaaaatgcagctgtgcagggtgcaggggctgccgccattgggccccctgtgcagcctcaggatgccaacgccctggagccccctctcaatggagacgtgactgaggatacacttgctgaatgtattgattccgtcagccttgaggcagaacccagatccgaaatacccctgcaagaacagaattatctggctgtggattcccctccaagtggaggaggatgggcaggctggggatcctggggcaaatntctgctgtcgtcagcatctgccacagtaggtcatggattgacggcagtcaaggaaaaagcaggagccactctacgggattcatggtgtnaaattctggatcttctggaaggagcccaaccaaatacctgaaaacggagt

SEQ ID NO: 5860 - DNA, 860 bp, Homo sapiens
  misc_feature 2, 3, 4, 5, 6, 8, 95, 113, 119, 125, 131, 147, 215, 222,224, 238, 248, 249, 250, 267, 270, 393, 488, 495, 497, 518,525, 541, 574, 592, 593, 595, 615, 631, 645, 647, 658, 661,669, 681, 695, 703, 704, 708, 709, 710, 714, 732, 738: n = A,T,C or G
  misc_feature 741, 743, 756, 757, 765, 766, 771, 774, 785, 792, 793, 814,827, 829, 837, 847, 848, 854, 856: n = A,T,C or G
gnnnnncncgcgtaatacgactcactatagggcgaattggagctccaccgcggtggcggccgaggtacaacttcattgaactgccctaccacggngaaagcattaacatgctnattgcnctgccnactganagctccactccgctgnctgccatcatcccacacatcagcaccaagaccatacgacagctggatgagcatcatggtgcccaaganggtgcangngatcctgcccaagntcacagctgnnncacaaacagatttgaanganccgctgaaagttcttggcattactgacatgtttgattcatcaaaggcaaattttgcaaaaataacaaggtcagaaaacctccatgtttctcatatcttgcaaaaagcaaaaattgaagtcagngaagatggaaccaaaagcttcagtgagcaacaactgcaattcttcattgcaagatcatcgtctccctggtttatagtatacagaccttttctgtntttcatncnacataatcctacaggtgctgngttattnatggggcagataaacnaaccctgaagagtatacaaaaggaaaccatgcnaagcaaccactactttgnncnaagaaagactccttttcctnaatctttcataagttnttgttaaaaatttntngaacctcggcncgntctaaaanttagtgggaatncccccggggctgcntggaattnnattnnnaagntttttccatacccggccnaacctnggngngggggggcccggnnacccccannttttnggntccctttaggnggggggnnaaattttttccctttgggggnaaatttaaggggncntagttttnaacccggggnnaaaaantntttt

SEQ ID NO: 5861 - DNA, 1098 bp, Homo sapiens
  misc_feature 2, 5, 6, 7, 9, 10, 11, 12, 13, 15, 16, 17, 18, 20, 21, 22,23, 24, 27, 28, 29, 30, 31, 35, 37, 40, 46, 47, 48, 49,51, 55, 61, 62, 64, 66, 68, 69, 70, 71, 73, 75, 76, 77,78, 79, 81, 86, 88, 89, 90, 92, 455, 462, 475, 523, 525,544: n = A,T,C or G
  misc_feature 566, 569, 570, 583, 584, 601, 613, 616, 634, 640, 661, 662,673, 675, 680, 685, 707, 716, 756, 769, 795, 799, 804, 809,829, 830, 831, 838, 844, 848, 850, 852, 860, 867, 889, 894,911, 926, 936, 939, 940, 943, 951, 954, 974, 986, 1004: n = A,T,C or G
  misc_feature 1006, 1013, 1014, 1015, 1019, 1022, 1038, 1040, 1046, 1048,1049, 1050, 1051, 1069, 1075, 1076, 1092, 1093, 1094: n = A,T,C or G
anttnnntnnnnntnnnntnnnnntannnnntgtntnttnaagggnnnngntatnggtatnntncntnnnnantnnnnngnagggngnnngncgtaaacgatcactatagggcgaattggagctccaccgcggtggcggccaggaaccgtaaaaaggccgcgttgctggcgtttttccataggctccgcccccctgacgagcatcacaaaaatcgacgctcaagtcagaggtggcgaaacccgacaggactataaagataccaggcgtttccccctggaagctccctcgtgcgctctcctgttccgaccctgccgcttaccggatacctgtccgcctttctcccttcgggaagcgtggcagctttctcatagctcacgctgtaggtatctcagttcggtgtaggtcgttcggctccaagctgggctgtgtgcaccgaaccccccgttcaagcccngaccgcntgcgccttatccnggtaactatcgtcttggagtccaaccccggtaaggacaccgacttatngncactggcagcagccactgngtaaacaaggattaagccagantcnnaggttattgttanngccggtgccttaccagnagttttcctttnganaggtgggtggggcccttnacttancgggctttaaccaccttaggnngggaaacaggntnttttnggggnattctggcggccttctggcttngaaagcccnagtttaaccctttcgggaaaaaaaaggaggtttggggtangctttctttggantcccgggccaaaaccaaaaaccaacncgcnttggnttagnccgggtggggtttttttttnnntttggcnaagccnagcnantnatttactnccccaanaaaaaaaaaaagggattcctcnaaggnaaggaatccccttttgnatgcttttttcttanccgggggttnttnnccncccttcanggngggaaaccgcaaaaaacctnacccttttaaangggggaattttttgggcnantgggagnnnattnttnaagaaaaggggattcntntaaccntnnnnattcctttttaaaaattnaaaaanntgaaagtttttaaaannncact

SEQ ID NO: 5862 - DNA, 1204 bp, Homo sapiens
  misc_feature 10, 11, 15, 18, 23, 25, 26, 35, 36, 39, 40, 43, 49, 50, 52,53, 54, 55, 56, 57, 59, 62, 68, 73, 74, 75, 82, 84, 88,89, 91, 93, 94, 96, 98, 103, 104, 141, 158, 209, 227, 257,277, 319, 338, 357, 365, 369, 388, 392, 406, 425, 436, 447: n = A,T,C or G
  misc_feature 455, 515, 537, 539, 544, 562, 570, 576, 582, 585, 587, 596,624, 637, 639, 643, 649, 651, 653, 664, 670, 689, 704, 705,715, 716, 722, 727, 737, 743, 748, 754, 776, 779, 795, 801,803, 818, 826, 827, 836, 842, 845, 853, 854, 860, 868: n = A,T,C or G
  misc_feature 869, 870, 874, 878, 887, 888, 891, 897, 901, 902, 907, 915,925, 926, 934, 935, 936, 940, 941, 943, 948, 949, 958, 960,963, 972, 975, 976, 977, 982, 983, 985, 987, 996, 998, 1001,1002, 1006, 1011, 1015, 1018, 1022, 1023, 1026, 1027: n = A,T,C or G
  misc_feature 1035, 1036, 1038, 1041, 1046, 1048, 1050, 1055, 1056, 1057,1059, 1065, 1071, 1084, 1088, 1091, 1092, 1101, 1110, 1112,1117, 1118, 1119, 1120, 1124, 1129, 1141, 1168, 1171, 1172,1178, 1203: n = A,T,C or G
gttcattgannaccntgnggtantnncctcttttnnaanntgncaattnncnnnnnntnatngatatntttgnnnctcattntncttnnangnncnanccgtnntacgactcactatagggcgaattggagctccacacgnggtggcggccgcccggncaggtacatctaaaggcatgaagcactcaattgggcaattaacattagtgnttgttctctgatggtatntctgagaatactggttgtaggactggccantagtgccttcgggactgggntcacccccaggtctgcggcagttgtcacagcggccagccccnctggcctccaaagcatgtncaggagcaaatggcaccanagatattncttntgccactgttctcctacgntggnatggtgtttcccancattccattaacacgttgncctcattgagnggtcacacttngaaatatnctcacttttccgggttcccaaggacattgtgcaagctttcattcattcttgggcccaatnttttcttcccttggaacagggncncccanttttgttcttcccaaatnctttgggnaaggtntcaacnacncnattttggtnctaatggggccaccccaattccttaganatggaaattccancnattncttggnananaatggaacccncctttntccaaaaaaggcccttaanggccaaccttgggcnnccatatcaannattttnaaaangcccttggantttcangaacnatttgnggtgtgtccccaacctttattnctntcccaaacttggacantaaaangnggggaaaaaccttgngtggttannggggggtcnaaaaanccnccgaagtnncaatanccgccaannntttngggnatccaaaannctnttttcngggnngggancaaagaanattggccccnnccggggannnacgnnanacttnnttctccctnanaantttttaaanccnnncccgnncnangtttccttnanaannaaanttttnacanatnaaannttnnccccaaannantangcccnancnttttnnngngaaaanaaattntttggggccttgngaanttnnttttttttnaaaaagggnanttttnnnnaatncctcnttttaaaaaacnttcttttttttttttttccccaccccnggnntttccnaacccaactttgggttttttttttnt

SEQ ID NO: 5863 - DNA, 870 bp, Homo sapiens
  misc_feature 73, 78, 81, 113, 175, 194, 209, 265, 266, 269, 275, 276,281, 285, 286, 287, 318, 327, 364, 373, 374, 413, 416, 425,426, 428, 445, 452, 462, 470, 479, 482, 485, 489, 491, 504,507, 511, 517, 518, 522, 528, 534, 543, 545, 552, 562: n = A,T,C or G
  misc_feature 563, 573, 575, 577, 582, 609, 615, 616, 627, 648, 651, 665,669, 679, 681, 699, 728, 770, 775, 790, 791, 795, 800, 803,808, 847, 855, 856, 861, 869, 870: n = A,T,C or G
ctcactatagggcgaattggagctccccgcggtggcggccgaggtactgaggaatgaatagaaaggcttccanatgtntanaagattctttaaactactgaactgttacctangttaacaaccctgttgagtatttgctgtttgtccagttcaggaatttttgttttggtttgtntatatgtgcggcttttcanaagaaatttaatcantgtgacagaaaaaaaaatgttttgtggtaacttttactttttatgaaaaaaaaatnnttngccttnnaaatncttnnnccccatccccctccaaagtcttgatagcaancgttatttngggggtagaaacggcgaaatctctagcctctttgtgnttttggtgnngttgatgacggcgatttatataatgcctgcatttgactnagntcaaagtgnnanaactcctgtcttgttanacaaggntgctgcctgngcccttgngcctgtcantantgntctntnccttcccccgctntcnaacngggggnncccncgcccngctttnaggttcccntntaaaggngggattaatnncccccccttngncngaaangatggccccttagcccccatcccttgngttgannatttgttatancgggttcacaaattttccccnccngccataacgaagcngggnagccataaanangctaaaggcctggggggngcccttaagtgagttggagcttaactcancatttaaatttgcccttggcgcctccacttgccccgcttttnccagnccggggaaacctggnncggngcccngcntgcantttaatgaaatcggcccacccccccgggggaggagggcnggtttcgnnaattngggccccnn

SEQ ID NO: 5864 - DNA, 634 bp, Homo sapiens
  misc_feature 276, 401, 417, 420, 434, 477, 484, 497, 526, 575, 597, 627,634: n = A,T,C or G
gactactatagggcgaattggagctccaccgcggtggcggccgaggtaccgcaaggcccgggaggaggcgcagcgctcagcccaggagaggaaggagcggctgcggcgcgcgctggaagaaaaccgcctgattcccactgagttacgccgagaggctctggccttacaggggtccctggagtttgatgatgctggaggtgaaggtgtggccagccacgtggatgatgaataccgatgggcgagttcgagggggaggctgaggaggaggtggcctanagccttcagtcactggggaaagcagggaagcagtgtgaactctttattcactcccagcctgtcctgtggcctgtcccactgtgtgcacttgctgttttccctgtccacatccatgcccgtacctncccgggcggcccgctntanaactagtggatccnccgggctgcaggaattcgatattcaagcttatcgataccgtcnaccttcnaagggggggcccngggtaccccagctttttgttccctttaantgaaggggtttaatttgccgccgctttggccttaaattcaatggtccantaagcttggttttcctgtgttnaaaaattgtttttccccgcttcacaaattncacaacn

SEQ ID NO: 5865 - DNA, 1283 bp, Homo sapiens
  misc_feature 1, 10, 11, 13, 14, 15, 16, 17, 19, 23, 28, 31, 34, 39, 45,49, 55, 58, 67, 68, 73, 77, 80, 81, 84, 85, 86, 92, 93,98, 104, 193, 194, 200, 201, 202, 203, 204, 205, 208, 217,218, 262, 311, 321, 405, 410, 421, 429, 446, 448, 449, 452: n = A,T,C or G
  misc_feature 459, 475, 488, 495, 496, 497, 499, 517, 522, 533, 554, 555,558, 562, 566, 567, 568, 569, 570, 577, 578, 583, 586, 596,598, 605, 610, 613, 617, 622, 625, 636, 652, 658, 663, 667,670, 678, 683, 685, 687, 689, 700, 704, 705, 713, 715: n = A,T,C or G
  misc_feature 716, 718, 721, 742, 751, 755, 757, 765, 766, 772, 781, 786,791, 793, 795, 799, 812, 815, 816, 818, 820, 825, 830, 838,847, 850, 854, 855, 857, 859, 860, 866, 867, 869, 881, 884,890, 894, 896, 899, 902, 903, 907, 915, 925, 930, 932: n = A,T,C or G
  misc_feature 935, 939, 940, 942, 943, 954, 956, 959, 960, 965, 970, 972,974, 985, 986, 987, 997, 1000, 1004, 1006, 1018, 1021, 1024,1027, 1029, 1030, 1032, 1033, 1035, 1037, 1038, 1042, 1047,1049, 1054, 1063, 1064, 1065, 1073, 1075, 1082, 1084: n = A,T,C or G
  misc_feature 1091, 1094, 1097, 1098, 1109, 1117, 1118, 1119, 1120, 1132,1134, 1136, 1137, 1138, 1152, 1154, 1156, 1157, 1175, 1178,1183, 1187, 1200, 1201, 1207, 1222, 1223, 1224, 1231, 1232,1233, 1237, 1238, 1245, 1246, 1250, 1251, 1252, 1262: n = A,T,C or G
  misc_feature 1266, 1271, 1273, 1279: n = A,T,C or G
ncccccctannannnnntntctntcacntanccncttcncccccncctntctacnctnaaacttccnnttatnaatntcnnttnnnccagcnngatgngttcancctccgactcctatagggcgaattggagctccaccgcggtggcggccgaggtactgaggaatgaataggaaggcttccagatgtctaannggatgnnnnnnaanctactgaannagaaacctatgttaacaaccctggcggagtatttgctgtttgtncagttcaggaatttttgtttttgttttgtcttatatgtgcgggattttnagaagaaatntaatcagtgtggacaagaaaaaaaatgctttatggtagcttttacttctttatgaaaaaaaaaattattttgcccttttaaatnccttntttcccccccnttcccccncttccaaaagtttcttngnntanccacagnccgctttattttttgngggtggataaagnaaaaccnnncnggaacaatccttccttanccccntcttctttgcnggtctttttgacatggtttgnnatngcantggnnnnntctggannactantanttaacatccncnttgcctntttcnacnttancaaanttnctaaattcaanaaataaaataccttancctcgntcatntggnctnatcaaccnacagngntntngccttgctatngttnncaacatantnntngcnccttgttcaactatacttgtntgcctctcngtananccctaccnntccccncccccttangtaancttancnangtgncactccccaccantanntncnttgtnaaacngtaaaacnacccaattnttnccannancnnatattnncnaataaccccttnctntaaccntccnanggnggnngggnccccacgnttaacccacnatccntnttntgtnntnncccttttacgnangcnngggcnaatantntncctcccctttnnncccacaaatnaanaggncnccatacaagtcncantcntgntnntnnanannatangtatnanacccntcttttacnnnttgccccnanaataccnanaccttanacnccnngtatgccatantaatactnnnnactaccacctcnancnnngccccacaattacncnannatacctcatactctaccnccnttatnaatngtttatgtcactnncaacangttcctcgctttacnnnacactgnnngcanncccctcnnccgnnnccacccactnacantctantnctatancccg

SEQ ID NO: 5866 - DNA, 892 bp, Homo sapiens
  misc_feature 238, 241, 250, 274, 421, 456, 465, 525, 544, 593, 595, 596,603, 613, 615, 622, 626, 632, 633, 646, 649, 650, 651, 662,664, 665, 668, 676, 677, 684, 688, 689, 690, 698, 706, 707,710, 721, 723, 727, 731, 735, 738, 740, 745, 746, 756: n = A,T,C or G
  misc_feature 757, 759, 760, 761, 764, 765, 769, 770, 771, 774, 778, 782,785, 793, 795, 797, 798, 801, 804, 806, 822, 828, 831, 832,837, 841, 844, 856, 858, 860, 862, 864, 866, 867: n = A,T,C or G
gcgtaatacgactcactatagggcgaattggagctccaccgcggtggcggccgaggtactgtgggtcgaagtaatggatacggacgtaaccatcttcgccgccgctgctgtagctcttgccatcaggatggaaggcaacactgttgataggtccaaagtgacccttgactcttccaaactcttcttcaaaggccaaatggaagaacctggcctcaaacttgccaatcctggtggaggntgnggttacatncatggcttcctgaccaccgcccangaccacatggtcatagttgggggagagggcagctgagttgacaggacgttctgtccggaaagtcttctgatgttcaaagagttgtggagtcaaaaagcttggctgtgttgtccttggacgcggtcacaaacatggtcatgtccctgnataactggatgtcgttgatctgccgggagtgctanttaacattnaccaacacctatccagacttggcactatactggttgaagcttctccactcttatggccanctaatgatgcactcccccnggggttcccaaaacagaaactggtgattttagaagccatttgcaagggnannttttctntaagggattnantgtgggncaantttggnntcgggatcccccncannnttaaaaaaaanannttngaaaaagnncttgggnaacnnnatttcttnttattttnnggnggggaaaaacntngatntttnttcnccncnaagtnngaaaacaacnngnnnttnngcgnnnacnttanttgnttntatggaanangnngcnacncntttttttttttttttntattgntanncagcnaaanaanatgttttttttnantntntntnnccccccccccccccccccccccccc

SEQ ID NO: 5867 - DNA, 886 bp, Homo sapiens
  misc_feature 2, 3, 4, 5, 614, 646, 654, 663, 674, 713, 715, 722, 723,727, 737, 750, 762, 764, 765, 768, 770, 771, 779, 780, 783,785, 797, 799, 804, 817, 838, 844, 847, 854, 870, 871, 875,881, 882, 883: n = A,T,C or G
gnnnngacgcgcgtaatacgactcactatagggcgaattggagctccaccgcggtggcggccgaggtactcagatagttacatccctatataaaaagtatgtttacatttaaaaaattagtagataacttcctttctttcaagtgcacaatttcattttgacttgagtcaacttttgttttggaacaaattaagtaagggagctgcccaatcctgtctgatatttcttgaggctgccctctatcattttatctttcccatgggcagagatgttgtaagtgggattcttaatatcaccattcttgggactggtatacataaggcagccgtgaaactggaaagtcattttgatgactgatgtgatacatccagaggtaaaatgcatttaaacatattaaagtatttgccaaagatacaattttcttgctgacataaaaatcacacaaacaagtcccccccaaaccacaactgtctctcaaatagcttaaaaaaattgaaaaacattttaggatttttcaagttttctagattttaaaaagatgttcagctattagaggaatgttaaaaattttatattatctagaacacaggaacatcatcctggggttatttcanggaatcagtcacacatggtgtggtgtgctggnaaatagtntaaattaancaaaggccccntagttttaactactttggggggggtggggggaacaaaangnaaaaaanntttnttttttttgnaaaaaacaaaggncttggggcttgngnnaanannagaaaccnntgngnattttttttttngnaaatntgggaaaaacacnggggcccttaaaaagaacatntggggngantttttgnttttccccaaaaattnnaaanaaaaannnaag

SEQ ID NO: 5868 - DNA, 486 bp, Homo sapiens
  misc_feature 2, 202, 222, 229, 231, 242, 322, 440, 442, 463, 468, 486: n = A,T,C or G
tncttagggcgaattggagctccccgcggtggcggcgcccacgcccagccctgtgctggccacggttcgagcggccgcccgggcaggtacagtctgctgaaccttgggcatcctagtcatgccacccacaagaatcacttctcctatgtcactcttgctgacttctgcatcttgcatagctttttggcatggagcgatagtnccttcttgattaggatcagnggacaantnccttcaaattngagcacggggtcaaactttcatattcaaatgcttgggtccagaagaatccattgtaagatagggcaaattgatgtcagtntgcacagatgaggagagttcacatttagccttttcagcagcttcccgtacctcggccgctctagaactagtggatcccccgggctgcaggaattcgatatcaagcttatcgataccgncnacctcgagggggggcccggtncccancttttgttcccttttagn

SEQ ID NO: 5869 - DNA, 625 bp, Homo sapiens
  misc_feature 3, 4, 5, 6, 7, 8, 10, 12, 14, 15, 17, 26, 28, 29: n = A,T,C or G
ttnnnnnncncntnntngacttactntnnggctgattggagctccaccgcggtggcggccgaggtacagtagcctgaacaattttcaggggggcaggtgctcatcgtataccattccatacactggccaaaagggaaggaggccacataggcattggagtccacacactgcttcatgttgctgcaccacatacactcagagctgccgctggtgcaatctccacatgctgtcctcaaggcacatggtgtccggcactgcttagcactgtggtttgcaggcctttcacagacactaccattgagtgggttgatgcaggttgcagccttcagtccccgagtacccttgaagacaaagttataatcttcctcagttccattccccatcttggctccgcatggagggtgcaggtgtcttcggggacagaggcgacaaatctgtgtgttggctcaatgccctcaaccctcagctctcaaaagatctggtcctgcccctcctctcattgggggtaaggggacttctgcagccagagggattggggacctcggccgctctagaactagtggatcccccgggctgcaggaattcgatatcaagcttatcgataccgtcgacctcgagggggggc

SEQ ID NO: 5870 - DNA, 623 bp, Homo sapiens
  misc_feature 4, 9, 18, 214, 268, 296, 313, 327, 366, 367, 368, 370, 373,376, 381, 382, 383, 389, 395, 396, 399, 416, 429, 433, 439,446, 449, 454, 457, 459, 464, 466, 467, 472, 476, 478, 483,485, 486, 488, 493, 494, 498, 499, 502, 504, 505, 506: n = A,T,C or G
  misc_feature 509, 513, 516, 519, 520, 522, 525, 526, 527, 535, 542, 550,551, 552, 553, 555, 560, 562, 563, 564, 565, 567, 569, 572,578, 579, 580, 583, 585, 592, 593, 595, 598, 605, 606, 607,608, 610, 611, 612, 615, 616, 617, 618, 619, 620, 621: n = A,T,C or G
tcgncttantatagggcnaattggagctccaccgcggtggcggccgcccgggcaggtacttcccaggaactggggacctacgggatatcggggctggcaaaggcaagctggacgtccagttctcaggactcaccaagggggatgcagtgcgagatgtggacatcatcgaccaccatgacaacacctacacagtcaagtaccttggccgctctanaactagtggatcccccgggctgcaggaattcgatatcaagcttatcgataccgncgacctcgagggggggcccggtacccancttttgttccctttagngagggttaattgcncgcttggcgtaatcatggtcatagctgtttcctgggggnnngngantantcatnnnacgggnggggannacntggttgttggtgagatnttttgaagtcctnatcnatatanggggaantcnaatgntcngnccctntnnaactntagnantcccngnncncccgnnttcnngantnnnctnttanctnatnnanccnnngggggggncgggggncccggttnnnncnttttntnnnngntnaanagggtnnnttngngccttgnngnaantaatggnnnntnnntgnnnnnnnga

SEQ ID NO: 5871 - DNA, 407 bp, Homo sapiens
  misc_feature 5: n = A,T,C or G
gagcnccgcgtaatacgactcactatagggccgaattggagctccaccgcggtggcggccgaggtacaaactgcatgcaattactacctgctcaatctacacacttaatggaagtttccaagaatttcattgaatttcattgactgggttttcttcctccttaaccaagttgagaacactgtctggtagccccctgaaggtataacctctccttctcctccccttaactgactgacttaaacttgatccactgattggcaccacgaacttcaaaaggtgggtcgctggagtagatgtggtagcccagctcttccaaaggtggctcaggatcggccgctctagaactagtggatcccccgggctgcaggaattcgatatcaagcttatcgataccgtcgacctcgagg

SEQ ID NO: 5872 - DNA, 511 bp, Homo sapiens
  misc_feature 112, 201, 209, 239, 253, 308, 311, 412, 462, 479: n = A,T,C or G
gcgtaatacgactcactatagggcgaattggagctccaccgcggtggcggccgaggtacagtccagtccttgggagatcgacctgggactccattgagaaattcttgaaagngccagctttgggaagaaacagccttgaggggaagggtgggagggccccggcttacgccccttaacaagaatgggaagccaagcttcaancgggggantcccctggcttggcaaccctttggaggtcnagaagcttgggcancaagaaccccggggccaaggaagggggaacaaggccggcccaggccccaggaagntantggagggccccctggcttggaaacaatccaaagggtcaagcttgggaaggcttggagaatcggccaccctaaccggccgcctgcttgggaaagaatgggcnagggacttttaaatctttgggtggatgccctttgggacagcagcaaactnccattgccaaacccatnccaaaaagaaccacccaccccgcccggatagt

SEQ ID NO: 5873 - DNA, 753 bp, Homo sapiens
  misc_feature 3, 5, 7, 9, 13, 16, 19, 24, 25, 29, 34, 35, 36, 41, 43, 53,58, 62, 63, 67, 72, 98, 100, 102, 105, 109, 111, 115, 116,126, 304, 308, 312, 359, 364, 376, 382, 433, 445, 452, 468,477, 500, 510, 517, 535, 536, 542, 547, 561, 586, 589: n = A,T,C or G
  misc_feature 592, 596, 608, 611, 612, 614, 626, 629, 634, 657, 662, 668,672, 679, 688, 694, 696, 722: n = A,T,C or G
tgnantntntttntcnttntatanntttntattnnntattnanttataatttnttttnattnnattngtatntatatatttttatttatatatatttntnangtnacgntncttnnactctttcanctactcactatagggcgaattggagctccaccgcggtggcggccgaggtacaaagtgtatgcacaacggtggcattctaccagccacacaaagcatgctcaaacagatgtcaccagttcagtcactccattggcatggcaacaggcaggtttacgggatgtttcccaaatagtggttnttancagntccagcacccacttgtggaattttgtgaatttttgaaaaaaaaaaanaaagntgtaattttatnggaatncaggggatttcaaaaaagtaaattcattttgtatcgcaattttacccccancacaagaggggnaaaaacntggtatgccgacttgnaaaaccttnggcttattaggattagcctttgnattgttcccnaaattanttttctaaaaccatattnnatggcnccaancttcttctcaattnttttttcaaagtttaaaaaattccncangcntttntcaatttcccanctnngnaagtaaaaaacnaancaacnaaatttttttttccttaagaccnccttncaaaangaanaccaaancccaaggcnttttgntntaaccattttttttccccccttaatncccttatttgggccaaggggaaaattggccg

SEQ ID NO: 5874 - DNA, 513 bp, Homo sapiens
  misc_feature 347, 365, 376, 395, 401, 402, 425, 427, 430, 435, 436, 448,454, 459, 463, 465, 469, 497, 507, 513: n = A,T,C or G
tactatagggcgaattggagctccaccgcggtggcggccgaggtacacaccgcccgtcgctactaccgattggatggtttagtgaggccctcggatcggccccgccggggtcggcccacggccctggcggagcgctgagaagacggtcgaacttgactatctagaggaagtaaaaagacctgcccgggcggccgctctagaactagtggatcccccgggctgcaggaattcgatatcaagcttatcgataccgtcgacctcgagggggggcccggtacccagcttttgttccctttagtgagggttaattgcgcgcttggcgtaaatcattggtcataagctgtttncttgtgtgaaatttgttnatccccgcttnacaaattttcaccacaaanaatacnnaggcccggggaggcattaaaagntngtnaaaanncctggggggttngccctnaattngagntngaancctaaacttaaccattttaaatttggcntttggccggnttcacn

SEQ ID NO: 5875 - DNA, 787 bp, Homo sapiens
  misc_feature 8, 13, 14, 15, 17, 21, 22, 27, 32, 44, 48, 50, 51, 56, 59,63, 67, 69, 75, 76, 83, 87, 93, 97, 98, 99, 100, 113, 295,305, 315, 329, 339, 352, 353, 375, 376, 385, 438, 461, 465,475, 492, 497, 520, 521, 556, 560, 561, 571, 575, 586: n = A,T,C or G
  misc_feature 594, 610, 612, 619, 638, 642, 654, 658, 663, 691, 694, 699,703, 709, 716, 729, 737, 746, 747, 748, 762, 777, 781, 787: n = A,T,C or G
cttctatnttttnnntntgtnnttatnttctnagtttattattnattntnntattntantttnattnantctatnnttatatnaagntatgtntatnnnnattgtgttctctnaactctcactatagggcgaattggagctccaccgcggtggcggccgaggtaccttttaattgcatgggtagttttaaataaatggagaaagcacctttcagaagctacactagcaggaaaaaattccatcaagcatttacatagtaaatttctataatttcacaaaagattcttgatcttancttgaaagtnttaccttganggggaaaaagagcnccctctcagnctaggttgttccnngtttgctttacaggaaagtcannactaaaagngacctaaaaactgggagggcaaaagcccaagggatggcccaaaaaaaagtggngggaaagaaggaaaaattgaatnaaangaaaccccantttccaataaaaatttncccantgttccttaccttttacaaatgnnaacaattttttggtccttaaattggaccccctttntacnnttaaaattanaagnttaattatttntaaggggnggaaaaaaaaccttancnccaaccnctcctttttttaaaagaanttanaaaaaaggtttncccnttacnggggccccggcttctttaagtaaaaccntanggttngggnaattcnccccccngtggggcctttgncaatgggnaaatttttnnnaattatttcaaaangccttttattccganttancccggn

SEQ ID NO: 5876 - DNA, 436 bp, Homo sapiens
actactatagggcgaattggagctccccgcggtggcggccgaggtactttgcctacggcagcaacctgctgacagagaggatccacctccgaaacccctcggcggcgttcttctgtgtggcccgcctgcaggattttaagcttgactttggcaattcccaaggcaaaacaagtcaaacttggcatggagggatagccaccatttttcagagtcctggcgatgaagtgtggggagtagtatggaaaatgaacaaaagcaatttaaattctctggatgagcaagaaggggttaaaagtggaatgtatgttgtaatagaagttaaagttgcaactcaagaaggaaaagaaataacctgtcgaagttatctgatgacaaattacgaaagtgctcccccatccccacagtataaaaagattatttgcatgggtgcaaaaga

SEQ ID NO: 5877 - DNA, 419 bp, Homo sapiens
  misc_feature 397, 403: n = A,T,C or G
ggcgaattggagctccccgcggtggcggccgaggtacacagcctgagtaaccaaagataacactaatataatgtatgggaaggcgtaatataaaaggcctccaccaactgcctgaagcacggttaaaattgggaagaagtaaagtgcagcataaatacttttaaatcgatcagatttccctaacccacatgcaatcttcttcaccagaagaggtcggagcagcatcattaataccaagcagaatgcgtaatagataaatacaatggtatatagtgggtagacggcttcatgagtacctcggccgctctagaactagtggatcccccgggctgcaggaatttcgatatcaaagcttatcgataccggtcgacctctaggggggggcccggtacccaancttttngttccctttagtgagg

SEQ ID NO: 5878 - DNA, 427 bp, Homo sapiens
  misc_feature 104, 128, 132, 145, 158, 167, 173, 177, 207, 210, 250, 254,296, 308, 324, 389, 394, 398, 407: n = A,T,C or G
cggagctccaccgcggtggcggccgaggtacagaggccccagttactactggtgtaaattttgtagtttcagctgtgagtcatctagctcacttaaactgctanaacattatggcaagcagcacggancagngcagtcaggcggncttaatccagagntaaatgatnagcttnccangggctctgtcattaatcaagaatgatctanccnaaagttcagaaggagagacaatgaccaagacagacaaganctcnagtggggctaaaaagaaggacttctccagcaagggagcccgnggataatatggnaacgagctataattgncagccctgtgacttccgatattccaaaagccatggccctgatgtaattgtagtggggccacttcnccgtnattncaacagctngcattacattcacaatgtgt

SEQ ID NO: 5879 - DNA, 449 bp, Homo sapiens
  misc_feature 2, 3, 4, 5, 8, 14: n = A,T,C or G
gnnnnggnccctancactacttagggcgaattggagctccccgcggtggcggccgaggtacgtgtggcttggtcacttcgtggctaaggtaagaacgtgcttgtggaagacaagtctgtggcttggtgagtctgtgtggccagcagcctctgatctgtgcagggtattaaacaaataccaaggggaacagttaacttcaatacaaggtcaaaatcagcaacaagttctacaatccagtgctgatatcagatacaagcttcaaggacaatttcttttcgaaggcttattccagtttcgtgaggctagcatgaggtgtgtgcatttgccaggggcaaatttctattctcaattaacccatgcagcaaatgctacgcatctgctgagtccgtttagaagcatttgcggtggacgatggaggggcccgactcgtcgtacctcggccgctctaa

SEQ ID NO: 5880 - DNA, 550 bp, Homo sapiens
  misc_feature 2, 4, 12, 170, 184, 273, 276, 282, 294, 297, 307, 317, 321,329, 332, 333, 335, 347, 351, 352, 354, 371, 373, 378, 380,382, 391, 402, 405, 406, 414, 416, 418, 420, 423, 425, 433,434, 435, 438, 442, 449, 455, 458, 463, 469, 472, 480: n = A,T,C or G
  misc_feature 483, 484, 496, 497, 498, 500, 505, 507, 509, 511, 516, 519,523, 525, 526, 528, 530, 534, 540, 544, 545, 548, 549, 550: n = A,T,C or G
gnanaggtcccnaaactctacttagggcgaattggagctccccgcggtggcggccgaggacttaaaccacttgataacgccttcagtaaaagcagcaccaattgctaggccatcgctgaaattgtgcaggccatcacccattatcaccatccaggccaaagtggctgacnccggcatctttcangctcctcccctatagtagccgctggctgtgactgtgaggatggtggttttggtggttggtgatgatggagaatatagatggtagtcatnatntatggnaaaatgagattngtnttactggtcnagatgtatcnctgnaaagtgtncanntngcaatttattgntatnncnccccctctttgggtacntnttgcncntnattttaagnaaacttaattnggnntattcccnancntnacncntgggaaannnaanttgncgccttnttaaangcnatttntttatntantatcccgnccnnttaatctttaannngngtgtngnantntcacntcngacntnntngncatngttttntttnnttnnn

SEQ ID NO: 5881 - DNA, 458 bp, Homo sapiens
  misc_feature 2, 3, 4, 5, 6, 9, 14: n = A,T,C or G
gnnnnngcncccgnaacgactactatagggcgaattggagctccccgcggtggcggccgaggtacatacctctctagtatgttctgtgactctgctcattacaatcctgtgctctacattgatccttgtagcagttttcaaatatggccatttttccctataagttttatgtagttaaatgcttcctagaaacctaaataagatctattaatttctgacgagaggtgttcttctagaattaattacttttatcttttgtcttcatttgtggccaaaattatgtttactagaggaaatttgggatcattctcagctaattccaaaatgtagtgctctattgcatggatccttggtaatcctcaagcatcagatgccataaggggaaacttaattctgctaaattaatgtttattttgtgagaagtgactttatcttcatttggggtagaaaaattattt

SEQ ID NO: 5882 - DNA, 475 bp, Homo sapiens
  misc_feature 8, 9, 198, 209, 217, 220, 227, 239, 255, 267, 282, 302, 335,384, 407, 409, 415, 416, 419, 441, 474: n = A,T,C or G
gtttaggnnccctatcatacttagggcgaattggagctccccgcggtggcggccgaggtactcacatcacaatgtcattttgataggagcgttttgttatttttacaaggcagaatggggtgtaacagttgaattaaacttagcaatcacgtgcaaaaaaaaaaaaaaaaaaaaaaaaaaaaaaaaaaaaaaaaaaangcttgtacctnggccgctntanaactagnggatcccccggnctgcaggaattcgatntcaagcttatcnataccgtcgacctcnagggggggcccggtacccancttttgttccctttagtgagggttaattgcgcncttggcgtaatcatggtcatagctgtttcctgtgtgaaattgttatccnctcacaattccacacaacatacnanccgggnngcntaaaaagtgtaaagcctggggngcctaatgagtgagctaactcacatttaattgng

SEQ ID NO: 5883 - DNA, 524 bp, Homo sapiens
  misc_feature 249, 254, 257, 259, 274, 284, 288, 290, 294, 300, 313, 322,334, 336, 357, 362, 387, 391, 404, 409, 411, 417, 424, 431,437, 441, 448, 455, 456, 458, 459, 463, 481, 482, 484, 489,497, 514, 520, 524: n = A,T,C or G
ggcgaattggagctccccgcggtggcggccgaggtaccattgttgattgataagtatgagatacattttttatgatgttcatcacagtgtggtaaggttgcaaattcaaaacatgtcacccaagctctgttcatgtttttgtgaattctaggctggtgctgcactgaaatagagcagtaagcttgtgataaaggccaattccaggtagctcttgaaggtgatggccatctactttccagtggctgccanccacntgnantggccatcaataacnttctgaaganggcntnttanataagntccacagacaatntcatacaanaccccctttggntnggattattttcatcaaccttngggantggagttggcccccaccaccaggtnctanatgcctttttaanagtananatgttnttttttngctttgnaaaaantaangaagtanaatattnncnnaaanaaattttgggcccagganncnagatnttttggtnccccttcccttcaaaantcttgngttn

SEQ ID NO: 5884 - DNA, 811 bp, Homo sapiens
  misc_feature 2, 6, 8, 9, 12, 16, 18, 22, 27, 30, 31, 32, 35, 38, 52, 58,66, 69, 71, 72, 73, 75, 83, 89, 94, 95, 99, 101, 110, 115,116, 118, 120, 121, 123, 132, 138, 139, 159, 259, 282, 309,335, 342, 345, 350, 357, 358, 364, 375, 378, 409, 414: n = A,T,C or G
  misc_feature 422, 446, 450, 454, 470, 478, 485, 486, 494, 501, 503, 512,520, 521, 523, 534, 542, 564, 566, 569, 590, 591, 599, 605,606, 607, 609, 610, 616, 623, 624, 627, 629, 630, 634, 638,643, 649, 669, 673, 689, 695, 696, 699, 707, 715, 720: n = A,T,C or G
  misc_feature 730, 734, 750, 753, 760, 769, 777, 778, 780, 784, 787, 788,790, 793, 797, 802, 804, 809, 810: n = A,T,C or G
tntaancnntantgtnantctnaattnttnnnctnaanagttagtctaattnttattntaataatnttnannntnttattttnattatnattannattntnattgttatnttatnntntnngnattgggatnatattnngatattatatggcgaattgnttctccaccgcggtcggcggccgaggtactgagatatccacatatttttgagaaaaattcccaagccaggcgaatgtggattggaataaagacataggcngtgtataccaccatagcaataanggttagtaagatggtgttaaacatatnatcgctcccagggctctaaaaacagncacagtnagnctaantgattcnnggttanttgtattagtntgnagcccaggtagaaaattattttccttttcancacgnccgtttanaaaatacacaattgggttttgggncatncccntttcaaaggaccttgnctatgttnaaagggnnttttgttnccttaanantaaaaatgnttcccaanngnattccttgtgntttttttnttaaaaggaccccattgggctntncanttttctggccggaaaaaaatnngtaattcncctcgnnngnntggggnggcttcnnaangnnttcntttnccaantaatanctttgggtggttattggccnttgntatatataaccctttntaattnnttnctccccanatttttgnggggnttggtttaantttntatacacccctttggntcnggggatnttattcccntttatggnnanaccngtnntnttnttantaaananccttnng

SEQ ID NO: 5885 - DNA, 908 bp, Homo sapiens
  misc_feature 3, 8, 10, 71, 98, 307, 359, 360, 395, 400, 425, 432, 460,479, 492, 505, 521, 528, 536, 560, 608, 609, 615, 647, 651,676, 696, 713, 716, 744, 760, 764, 765, 766, 771, 772, 782,784, 794, 800, 814, 819, 825, 827, 836, 853, 869, 871: n = A,T,C or G
  misc_feature 875, 878, 892, 907: n = A,T,C or G
tgngccgnancactactatagggcgaattggagctccccgcggtggcggccgaggtactgctatagctaantcaactaaaaatcagttatgtagtgtngctcaacagatgtactgtgccctgacctcagcaatgatgctgtccatgtccagggagcggctgttgtccatggacagcaccacaggtgtgtcccgagatctgggactgcagctcccggatctcctcttcatatagctgcctgaggaagttgatctcgtcggtcagcccttccaggcgagactccagctctaccttgttcatgtaagctncatccacatccttcttgatgaggacaaattccgttctccatctctgtacctnngccgctctagaactagtggatcccccgggctgcangaatncgatatcaagcttatcgataccgtngacctcnatggggggcccggtcccaacttttgttncctttaagtgagggttaanttgcccgcttggncgtaatcattggncatagctgtttcctgngtgaaantggttatncgctcacaatttccacacaacatnccgaagccgggagcataaaagtgtaaagcctgggggtgcctaatgagnngagctnactcacattaaattgcgttggcgcttactggnccgnttttcagtccggggaaaccctggtntagcccaccttgcatttatnaattcgggccaaactcnccnggggaagaggcggtttggccgttattgnggccgctcttttcggntttnnngtttnnatgaacttgntngcgctcaggncggtcnggctgccgcaagcngtttnagcttnanttaaaggcngttttccggttttcaanaaattcaggggataancntagnaanaacattaacccaanggcaaagaaaagccnt

SEQ ID NO: 5886 - DNA, 832 bp, Homo sapiens
  misc_feature 2, 187, 319, 531, 607, 619, 699, 719, 749, 767, 776, 821,831: n = A,T,C or G
gnctatcactactatagggcgaattggagctccccgcggtggcggccgaggtacagaaacttaccggcctagttctgcctcacagtgtgtgggctggtatttgctttgtgcagagatcccagttaaaccaagtgggccagaactcattcctcagctggtggccaatgtcacaaaccccacagcacangagcacatgaaggagtcgacattggaagccatcggttatatttgccaagatatagacccagagcagctacaaagataaatccaatgagattctgactgccataatccaggggatgaggaaagaagaacctantaataatgtgaagctagctgctacgaatgcctcctgaactcattggagttcaccaaagcaaactttgataaagaagtctgaaaggcactttattatgcaggtggtctgtgaagccacacagtgtccagatacgaagggtacctcggcccgctctagaactagtggatcccccgggctgcaggaattcgatatcaagcttatcgataccgtcnacctcgagggggggcccggtacccagcttttgttccctttagtgagggttaattgcgcccttggcgtaatcatggncatagctggttnctgtggggaaattggtattccgctcacaattcccacaacatacgagccgggagcataaagtgtaaagcctggggtgcctnatgagtgagctactccattnattgcgttgcgctcactggccgcttttcantcgggaaacctgtcgtgnccacttgantaatgaaatcggccaccccccgggggggagggcggtttgcgtatnggccctcttnt

SEQ ID NO: 5887 - DNA, 824 bp, Homo sapiens
  misc_feature 2, 3, 553, 630, 697, 701, 713, 737, 744, 754, 759, 766, 782,811, 813, 814, 818, 820: n = A,T,C or G
gnnatcactacttagggcgaattggagctccccgcggtggcggccgaggtacaagaggaccatcctaccagtggggccacgtctcaacggtttatccttcacccatttttctgcacgtcatcctgaggtaaaccaattttaaatgtgtttgttttcagtaaaccagctatgacaatttatactaaacaaattgaactagaacccatttgaataggttttgaatttgttttttcatttttcatttttaatacaaaggcctgactgtgctcaatcgtcaagctgcatgcatgaaaaactggccagcccaaacagtgtattaatcattagcaaatggaactttaaggagtccttatcattaaggtagtacctgcccgggcggccgaggtacatgaaactccagcagatttaatattggcatccatcatctagtcaaacctctcacatgttcttcaaatcaatcaaatttgggattctcaacattttctgtgtcaataaaaggtgtggaattagtagattcgatgaagacctgtttttccttgccacattggacttncagacgccatttggattgggtttagaagatggggaaatttaaaagaccgtttcttggcctgagtctctttaagagtngagatgcagaagagagagtgagaccacgaagagactgctggtgactgcagggcacccccagcccccntggngggggcattaanttggatttggggcccacccaaaantggagtncctcggccgntttanaactagnggatcccccggctggnggaattcgatttcaagcttattgatcccncnncctngngggg

SEQ ID NO: 5888 - DNA, 827 bp, Homo sapiens
  misc_feature 350, 726, 740, 764, 782, 784, 801: n = A,T,C or G
gctatcactactataatacgactactatagggcgaattggagctccccgcggtggcggccgcccgggcaggtacagggttcctgtagggtagtcttaagtcctaagaggcaccaagcggttacaaaggctaggtgacaatccaaatcacaaggtccgacgatataataaatcccgtgttgccttatcaactttttgctggtagtcctccaatttgtcaagtattttctgggacagtgcgatgttgtgactgttggcactgttctctcccagagcttggagaagctgatcaatagaggagtatggaagccacaccattggggctgttgcggacagtggaaactcaattccnaagtattgatgtccttttcccaatacagcatccacatattctgacaccaaatccacagcttcttctaaaaggtcatagtttaagtataaacgaagcaattcagcagcatcaaccttcttgtaactgtttataagccaattaggcagaggcgctccatgagacaagagcttgttgattacacagtggtgatacaagttattctggactttgtacctcggccgctctagaactaagtggatcccccgggctgcaggaattcgatatcaagcttatcgataccgtcgacctcgagggggggcccggtacccagcttttgttccctttaatgagggttaattgccgcctggcgtaatcatggtcatagctggtttcctgngtgaaaatggtatncgctcacaattcccacaacatacnaaccgggagcataaagtntnaaagcctggggtgcctnatgagtgagctaactcacattaattg

SEQ ID NO: 5889 - DNA, 841 bp, Homo sapiens
  misc_feature 5, 10, 17, 709, 735, 763, 765, 774, 814, 823, 841: n = A,T,C or G
ggccnatcgngtatacnactactatagggcgaattggagctccaccgcggtggcggcccgaggtacctcctcaaggttctccaactatgggcagttcagtaatggggacacagatgaacgtgataggacaatctgcttttggtatgcagggtaatcctttctttaacccacagaactttgcacagccaccaactactatgaccaatagcagttcagctagcaatgatttaaaagatctttttgggtgaggtgtcttacttctattttgaaggattatttcagtttcaatcatgggtgagctgatttacatctttatatagttggcttggaggaagcacctcggccgctctagaactagtggatcccccgggctgcaggaattcgatatcaagcttatcgataccgtcgacctcgagggggggcccggtacccagcttttgttccctttagtgagggttaattgcgcgcttggcgtaatcatggtcatagctgtttcctgtgtgaaattgttatccgctcacaattccacacaacataccaagccgggagcataaagtgtaaagcctggggtgcctaatgagtgagctaactcacattaattgcgttgcgctcactggccgcttttcaatcgggaaacctgtcgtgccaacttgcattaaatgaatcgggccaaccccccggggagaggccgtttgcgtattgggcgctnttttcgctttcttggttacttgactngctgcgcttcggtcgttcggctggggcnanccggattancttacttcaaaggcggtaataccggtattcccagaatcanggggatacnccaggaaaaaacatgtgn

SEQ ID NO: 5890 - DNA, 852 bp, Homo sapiens
  misc_feature 4, 5, 9, 10, 12, 25, 627, 635, 653, 665, 688, 690, 693, 745,769, 786, 814, 819, 832: n = A,T,C or G
tggnnctanncncgtaatacgactnctatagggcgaattggagctccccgcggtggcggcccgaggtcagaaagtaaggtgttctactttctggttgtgtagcattgggaataagatatttgtccaacagctccagaacatcattgcagatgtcctgcagttctgcctctatcttctcacggtacctcggccgctctagaactagtggatcccccgggctgcaggaattcgatatcaagcttatcgataccgtcgacctcgagggggggcccggtacccagcttttgttccctttagtgagggttaattgcgcgcttggcgtaatcatggtcatagctgtttcctgtgtgaaattgttatccgctcacaattccacacaacatacgagccgggagcataaagtgtaaagcctggggtgcctaatgagtgagctaactcacattaattgcgttgcgctcactgcccgctttccagtcgggaaacctgtcgtgccagctgcattaatgaatcggccaacgcgcggggagaggcggtttgcgtattgggcgctcttccgcttctcgctcactgactcgctgcgctcggtcgttccgcttgcggcgagcggtatcagctcactcaaaggcngtaatacngttattccacagaatcanggggatacccanggaaagaacattgtgagcaaaangncancaaaaggccaggaaccgtaaaaaaggccgcgttgcttggcgttttttcatangctccgcccctgacgagccttacnaaaattcgacgcttaantcaaaggtggcgaaccccgacaggactntaaanaaccaggcgtttncccctggaagctcctcgtgc

SEQ ID NO: 5891 - DNA, 855 bp, Homo sapiens
  misc_feature 2, 18, 19, 21, 32, 69, 72, 75, 76, 96, 164, 231, 247, 257,364, 409, 428, 436, 451, 486, 557, 587, 610, 680, 681, 686,688, 696, 775, 776, 787, 795, 809, 836, 842, 849: n = A,T,C or G
gnccgtatcgactactannantcactataggngcgaattggagctccaccgcggtggcggccgaggtcncancanntggggaggagccaaagcctnggcgctcacctaagccgcagggagatacacccaactgggagatgaggaaacagcaacccagagagganaactaacccacacaggatcatttcgtgaaggagcaaggctgaagaaccaagacctggactttcttangacaaacttactgcancttgaagganccaaccatggatttgaggcgtgtgaaggaatatttctcctggctctactatcaataccaaatcattagctgctgtgctgttttagagccctgggagcgatctatgtntaacaccatcttactaaccattattgctatggtggtatacactgnctatgtctttattccaatncacattcncctggcttgtgaatntttctcaaaaatatgtggatatgacaagtaccttngccgctctagaactagtggatcccccgggctgcaagaattcgatatcaagcttatcgataccgtcgacctngagggggggcccggtacccaacttttggtncctttaattgaggggtaattgcncgcttggcgtaatcatggtcatagctgtttcctgtgtgaaatttgttattccgttacaaatttcacacannatacnanccgggaancttaagtgtaaagcctgggggccttaatgaatgagctacttacattaattgcgttgcgcttacttgccccctttccagnnggaaaactgtngggccagntgctttatgaattngccaacccccggggaaaggcggtttgngtattnggccctnttccct

SEQ ID NO: 5892 - DNA, 475 bp, Homo sapiens
  misc_feature 2, 7, 475: n = A,T,C or G
gnacccnatcactacttagggcgaattggagctccccgcggtggcggccgaggtacaaatagctcatctaggctaccacagttaagtctgaagcagggctgtggcgtgggtgaactacagtatttgacatctttatacggattaaggagttgggtcaggaaacctgatgacccaggagagaatgaaaaaattaagtcaccaattattcattataatagtcaccagatcatttgacacattaaatttcagtcttggcttcaacttaagaatatagagttttaggaaaatgttttccatatgcataaaaaacaagaatggagggatgcagaccagcagctattttctgagaacaaaacatcagcccatgtgttgctttacacttttaatctctgttggtacctcggccgctctagaactaggtggatcccccgggctgcagggaattcgatatcaagcttatcgatacccgtccgan

SEQ ID NO: 5893 - DNA, 442 bp, Homo sapiens
  misc_feature 1, 4, 5, 11, 169, 377: n = A,T,C or G
nggnnccctancactacttagggcgaattggagctccccgcggtggcggccgcccgggcaggtacgcggggacccggctgcggtggctgcgggactgacgagtgagtctcgggctggggcggaaacggagctccgggaaactactaaagttcctggggaagcaaagtanaatttcataagaacaaaatgggatggagaggagaaaacctatggtggctgtgaaggacctgatgccatgtatgtcaaattgatatcatctgatggccatgaatttattgtaaaaagagaacatgcattaacatcaggcacgataaaagccatgttgagtggcccaggtcagtttgctgagaacgaaaccaatggaggtcaattttagnagagataccttcacatgtgcctatcgcaaagtatggcatggtatttttaccgtaccctcggcccg

SEQ ID NO: 5894 - DNA, 550 bp, Homo sapiens
  misc_feature 2, 73, 120, 228, 265, 322, 329, 354, 369, 370, 381, 397,409, 423, 430, 443, 446, 447, 473, 474, 500, 510, 517, 518,519, 520, 528, 530, 531, 533, 536, 537, 540, 543: n = A,T,C or G
ancctatcactacttagggcgaattggagctccccgcggtggcggccgaggtaccctgaacagtggcccaaangccactgatcaaaaataaaatagtggctgtatatcaatgaaatgaantccaagaagctttaaccctttggcatcagaaatccagatttttccaattatgtaaatgcttatttcttacatgccaagagtggggagaagtgaatgttccaatgtggnaaagaaaaaaagcccaccactcactgggaccacccanagaaattgggcttttaaacagacaatttatggggggttagggcaaaaaaacccccanaaaattngggttatttaagcctgcttttgtgnttcatttaaaatttnnaaggttggganaattgaaccttggagnttcccttaaaanggaaccctttttgngcccccnttttttaaaaacnttnnttgggaattccccccccggggccttnncaaggggaaattttcctattaattcnaaccctttanttttggnnnnaccccccncnnanccnnccnaanggggggg

SEQ ID NO: 5895 - DNA, 434 bp, Homo sapiens
  misc_feature 8, 104, 269: n = A,T,C or G
tatcactncttagggcgaattggagctccccgcggtggcggccgaggtacttattggcacaaattcgggcagcctccagggctaggtagggagaagaaaagcancaaagtgagagaagataatagagaaacattcaccacgactatctccagctcaggggaactgtgttggctgagttttgtaaggctcatgtttcatcaactcccaattccagtgcagtgtatgtgggtggggttgagggagcacggaggaaggactggggggtgacnaacaaagaatcctgccttaccttcagaggacagctgctcatattcatctgacaccatgtggccacaaagcggaaactcatccactttttgcctttttccgccccaggtcaaaaatgcgaatcttggcatcttaaaaggattgggtaaagtgtgcaggggggtgtc

SEQ ID NO: 5896 - DNA, 431 bp, Homo sapiens
ctatcactacttagggcgaattggagctccccgcggtggcggccgcccgggcaggtgtttgttttctgaaagctttgtggtttcggtgagctctcagagccgatttctagcgtccgtgccggggacaggtgtccagaggtcggctgctgcagacatggcggcctccaccgcggccgggaagcagcggattcccaaagtggccaaggtgaaaaacaaagccccggctgaggtacctcggccgctctagaactagtggatcccccgggctgcaggaattcgatatcaagcttatcgataccgtcgacctcgagggggggcccggtacccagcttttgttccctttagtgagggttaattgcgcgcttggcgtaatcatggtcatagctgtttcctgtgtgaaattgttatccgctcacaattccacacaacat

SEQ ID NO: 5897 - DNA, 427 bp, Homo sapiens
cctatcactacttagggcgaattggagctccccgcggtggcggccgcccgggcaggttgcgggacgtggacggaagaaaaaagagagtgagcgagcgccggaatcagcccggcgtggagtgcggacccgcggtagtgccagggggcgaaggcggcggtggtgaggaagatactttggttagtgaccacatcgcagcatgttgagtcaagtttaccgctgtgggttccagcccttcaaccaacatcttctgccctgggtcaagtgtacttctcagcttcctggaccatacgttcaatgtcttccttgctcaaacggcccttgtcattagtgatagtaatcttgttctcttttcccgtacctcggccgctctagaactagtggatcccccgggctgcaggaattcgatatcaagcttatcgataccgtc

SEQ ID NO: 5898 - DNA, 429 bp, Homo sapiens
  misc_feature 2: n = A,T,C or G
cnatcactacttagggcgaattggagctccccgcggtggcggccgaggtaccacggataaacaaagttttccaacactaattcaagaacctctgagagagatgcatcaaccttggaagaaattttcaggtctagccatggctggtagttttcaagtagcaaagaaggcctatgtcgtttacatttcactttaccacaaacagcacagctatgaccttgaggaaataattcctgaagtcctaactgcttgggtttgtattttattgtgaagaatatatttggtaagagagaatcaggtcctagtgagcagtagaatgtgacaactccagcaacacctcggccgctctagaactagtggatcccccgggctgcaggaattcgatatcaagcttatcgatacccgtcgacctcgagggggggcccggtaccc

SEQ ID NO: 5899 - DNA, 689 bp, Homo sapiens
  misc_feature 498, 601, 612, 616, 617, 631, 640, 651, 661, 664, 675, 683,684: n = A,T,C or G
gcgtaatacgactcactatagggcgaattggagctccaccgcggtggcggccgaggtacgccacatcctgtgctaacaactttgcaatgaaaggaaagcggaagacgctgaatgccagtgatgtgctctcagccatggaagagatggagttccagcggttcgttaccccattgaaagaagctctggaagcatataggcgggagcagaaaggcaagaaggaggcctcagagcaaaagaagaaggacaaagacaaaaaaacagactcggaagagcaagacaagagcagggatgaggacaatgatgaagacgaagaaaggctggaagaagaagaacagaatgaagaggaagaagtagacaactgaaaagggcgggagactgtggcaccttggaaggtacctgcccgggcggccgctctagaactagtggatcccccgggctgcaggaattcgatatcaagcttatcgataccgtcacctcgagggggggcccggtacccancttttgttcccttttatgagggttaattgcgcgcttggcgtaatcattggtcatagctgttcctgtgtgaattggtatccgtcacaattccccacacaatacnagccgggagcntaanngtaaagcctggggngcctatgantgagctactcnattaattgcntgngctccttgccnctttccanncggga

SEQ ID NO: 5900 - DNA, 908 bp, Homo sapiens
  misc_feature 1, 154, 166, 168, 176, 183, 190, 191, 200, 208, 213, 217,224, 231, 241, 250, 251, 253, 257, 261, 265, 266, 273, 288,296, 300, 309, 314, 321, 324, 329, 330, 345, 351, 354, 355,358, 361, 366, 381, 382, 386, 398, 414, 442, 447, 454: n = A,T,C or G
  misc_feature 477, 483, 487, 502, 516, 609, 634, 641, 644, 679, 689, 698,710, 720, 740, 752, 779, 782, 792, 793, 798, 814, 820, 823,831, 832, 841, 842, 849, 850, 852, 858, 859, 861, 864, 868,876, 877, 879, 881, 884, 885, 888, 889, 892, 894, 899: n = A,T,C or G
  misc_feature 900, 901, 906, 908: n = A,T,C or G
nacgtcgctgctattacgactactatagggcgaattggagctccccgcggtggcggccgccgggcaggtacctaacaaacccacaggtcctaaactaccaaacctgcattaaaaatttcggttggggcgacctcggagcagaacccaacctccnagcagtacctcngncgctctanaactatnggatccnncgggctgcntgaattcnatatnaaancttatcnataccgncgacctctanggggggccnntncccngctnttgnnccctctnttgaggggtaattgnacgcttgncgcnttcataganatagntgtatgntgngtacnnctaaagggcatccangacctntannatnatncaacnattttgcatgccagnnaaancatttgtactgnccaagaaaaacatctnattccttttgtcttgaatatccctgctnacgcnctttatnaattatattctgccacagatgantccctncatnaactaagaaaagccngttttctttatttnaaacttggtggcgaatgtgttgccgggtcctgtagggctgctttctggattgtctcctaaccctctagttttaattggacacttttttgctgntgcaatctatgcccgggtatttttnctttaantcngaaaccttggattacaaaaacctcgagcccttttnagtagtgggnctggattgnaccttcggccgntctaaaactnggtggatcccccgggcctgnaggaattctatnttaaagcttatcgataccgtcgacctngangggggcccgnncccancttttgttcctttatnaagggntanttgccccnnagcggattnnggcattnntnttcctnngnaantttntatccttnnantncannaanntananccggnnnataangn

SEQ ID NO: 5901 - DNA, 455 bp, Homo sapiens
  misc_feature 81, 84, 188, 436, 445: n = A,T,C or G
aatacgactactatagggcgaattggagctccccgcggtggcggccgcccgggcatggtgacgtcgggggtggcgccgcancanttgcccctggtaacgggggaggcagcaggaggaggaggaggaggagggactcggcgggaggatgggcttgctctcaattttgcgcaagttgaaaagtgcaccanaccaggaggtgagaatacttctcctgggcttggataatgctggcaagaccactcttctgaagcagcttgcatctgaagacatcagccacatcacacctacacagggtttcaacatcaaaagtgtacctcggccgaggtacacttgaaaccaaatttctaaaacttgtttttcttaaaaaatagttgttgtaacattaaaccataacctaatcagtgtgttcactatgcttccacactagccagtcttntcacacttnttctggtttc

SEQ ID NO: 5902 - DNA, 903 bp, Homo sapiens
  misc_feature 2, 31, 128, 253, 273, 410, 465, 495, 503, 580, 606, 671,735, 758, 766, 771, 829, 853, 864, 866, 871, 878: n = A,T,C or G
tnttctatttactactatagggcgaattggntctccaccgcggtggcggcccgaggtacaaaggttccaagggacaggaccaagaacgaggggctgagacatttacaacagcaggcattttctctttnctcttcttcacggggaggcgggcagaggactgctcggatcgcttcgtcaaacactgcttgaggccctcgcttgtgtgagcgccgagcacctccaaggtattttacagcacccaatcttcctttancccatggctagacccttgcngataggtgatggggaagtcaacttcttcttctttcaagtttctcgatcgtggtctttatcattccctaaagatcaaagtttaatttcccacttaggatgatggggagtgttggggacaagtgggtgcccgcaccctnaaggataccacttttgcaccggacatttttcaaaatgatggcagggactcacaangggaaaaagccaaattaaagaacaccattnggcaatcnggctttgtctttgccccggggagggttattattccttaccggtaccttcgggccgcttctaagaaactagtgggatnccccccgggcctgcaaggaaattccnatatcaaagccttaatcgatacccgcgaccctccaagggggggccccggtacccaacttttggtncccttaatgaagggttaattgcgcgcttggcgtaatcattggtcatagctggtttctggtgtgnaaattgtattccgcttacaattncacacaanatacnaaccgggacataaaagtgtaaaagcctggggtgccctaatgaagtgactaacctccanttaattggggttgggcttacttgnccgcttttcantntgggnaaaactntcttgccaacttgcattaatggaat

SEQ ID NO: 5903 - DNA, 728 bp, Homo sapiens
  misc_feature 721: n = A,T,C or G
gcgtaatacgactcactatagggcgaattggagctccacccgcggtggcggcccgaggtacaaactcgcattcatggcttggtttcccagaagatctccatttaacttttttaaagaaagtttattgctttctttaacctgcattttttctaagttttttttcacataaaggtgctgtctttgtggcaaggcctaggcatgacaatcggaggactcgagggggatggaggactagtgatcggctggctgcttccagtcgattagagaggtgaaaaagctgaacgtgtgccagtaatcttcaaaaggcagaacatatcacctctgccccgtaaactgttctctccgagggaaaaaatggaagttatcctcacagttcactgccgtggtatttcttctgtcccatgctttgcatgactgccatggtacctcggcccgctctagaactagtggatcccccgggctgcaggaattcgatatcaagcttatcgataccgtcgacctcgagggggggcccggtacccagcttttgttccctttagtgagggttaattgcgcgcttggccgtaatcatggtcatagctggtttcctggtgtgaaattgttatccgctcacaattccacacaacataccgagccggggagcataaagtgtaaagccctggggtgcctaatgaagtggagctaacttacaattaattgcggttgcgctcacctggcccgnttttcct

SEQ ID NO: 5904 - DNA, 855 bp, Homo sapiens
  misc_feature 8, 17, 24, 32, 95, 98, 111, 134, 142, 147, 149, 167, 213,299, 309, 328, 329, 343, 350, 362, 380, 381, 385, 400, 416,417, 420, 426, 447, 454, 459, 471, 508, 516, 519, 536, 537,545, 547, 548, 558, 567, 581, 601, 609, 645, 671, 696: n = A,T,C or G
  misc_feature 718, 725, 729, 737, 758, 762, 764, 765, 795, 804, 833, 834,838, 839, 842, 844, 853: n = A,T,C or G
agctatcnctactactnactatanggcgaatnggagctccaccgcggtggcggccgaggtactggaagacagtggttctgatgggttcagccctntangaactgaccccantgaaatagcggggttgcaggcanacattganctgcnanacaatgggaataaccttngtgtccacctgtgggggactgattcaatacatatgcacgtccacancagagaatgccatgctggcctgctacttggggctgagctcaaaacgcttggctctcttctccagccagtcctccagatggccctangcgagctcangagcatctagtatccactnnctggctcgactgtncttctanacctggatgctnaagctcctgcaggtctcnntatnacatgtgggaaaatntgcagatggagccaanntcncactgncctgtcactagaaacttctgnagggccncttgntctgctattcancaagatggcaggtgcatctgggaacatgtcgtacctngggcgatntanaactagtgggatcccannggctgcangnnttcgatatcnagcttatcnataccggggacctnaaaggggggccccggacccnccttttgntccctttaactgaaggttaattgcgcccctcggccntaaacattgtcatagctggtaactgngtgaaactggtatcttttacaattncccacaacatacgaaccggggncataaantttnaagcctgnggcctaatgagtgaactaacncaantnntggcgtcgctactggccgcttttaaattgnaaaaaaggnggggcaactggattaaaaaaaccccaaannccgnnganangaatttttnat

SEQ ID NO: 5905 - DNA, 913 bp, Homo sapiens
  misc_feature 1, 769, 809, 857, 860, 875, 879, 881, 893, 896, 904: n = A,T,C or G
ncgcactactatagggcgaattggagctccccgcggtggcggcccgccgggcaggtaccaggaatcctgagttctgtgaaaatctgttcattccaaatctgttaagcatttccaaacatccagagaatggtttcactgttgagggtgcatgtggcagaatctgtctctctctgcacctgtcttctgttaccatccctggacagtgacagattttaagccagccaccagaattcttttcgagttaaccatttcttagtttctgtaaattcgtgacttgtcttactgaactacagcctggtttgtagacttccaacatctacactgctgctcttcaccattggaattcactgtggtatttatagtattggcttcagtccgagccacaggcaataaaaggatatcagctgtagttctcagctacatcatggtgtatagatgctgttattcaggcgaacttgctcatgggtggactaacacctggtttggtacctcggccgctctagaactagtggatcccccgggctgcaggaattcgatatcaagcttatcgatccgtcgaccctcgagggggggcccggtcccagcttttgttccctttagtgagggttaaattgcgcccttggcgtaatcatgggtcatagctggtttcctgtggtggaaaattgttatccggtcacaattccacacaacattaccaagccgggagcataaagtgttaaagcctggggggcctaatggagtgagcctaacctcccattaaattgcgttnggcttcactggcccgctttccaggccgggaaacctgtcgngccaactgcattaatgaattcggccaacgcgccgggaaaggcggttgnggnattggggcttttcgnttcntngttaatgactcnctnggctcggncgttccggg

SEQ ID NO: 5906 - DNA, 936 bp, Homo sapiens
  misc_feature 1, 4, 71, 116, 124, 127, 133, 134, 140, 174, 180, 196, 197,210, 224, 230, 272, 278, 385, 435, 447, 451, 455, 481, 483,487, 488, 509, 536, 539, 543, 555, 559, 566, 571, 589, 607,608, 621, 623, 637, 644, 655, 661, 664, 673, 674, 675: n = A,T,C or G
  misc_feature 683, 685, 690, 697, 700, 717, 719, 721, 748, 749, 751, 752,762, 768, 770, 771, 777, 779, 787, 794, 795, 799, 801, 809,811, 813, 820, 825, 826, 830, 833, 835, 836, 840, 842, 844,852, 853, 860, 865, 867, 871, 873, 874, 877, 878, 884: n = A,T,C or G
  misc_feature 886, 893, 896, 900, 907, 913, 915, 916, 923, 924, 925, 928,929, 933, 936: n = A,T,C or G
ngcngcgcgtaatacgactcactatagggcgaattgggagctccccgcggtggcggcccgaggtactatgngtggttcacccactgtcttactctctaggaacactgaagtgattngtttgcgngcnctgcannacagcncttggtcccctctaaacatgccaccccacacgtntttgtnacctgaaaattctatnngtatcactttctncaaaatggctaggngcaagnctacgtcagaattaatcgctccctttccccagtttccacatnttattntttgacttatccaaatttctaccacttttgttattgctcctgcttacattctgcccatattgaacatgtgggtatatgccaggctctatgctttctctttattattntattgccttcttatgtaaccctacaaaaatgttttttttttttcttatanagaaaatggaangctnaaangagggggacattctctatgatttgcntnggannatggtttctgaaactaagggntgctgtccatattcagcatgcggtacnctncccnggccggccgctnttanaactagntggancccccgggctgcaggaanttcaaatcaagcttatcnntacccgtcgaccntnagggggggcccggntcccaanttttggtcccntttagngangggttaaannnggcgcttngncgtanataattnggncattacctgttccctgngngnaaaaagttattcggcttacaaattccnncnnctttactaanccgtgngnncattantnggaaaacncgggggnncccnanttaggtgnancnaactcantaaanntgcngtngnnttantngncctctttnntatgggnaaacntnttgngnncanntttttnanaatctgnccntctnaggtganaaggangnntatgtcnnngtnngcanttn

SEQ ID NO: 5907 - DNA, 409 bp, Homo sapiens
  misc_feature 5: n = A,T,C or G
gagcnccgcgtaataccgactcactatagggcgaattggagctccaccgcggtggcggccgaggtacagcctagaagaaaacagagagatgagcagcttctgacaaatgtcctggaaacacttcgaggtgatggaaatgtgttaatagcagtggacacagcaggcagagttttggaacttgctcaacttcttgatcagatttggaggactaaagatgcaggattgggtgtttactcattggcactcctaaataatgtcagttacaatgtggtggagttttctaagtcccaggtagaatggatgagtgataaattgatgagatgttttgaagacaaaagaaataatccgtttcagtttcgccatctctctttatgtcatggtctttctgacttggcccgtgtacctcggc

SEQ ID NO: 5908 - DNA, 413 bp, Homo sapiens
gagcgccccgtaatacgactcactatagggcgaattggagctccaccgcggtggcggccgaggtacagatgatggagagtttggcctcaagtttttataaactgagcgagactagtgttcaggatctcctcccttgtttaaatgtcaataaatgccccaactgcttattaattgactgtgccttgggaaacagtgggaagtaacttggtgcagcactggggtattgttggcttcttgtgttggaaactttgtaatgtaaaaggaaaaactggaaatccccacgccctgtttccctttatcgtcttgtggttggactggttcaattcgtttaactcgaattcttgctcctggccgtggttaagctgtgtactcctcagcagagctggaggacagcaaggccaggaccagcccca

SEQ ID NO: 5909 - DNA, 810 bp, Homo sapiens
  misc_feature 607, 635, 656, 666, 705, 713, 745, 756, 763, 765, 767, 771,784, 788, 802, 808: n = A,T,C or G
gactcactatagggcgaattggagctccccgcggtggcggccgaggtaccaaagatttaattaaaagtaagtggggatcgaagcctagtaactccaaatccgaaactacattagaaaaattaaagggagaaattgcacacttaaagacatcagtggatgaaatcacaagtgggaaaggaaagctgactgataaagagagacacagacttttggagaaaattcgagtccttgaggctgagaaggagaagaatgcttatcaactcacagagaaggacaaagaaatacagcgactgagagaccaactgaaggccagatatagtacctgcccgggcggccgctctagaactagtggatcccccgggctgcaggaattcgatatcaagcttatcgataccgtcgacctcgagggggggcccggtacccaacttttgttccctttagtgagggttaattgcgcgcttggcgtaatcatggtcatagctgtttcctgtgtgaaattggtatcccgctcacaattccacacaacataccagccgggagcataaagtgtaaagcctggggtgcctaatgagtgagctaactccattaattgcgttgcgctcactgnccgcttttcagtcggggaaacctgtcgngccacttgcattaatgaatcnggccaacgcnccggggagaggccggtttgcgtatttgggcgctcttccntttcttgnttcaatgaactcccttgggcttcgggcgtttnggttgcggggnagcggtntnancttncttcaaaggcggnaatnccggttttccacanaattcngg

SEQ ID NO: 5910 - DNA, 387 bp, Homo sapiens
  misc_feature 3, 8, 387: n = A,T,C or G
ttngggcnattggagctccaccgcggtggcggccgaggtacatccttactggagagggtgctgggactatatttatcattgacgataccacgggtgatatccactcaacaaaaagcctagacagagagcagaagacccactatgtgcttcatgctcaagctattgatagacgtacaaaagaagcagctcaggaggctgttaaactgtataataatcatgaaattcgttctggaaaacatattggtgtctgcatctcagttgccaacaataggctttttgtgggctctattcctaagagtaaaaccaaggaacagattcttgaagaatttagcaaagtaacagagggtcttacagacgtcattttataccaccaaccggatgacaagn

SEQ ID NO: 5911 - DNA, 847 bp, Homo sapiens
  misc_feature 326, 575, 576, 610, 634, 639, 640, 677, 683, 731, 734, 735,755, 758, 759, 761, 767, 770, 773, 794, 818, 819, 830, 840,845, 846, 847: n = A,T,C or G
cactatagggcgaattggagctccccgcggtggcggccgaggtaccatttgtggtgcccaagtttaagttatcttacattcaacccaggacacaagaaactccttcacatctggaagaacttgaaggatctgccagagcatcttttggagatcgaaaggtagaactttccagttcatcccagcacggacctagctatgatgtgtataacccattctatatgtatcagcacatttcacctgatttgagtcgacgctttcctccccgttcagaagtgacgagactgtatggatcggtttgtgatttaaggacgaacaaacttcccggntcccctgggctaagcaaatctatgtttgatcttacaaactcatctcagcgattcatccagagacatgattcattgtccagtgtacctcggccgctctagaactagtggatcccccgggctgcaggaattcgatatcaagcttatcgataccgtcgacctcgagggggggcccggtacccagcttttgttccctttagtgagggttaattgcgcgcttggcgtaatcatggtcatagctggttcctgtgnngaaattgttatcccgctcacaatttccccccaancataccgagcccggggagccattnaaagnngtaaagccctgggggggccctaaatggagtggagccnaacctnacatttaaatttggcggttgcgccttcacttggccccgctttttccangtnnggggaaaacccggtcggggnccnngnttgganttnaantgaaattccgggcccaccccncccggggaggaggccggttttgcnnaatttggggcncctttttccntttcnnn

SEQ ID NO: 5912 - DNA, 415 bp, Homo sapiens
gagcgcgccgtaataccgactcactatagggcgaattggagctccaccgcggtggcggccgcccgggcaggtactaggattacaggcgtgaagcagcatgccacgcctatagtgatatctttaagtaagcctctcctatctttttttgagcagtttttcaaagcaacaggcaccttattaaattagaaagttgatgtgcttccctaatgcctactaatgaggtaaagaactaaagaacctctgtgatttcaatgaagtcccttcagatgttatgggctacttgttaccccgcgtacctcggccgaggtactgtttggtgtgtgtttgtttcttccccagcaatgcctactgcagctacttagtaacaactagaggtggagggtgtccggggaagcagttagatgagttaagtgtg

SEQ ID NO: 5913 - DNA, 416 bp, Homo sapiens
gagcgcgcgtaatacgactcactatagggcgaattggagctccaccgcggtggcggccgaggtactgtgacagcccaatgcattcaccttgcccgctgcctagacagaaccgatttatcaagacagaggaactgcagtggagaaggagtaactcacgcagagccggctgtgtggcagacccaagtttattactcaaatcggtctccccgagcattcggggatcagagtttttaaagatatttggtgggtaggggcttgggaattggggattagtcaggttggagatggaatcatagggggttgaagttagcttttcttgctgtcttctattcatgggtatgatggcacaactggttgggccagattaccggcctgggcagggtctgcaacacataacaagccctgatcttaggttt

SEQ ID NO: 5914 - DNA, 662 bp, Homo sapiens
  misc_feature 602, 608, 633, 648, 651: n = A,T,C or G
gcgcgccgtaatacgactcactatagggcgaattggagctccaccgcggtggcggccgaggtacttgagcctaggcaacagagccagactcagtcctttaaagaaaaaaaaaaattctcccaacttcataagtaaactgcctaaacaaatcaggattcattttaccattcatttagcagaagaggaaggtaacagaagttcatatatttcgccagataactttatcaccctccaacccagactagaggttttgatttaattatctcaaatgaactttaattattttgaacttatgattaccataatacctcttgttagaaaagtgagatttctaaaacctagtaagtaatcgtaaaggtataattttaccaccagtaatgcaagttcttaacagctgtcttggcctcaggggtcataaactaatggcctcagtaataaaatatttaatagaaattaatgagataggcccaatgatgtgggccaagtaaagagaggagaaataagaattggtgggaactgtggcaaatcggagagagtatgcacatctaaagggactcagagcaggttaattccagcccctgtataccccgcgtacctgcccnggcggncgctctagaactagtggatcccccnggctgcaggaattcnatntcaagcttatc

SEQ ID NO: 5915 - DNA, 663 bp, Homo sapiens
  misc_feature 42, 86, 249, 460, 477, 508, 642, 656, 660: n = A,T,C or G
gattataatacgactcactatagggcgaattgggccctctanatgcatgctcgagcggccgccagtgtgatggatatctgcagaangggccctttcgagcggccgcccgggcaggtacttttttttttttttttttttttttggggggcaaagccttgctttgtcacccaggctggagtgcagtggcgtgatctcggctcactgcaacctccgcctctcgggttcaagcaattctcctgcctcatgctnctgagtagctgggattacaggcgcccaccaccacacccggctaatttttgtatttttagtaaagatggggtttcaccatgttggccaggctggtcttgaactcctgacttatggtccacccgccttggcctaccaaagtgctaggattacaggtgtgagccaccgctcctggcctggcttcttttttaaatcatgattatttagacagaanaactactgatgtgtttnggaaatatttgtagtttggaataagaatcanaagatggtttgttgcttgtttacatttgttattgagattcaactagtaaacatacttgcaacaaatggagaaaacttgcccaagttcttgattttttgttcttcctgcttgaagctaaaagtcaccctgcttgncttcactgctggantgtnact

SEQ ID NO: 5916 - DNA, 616 bp, Homo sapiens
  misc_feature 9, 12, 68, 77, 91, 108, 121, 136, 139, 142, 146, 149, 152,162, 189, 212, 219, 257, 258, 284, 310, 355, 362, 369, 390,396, 414, 424, 425, 458, 500, 502, 532, 554, 573, 575, 604,605: n = A,T,C or G
ggcgcgagnccncctatacgactcctatagggcgaattggagctccccgcggtggcggccgcgtacanatacagttnttaaacctaaagtnactggtgaaacaagctncgctattactganatgtataatgaatgnctnaangctntanatncactcatcgntgtgtttaaggaggaactgaagcacanttgttaagaacaaagtgaattangtgaatntacattgacaaaaggttgataataaagttgtcagaatnncaaaaataatttagtgtgacttgaancttaaaatcatgttatattaaattanagtaacactttactgatttaatatttgagtcatttctaaggaaantactganatatcanttgcttaacagaagtttaaantatacngtaatttggcatcttggnttcacatgtnntggaaaagctaaacatatttgggcctgttaatnaaaggcataaaaattattttatgagatggtgttcatctgcanantactaacatgatgccacttcaaaatgcttncttaattttcactagaaattanggtttctaacgagttaatntnaaattaatattagagtgattttaaacctnnaaaataatgat

SEQ ID NO: 5917 - DNA, 868 bp, Homo sapiens
  misc_feature 2, 5, 7, 10, 655, 658, 696, 730, 733, 736, 750, 778, 811,815, 832, 834, 848, 863: n = A,T,C or G
gnccntntgncgcgcgtaatacgactcactatagggcgaattggagctccaccgcggtggcggcccgaggtacactcttccttaagtccagtggtgcaggaaagcttcagtttgtcaatatcacgcaagacagggacaccaaacactacccctgcccaaaggagtccctcacggacgccgcatgttgttaccggacccccccgcgtacctgcccgggcggccgctctagaactagtggatcccccgggctgcaggaattcgatatcaagcttatcgataccgtcgacctcgagggggggcccggtacccagcttttgttccctttagtgagggttaattgcgcgcttggcgtaatcatggtcatagctgtttcctgtgtgaaattgttatccgctcacaattccacacaacatacgagccgggagcataaagtgtaaagcctggggtgcctaatgagtgagctaactcacattaattgcgttgcgctcactgcccgctttccagtcgggaaacctgtcgtgccagctgcattaatgaatcggccaacgcgcggggagaggcggtttgcgtattgggcgctcttccgctttctcgctcactgactcgcttgcgctcggtcgttcggctgcggcgagcggtatcaacttactcaaangcngtaataccggtattccacagaaatcaggggataaccanggaaagaacatgtgaaccaaaaggccagcaaaanggncangaaaccgtaaaaanggccgcgttgctggcgtttttttcatangcttccgcccccctgacagcattacaaaaaatngacnctcaaattagaagtggngnaaaccgcaggactnttaagataccagcgnttcct

SEQ ID NO: 5918 - DNA, 626 bp, Homo sapiens
  misc_feature 470, 487, 615: n = A,T,C or G
agccgtatacgactactatagggcgaattggagctccaccgcggtggcggccgcccgggcaggtacaaaagccaagatgcccattgtgggcctgggcacttggaggtctcttctcggcaaagtgaaagaagcggtgaaggtggccattgatgcagaatatcgccacattgactgtgcctatttctatgagaatcaacatgaggtgggagaagccatccaagagaagatccaagagaaggctgtgatgcgggaggacctgttcatcgtcagcaaggtgcacatggcgcatttggtgggaggccttcacttcaaggcaggcagaagtatctggatcgggtgggcagcaagaactctgtcggccttttctacgtgtacctcggccgctctagaactagtggatcccccgggctgcaggaattcgatatcaagcttatcgataccgtcgacctcgagggggggcccggtcccanctttttgttccctttantgaaggttaatttgcgccgctttggcgtaatcatgggtcaatagctgttccctgtggtgaaaattggttattccgcttcaccaatttcacaccaacataccaacccgggaagcattaaagtgtaaaancctgggggtgg

SEQ ID NO: 5919 - DNA, 639 bp, Homo sapiens
  misc_feature 335, 500, 518, 524, 537, 575, 587, 593, 630, 638: n = A,T,C or G
gccgtatacgactcctatagggcgaattggagctccccgcggtggcggccgcccgggcaggtacttttttttttttttttttttttgccactggaaaaagaaagggaagaaggagaaggagaataagaaccagagaattctcctacccttgaaaatttagcaagggcagattataacagccaaaactgacctgtggacccaagaactggactgcatgtaataagaaacattctgaaaatttaacaagtggaaaaataacctgctgggcctctttgtgaacaagctgctcaatgtcaacaagcccaaggcaccactaaatatcacaaggtcaattncactgaaatagggtttttatatattgtcagattttttgtttagttgtttttgaaaacagaatattttctattgaatatcttctttttctttttttaaatccatgggtctggttttaactgcaaacaggacccttgggttaagcccccaccacatgggagaccaanggtggagaccgttagaancttctnttagccaaaaacnactgggagggtgtttaagggctgaacgggtctatcaanaaatcaactttnggcttnaatttgccttctttggatgaccctttgaaagggaaanaaaaccant

SEQ ID NO: 5920 - DNA, 605 bp, Homo sapiens
agcgcgtatcgactactatagggcgaattggagctccccgcggtggcggccgcccgggcaggtacaagggcatgacaggctgggaggtggctggtgatcacatttacacagctgctggagcctcagacaatgacttcatgattctcactctggttgtgccaggatttagacctccgcagtcggtgatggcagacacagagaataaagaggtggccagaatcacatttgtctttgagaccctctgttctgtgaactgtgagctctacttcatggtgggtgtgaattctaggaccaacactcctgtggagacgtggaaaggttccaaaggcaaacagtcctatacctacatcattgaggagaacactaccacgagcttcacctgggccttccagaggaccacttttcattaggcaagcaggaagtacctcggccgctctagaactagtggatcccccgggctgcaggaattcgatatcaagcttatcgataccgtcgacctcgagggggggcccggtacccagcttttgttccctttagtgagggttaattgcgcgcttggcgtaatcatggtcatagctgtttcctgtgtgaaattgttatccgct

SEQ ID NO: 5921 - DNA, 863 bp, Homo sapiens
  misc_feature 598, 664, 670, 687, 705, 711, 745, 758, 780, 793, 831, 833,838, 847, 849, 860, 862: n = A,T,C or G
gcgcgtatacgactactatagggcgaattggagctccaccgcggtggcggccgcccgggcaggtacgcgggtcatgggaagtggcggccactgccacatctgctatgaggctcttcgccatcgttggctgctggaaatttggatacaggtaaatggtatataaggcttctttttgcttgtgcaccagaagtctttgtcccagcctccagatcagcagtcagtacctcggccgctctagaactagtggatcccccgggctgcaggaattcgatatcaagcttatcgataccgtcgacctcgagggggggcccggtacccagcttttgttccctttagtgagggttaattgcgcgcttggcgtaatcatggtcatagctgtttcctgtgtgaaattgttatccgctcacaattccacacaacatacgagccgggagcataaagtgtaaagcctggggtgcctaatgagtgagctaactcacattaattgcgttgcgctcactgcccgctttccagtcgggaaacctgtcgtgccagctgcattaatgaatcggccaacgcgcggggagaggcggtttgcgtattgggcgctcttcgcttnctcgcttactgactcgcttgcgctcggtccgtcggctgcggcgagcggtattaagctcactcaaangcggtnataccggtattcacaanaatcaggggataacgcangaaaanaacattgtgaacaaaaggccagcaaaaaggccangaaccgtaaaaanggccgcgttgctggcgtttttncataagcttccgncccctgacaacattaaaaaaaatcgacgctcaagtcananggggngaaacccgncnggacttttaanant

SEQ ID NO: 5922 - DNA, 628 bp, Homo sapiens
  misc_feature 1, 12, 461, 509, 510, 586, 594, 626: n = A,T,C or G
ngccgtagacgncgtatacgactcctatagggcgaattggagctccccgcggtggcggccgaggtactatttatttcttgttgaatgctgtgtgaagtttgtggagtgtttgaattctgtctctatcatttactaatagaatatatttcatcaagtgtcttaaatattattagcatatttctgcataatgtataaaatgggaaagtaattgtctctatttcaaaattattggaaggattagatctaatgtgcttatatcatctatttaataaaaatacatgttccctttattttttcagaagaatgccctagctttttaccacatcaacagtagttcagtttccgagtgagacaaagcaattactggaagaagtaaagaaattttattaccgtcataaaccattgaaaacacatctagtaagaaaatgaaaacctgaataagataggacaatagttgaagnaaagaaaagtctctggtacgcggggaggtcacttaaaggatccaaganntgtgtccttgcctttcttccctggaaccgtcagtgtgggaccgggaatgggagaagttcattggccagggatgggncctctttncaaagacccagaaacttacaccgaattccttnct

SEQ ID NO: 5923 - DNA, 619 bp, Homo sapiens
  misc_feature 2, 3, 4, 426, 470, 484, 532, 573, 575, 590, 594: n = A,T,C or G
cnnngaccgcgcgtaatacgactactataggggcgaattggagctccacccgcggtggcggcccgcccgggcaggtacaaagcagactgcccgcaaatcgaccggtggtaaagcacccaggaagcaactggctacaaaagccgctcgcaagagtgcgccctctactggaggggtgaagaaacctcatcgttacaggcctggtactgggaaaagatctaatctgccgtgggcctgtcgtgccagtcctgggggcgagatcggggtagaaatgcattttattctttaagttcacgtaagatacaagtttcagacagggtctgaaggactggattggccaaacatcagacctgtcttccaaggagaccaagtcctggctacatcccaacctgtggttacaagtgcagacaggccatgtgagccacccgntgcaagcacagaagcgtctttccccttgtagactagtgccgtanggaagtaccttcgncggtcttaaactagtggatcccccggcttgaagaattcgatatcaaantttatcgataccctcgacctcgaggggggcccggtacccancntttggttcctttaantgangggtaaattgcgcgcttggcgtaat

SEQ ID NO: 5924 - DNA, 626 bp, Homo sapiens
  misc_feature 5, 11, 17, 19, 22, 33, 161, 182, 195, 206, 213, 272, 289,291, 347, 375, 376, 393, 403, 413, 421, 436, 453, 455, 463,500, 522, 524, 534, 537, 543, 550, 556, 575, 578, 592, 598,604, 613, 616: n = A,T,C or G
gctancactantatcgngngantaggagctaancgcagcggcggccgaggtacatacgaggtttcattatgttgtcctggctggttttgagctcctggccttaagctatttgcttgcctcagcctcccaaagtgctgggattacaggcatgtgccattgancctggccaataattattcctnaaagatgaaaatnataggtatttntaaaatnattttcagtggttccttaagaggggtgaatcactctcctcccctgataacatttggtantgtctgttgacaatgcngngttggggtgctgtggtgctgtcagcacctgataggtgaagaccagagatgaacacnctataatgtcagagtactccccccaacnnagaattatccagcccanaaggtcaaantgtaccttcncgggcggncgctctagaaactantggatccccccggctgnangaatatgntatccagcttatcgatacccgtcgacccttgaggggnggcccggtacccagcttttggntnccttttagtngangggttnattgccnccctgnccgtaaataatggtcatangcngtttccctgtggtnaaaatnggtaanacgctttanaanttccacgcct

SEQ ID NO: 5925 - DNA, 842 bp, Homo sapiens
  misc_feature 1, 2, 5, 11, 35, 619, 626, 676, 697, 726, 741, 761, 775,787, 807, 815: n = A,T,C or G
nncgncatacnactactatatggcagctcgcccgnggtggcggccgaggtaccaaggagaagacggaaccaaaaacaaactctccaagtatattcacacattcaacaaaatttttgcatgccttctatgtcgtaggcatttttagttcctggggatttggacatggctaagtcagagaaggccattgctcaccatgaacactgtataccagaaggagagtggggaggagacaaaaaacaaataagaccacttcagacaatcaaagtatcagttaagagaatgaaaacaggcctgactcagtggctcacgcctgtaatcccagtacctgcccgggcggccgctctagaactagtggatcccccgggctgcaggaattcgatatcaagcttatcgataccgtcgacctcgagggggggcccggtacccagcttttgttccctttagtgagggttaattgcgcgcttggcgtaatcatggtcatagctgtttcctgtgtgaaattgttatccgctcacaattccacacaacatacgaacccgggagcataaagtgtaaagcctggggtgcctaatgagtgagctaactcacattaattgcgttgcgctcactggccgctttncaagtcnggaaacctgtcgtgccagctgcttaatgaatcggccacccgcggggagangcggttgcgtattgggcgctntttcgctttctcgcttactgactcgctgngctcggtcgttcggntgcggcagcgggattaactnacttcaaaggcggnaatacggttttncacagaatcaggggataccncaggaaanaacatgttaaccaaaaggccccccaat

SEQ ID NO: 5926 - DNA, 852 bp, Homo sapiens
  misc_feature 2, 71, 552, 583, 626, 633, 690, 692, 713, 724, 732, 737,757, 764, 782, 783, 796, 818, 826, 827, 837, 844: n = A,T,C or G
gncgcgcgcgcgtatacgactcactatagggcgaattggagctccccgcggtggcggcccgaggtactttntttttttttttttttttttgttcttcaacttctccttggttttcatttccattctgggctaattgtctattaagtctcttaatctcttcttgtagctgttcctggtcttctcgctgtctctccatttgccgcatatgtgcttgccttaacaattccgttgcctgttgatgttcttggtattgtcgtacggggagagagagagagccaaagcccgggccaggccagacaacgagcgacagaaagacagaggcaacagggagcgggacagagactccgaacgcaagaaggagacagagagaaagagtgagggggggaaagagaaggagagactgagagacagggaccgagagcgcgaccgggacaaagggaaggacagggagggttttagctggagagaagggagaagtgaaaggccgggcctcactgacctcaagatctcaggaattggataataagaatgtgcgagaagaagagtccaganttcacaaaaaatacagaggatagaggagacncttaaataaaagagagaagttcctgcccgggcgggcgctctanaactagnggaacccccggcttgcaagaattccatattaaacttattgaataccggccaacctcnangggggggcccggtacccaacnttttggttccnttaatgangggtnaatggcccccttggcgtaancatgggnaatagctgtttctggggnnaaattgttatccngttacaattcccccaacaaacnagccgggnncttaaaggtnaaacctngggtgcct

SEQ ID NO: 5927 - DNA, 848 bp, Homo sapiens
  misc_feature 4, 7, 9, 10, 11, 23, 24, 630, 651, 742, 768, 777, 793, 828,840, 844, 847: n = A,T,C or G
atgngcncnnngactactatagnntataggggcgaattggagctccccgcggtggcggccgaggtaccaatgtcttggggggagggagccagctgattgtgagatgtaagtttgtgattctgagatagcagctttgcaaaaaactgcaatttgtcaattcaccaatattgataatgtgcaagcttggtgagctgagaatattcctgaaaacctttgttcccactgcgaattcctggggacagttatgagttcctaatgacgtcaccacaaagacattttggagtgtttggtaaaggctgtttcttttcagtgattgctggaagcagatgggatcaaataaaaatagaacattgtgggctcccaaggctgaggtggagctggaggatgccggccagactgcggagcagcagtcttccttgtgcacatgcctgaagtccgcgtgggtgtttgaggaagtggggatacagcatttaatgaaaaatttatgcttaagaagtagaaaatggcaagtcttcctagataattttcaatggccagaatgtgaatgtattgaccagtgagagaagaaatgttgtggcgtctgttgtgacaggtatattgttttttacaggctggtggataatgacgcancagtggtgtattgtaggccanaacagttaaccatgcctttcacacatgtggtgtatttccacatttgcttcttcatgataaatgctgtattccaatgctcaaggtgagaagngatagctttgaaaagtggctggttangaagaacangtccttgagtttggcntttcgtgggttcatggtgatggttgggggacctgnccggcgggcggnttanaant

SEQ ID NO: 5928 - DNA, 860 bp, Homo sapiens
  misc_feature 58, 63, 69, 206, 238, 330, 452, 465, 472, 480, 493, 506,509, 519, 521, 533, 546, 579, 594, 624, 631, 643, 654, 680,687, 690, 716, 728, 733, 739, 740, 750, 756, 757, 780, 811,816, 825, 828, 849: n = A,T,C or G
agcgcgtaatcgactactatagggcgaattggagctccacccgcggtggcggcccgangtacncgggtnggcacctgccaccacgcccggctgatttttgtattttgtaattttgtatttttagtagagactaggtttcaccatgttggccaggctgatcttgaactcctgacataaggtgatccgcccacctcccaaagtgctangattacaggcgcgcccagccctgttgtattanttttctattgcttccatgacaacaaatcaccacaggcttggcagtttaaataccactgattatctcacaattctctaagtcagatgcctganttcagccaggcccagctgggtcctctgctcagtctcatggggccagtgtctgaggtgctgggttcaccctggaggccttcaagcttatgcacagttggctcaattattccttgcagctgtangactgggtccccnttccttntcatgctntccaagtggcccnctccagcaatggnggnttgggcaatntnagcctctagtcntctgccatgtctnttctgcctccggccagagaacattcctgactgngactatattgagccnactggacaaccccagatctcttccctgttntacaagntcaagtcttaancacacctggcncgggcgggcggttttaaaactaagtnggatccnccnggcttgaaggaattcgatattcaaancttattccattncgtcnaacttnnaagggggggncccggnncccaagcttttggttccctttantgaagggtaaattgggcccctgggcgaaatnatggncaaaactgnttnccgggggaaaatggtatcccntcccaaatcct

SEQ ID NO: 5929 - DNA, 858 bp, Homo sapiens
  misc_feature 55, 60, 89, 104, 148, 516, 556, 681, 691, 701, 732, 736,743, 782, 789, 797, 821, 825, 834, 835, 836, 845, 857: n = A,T,C or G
tagcgcgtatccgactactatagggcgaattggagctccccgcggtggcggccgnccggncaggtactttttttttttttttttttttngcagagagacagagnctcgctcagtgacccagactggagtactggagtgtggtggcacngatctcagctcactgcaacctccgcctcccaagttcaagcaattttactgcctcaagcctcccgagtagctgggactacaggtgcacgccaccacgcccggctaatttcttttgtattttactagagatggggtttcaccatgttgcccagctggtctcgaactcctgagctcaggtaatcagccagcctcagcccctcaaagtgctaggattacagacgtgagccactgcgcctgaccagggactgaatttatggagcagaatatcagataaatatgagaactgcactttttattttgaatttatttgcaagataactgatgtttaaggcaaaaacaacactagagctataatttgtatattgctgnttattacatagaagtaaaaggtataataataacaacaacnaaaaaaaagatgaagaggaaaaggagtgacactatactgctctaggatacttatagtcaaatcctaaaaccaactgtcagcaaaagaaatgaaggtgtaccttcggcccgctctaagaactaggnggatcccccnggcctggcangaatttcgatatcaagccttatcgatccgtncgancctcganggggggggcccggtacccagcttttggttccctttaagngaggggntaattgcncccttggcgtaatcatgggcaaancttnttcctgggnnnaaatgttantcccttcacaant

SEQ ID NO: 5930 - DNA, 843 bp, Homo sapiens
  misc_feature 1, 241, 265, 290, 575, 659, 677, 744, 773, 790, 805, 806,818, 827, 842: n = A,T,C or G
nagccgtaatcgactactatagggcgaattggagctccccgcggtggcggccgcccgggcaggtactttgaaacattcctggcaggcaatgtgtccaagagggagaatctgagacccactttcctgaggtcatccaatcccctcccatcttatcaggggtatggtatggcagctgtggcagagggatggaggagaggagacaccagagggaaaaaaaaaacgcaaatcctgttcacccagnaggtcaacaatggaaggaatacanaggagaaagcaccaggagggtgtancaggcataccccgagatgaagaggggtttgggcgaagttggatgtgcaaacaactcaaccccaccatgacatgaaggaggccaccgtgtgagcacagggcctggaacaatgggtgtaatgagttactgccacgtcagagaaattggttgctcctgttgatatggtttgactgtgtccccacccaaatctcatcttgaattgtacctcggcccgctctagaactagtgggatcccccgggctgcaggaattcgatatcaagcttatcgatacccgtcgacctcganggggggcccggtacccacttttgttccctttagtgagggttaattgcgcgcttggcgtaatcattggtcatagctgtttcctgngtgaaattggtattccgntcacaatttcacacacatacgaacccggaaccttaaatgtaaaacctggggtgccctaatgagtganctacttacaattaatttgcgttgggcttnacttgcccgttttcagncgggaaaactgtccnngccacttcattnaatgaaatnggccaccccccgggna

SEQ ID NO: 5931 - DNA, 868 bp, Homo sapiens
  misc_feature 4, 5, 637, 763, 767, 814: n = A,T,C or G
tagnngagcgcgcgtaatacgactactatagggcgaattggagctccaccgcggtggcggcccgcccgggcaggtacatggcctgggccgtgatgatgttgtcacccgcataggagctcatctgccactgcgggatggcggtgcaggccaccagacccacccagcccagcagggccatggagaagcccagcaactgcaggcccgaattggccatttccgccctcagaaaacactgggggcgccgggcggggagaccctacagtaaaacaaacgacacttggggggcagccccacaaaagaaaacttgaggtggagttttccggtcacccaaagagacaaaaagggtttgggccaggtgaatgcaaatcttgtcaccaaactacacacaaatcgacccccccagtgaagcgatggcctcgcggcacagggagtaggatacgccgggagggtggttccagacaaaattggtggtccccgaaggccaggcggttccctccgggcgctctcggcgacccactgtcccctccggcatcaaggctcctaactggaggaagaaaccactgggaccttcccgcgtacctcggcccgccgggcaggtactaccacaattagaggaggccgtgacaactgacaaganaacactgatgacaagcttcaggcattgtagtgcttaatacgtgcccagtggttctaaaccaaatagaacttgggcttccaacttcttgtccttttcccaagaaaagcattttggcttgccccctangganggaagaatacacaggaattgggatttaaaattgcttccattttgganctttgcactttctggcttgggtgacctaaaaccaagtgaattaccttttttttt

SEQ ID NO: 5932 - DNA, 855 bp, Homo sapiens
  misc_feature 665, 691, 739, 805, 808, 810, 812, 818, 825, 846: n = A,T,C or G
cgcgtatcgactcactatagggcgaattggagctccccgcggtggcggcccgcccgggcaggtacgcgggtttcctaaatctgaagttcctgctagtttaccaccttcaagatcttcttgaactggtaactgattaggttgaacttatggaagatttgtggacttaactcaaaagtaaccttcagtgttctatagaacatgtatttgtgtaactgaacctaccaggagaaatgtttggaattctatatgtgcaatttttcaacaaatgcaaaaaaaatacagcacatgtattgacaagcttctgtcaagcagcttgagttgaaatttgatttaagaaaataaatcatgattgttcaaagctgctgggacgttagaattaggccatgatactggtctcattttaactacagtgggtatttggcactagtgtaaacttccatataaatcactcttttggaacaaccaaagggggagggagaaaaatcacggcctgttaaatgagtacctcggccgctctagaactagtggatcccccgggctgcaggaattcgatatcaagcttatcgataccgtcgacctcgagggggggcccggtcccagcttttgttccctttagtgagggttaattgcgcgcttggcgtaatcatggtcatagctgtttctgngtgaaattgttatccgctcacaattncacacaacataccagccgggagcataaagtgtaagcctggggtgcctnatgaggtgagctacctccattaaattgcgttcccctcctgcccgctttccagtccgggaaaaccgncgngncngctcanttaatgnaatcggccaacccccgggganaggcggttg

SEQ ID NO: 5933 - DNA, 860 bp, Homo sapiens
  misc_feature 1, 4, 739, 766, 817, 845, 854, 855, 856: n = A,T,C or G
ntgngggcgcgcgtaatacgactcactatagggcgaattggagctccccgcggtggcggcccgaggtacagtataaaacttcacagtgccaataccatgaagaggagctcagacagttcttaccacatgatacaagagccggctggtggaagagtggggaccagaaagagaatttgctgaagaggagaaggaaaaaaaaaacaccaaaaaaaaaaaataaaaaaatccacacacacaaaaaaacctgcgcgtgaggggggaggaaaagcagggccttttaaaaaggcaatcacaacaacttttgctgccaggatgcccttgctttggctgagaggatttctgttggcaagttgctggattatagtgaggagttcccccaccccaggatccgaggggcacagcgcggcccccgactgtccgtcctgtgcgctggccgccctcccaaaggatgtacctgcccgggcggccgctctagaactagtggatcccccgggctgcaggaattcgatatcaagcttatcgataccgtcgacctcgagggggggcccggtacccacttttgttcctttagtgagggttaattgcgcgcttggcgtaatcatggtcatagctgtttccttgtgtgaaattggtatccgctcacaattcccacaacataccaacccgggagcataaagtgtaaagcctggggtgcctaatgagtggacctacttcacattaattgggttgggcttactgnccgcttttcagtccgggaaacctttcntgccacttcattaatgaattcggccaacccccggggaagaggcggtttgcntattgggcgctttttccgttccttgttncttgacttnnnttgc

SEQ ID NO: 5934 - DNA, 462 bp, Homo sapiens
  misc_feature 2, 3, 4, 5, 458: n = A,T,C or G
gnnnncgggccctatcgactactatagggcgaattggagctccccgcggtggcggccgggggccattgagactgccatggaagacttgaaaggtcacgtagctgagacttctggagagaccattcaaggcttctggctcttgacaaagatagaccactggaacaatgagaaggagagaattctactggtcacagacaagactctcttgatctgcaaatacgacttcatcatgctgagttgtgtgcagctgcagcggattcctctgagcgctgtctatcgcatctgcctgggcaagttcaccttccctgggatgtccctggacaagagacaaggagaaggccttaggatctactgggggagtccggaggaacagtctcttctgtcccgctggaacccatggtccactgaagttccttatgctacattcactgagcatcctatgaaatacaccagtgagnaaat

SEQ ID NO: 5935 - DNA, 474 bp, Homo sapiens
  misc_feature 1, 2, 10, 351, 412, 446, 449, 465: n = A,T,C or G
nnatccctancactacttagggcgaattggagctccccgcggtggcggccgaggtgggtggatcgcttgagcccaggaattcgagaccaacctgggcaacatagtgaaaccccgtctctaaaaaaaaaaaaagaaagaaaggagactttataacaattaaaaaaaattccccccaaaatcatctgttcatcagtgaggatctgcagatgtctctgctttgtcccatgcatatttgtcatttttctaaaaggttgattttgcccgggcacggtggcttatgcctgtaatcccagcactttgggaggcccgaggtgggcggatcatgaggtcaagagattgaaaccatcctgnacaacatgggtgaaaccccgtctccactaaaaataccaaaaaatcagcttgggcgttggcnggcgcatgcctgccagttccccaggcccacttcnggnaaggcttgagggccanggaagaagt

SEQ ID NO: 5936 - DNA, 411 bp, Homo sapiens
gagcgcgcgtaatacgactcactatagggcgaattggagctccaccgcggtggcggccgaggtacagcgggtgctggtggatactggcacagattgcagccttgtttatgggaacccggataagtttcttggcaaacctgcttacattgacagctatggcagctggtcagtgaaagtgaaacctgtatctctataccttggcatcaccgtttggctccctgcttatgcgctgtgtatgtctctcctgaatacattctgggggtgagtgtttcacaaggtttggcagctgtctcatctatcatggatttgatagactgctcgatgatggaattggaacaataccactatgtggtagacttggctaatgcattcttttccagagagccaggaatactttacctttatgggaca

SEQ ID NO: 5937 - DNA, 456 bp, Homo sapiens
  misc_feature 2, 3, 4, 12, 15, 453: n = A,T,C or G
gnnnacgccgcnaancactacttagggcgaattggagctccccgcggtggcggccgcccgggcaggtacacatatggcccgggagctacaacaatctatcctgctgctgggggctctgacgactgggcttatgaccaaggaatcagatattccttcacctttgaacttcgagatacaggcagatatggctttctccttccagaatcccagatccgggctacctgcgaggagaccttcctggcaatcaagtatgttgccagctacgtcctggaacacctgtacaagactcataagtcaaagagccaaactctaacccagaacactagttggcacttgagctctactttaaggcataagtaggatttttcgtcagagaacctgacctaggcagaaggagtggcttcagccattttagagacttcaaaacaatgaaagtgttttcagggaatgtanagc

SEQ ID NO: 5938 - DNA, 403 bp, Homo sapiens
  misc_feature 5, 403: n = A,T,C or G
gagcnccgcgtaataccgactcactatagggcgaattggagctccaccgcggtggcggccgcccgggcaggtacagcttaaatccttgaaaactccctcttaaacttggaaaatggagaagatgctggtgttcaattgtcagacttttccctcattatcattgatgaatgtcatcacaccaacaaagaagcagtgtataataacatcatgaggcattatttgatgcagaagttgaaaaacaatagactcaagaaagaaaacaaaccagtgattccccttcctcagatactgggactaacagcttcacctggtgttggaggggccacgaagcaagccaaagctgaagaacacattttaaaactatgtgccaatcttgatgcatttactattaaaactgttaaan

SEQ ID NO: 5939 - DNA, 456 bp, Homo sapiens
  misc_feature 2, 3, 9, 14, 15, 19, 26, 129, 134, 255, 322, 336, 412, 425: n = A,T,C or G
gnnagcccncccanncgantacttanggcgaattggagctccccgcggtggcggccgcccgggcaggtacgcgggtggattagaagaatgaaatcagatgacacctggctgcaaaaatgtttataagcnaatanccttcttacattttggtataaagctgtgaacttcgtaactttgtaaagcaagatataaagcaaatacaagaggaaaataaagtacctcggccgctctagaactagtggatcccccgggctncaggaattcgatatcaagcttatcgataccgtcgacctcgagggggggcccggtacccagcttttgntccctttaggtganggttaattgcgcgcttggcgtaatcatggtcatagctgtttcctgtgtgaaattgttatccgcttcacaatttccncacaaccataccnagccgggagcataaagtgtaaagcctggggt

SEQ ID NO: 5940 - DNA, 858 bp, Homo sapiens
  misc_feature 527, 531, 557, 563, 571, 581, 597, 654, 655, 656, 660, 665,679, 684, 687, 703, 708, 713, 715, 731, 737, 753, 778, 786,788, 794, 805, 808, 813, 818, 819, 820, 832, 841, 846, 848,855: n = A,T,C or G
atgccgcgtatacgactcctatagggcgaattggagctccccgcggtggcggcccgcccgggcaggtacaaacatggtgggcaaagttcaactcaggtaatagtgattaaaaacaaaacatgtagtgggtcacaaccagactggttttcactgtgcaactttcctcaggtaataatacccattccagaaagaaaggaatatgcatccaagcctttgttcataaagaaaatgcccttcaaacaagttcatcataaggctaaaaaaaaaaaaagaaagaaaaaaggatgaagcagtttggcccagagaaaagcttaaatataatgtgtatacatacttatagatatgttgccatttaaaccatggatatagacatttgacaattaaatgaattggctcagtaaaagtgaaaaagtgttttctataaatatgtagttattgctgatatgctacacattatgctttgacatggagattgtagtaactcagaatttaaagctgccatattgccagtgttagccctgcagtangccntcctgtggacaacatgccatccaatnctgaanaaaaagcnaaaccccccntcttaacaaaaaaaangcttatgccctgcccttacatttttggtttttttttttttaaaaaaccaaacaaacnnnattnaagtnccgttcacccccangttangcncacctggcgggcaagnttaancggcntnaagggggaaaaaccangggggnccctcggccgttttanaactaaagggattcccccggcttcnggaattcnantttaanctttttttatnccngtccnctttnnnggggggggcccngacccccanttttngntcctttnaag

SEQ ID NO: 5941 - DNA, 852 bp, Homo sapiens
  misc_feature 2, 17, 18, 20, 21, 38, 555, 566, 573, 645, 646, 648, 659,662, 675, 682, 697, 710, 712, 717, 725, 728, 732, 734, 747,750, 770, 772, 781, 784, 789, 790, 808, 811, 820, 823, 831,839, 846, 849, 852: n = A,T,C or G
angccgcgacgcgcgtnnannactactatagggagctncccgcggtggcggccgcccgggcaggtacgcggggagactaaagcacagctgaaccctcaagcaggaactgagagcaaattgtattgaaactgcttcagctgtcggagatcgtttatatgtcttccttttttctgcattggttgggaataaaattgaatctattccagtaaaaggaccagccctatcaagaaagaggaagaaggaagtggatgctacttcacctgcaccctccacaagcagcactgtcaaaactgaaggagcagaggcaactcctggagctcagaaaagaaaaaaatcaaccaaagaaaaggctggacccaaagggagtaaggtgtccgaggaacagactcagcctccctctcctgcaggagccggcatgtccacagccatgggcccgttccccatctcccaagacctcattgtcagctccacccacacttcttcaactgagaacccgaaaacagtgggccaaatgtcaggtaactcccagaagaaatgttcttcaaaaacccccantgatagtgaangtccctnggccgctctagaactagggggatcccccggctggagggaattcgatatcagcttatcgataccgtcgacctnnangggggggcccnggncccaacttttgtncctttantgaggggtaattgcncccctggcgaatnangggcnatagctgnttnctgngnggaaattggtatnccnttacaattccccccacaatncnaacccgggnccntaaanngttaaacctggggggccntangagggggcnacnccattaantggggtgngctcctnccnccn

SEQ ID NO: 5942 - DNA, 915 bp, Homo sapiens
  misc_feature 2, 501, 520, 529, 542, 564, 566, 578, 579, 586, 588, 596,598, 628, 637, 650, 651, 657, 668, 670, 671, 673, 675, 689,698, 705, 707, 710, 713, 714, 728, 740, 742, 743, 748, 753,759, 760, 767, 770, 772, 775, 777, 785, 799, 803, 832: n = A,T,C or G
  misc_feature 834, 839, 855, 856, 857, 862, 867, 871, 876, 879, 880, 883,890, 894, 897, 906, 907, 910, 914, 915: n = A,T,C or G
tncgacactactatagggcgaattggagctccaccgcggtggcggccgcccgggcaggtactctttttttttttttttttttttttggtagagacagggtctcactgttgcccaggctgtctccaactcctggcctcaagcgatcctcccacctcctgcagctcattcttaatctagccccaccaggcatgtaaggccatggaaattcaacagtagagccccagatttatttcagaacagatccagcatgggggcctttggaagggcagccagctccttaagggccttcattcaggttgtccaggctcaggtccagttcattgtctcctgcctgtcagaggctcccgcccttgctaacagcctttggtcatgatgacagggggctgagagggcttgggctccaaggttcccaaggcattgaggggagaggagctggaaatgcccttgtcagttctgtggatccccacccaaacccacaaactcctgcgcccttccaccgangccccaagcccttggtttncaactagtngcccgggacaacnaccccggaatcaaggatttttnantttttcaatccnncgccttngnaaacagantncccctgactgatgttaggtattcaaccccnggaccactnaaaaatcagggannaaaatnaagaaatgggngnntntnagtgaaaaaggggngggttttanacaaatntntanttnnggggaatttttatncaaagccccttnanngaaanttggncctttnntcaaaanggncncananattggggnatatacccaaaatntttnaaaaattttggggggcattgggaaacccngnttaanatccccattttattcnnnttaanccttngggnataanttnnaanctgaaanaaanttnttaaacttnnggncttnn

SEQ ID NO: 5943 - DNA, 872 bp, Homo sapiens
  misc_feature 610, 615, 632, 634, 654, 658, 661, 671, 674, 688, 712, 714,721, 731, 746, 751, 753, 771, 772, 781, 798, 807, 811, 812,817, 820, 829, 830, 831, 838, 839, 840, 845, 848, 849, 850,853, 856, 859, 865, 866, 867, 868, 872: n = A,T,C or G
acgccgcgtaatccgactcactatagggcgaattggagctccccgcggtggcggccgcccgggcaggtacatccagaagccgagtgagctggaaggaccccagtggggatgggctatggttggagaccctggtatgaaccccagtttagcttgacatagacacagatggttccatgcagaatatttatagacatgtatgtgcatggattagcattcacacacattcccttgctctgtcagctgagaataaaaatgaggatcattattactattacattctcatctaggcctttaaatagcagctccagttgtaaacctctctaaggggctctggattaactgcgtgagagtgatgaggggaaaaggtctttctcatctccatctgacctacccatctaccaaccaagctggacactgactgtccttccgtcctctccccagatgagtcattgcaaacagaagccccagaaagactccatgaagaatggtagtgagtttggtgtaaaggaaagatttagtgaaaatgacacttagttcattaactattcacggtggagcaacccatgtgcagaaaacaagcctcagccccagctggggctctccctggggnctacntcttccacttgaacctncncgcgtaccttcggcccgctntaanaantaagtgggantcncccggggctggcanggaaattcaatttaaagcttattngnaacccgncgacctcgangggggggccccggancccancnttttggtccctttaaagnngggtaaatngccccccttggcctaanaatgggcanagcnnatttnttntggaaatannnttccttnnnaaatnccnnnacnaantanccggannnnaaan

SEQ ID NO: 5944 - DNA, 874 bp, Homo sapiens
  misc_feature 2, 347, 514, 525, 528, 534, 540, 547, 565, 569, 585, 604,607, 610, 615, 621, 624, 636, 638, 645, 653, 654, 669, 680,683, 689, 695, 700, 701, 710, 711, 719, 721, 723, 730, 739,755, 763, 769, 775, 781, 797, 801, 804, 806, 807, 818: n = A,T,C or G
  misc_feature 825, 829, 830, 832, 839, 842, 843, 844, 848, 851, 853, 855,857, 859, 861, 866, 871, 874: n = A,T,C or G
angcgccgtaatacgactactatagggcgaattggagctcaccgcggtggcggccgggcccgtggaggcctaggctggccctaggaccttcttggtttgctccttggattccccttcccactccagcaccccagccagcctggtacctcggccgctctagaactagtggatcccccgggctgcaggaattcgatatcaagcttatcgataccgtcgacctcgagggggggcccggtacccagcttttgttccctttagtgagggttaattgcgcgcttggcgtaatcatggtcatagctgtttcctgtgtgaaattgttatccgctcacaattccacacaacatacnagccgggagcataaagtgtaaagcctggggtgcctaatgagtgagctaactcacattaattgcgttgcgctcactgcccgcttttcagtcgggaaacctgtcgtgccagcttgcatttaatgaatcggccaacgcgcggggagaggcggttttgcgtattgggccgnttttccgcttnctngctcantgactngctgcgntcggaccgttcagctgcnggcnaagcggtattacttantcaaaggcgggtaattacnggntantcaanagaaancanggggataacccnanggaaaanaacatgtnnagcaaaaaaggccancaaaaaggccnagnaacctnaaaaangcccnnttgcttggnntttttttnananggttcanccccctganaaggcttaaaaaattnacctttantaatanggtggnggaaanccgcgggactataaanaaanaananngttcccctagnaagaatnactnnangctcttnttnnnattnaancnancntntnaacanatacnttn

SEQ ID NO: 5945 - DNA, 851 bp, Homo sapiens
  misc_feature 425, 483, 495, 513, 544, 547, 565, 588, 623, 628, 635, 639,641, 643, 644, 649, 655, 661, 663, 678, 680, 684, 692, 693,696, 700, 709, 716, 720, 723, 736, 740, 743, 744, 747, 750,753, 754, 757, 761, 762, 766, 767, 768, 769, 770, 771: n = A,T,C or G
  misc_feature 772, 780, 782, 784, 785, 786, 787, 788, 790, 791, 793, 795,796, 802, 807, 808, 819, 823, 824, 825, 828, 829, 830, 832,833, 834, 835, 836, 839, 846: n = A,T,C or G
gcccgacgcgcgtaatacgactcactatagggcgaattggagctccccgcggtggcggcccgaggtaccctgagcatcagcagagatgctgagatgaaatcagggaactcctaggggatgggtcttctattacctgggaacacctgagccagatgccttacgccacaatgtgcatcaaggaatgcctccgcctctacgcaccggtagtaaacatatcccggttactcgacaaacccattacctttccagatggacgctccttacctgcaggtcttaaaacaacttttttttttaacaatgcagctatgtttggattgaaatgtcttaacacactcatgtctttaacagttatttatccttagactctgtggaacctagggccattcttatttcccagagagggagaaagaggagagagctctcangactatctaaacaggcacaggattatgcaggtgcaaaggtacctgcccgggcggccgntctagaactagnggatcccccgggctgcanggaattcgatatcaagcttatcgatccgtcnacnttgaagggggggcccggnacccagcttttggtcccttttantgaggggtaattgcgcccttgggcgtaatcatggncatanctggttnctgngngnnaatgntatcgntccaantncccacaaaaaacaancngggngcataaannggnaaancctgggggngcctaangagnggncctactcacattnattnggnntgnggntanntgncccnntttnnnnnnngggaaaantntnnnnncnncntnnttaatnaaatnnccaacccccgnggannnggnnntnnnnnatngggcgcncttcc

SEQ ID NO: 5946 - DNA, 855 bp, Homo sapiens
  misc_feature 2, 387, 401, 405, 407, 427, 428, 430, 434, 438, 440, 447,451, 452, 454, 457, 458, 459, 460, 463, 472, 473, 475, 480,484, 485, 486, 491, 492, 494, 496, 499, 500, 502, 504, 505,506, 507, 512, 513, 515, 521, 523, 530, 532, 533, 537: n = A,T,C or G
  misc_feature 538, 540, 543, 544, 548, 549, 552, 553, 554, 555, 556, 559,563, 567, 570, 571, 572, 575, 576, 581, 582, 583, 586, 587,588, 589, 591, 592, 594, 595, 596, 601, 602, 603, 604, 606,609, 610, 612, 613, 614, 615, 616, 621, 622, 623, 625: n = A,T,C or G
  misc_feature 626, 629, 632, 633, 635, 637, 638, 639, 641, 642, 645, 646,647, 648, 649, 650, 651, 653, 654, 656, 657, 658, 660, 662,663, 666, 667, 670, 671, 672, 673, 674, 675, 676, 679, 682,683, 684, 685, 686, 688, 689, 692, 696, 699, 701, 702: n = A,T,C or G
  misc_feature 704, 705, 709, 710, 711, 712, 714, 717, 718, 722, 723, 725,726, 728, 729, 730, 731, 732, 735, 736, 737, 743, 747, 751,752, 761, 762, 763, 764, 769, 772, 773, 774, 775, 776, 777,778, 783, 784, 785, 788, 789, 791, 792, 793, 794, 796: n = A,T,C or G
  misc_feature 797, 800, 801, 803, 804, 805, 806, 809, 811, 812, 817, 818,820, 823, 825, 826, 829, 830, 831, 834, 837, 843, 845, 846,853, 855: n = A,T,C or G
angccgcgacgcgcgtaatacgactactatagggcgaattggagctccaccgcggtggcggcccgaggtaccacaagctgtgtgtctttaagcaacagaaatttcttccctcacagttgcggaggtcagaggtcagaaaacaaggtgtctgcaggaccaacctctcccctggatgctctaggtgagaatcttttccatgcctttctcttagcttctgatgttgccgtcagaacttcagatggtgttccttggcttcattttcttgtagggggattcccctgggtctgtgccactcctgggtgaatggttgatctgtctcactcttctccgtgatccgaaggtcacactatgtcactgatgaatccttatgtgtccacctggatgttncggtgaagagctantgtntnaccactctttctgctatttnngnaganttgnanacactanctgnntntannnnaancttcttggnncnatctnactnnnctttnntnangtnnancnnnnaccannanaggatntnccttacnannatcnnantcnncaanntgnnnnngtntctnaaanggnnnggnncattnnntcnnnnanngnnntaccnnnnancannannnnnatttnnnannttnctnntnannncnnttnnnnnnntnntnnntncnnctnnttnnnnnnnatntcnnnnntnnganttgnatntnntnncttnnnntnggnntctnngnntnnnnnttnnntatttnaaantagnnttttgaatnnnnaatcntannnnnnnattcnnnatnntnnnnannaanntnnnnatntnnttttnnanttncnnttnnntanatntaatanannatatttncn

SEQ ID NO: 5947 - DNA, 872 bp, Homo sapiens
  misc_feature 1, 2, 4, 5, 6, 7, 568, 588, 621, 650, 653, 680, 696, 704,715, 717, 723, 728, 754, 764, 765, 769, 783, 791, 797, 799,800, 809, 816, 833, 835, 837, 840, 845, 849, 852, 853, 863,872: n = A,T,C or G
nngnnnnggacgcgcgtaatacgactactatagggcgaattggagctccaccgcggtggcggcccgcccgggcaggtacagctgttgtccatgtgtagagcttttaataaccagcgcagcaggccccttcacctgcttttatgcctggaccagatgactgaatgtagaactttaggcactttttttttttttgagacggagtctcggtttgttgcccaggctggagtgcagtggcgcaatctcggctcactgcaagctctgccccccgggttcacgccattctcttgcctcagcctcccaagtagctgggactacagactcccaccaccatgcccggctaatttttatattttttagtagagacagggtttcaccgtgttagccaggatggtctcaatctcctgacctggtgatccacctgccttggcctcccaaagtgctgggattacaggtgtgagccaccagatcggccctttaggcactttctacttctcaaggtcaagaaacatcctttaaaaaagttaattcccttttctggagcctaagccagaacttatctaggccttgngttgccatctggtaacatcnatttctggaatggagcaactttctcaaaagttnggtcttgctagtcatgaaggcaagtcagngtnttaaggtcaactggtggttaacctttnctttacccaagggagnatactggnataagggtttntngaacanccggntttcaattaattaattggtccttttnacttgcccannaaanggggggggaccctnaattgaanaacaantnnctttttaanaaaaacntggaaaggttttttttngnanttnggaangagnatnnctttgaaacntgttttccn

SEQ ID NO: 5948 - DNA, 888 bp, Homo sapiens
  misc_feature 507, 527, 536, 543, 563, 571, 574, 577, 583, 596, 607, 609,618, 623, 633, 636, 639, 647, 649, 651, 655, 659, 666, 673,675, 677, 680, 683, 693, 720, 726, 731, 739, 743, 744, 753,758, 759, 765, 766, 768, 769, 777, 783, 798, 803, 806: n = A,T,C or G
  misc_feature 808, 812, 817, 824, 842, 843, 848, 852, 853, 869, 871, 877,878, 879, 887: n = A,T,C or G
cgcgcgtatacgactactataggggcgaattgggagctccccgcgggtgggcggcccgcccgggcaggtacgcggggacacattaacgcacacatcagttccaggccccattccattctctgaacatcttctgacacactgacagtgctgagcagagcaaggttgggttcgctcctctggcagaacctcggctctcaggaggtccttgttccagggaacagctgcttctctggggctgggctctactccctgcagcccctcgcactacccagctggaaccagggacaacgcctgagtccaaccctcgtgtctattttccagaaaacgggcaatgctgtgagagccattggaagactgtcctctatggcaatgatctcagggctcaatggcaggaaatccttcaacagggtcaccaaccagcccgctcaatgcagaaaaactagaatctgaagaaagatgtgtcccaagctttccttgaggctgttgctgaggaaaaagcctcatgtnaaaaccctatttcttctaanacattcgcnaatttancaaagttgtggaagggaagngctgcctnganttnccttgnaaagattgaaggnatcccctaacncngggggtggntggtncaaagattancanttngaaaaagngntntccncccnttcctanaatgaantncnatnaangcccgggaantgggcttttattattattggggttttngggttnataanccaaagantttnnggctttgtnaaatnngggganncnnggggtttngttttncaaaggggggttttnggttnccnanaatnggggnggcccgnaaaaaattttttcaaagnncgggnaaanngccgccctaaaaaggncntgtttnnntttttttnt

SEQ ID NO: 5949 - DNA, 946 bp, Homo sapiens
  misc_feature 7, 366, 415, 418, 465, 476, 480, 519, 559, 598, 599, 620,622, 629, 632, 649, 653, 654, 666, 670, 681, 685, 686, 699,700, 703, 718, 721, 730, 739, 742, 744, 753, 757, 768, 771,774, 782, 783, 786, 792, 796, 807, 808, 813, 818, 819: n = A,T,C or G
  misc_feature 820, 821, 822, 827, 847, 848, 859, 861, 862, 863, 872, 874,878, 880, 884, 885, 900, 901, 910, 920, 921, 928, 933, 934,935, 936, 942, 944: n = A,T,C or G
cgtccanttacgactactatagggcgaattggagctccccgcggtggcggcccgcccgggcaggtaccaacagctagcggtagccctggactccagctatgtaacaaacaaacaactcaatatcacgatagagaaattgaaacaacagaaccaagaaattacggatcagttggaagaagaaaagaaagaatgccaccaaaagcagggagccctaagggagcagttacaggtccacattcagaccatagggatcctcgtatcagagaaagctgagttacagacagccctggctcacactcagcatgctgccaggcagaaagaaggagagtcttgaagatctggccagccgcctgcagtattcccggnggcgtgtgggagagttggagcgggctctctctgctggtcttccacgcancanaaagaagggcagacaagggttgacggagcctggacttccattttcanaaccaaacaanccantcaaccgtaaaaaaaaaaaaaaaaaaaaagttcctcggnccgcttttagaactagtggatcccccgggcttgaaggaanttcggataataaagcttaatcgatacccgtcaatccttnnaggggggggcccgggtacccnangtttttngtnccttttagggaggggtnaatnngcccctttggcnttantcaatggttcnttannttggttccctggnntgnaaatggtattccggntcnaaatttccnaaacaactnttncnaacccgggnagcntaaaaggggtnaanccngggggggnnctnaatgangggngcctaacttcnnttttntttgnnnnngggtnaacttggcccgtttttcaanntgggaaaactntnnntcctcgctngnttantnattnnccccccccccggggnngttttttgntttttgggcnnttttccnttttnnnntaatgnanct

SEQ ID NO: 5950 - DNA, 908 bp, Homo sapiens
  misc_feature 1, 319, 442, 502, 536, 614, 632, 641, 680, 681, 730, 737,759, 779, 810, 819, 820, 828, 842, 854, 856, 857, 858, 859,863, 865, 869, 908: n = A,T,C or G
ntcactactatagggcgaattgcagctccccgcggtggcggccgcccgggcaggtactggatccaaagctttgttgaaaatgctgtttgatgaattcactgaagaatatagaaaggtggtcaggtaaagtctacttttattttgtcaagcttaataatttgtgtcatactttaccccagtatatataggcaaaccaaaaccttatcaaatattaaattagttgtttaaactttgcttataaagtattggccatgtggtggctcatgccgctaatcccagcactttgggaggctgagacgggcagatcacttgaggtcangagcttgagaccagcctggccaacatgatgaaaccctgtctctactaaaaataccaaaaattagccaggtgtggtggtgggtacctcggcgctctagaactaagtggatcccccgggctgcanggaattcgatatcaagcttatcgataccgtcgacctcgagggggggggcccggtacccancttttgttccctttaggtgagggttaattgcgcncttggccgtaatcattggtcatagctggtttcctgtgtgaaattgttatccgcttcacaattcccaccacataccaanccggggaccataaaagtntaaagcctnggggtgcctaatggagtggagctaactcacattaattgnngttggcgctcactgcccgctttccaagtcgggaaaccctgtcgtgccancttgcantaatgaatcggccaaccccccnggggagaaggccggtttgcnttttgggggcctttttccgctttcctcgttnaataaatcnntgggcctngggcggtcggttgnggggaagcgggntnnnnttcntnaaanggggtttttcggtttttcccaaaattcgggggaaacccn

SEQ ID NO: 5951 - DNA, 995 bp, Homo sapiens
  misc_feature 52, 241, 242, 332, 345, 352, 372, 373, 381, 389, 395, 408,414, 422, 428, 440, 442, 459, 486, 492, 503, 508, 524, 527,552, 561, 565, 569, 574, 579, 588, 591, 592, 595, 596, 598,599, 600, 603, 614, 619, 620, 623, 624, 625, 631, 632: n = A,T,C or G
  misc_feature 635, 640, 643, 647, 655, 663, 666, 670, 677, 678, 681, 686,687, 688, 691, 693, 726, 728, 731, 734, 736, 737, 738, 747,748, 752, 753, 757, 759, 764, 765, 767, 768, 773, 775, 784,788, 790, 791, 792, 794, 797, 802, 807, 809, 811, 817: n = A,T,C or G
  misc_feature 820, 831, 839, 853, 856, 866, 868, 870, 872, 878, 885, 887,895, 897, 899, 901, 908, 911, 915, 919, 921, 933, 938, 939,946, 953, 956, 957, 960, 963, 966, 967, 969, 975, 978, 983,989: n = A,T,C or G
gtcgcgtatacgactactatagggcgaattggagctccccgcggtggcggcncgcccgggcaggtactgaaatcaggtcatcccgtggcaacactgtggaacctggaggacattatggtaaatgaaacacactaggcagggaaagacaaacctcgcatcacctcactcatgaggaatctaggaaactttatctcacacagacctacaaagcaccattgtgcttgccagggttgaaacaganngctgggcatgggtgggcataggaaacaggtacctcggccgctctagaactaatggatcccccgggctgcaggaaattccgatatcaagcntatcgatacccgncgacctngaggggggggccccggtacnnaacttttngatccttntagtgnagggttaattgcngcggcntggcgtanatcatnggtaatagctgntnctgtgtgaaaattggtntaatccgctcacaatttgcacacaatnatactntccgggaagcntaaangtgtaaaagcactggnggngcctaattgaggtgaatcttacttnacatttaantagnggtngcggntcacntgaccaggnttnnaanntnnnggnaaaccttgttngtggnnaannntggcanntantgaanatntgtncaaactcnacagtggnagnaggncttgttnngtnatttnnnggncngctttttttcgctttattttggtttaaattgancntanatntnnngtgggttcnntctnnggangntgganntnnttatncncggtctatncttncnnnanagnttagnggttntnantatttnacncaaattagggngaatttcngccgggataatatnttnagtcgttaangngntntgtgtntagagtntnttctcccntntnanggctcanttncggngtgnanattttgtaaaantttgnngcgaccnctttgtnggnntanttntanntntaatcntcntgganttaaantgggct

SEQ ID NO: 5952 - DNA, 334 bp, Homo sapiens
  misc_feature 5, 7, 9, 166, 214, 241, 242, 245, 246, 247, 248, 249, 250,251, 252, 253, 254, 255, 256, 257, 258, 259, 260, 261, 291,308, 317, 320, 322, 328, 329: n = A,T,C or G
gagcncncngtaatacgactcaactatagggcgaattggagctccaccgcggtggcggccgaggtacaagcagtaattgattcactggccttggactacttttggcaggtcagcttgtctcacataacaggttggtatattgtataactatcaccattaaattttnaattgcattttagtaaaataatggttaaaactggcttcgggcagttgngacctctaactggaatttcccttggcnnttnnnnnnnnnnnnnnnnnatgtttccccctttgggctggcccccaacnaaaaagggggcctttgnaaaaaattnttncnaaattnnggccc

SEQ ID NO: 5953 - DNA, 408 bp, Homo sapiens
  misc_feature 5: n = A,T,C or G
gagcnccgccgtaatacgactcactatagggcgaattggagctccaccgcggtggcggccgaggtacagatacagtttttaaacctaaagttactggtgaaacaagcttgctattactgagatgtataatgaatgtcttaaagctataaatccactcatcgttgtgtttaaggaggaactgaagcacaattgttaagaacaagtgaattaggtgaatatacattgacaaaaggttgataataaagttgtcagaatttcaaaaataatttagtgtgacttgaaatcttaaaatcatgttatattaaattaagtaacactttactgatttaatatttgagtcatttctaaggaaaatactgaaatatcaattgcttaacagaagtttaaaatatacgtaatttggcatct

SEQ ID NO: 5954 - DNA, 414 bp, Homo sapiens
  misc_feature 5, 17: n = A,T,C or G
gagcnccgcgtaatacngacctcactatagggcgaattggagctccaccgcggtggccggccgaggtacattttcccctgtataattgatacctcttctgtaggattatatttaaatccttgtagaagatcctattccacaatagcttttcatccaatagttttagcatctattgatgaacgttaccgtgaaaaatctatgaactgctctttatgaacactttttaaagcctttataaaactattttctcttactgtattttcactttttgcttaacctaaatttggccctttttaaaaatcctaaaatcatatgacagttttagaatggtagctggttgctgctagttttgcatgtttgtcccccaaaatctcatgttgaaatttgatcccagtgttggagggtggggcctga

SEQ ID NO: 5955 - DNA, 345 bp, Homo sapiens
  misc_feature 3, 5, 38, 40, 155, 175, 178, 182, 187, 190, 195, 230, 233,244, 247, 250, 257, 258, 259, 266, 267, 268, 269, 286, 296,297, 298, 299, 300, 301, 302, 303, 304, 305, 306, 312, 318,338, 339, 343: n = A,T,C or G
gcncnccgtaatacgactcactatagggcgaattgggnangctccaccgcggtggcggccgaggtaccttgatctcctgcgtggcctcgtcccccttgggttcttagttccaccgggcagcgggagtcaggaccgcctgtcctcagacccccttnccgcaaccgacttggtgggnccngggnccccngcntctanaactagtggatccccccgggcttgaaggaatttcnatnttaaagctttnttnganaacccgnnnaaacctnnnnaaagggggggggggggncccccccccnnnnnnnnnnncccaantttttntcccttttaaaaagaggggnnaaangc

SEQ ID NO: 5956 - DNA, 840 bp, Homo sapiens
  misc_feature 470, 569, 571, 640, 643, 678, 686, 705, 715, 717, 718, 725,727, 734, 749, 754, 758, 777, 780, 789, 795, 798, 801, 810,822, 824, 829, 840: n = A,T,C or G
gcgcgtaatcgactactatagggcgaattggagctccaccgcggtggcggcccgcccgggcaggtacttttttttttttttttttttttttggctggttttaagtttattttgatggaacttttgataagaaatctcagattagacttttaaaagcctttcaagggtcagaagtcaaaggagggcgaacatcagactttggctgcagtatctaaaaatctgcatgaatttctctcttcttgaggtctccaatatatctggaggttcctggccattttcttgtagggggattcccctgggtctgtgccactcctgggtgaatggctgatctgtctcactcttctccgtgatccgaaggtcacactatgtcactgatgaatccttatgtgtccacctggatgttccggttgaagagctagtgtctcaccactctttctgctatttgtgagagtggcacacactaactgcttntagtcaaccatcttggccccacctcacttcacttttctcaagtaatcaaagaccagaaaggatgtcctttacaagaagcagatcccccaaaaatgtaananttcactggaaaaggggggagctcaaacccaaggagaggacttatcttcgcagcataaagaacaaccttnganccttggccgctctaaaaactaagtggatccccccnggctgcanggaatttccaattttcaangctttatttnanncccgtcnanccttganggggggggccccggntaccnaaancttttgttcccctttaagnggnggggaaaantggcgnccnttnggcgaaaancatgggcaaaancngtttnccggggggaan

SEQ ID NO: 5957 - DNA, 826 bp, Homo sapiens
  misc_feature 1, 486, 579, 599, 619, 637, 641, 661, 671, 678, 679, 687,688, 733, 734, 749, 754, 764, 787, 792, 794, 802, 822, 823,824, 825: n = A,T,C or G
ngcgcgtatcgactcactatagggcgaattggagctccccgcggtggcggcccgcccgggcaggtacaatcgtgtgggagagccaagacctccacggccttgtgtcaagaaatctccacaaagtgacagtgaatgatggagggggagttctcagagtcattacagctggggagggtgcattgcctcatgaattcttggaaggtgtggaaggagttgcaggtggttttatatatactattcaggaaggtgatgctctcttacacaaccttcattctcgccctcaaagacttattgatcatataaggaatctccatgaggaagatgccttactgaaggaggaaagcagcatctatgatgatattgtttttgtggatgttgtcgacacttatcgtaatgttcctgcaaaattattgaacttctatagatggactgtggaaacaacgagcttcaatttgttgctgaagacagatgatgactgttacatanacctcgaaagctgtatttaataggattgtcccaaaagaatctggatgggccctaattttttggtgggggaaatttcagactgaattgggcaanttgaccgaacccggaaagtngccaggagttggagtcctcngcccgtctagaactagtngatnccccggcctgcaggaattcnatattcaaancttaatnnatcccgtnnaccctcgaggggggggccccggtacccaccttttgttcccttaanngaaggggttaaattnccccncttgggcgtnaatcatgggccatagcttgtttnccggngnggaaaatngtaatcccttccaaatttcnnnnt

SEQ ID NO: 5958 - DNA, 882 bp, Homo sapiens
  misc_feature 7, 97, 170, 176, 177, 189, 191, 192, 204, 211, 221, 226,229, 233, 234, 236, 242, 256, 258, 266, 270, 276, 277, 278,283, 286, 290, 291, 292, 293, 295, 298, 303, 304, 310, 311,314, 321, 322, 336, 340, 346, 347, 348, 350, 354, 355: n = A,T,C or G
  misc_feature 356, 362, 365, 369, 386, 388, 392, 393, 407, 409, 410, 411,421, 424, 431, 440, 442, 444, 453, 454, 476, 479, 480, 482,484, 486, 494, 498, 504, 507, 531, 537, 540, 544, 550, 559,564, 571, 575, 578, 581, 582, 589, 590, 591, 592, 597: n = A,T,C or G
  misc_feature 598, 602, 603, 605, 614, 618, 619, 623, 625, 630, 633, 635,644, 659, 662, 675, 680, 689, 692, 695, 696, 697, 698, 699,704, 709, 711, 712, 716, 720, 722, 729, 732, 736, 764, 769,773, 775, 777, 783, 788, 798, 805, 806, 810, 815, 826: n = A,T,C or G
  misc_feature 829, 834, 835, 836, 875, 878, 882: n = A,T,C or G
gcgcgtngacgcgcgtaatacgactcactataggggcgaattggagctccaccgcggtggcggcccgaggtactttttttttttttttttttttttngcttttttttttttttttttttttttttttttttttttttttttttttttttttttttttttttttttttttntttttnntttatttttaantnntttttttttttntttttanaaaaaaaaanggggnccntttnnanaaaaanggaaaaaaaaaagnanaaaaaaancccntttttnnnccccnccncccnnnngnaanccccnnttcccnnccnggggganngtaaaaaaaaaaanggancccccnnncngaannnaatttnttntacnatttatttaagcccccncncccnnggggggggcccccncnnnacaatttttnccntttgggnggggaaaanancnccccacatnnaaaaaaaaaaaaaaaaaactgnttnncntnanaaaaaaantatnattctnacnaaaaatttcaaaaaaaaaaaatanaccccnggngaanaaaaanaggaaaaangcggnggggggncccnaanatnnggaacannnncaccnnaatnntnttttttatngaanncccncnacccnatntntcaagaagnaaaaaatatgggttncancccattaataaanaaaanaaaacaccnccnccnnnnnataangggangnntttntatntntttggcnacnttantatttttttttataaaaaaaaaaaaaanaatgnccanananatatanggtangggggggggngggaatnncacnttaanaaaaagggggngcntaaannnttattaaaaaaaacaatagggggtaataagggataaaanatntttn

SEQ ID NO: 5959 - DNA, 868 bp, Homo sapiens
  misc_feature 1, 448, 615, 618, 629, 689, 694, 704, 718, 729, 733, 760,775, 779, 785, 789, 801, 807, 813, 819, 842: n = A,T,C or G
ngcccgtatcgactactatagggcgaattggagctccccgcggtggcggccgaggtacctgggattcagagtgacttgcctaagattacacagctagtttatggaaagaactgttactaaaagctttgtcttttgatttccacctaatggggagcttaaaaataatgtcctaccaggtatggtagctcatgtgggaggctgaggcaggagtattgtgaggccaggagttccagatcagcctgagcagcatagcaagatgctgtctgtacctgcccgggcggccgctctagaactagtggatcccccgggctgcaggaattcgatatcaagcttatcgataccgtcgacctcgagggggggcccggtcccagcttttgttccctttagtgaggggttaattgcgcgcttggcgtaatcatggtcatagctgtttcctgtgtgaaattgntatccgctcacaattccacacaacatacgagcccgggagcataaagtgtaaagcctggggtgcctaatgaagtgaactaactcacattaattgcgtttgcgctcactgcccgcttttccagtcgggaaacctgtcgtgccagctgcattaatgaatcgcccaacccnccngggaaaaggcngtttgcgtattggggccctctttcgctttctcgcttacttgattccttgcgcttcggtcngttcngcttgcggcnaaccggtattaacntcacttcaaanggcngtaataccggtatttcacaaaaatcanggggataccccaggnaaanaacatntganccaaaaggccancaaaanggcccngaaccntaaaaagggcccgttgcttgcgntttttcataagctcccccccctgaca

SEQ ID NO: 5960 - DNA, 887 bp, Homo sapiens
  misc_feature 19, 455, 514, 534, 563, 568, 577, 661, 709, 745, 749, 771,778, 782, 847, 851, 856, 859, 861, 868, 872, 879, 880, 883: n = A,T,C or G
atgcgccgtataccactcnttatcgactactatagggcgaattggagctcccccgcggtggcggcccgcccgggcaggtacctaactggaatgaggttactttttatggcttatcaaatgcttgtcctggcccgatgcggtggctcatgcctgtgatcccagcactttgagaggctgaggcagggcagattgcatgagcccaggagttcgggaccagcttgggcaacatggtgaaacactgtctctgcataagatacggagattagctgggcgtggtggcacgttcctgcggtcccagctactcataaggctgaggtgggaggatctattgagccctggaattcgaggatgcagttaattgtggttgtgtcacagttcactgcagcctgggtgacactccagcctgggtgacagaggagaccccgtcaaaagaaaaagtacctcggccgctctanaactaattggatcccccgggctgcaggaaattcgatatcaagccttattgataccgtcnaccctcgaggggggggcccngtacccaactttttgttccctttagtganggttnaattgcgcncttgggcgtaaatcatggtcattagcttggttccctgtgtgaaaatggttattccgctcacaatttccacacaacattaccaanccgggaaccataaaagtgttaaaacctggggtggcctaatgaagtgancctaactcacaattaattgcgtttgccctcacttgncccnttttcaagtcgggaaaaccttnttcgtgnccanttgattaaatgaaatcggccaaccccccggggaaaaggcggtttgcgttttgggggccttttccntttncttgnttnanttacttnttgnacttggnnttnggtt

SEQ ID NO: 5961 - DNA, 887 bp, Homo sapiens
  misc_feature 3, 38, 550, 560, 598, 620, 634, 638, 641, 646, 648, 675,691, 726, 743, 758, 790, 805, 806, 808, 810, 815, 825, 827,837, 860, 868, 870, 877, 884, 886, 887: n = A,T,C or G
tancctatcgactccttacgactactatagggcgaatnggagctccccgcggtggcggccgaggtactttttttttttttttttttttgagacagggtctcactttatcaccaggctggagtgcagtggcatgatctcagctcactgcagcttcgacttcctgagctcaagtgatgctcccacctcagcctcccgagtagctgggactgcaggtgcccgccaccacgcctggctaattttttgtatttttagtagagacgggatttcaccatgttgtccagcttgtctttaactcctgacctcatgatccgcccgcctcggcctcccaaagtgctaggattacaggtgtgagccaccgcgcccagctgagagctttttattagcgattggtgtgaaggatcaaagccctctcatgagtattgcaacatgaagatgttactgaaatgaacgtcctaggggctgcatttaggtacctgcccgggcggcccgctctagaactagtggatcccccgggctgcaggaattcgatatcaagcttatcgatacccgncgacctcganggggggcccggtacccaacttttggtccctttagtgangggtaaatgcgcgcttggcgtnaacaaggggcaaanctgnttnctggngngaaattggttattccgctcacaaattncacaacaaacataacnaacccgggagcataaaagtgtaaaagcccgggggngcctaaatgagtgagcntaacctccaattaantggcgttgggcttaactggccccttttccatnggggaaaacctgtcnngncnactgnattaatgaantnggccaacccnccggggaaaagggggttggggtntttgggcncntttcccnttcttgntnn

SEQ ID NO: 5962 - DNA, 874 bp, Homo sapiens
  misc_feature 5, 594, 659, 662, 671, 734, 743, 749, 750, 754, 763, 769,789, 798, 802, 814, 831, 835, 838, 848, 850, 854, 863: n = A,T,C or G
tggcngcgtatcgactactatagggcgaattggagctccccgcggtggcggccgcccgggcaggtactaccttttatttttttttttttttttagtagagatagggtttcaccatgttggccaggctactctcaaactcctgacctcaggcgatccgcccacctcagcttcccaaagtgattacagtcgtgagccaccacgcctggctgatgtgtcaagttttaaataagttcttaatatacaaagaattgaaataccaatatctacacttaaagccacaaaaagtcccataaacgagatgtgtttaatcgagtccccattaaatcagcttttgtcctcctactagctatacccttcactccccgcctcacactatacaaatacagacgacagcaatactgctagacaatggggctccaaccagagtttgtaggagagtgacaaatatgactgcctccatcaattgaaattacagtttacaaaattagggacacagggccctcatgcctgtaattgtttacaatccaaatagccagatgaatctttgtattataaaaaaatcaaaaagtaaggtaaatcaaacaccagacattnttcaaaaacaaaatttttagcaactgggtggtgataaaaaccaatttttagggaaagccggtttntangcaataagnggggataagacctttgggccaatataaaattttcaagttttggatgttcagttttagggggangggggttgntatttnnaaanacccgggtntaactngcctaacattttaaaagaanaatttgaangttncctttttaaagngagcatttttttttttntaanaancttttaaagngntaantttttgggnccatccaaaat

SEQ ID NO: 5963 - DNA, 870 bp, Homo sapiens
  misc_feature 26, 412, 496, 541, 543, 646, 649, 653, 711, 730, 742, 764,768, 779, 781, 785, 795, 800, 804, 809, 811, 821, 823, 829,830, 832, 839, 851, 853, 868, 870: n = A,T,C or G
ggctatcgactactatagggcgaatnggagctccccgcggtggcggccgaggtactgaactgcatgccattatgggatgtgaaaaacttgtcactaggatcatcgccaaaatcaaagccatcaaaggcatctccagcatccccaccagcgaagtaggcatatgttaggcggtacgagaggtcaacgtatccaaaacgtgaatgtcaaatcagcacaacaggaagcatcagcagatgttgctactcctaagatgccagggcagtcagtcaggaagaaaactaggaaggcaaaagaaatttctgaagcttctgaaaacatctattctgatgtcagaggactatctcagaaccagcaaatacctcaaaattctgttacgcctaggagaggaaggagaaagaaagaagttaatcangacatactagaaaacaccagttctgtggaacaagaattacagatcactacaggtagggaatcaaaaagattaaaatcatctcanctgttggaaccagcagtttgaagaaactctaaaaaagaagttaangnttcatctggttccaaaagggctcctagaagaattaaaagatctgtagaaaatcagggaaaagtggttgaaattatttaatggatctaaaaggttagtacctgnccnggcnggccggttttaaaactagtgggatccccggcttgcaggaatttcattttaagcttttngatcccgtccaaccttganggggggccccgnacccaacttttgttcccttttntgangggtaattgcncncctngcggaatcangggcntaantgttncngggggaaaangntttccnntnacaattncccacaacttcnancccggggccttaaangn

SEQ ID NO: 5964 - DNA, 423 bp, Homo sapiens
  misc_feature 1, 4, 6, 8, 10, 12, 17, 18, 19, 21, 22, 23, 24, 25, 28, 32,34, 37, 42, 60, 108, 381: n = A,T,C or G
nttnantntnangacgnnnannnnntanaggnanggngcgcncgtgatacgactcactanagggcgaattggagctccaccgcggtggcggccgcccgggcaggtacncggggcgtttggacctgtctgtgcgttctcctgcgtggcagtcctgatttccatgcttctggagaatccatttcgttaacactgaaagccagttctcttttcctggcagtttttttcattttatttttggcatttttttacaagataccgttcgggaaaggcttttgaaaggacggaagccgtattcacttgtgcgccagtacctcggccgctctagaactagtggatcccccgggctgcaggaattcgatatcaagcttatcaataccgtcnacctcgagggggggcccggtacccagcttttgttccctttag

SEQ ID NO: 5965 - DNA, 697 bp, Homo sapiens
  misc_feature 5, 38, 54, 171, 179, 184, 188, 198, 199, 201, 208, 211, 213,214, 219, 221, 225, 226, 228, 230, 236, 237, 238, 242, 248,252, 253, 254, 256, 257, 259, 265, 272, 286, 288, 298, 302,304, 306, 321, 322, 326, 328, 331, 332, 336, 337: n = A,T,C or G
  misc_feature 338, 345, 346, 348, 349, 358, 359, 360, 365, 366, 368, 369,376, 377, 379, 380, 382, 385, 390, 392, 394, 395, 396, 402,404, 420, 429, 436, 445, 446, 457, 458, 461, 464, 468, 469,470, 471, 474, 478, 487, 488, 498, 517, 522, 523, 524: n = A,T,C or G
  misc_feature 533, 534, 536, 537, 540, 542, 543, 564, 575, 576, 581, 584,585, 589, 590, 591, 597, 603, 604, 605, 618, 624, 629, 630,631, 645, 646, 650, 657, 660, 661, 669, 675, 676, 677, 678,679, 682, 690, 691, 692: n = A,T,C or G
gagcnccgccgtaataccgactcactatagggcgaatnggagctccaccgcggnggcggccgcccgggcaggtacttttttttttttttttttttttttttcctttttttttttttttttttttttttttttttttttttttttttttttttttttttttttttttttttnaaaaaaanaaccntttnaaattttaanncnaattttnaanannaaaancnaaannancnaatttnnnttgnaacccnaggnnnanntnaaaaancgttttnaaggggcccggggnanggggaacccnaccntngnaaaaaaaaaccgggnngggnanggnncccnnnaaaaaannannaaaaccccnnnaaaanngnnaaaaaannanncnccnttttngnannnaccccnanggttttaaaaaaaaanccccagggncccccanaaacggggnngaaaaaaaaannccnttntttnnnnacngggngggggggannccaaaaaaancaaaattttttttttaaanggggnnnaatgaaccnngnnccntnnaaaaaaaaggaacccccggcntgaaaaaattnnaaaanaannttannnaccccncaaccnnnggggggggcccgncccaanttttnnnccccttaaggaagnnaaangcccccnggnnaaaaaggnaaaaannnnnccnggaaaaannnacccc

SEQ ID NO: 5966 - DNA, 680 bp, Homo sapiens
  misc_feature 5, 483, 500, 507, 524, 558, 568, 577, 581, 583, 586, 593,595, 602, 605, 608, 611, 631, 632, 641, 644, 651, 652, 655,661, 668, 677, 679, 680: n = A,T,C or G
gagcnccgccgtaatacgacctcactatagggcagaattggagctccaccgcggtggcggccgaggtaccaacagcacagaggcagaaaacggcaacggcagcagcggaggagacaatggagaagaaggggaagaagaaagtgtcactggagccaatgcaaaaggcaccacagagaccggaaggcagggcaagggcacctcgaagacaacaacctctccaaatggtgggtttgaacctacaaccccaccacaagtctatagaaccacttccccaccttttgggaaaaccaccaccgttgaatacgagggggagtacctgctggagattttcagcaacaaatgtcctaacctctcccttccacttcctcaggcatgctggggcaaccggacattttctttattcccaaaggagaaaaagcaagaacgtggtggggaatcaccttccccagggctgctggtggtgtgggggaatcctaccttctncccaactccattacctnatagtangcaagggtccctgcctncttggtgaaccggcctggaattcccggtcctganattggggctncaacaccantctnanaanaagccanantgaactnctnccnaangtggggatgcccattaccannttctggcangancccccannctnaacatntacctgnccgggcggncnn

SEQ ID NO: 5967 - DNA, 716 bp, Homo sapiens
  misc_feature 5, 173, 179, 186, 187, 188, 204, 208, 213, 218, 220, 222,223, 228, 232, 238, 239, 240, 250, 253, 254, 255, 261, 262,265, 276, 286, 287, 292, 294, 296, 298, 304, 307, 308, 319,326, 334, 345, 349, 351, 354, 357, 359, 362, 366, 367: n = A,T,C or G
  misc_feature 368, 372, 373, 376, 378, 379, 383, 384, 386, 387, 389, 393,394, 401, 403, 405, 406, 408, 413, 415, 416, 419, 420, 421,425, 427, 429, 433, 439, 443, 444, 445, 450, 454, 466, 472,480, 488, 489, 491, 507, 510, 511, 518, 527, 532, 533: n = A,T,C or G
  misc_feature 556, 559, 562, 570, 571, 576, 581, 585, 601, 602, 603, 609,634, 636, 637, 638, 641, 643, 644, 654, 656, 657, 658, 669,685, 706: n = A,T,C or G
gagcnccgccgtaatacgactcactatagggcagaattggagctccaccgcggtggcggccgcccgggcaggtactttttttttttttttttttttttttccttttttttttttttttttttttttttttttttttttttttttttttttttttttttttttttttttttttnaaaggnaaaaaannnttttttaaaaaaaaancccnaaaanttttncntnnccctnaaanccaagnnnggttggggcnacnnnaaacgnnggnaattgggaaangggaaccccnnccacntncnanggaaanggnnaaaaaaaaagnccctttnaaaagggntttggaaaccngggnanccnaancnggnaaannnaaannccntnngggnngnngncccnncccaaangnanngnccccntnnaannnttangncnaccnccccangggnnntcccnaccnaaaataaagggnaaaatntttaaggnaaaaatcnncnggggccccaccttttnaannattttanaaacccccntttanncaaaggggaaaaaaaaaaacccnccnttncaattttnncccanttggnaaantaaaaaaaaaaaaaannncccttntgggggggaaaaaaaaaaaaattancnnnccntnnccccccgggnannncccgggggggnaaaaaaaaagggtttnggccccaaaaaaatttatttnaaaaaaaaaa

SEQ ID NO: 5968 - DNA, 414 bp, Homo sapiens
  misc_feature 5, 342, 382: n = A,T,C or G
gagcnccgcgtaatacgactcactatagggccgaattggagctccaccgcggtggcggccgaggtacaaaaatagctcaaacatcaggtgccagcagttcaggggagggatctgaaaaggcagcaaggcactaaatcagcaccccaacctggttttgtgtttgttttcttaaacctgccagcaccaactcttcatcaccttgtcaaattcaagaccatcttggagagacagttaggactgacttgcaatgtctttgtgattcttacccacccacatggctgtttttctaggcctcgggccggtgctcctttaaaaagtgatgcaagccctataagtgaccantgagagaagggactcctgggtggcttcatccacacaccgnttccaacagggccccagcgttcgccctctagg

SEQ ID NO: 5969 - DNA, 438 bp, Homo sapiens
  misc_feature 5: n = A,T,C or G
gagcnccgccgtaataccgacctcactatagggccgaattggagctccaccgcggtggcggccgaggtacaagacattttgcatggtattgtggatgttaaaattaagtttagcctaaagctaccttcttataaattctgcctaaagatttccctgttcatagtgaactggatgtgtaaacagactggaaactactcctctaccaatcgctgagttttggccaatcacaggaggccaactcttcaaatagaggaaaagccagctgtaaccaatccagctgtttctgtatgtcacttccattttctgcaggtcactttcctttttctgtttcctttttctgaccacacgccagcaccagagtctctctcaacccattatggtttggggggctgcctgattcgtaaattgttctttgctcgattaaactctaagaaatta

SEQ ID NO: 5970 - DNA, 439 bp, Homo sapiens
  misc_feature 5, 7: n = A,T,C or G
gagcncngcgtaatacgactcactatagggcgaattggagctccaccgcggtggcggccgcccgggcaggtacccttccgctccctgagcccaaagaggagaacccagccctctgcgtaggaagaacacatttcaaggcatttactgacaagtaggtatagttactgcatacacatgtggaggctgcattatatcaaaaccgtaaataaacatagactctgcacactccttcaggccccaccatgtatttatgaatgggattgcttcatcattttcttttaatgtcagtagcagggaagtcagaaagcattacctctaaaacggggacagaacattgcaaatacatacatttccaaccagctgtggcaataaccagcaaacaaaattacttcaccccgttgttatgggccccatgcctatgggatttttcctgagtttc

SEQ ID NO: 5971 - DNA, 421 bp, Homo sapiens
gcgcgcgtaataccgactcactatagggcgaattggagctccaccgcggtggcggccgaggtacttttttttttttttttttgagacggagtctcgctctgtcgcccaggctggagtgcagtggtgcaatcgcggctcactgcaagctccgcctcccgggttcacagccattctcctgcctcagcctcccgagtaggggggactacaggcgcccgccgccacgcctggctaatttttcttttttttgtattcttagtagagacggggtttcaccgccctgctgccttttaaagcaatttaatacatgagttaaatatcatattttaaaaatagattttattttttattataattttgatgaatgcatttttgtcaaagttgtcaaagtcaagaagtcattattgagaccctgagggtaagg

SEQ ID NO: 5972 - DNA, 432 bp, Homo sapiens
  misc_feature 5: n = A,T,C or G
gagcnccccgtaatacgactcactatagggcgaattggagctccaccgcggtggcggccgaggtacagacgggatttcactatgttggccaggctggtctcaaattcctgacctcgtgacccacgtgccttggcctgccaacatgctgggattgcaggtgtgagccaccgcgcccggccccaacttctcctaatgttgctattttgatcttattttttaaatcatgaatgttctcaatgacatctagaatggtgaatcctttccagtaggttttcaattattttgcccagatccatcaaaggaatcactttctagagaagttatagctttatgaaatatatttttaagtgataagacttgaaagttgcaattattctttgatccaagggcaccagaatgaatgttgggttagtaggcatgaaaacaatattc

SEQ ID NO: 5973 - DNA, 413 bp, Homo sapiens
  misc_feature 119, 122, 126, 137, 167, 176, 177, 194, 211, 216, 218, 221,224, 225, 231, 236, 239, 240, 241, 242, 247, 253, 254, 260,264, 268, 271, 274, 280, 282, 285, 289, 295, 300, 304, 314,316, 317, 324, 329, 335, 336, 347, 351, 352, 354, 355: n = A,T,C or G
  misc_feature 358, 359, 361, 372, 384, 385, 389, 398, 401, 405, 406, 407: n = A,T,C or G
gagccccgccgtaatacgactcactatagggccgaattggagctccaccgcggtggcggccgcccgggcaggtacttttttttttttttttttttttttcttttttttttttttttttnttntttnttttttttttnttattattttttttttttttttttttaaanaaaagggcnntttattggaaaaagggnaaaaaaaaaaaaaaatnaaaananaanccnntaaatnttaanaannnnaaaantttttnnaaaagnaaanccgnttnatnaaaaangnaanccgnaaaaantaagngggnaaagaaaaangnnaaaaaanttctnccgggnnaaaaaaaaatncttnncnnaannanaaaaaaaaaanttttatttttannaaangggaaaatntanactnnnaaaaaa

SEQ ID NO: 5974 - DNA, 406 bp, Homo sapiens
  misc_feature 5, 404: n = A,T,C or G
gagcnccgcgtaatacgactcactatagggcgaattggagctccaccgcggtggcggccgaggtactgcgaggtcaccttcatggattagcatcctgctgtgagctgaaagactgaacaagcagaagcataagccaaacccatccctccacgctccccactgtgcagatggacttactgaggctccagcatacactgcttgctcagcactttatctatttcagaccaaagtgtcagcagaactgatacccacggggcatccaagtccacatccagacccagttccctctgcggccctctcttaaaccgagccgctgactgctgatggtgagttcccaatcatgggctgcactgagggtgccagaggcctgggtgggcatgaagcctggtgggtatggagtgaangg

SEQ ID NO: 5975 - DNA, 404 bp, Homo sapiens
  misc_feature 4, 404: n = A,T,C or G
agcnccgcgtaatacgactcactatagggcgaattggagctccaccgcggtggcggccgcccgggcaggtacattgaagctctgccccatgtgatatgtctggagacaggacctttgggggtgattaggatttcaacgtaaggatttggggggacgcaaaccttcagcccacagcagtgcccttggtcctaccccttcctctcctagacttcctccataggagttcggcaggcactcctggtcttcctttatcttcttgcagaaagatggcccggcaggtccgtccaaacacaaagactggacgcagagacccggagaacagcaaaacggagattttcaatgacagtcttgcaagactgggtgtctggctggcatgcagccacccccgcgtacctcggccgctn

SEQ ID NO: 5976 - DNA, 369 bp, Homo sapiens
  misc_feature 5, 32, 198, 215, 248, 254, 262, 293, 294, 297, 307, 308,314, 315, 316, 319, 320, 340, 341, 343, 360, 364, 365, 366,367: n = A,T,C or G
gagcnccgcgtaatacgactcactatagggcngaaattggagctccaccgcggtggcggccgcccgggcaggtacggagtgttttaccttttgacttttttttcatgactacaaactgttggatattgaaaaccttgcattttaccttttgtgaattgccagtctgtgttttgcgtatggaggaaggaactgtggaangtgcatcagtggaaaanaaaaaatggggggaaccaatgtgtataaacaanggaatnttccttgnttaaccattaacaacaaatttttctttaaannatnaacaaaaaanngggggnnnccnngggggaaaaggaaaaaaggnnancttaaaacttaaacccnaaannnngc

SEQ ID NO: 5977 - DNA, 395 bp, Homo sapiens
tatacgactcactatagggcgaattggagctccccgcggtggcggccgcccgggcaggtaccagttaggatgctttggctgtaacaaaacctaactaagagtagcttaaattaaaccaagggtcagcaaacttttgtaaagggctagattaggggtatccaatcttctggcttccctgggccacactggaagaagaagaattgttttgggccacatatgaaatactctaacgatagctgatgagctaaaaaaaaatcacaaaaatctcataatgttttaagaaagtttacgaatttgtgttgggccacattcgaagctgtcctgggctgcatgtggcccacgggctgcaagttggagaagattgggctagatagtaaataatttaggctttctgg

SEQ ID NO: 5978 - DNA, 859 bp, Homo sapiens
  misc_feature 2, 3, 5, 561, 674, 684, 703, 721, 735, 758, 765, 784, 806,823, 831, 850, 858: n = A,T,C or G
tnnancgcgcgtatacgactcactatagggcgaattggagctccccgcggtggcggccgaggtacaagttgtctttatgctgcgagataagtcctctcttggtttaagctcccaccttttcagtgaactcttacattttgggggatctgctcttgtaaaggacatcctttctggtctttgattcttgagaaaagtgagtgaggtggggccaagatggttgactagaagcagctagtgtgtgccactctcacaaatagcagaaagagtggtgagacactagctcttcaaccggaacatccaagtggacacataaggattcatcagtgacatagtgtgaccttcggatcacggagaagagtgagacagatcaaccattcacccaggagtggcacagacccaggggaatccccctacaagaaaatggtgagtgagtgagagtcccgtgggatgcatatttctgccacgaacctttgaatccctgggctcaggagataccccagctggggtctccagaccaaaacagagagccatgtgggaagtctgggtagagctgcttcttangtaggtgtggagtcccagtacatttgttcccctgggtcctgccccgggcgggccgtctagaactaggtgggatcccccgggctgcaggaattcatatcaacttatcgatcccntcgacctcangggggggcccggtccccancttttgttcctttatganggttaaattgcccncttgcgtaatctggtcatactgntttctgntgggaaaatggttattccnttcacaattcccacaacatccnaaccggggagcataaantgtaaaancctggggtggcctaatgangggacctnt

SEQ ID NO: 5979 - DNA, 872 bp, Homo sapiens
  misc_feature 5, 525, 539, 607, 620, 632, 642, 663, 677, 698, 705, 721,741, 755, 763, 767, 775, 780, 795, 823, 826, 827, 828, 836,856, 863, 870: n = A,T,C or G
tagtngacgcgcgtatacgactactatagggcgaattggagctccccgcggtggcggccgcccgggcaggtacgagaagatcgccttccagtatggaataaccgacctgcgcggcatgctcaagcgactcaagcgcatgcgcagagaggagaagaagagcgcagcttttgcaaaaattcttgatcctgcatatcaggttgacaaaggaggcagagtgaggtttgttgtggagctggcagatccaaagttggaggtgaaatggtataaaaatggtcaagaaattcgacccagtacctcggccgcccgggcaggtacctgagctcccagtctagggattaccacaaggaagagtgacggatcatgagtggaagggagatgagttaatacaaatggaaaacaggtttcattgtaggaaaaaggaaagtgaattaatgctttcgaaagagacattaaagtagatttctgggcaatatgaaactgagagtcaatctcgtcagattctgaaggcatctgtagataagcttnccaatgaaaaacanggcagtgacaataggacaactagaaagtaaagctttaattatagcaaaagaaggcaaggagctagccntaaacttgcctantggcattgttgnaagtcattanaactacttcttttcaacttcnttttgtcatcagangcttccttgatgcgaaacatnttggggngagggatagctttttnaagccccttccactttccangggcctttaccctnggccgttnttanaacttatnggatnccccccggcttgaangaaattcgatatcaagcttaatcgattnccnnnaactttangggggggcccggtccccacntttgttncctttantg

SEQ ID NO: 5980 - DNA, 874 bp, Homo sapiens
  misc_feature 2, 3, 172, 188, 194, 197, 200, 201, 207, 208, 217, 218, 219,221, 224, 226, 228, 230, 231, 239, 241, 242, 243, 244, 247,248, 249, 258, 261, 270, 271, 272, 274, 275, 276, 280, 281,282, 283, 287, 288, 289, 291, 292, 294, 295, 296: n = A,T,C or G
  misc_feature 299, 300, 302, 311, 312, 314, 324, 327, 336, 337, 338, 349,354, 359, 363, 370, 371, 375, 376, 378, 382, 385, 388, 400,403, 404, 406, 412, 426, 434, 435, 436, 437, 448, 451, 455,456, 458, 459, 463, 472, 475, 482, 489, 490, 492, 496: n = A,T,C or G
  misc_feature 498, 508, 530, 532, 536, 541, 547, 552, 563, 576, 582, 585,594, 602, 605, 607, 622, 624, 625, 631, 636, 638, 644, 654,657, 661, 667, 681, 682, 684, 689, 704, 707, 724, 742, 744,751, 753, 758, 773, 774, 781, 782, 783, 784, 786, 798: n = A,T,C or G
  misc_feature 800, 810, 812, 813, 818, 819, 828, 829, 840, 842, 850, 861,869, 873, 874: n = A,T,C or G
tnnagagcccgtaatacgactactatagggcgaattggagctccccgcggtggcggccgaggtacttttttttttttttttttttttcctttctttttttttttttttttttttttttttttttttttttttttttttttttttttttttttttttttttttttaaaaaaantttttttttttaaaanaaaaanggnttnntttttnnaaaaaaaannngnccnantncnnaaaaaaantnnnnggnnnccccccccnttnccaaagggnnnannnaaannnngggnnngnngnnnggnntnttttttttnnanaaaaaaaatngcntccccccannnttttttttttnaaaanccccntttnaaaaaannaggnnangaanccnttntttcccccccancannanttaaanaatttttaaccccnttaaaaannnncccttttttanggngccnntnncccnaaacatttntanacatgtnttttttnnangggngngggatttttnaaaaaggaaaaacccccccccncncccnaaaanacaaantgggncccccttttcntgggaaacccccnttacanatnaataaaaanacagcgcnccncntttaatatgtttctncnnccccanaaatntntttttngctctgagancancaanaaaaanatttttgggggggnnanattantaaagggggggcccnaanaacaatgttttccccanaaaaaaaaaaaaaaaatntncccattncncaccnggggggggccttttnnaaaaaannnngnccccccggggcngnaagaaatttntnnaaaannttatatcannccccccccctngngggggggnccccaaccccncttttttntatnn

SEQ ID NO: 5981 - DNA, 448 bp, Homo sapiens
  misc_feature 5, 38, 47, 54, 71, 99, 143, 145, 148, 154, 157, 163, 164,165, 166, 188, 191, 195, 197, 199, 201, 204, 233, 236, 240,242, 243, 245, 249, 256, 260, 264, 269, 272, 273, 276, 288,291, 292, 293, 295, 298, 303, 307, 311, 328, 329, 333: n = A,T,C or G
  misc_feature 336, 338, 352, 354, 355, 360, 362, 365, 394, 396, 399, 400,403, 408, 410, 415, 431, 432, 433, 434, 441, 446: n = A,T,C or G
gagcnccgccgtaatacgactcactatagggcagaatnggagctccnccgcggnggcggccgcccgggcangtactttttttttttttttttttttttnattttttttttttttttttttttttttttttttttttttaaaantnatntttttnaanttttannnnaatttttaaaaaaaaaaaccanatnaaanantnangcnaatttagccaaaagaaaaattaaaaaaanaantttnanntngaanccaaaanaaanatcnaaaanctnntantaaagaccccgnggnnngnggnacccnaccntganaaaaaaaaaacccccgnnaaanggncnaaattaaaaatccncnnaaaancnganaaaaatggtaaaaaaaaaaaacccccttngnaannaancaaangngtttnaaaaaaaaaacccctnnnncccccanaaagngg

SEQ ID NO: 5982 - DNA, 443 bp, Homo sapiens
  misc_feature 3, 131, 184, 235: n = A,T,C or G
gcncgcgtaatacgactcactatagggcagaattggagctccaccgcggtggcggccgcccgggcaggtacgtttgctggaaggatggcatgtcagcataaatggccaacccccaatggaaatacaccgtnccagttttcaagaatcaacacatatgacaaggtagcttagctacacacatganaagcctgagaaagtggttgttttgaactagggtagtcacctgtacctcggncgctctagaactagtaggatcccccgggctgcaggaattcgatatcaagcttatcgataccgtcgacctcgagggggggcccggtacccagcttttgttccctttagtgagggttaattgcgcgcttggcgtaatcatggtcatagctgtttcctgtgtgaaattgttatccgctcacaattccacacaacatacgagccgggagcat

SEQ ID NO: 5983 - DNA, 392 bp, Homo sapiens
  misc_feature 5, 290, 305, 313, 317, 331, 339, 345, 357, 373, 380: n = A,T,C or G
gagcnccgcgtaatacgactcactatagggcgaattggagctccaccgcggtggcggccgcccgggcaggtactcacttcagcctggcaaaagagtaagaccctgtctcaaaaaaagaaaaaaaaattggtcatgtctcagaccaattaaatcacaatgttcaatggtgggatctagacatcagagtcttttttttaagctccccaggtgatgctgatgttcagcccagtttgagaagcactgatcagcactttccaaactttaatgtgcacacagatcacctggggatnttgttaacctggganatcctttncagnggatctggggaaangcctaaanggctgnattttttattancctttaaggcaatccnaaacctncttgggggtgga
